United States Patent Application Publication US 2014/0259212 A1 - sequence listing, part 34

SEQ ID NO: 118432 - protein, 245 aa, Agrobacterium tumefaciens str. C58
MLDLTGRKALVTGATGGIGEEIARLLHKQGATVGLHGTRVEKLEALAAELGDRVKIFPANLADRAEVKALGEKAEAELEGVDILVNNAGITKDGLFVRMSDEDWDNVIEVNLTAMFRLTRELTHPMMRRRFGRIINITSIVGVTGNPGQANYCASKAGMIGFSKSLAQEIATRNVTVNCVAPGFIESAMTGKLNDKQKDAIMGAIPMKRMGTGAEVASAVLYLASNEAAYMTGQTLHVNGGMAMI

SEQ ID NO: 118433 - DNA, 747 bp, Agrobacterium tumefaciens str. C58
  CDS (1)..(747): transl_table=11
gtggtgcaggaccacccgtcggactggatagggagaagagcgatgtcggcagaaaaagtggctattgtaacggcaggtggcagcggcatgggggcggccgtggcgaaacgcctggcggcggacggttacaggctcgcgatcctgtcctcctccggcaagggcgaggcgctggcgaaggaactgggcggtatcggtgtcaccggctccaaccagtccaatgacgacctccagcgactgacggatcagacgctcgagaaattcggtcgcatcgacgtgctggtcaatagcgccgggcatggcccacgtgcctccattctcgatattaccgacgagcaatggcacaccggtctcgatgtctacctgatgaacgtcatccgcccaacgcggatcgtcgcgcccatcatggtgaagcagaaggccggtgcgatcgtcaacatctcgacggcctgggctttcgaaccgagcagcatgttcccgacatcggcagtgttccgggccggccttgcctcctacagcaagattttcgccgatacctatgcggccgacaatgtgcgcatgaacaatgtcctgcccggctggatcgacagcctgccggctacggaagaacgccgcgacagcgtgccgatgcagcgctacggcaagagcgaggaaatcgctgccaccgtggcgtttctcgcgtccgaaggggcagggtatattaccgggcagaatatccgggttgatggtgggctgacgcggtctgtttga

SEQ ID NO: 118434 - protein, 248 aa, Agrobacterium tumefaciens str. C58
MVQDHPSDWIGRRAMSAEKVAIVTAGGSGMGAAVAKRLAADGYRLAILSSSGKGEALAKELGGIGVTGSNQSNDDLQRLTDQTLEKFGRIDVLVNSAGHGPRASILDITDEQWHTGLDVYLMNVIRPTRIVAPIMVKQKAGAIVNISTAWAFEPSSMFPTSAVFRAGLASYSKIFADTYAADNVRMNNVLPGWIDSLPATEERRDSVPMQRYGKSEEIAATVAFLASEGAGYITGQNIRVDGGLTRSV

SEQ ID NO: 118435 - DNA, 771 bp, Agrobacterium tumefaciens str. C58
  CDS (1)..(771): transl_table=11
atgagcaatcagatcatcttcgatctcggcgggcgcacggcgcttgttaccggttcttcacgcggcctcggccgcgcaatggcagaaggacttgccgtcgcgggggcacgcatcctcattaacggcaccgatccgtcgcgtgtcgcgcaaacggttcaggagtttcgcaatgtcggccatgacgccgaggcggtcgcctttgacgtcacctccgaaagcgaaatcattgaggctttcgccaggcttgatgagcaggggatagacgtcgacattctcgtcaacaatgccggcatccagttccgcaaaccgatgatcgagctggagacggccgactggcagcgggtaatcgacaccaacctcactagcgccttcatgattggccgtgaggcggcaaaacggatgatcccgcggggatatggcaagatcgtcaatatcggctcgctgaccagcgaactggcccgcgcgacggtggcgccctacaccgtggccaagggcggcatcaagatgctgacccgcgccatggcggcggaatgggcgcaatacggcattcaggcgaacgccatcggccccggctacatgctgaccgacatgaatcaggcattgatcgacaatccggaatttgacgcctgggtgaaggcgcgcacgcccgcgaaacgctggggcaagccgcaggaacttgtcggaaccgccgtgttcctgtctgcttcggcctccgactacgtcaatggccagataatctatgtcgatggtggaatgctgtcggttctctag

SEQ ID NO: 118436 - protein, 256 aa, Agrobacterium tumefaciens str. C58
MSNQIIFDLGGRTALVTGSSRGLGRAMAEGLAVAGARILINGTDPSRVAQTVQEFRNVGHDAEAVAFDVTSESEIIEAFARLDEQGIDVDILVNNAGIQFRKPMIELETADWQRVIDTNLTSAFMIGREAAKRMIPRGYGKIVNIGSLTSELARATVAPYTVAKGGIKMLTRAMAAEWAQYGIQANAIGPGYMLTDMNQALIDNPEFDAWVKARTPAKRWGKPQELVGTAVFLSASASDYVNGQIIYVDGGMLSVL

SEQ ID NO: 118437 - DNA, 774 bp, Agrobacterium tumefaciens str. C58
  CDS (1)..(774): transl_table=11
atgaatatcgaaggcgcaggcgcactcgtcacgggtgcggcatccggcctcggggcggccgtggcgcgaatgctcgcggctcgcggcgcggcggtcaccatttttgaccgtaacggcgaagccggcaaaaagctggcggcggagatcggcggtaaggccgttcaaggcgatgtgacaagcgacgccgatgcgcaggcggcaataaaggtagccgcttccgccaaaggcggccttcgtattctcgtcaattgcgcgggcatcggcaccgcgggtcgaattctcggtcgcgaagggccgcaaccgcttggcgatttcgaacaggtcatccgcgtcaacctgatcggcaccttcaacatgatgcggcttgcggccgctcacatggctgagagggaacaggatgaaggccaagacagtcgccaagacaatggtgtgatcgtcaacacggcgtcggttgccgctttcgagggccagatcgggcaagcggcctatgccgcgtcgaaaggcggcatcgtttcactcgccctgcccgcagcacgcgaacttgcccgcttccgcattcgggtgaacaccgtggcgcccggcattttcctgacccccctgcttcagggattgccgcaggaggttcaggagagccttgcgggccagataccccacccttcccggctcggcgatccagccgaattcgccgatacggtgcgctttctcatcgagaacgattacatgaacggtgaagtcatccggctggatggcgcgatccgcatgcagccgcggtga

SEQ ID NO: 118438 - protein, 257 aa, Agrobacterium tumefaciens str. C58
MNIEGAGALVTGAASGLGAAVARMLAARGAAVTIFDRNGEAGKKLAAEIGGKAVQGDVTSDADAQAAIKVAASAKGGLRILVNCAGIGTAGRILGREGPQPLGDFEQVIRVNLIGTFNMMRLAAAHMAEREQDEGQDSRQDNGVIVNTASVAAFEGQIGQAAYAASKGGIVSLALPAARELARFRIRVNTVAPGIFLTPLLQGLPQEVQESLAGQIPHPSRLGDPAEFADTVRFLIENDYMNGEVIRLDGAIRMQPR

SEQ ID NO: 118439 - DNA, 771 bp, Agrobacterium tumefaciens str. C58
  CDS (1)..(771): transl_table=11
atgggcattctccagaaattctctctcgaaaaccgcaccgccatcatcaccggcagcggtcgcggcctcggtttcgaaatcgccaaaggcttcgccgaggcgggcgcccatgtctggctgaccggccgtaacgccgagacgttgcaacaggcggtcgacacgctgcgcaaggcgggcggaaaggccgattatgcagccttcgatattgccgacacggctgcaggaagcgcgcttgtccgccgcatcatggatgaggccggccatctcgatatcctcgtcaacaatgtcggcgcgcgcgaccgccgcccgcttgccgaatttaccgacgacgacgtgctggagctcatccgcaccgacctcacctcctccatctcgctgtcgcgtgatgcggctgaagccatgaatgccaacggttacggccgcatcatcaccatcacctccattctcggccatatcgtccggccgggtgatgcgatctatcccgtcgccaaacaggggctgaccgggctgatgcgggcgattgcagtggaatatggcgcgcgcggcatcaccagcaacgccattgcccccggcatgttcgccaccgaaaccaatgccgcccttgccgaaaaccctgacatggtggcctttgccaagctgcgcgtaccgctggagcgctggggcagacccgatgaaatcgccggggctgccctgtttctcgccagcgacgcggcctccttcgtcaacggccacatattgacggtggacggcggcatgtcggtgcggctgtga

SEQ ID NO: 118440 - protein, 256 aa, Agrobacterium tumefaciens str. C58
MGILQKFSLENRTAIITGSGRGLGFEIAKGFAEAGAHVWLTGRNAETLQQAVDTLRKAGGKADYAAFDIADTAAGSALVRRIMDEAGHLDILVNNVGARDRRPLAEFTDDDVLELIRTDLTSSISLSRDAAEAMNANGYGRIITITSILGHIVRPGDAIYPVAKQGLTGLMRAIAVEYGARGITSNAIAPGMFATETNAALAENPDMVAFAKLRVPLERWGRPDEIAGAALFLASDAASFVNGHILTVDGGMSVRL

SEQ ID NO: 118441 - DNA, 786 bp, Agrobacterium tumefaciens str. C58
  CDS (1)..(786): transl_table=11
gtgatgaacgacaggaaagaccagctcgccatcgtaaccggtgcggcaggggatattggccgggcgattgctgcggcactttctgaaagccataaaaaggtggtgctggtcgatatcgatgccgacgccctgtccgatgcgctttacaagctttccggtccgggcttcgttgccaagacctgtgatgtcactgatccgcaggatcttgcgcggctggccgccgaggtcgcggagtttggcgaagtcgccaccctcgtcaataatgccggtgcggcacgggccgtcagcctgcacgacacaacggctgaaatctggcgcaaggacaatgcgctcaatctggaagcgccgtttctctgcttcagggctttcgaggaggcgttgaagcgcacccagggctctgtcatcaatatcacatccgtcaatggcatggctgtgttcggccatccggcctatagcgcggcaaaggccgggttgatccatctgaccaagctgatcgccgtcgaatacggcaaattcggcatccgcgctaacgcagtcgcgccgggcaccgtccgcacgcaggcatgggaggcgcgcgctgccaccaatccccaggtcttcgaggaagccaagcactggtatccgctgcagcggatcgtcagacccgaggatgtggccaatgcggttgcttttctcgctggcccgcaggctgccgccatcagcggcgtgtgcctgccggtcgattgtgggctgacggcaggccaagcgccactcgcccggacattttcgcaatccgaacactactga

SEQ ID NO: 118442 - protein, 261 aa, Agrobacterium tumefaciens str. C58
MMNDRKDQLAIVTGAAGDIGRAIAAALSESHKKVVLVDIDADALSDALYKLSGPGFVAKTCDVTDPQDLARLAAEVAEFGEVATLVNNAGAARAVSLHDTTAEIWRKDNALNLEAPFLCFRAFEEALKRTQGSVINITSVNGMAVFGHPAYSAAKAGLIHLTKLIAVEYGKFGIRANAVAPGTVRTQAWEARAATNPQVFEEAKHWYPLQRIVRPEDVANAVAFLAGPQAAAISGVCLPVDCGLTAGQAPLARTFSQSEHY

SEQ ID NO: 118443 - DNA, 738 bp, Agrobacterium tumefaciens str. C58; identical to SEQ ID NO: 59428
  CDS (1)..(738): transl_table=11

SEQ ID NO: 118444 - protein, 245 aa, Agrobacterium tumefaciens str. C58; identical to SEQ ID NO: 59429

SEQ ID NO: 118445 - DNA, 741 bp, Agrobacterium tumefaciens str. C58; identical to SEQ ID NO: 59432
  CDS (1)..(741): transl_table=11

SEQ ID NO: 118446 - protein, 246 aa, Agrobacterium tumefaciens str. C58; identical to SEQ ID NO: 59433

SEQ ID NO: 118447 - DNA, 786 bp, Agrobacterium tumefaciens str. C58
  CDS (1)..(786): transl_table=11
gtgacattggcttatcgcaaagttgctctcgtcaccggtgcaggttccggtatcggtcgcgccgccgccctccatctggccgcggcaggcttttcggttggcctgctcgggcgcaccgaatccgaattgcagaccgtggctgctgagatagaggccgcatccggctcttcgagacttcttctcgccgatgtctcggatgaggcggccatgcgtcatgcggtagcaacgcttgtggacgatttcggtcggctggatgtcgtggtggcgaatgccggggtgaacggagtctgggcgcccatcgatgagttgaagccttccgactgggacgacacgatccgcatcaacctgcgcggcacctatctcaccgtccacgccagcgtgccgcatctgaaagcggccggcggcgggtccatcgttatcgtgtcgtccatcaacggcacccgcacgtttacctcgcccggtgcgaccgcctattccgtgacaaaggcgggacagcttgccatggcccagcaactggcgctggagcttggccgccaccggatccgcgtcaatgcggtgtgcccgggcgagatcgaaacggcaatcaatgagaacaccgacatccgcgggagggaaaggaccgaagtgccggttcgttttccggcgggcgacattccggtgacgggcggtgtcgccgggacgagcgaggatgtcgccgaactcatcggttttctcgcctcggatgcatcgcgtcacattaccggcacaccggtatggatcgacggcggtcagggccttctccgataa

SEQ ID NO: 118448 - protein, 261 aa, Agrobacterium tumefaciens str. C58
MTLAYRKVALVTGAGSGIGRAAALHLAAAGFSVGLLGRTESELQTVAAEIEAASGSSRLLLADVSDEAAMRHAVATLVDDFGRLDVVVANAGVNGVWAPIDELKPSDWDDTIRINLRGTYLTVHASVPHLKAAGGGSIVIVSSINGTRTFTSPGATAYSVTKAGQLAMAQQLALELGRHRIRVNAVCPGEIETAINENTDIRGRERTEVPVRFPAGDIPVTGGVAGTSEDVAELIGFLASDASRHITGTPVWIDGGQGLLR

SEQ ID NO: 118449 - DNA, 735 bp, Agrobacterium tumefaciens str. C58; identical to SEQ ID NO: 59434
  CDS (1)..(735): transl_table=11

SEQ ID NO: 118450 - protein, 244 aa, Agrobacterium tumefaciens str. C58; identical to SEQ ID NO: 59435

SEQ ID NO: 118451 - DNA, 753 bp, Sulfolobus tokodaii str. 7
  CDS (1)..(753): transl_table=11
atgggcatagaattaaatggaaaaatagccatagttactggagcctctagcggaattggtagggctattgcatttaagttagctagcagaggtgcaaatctaattttaggagatgtaaaaattgatgaacttagaaaagtagctgaggaaatagcaaaagaaactaaagttaaagtaattcccctctacgttaacgtaggcgatttcaattcaacaaaagaattctataataaaggtatctcagagcttggagtagattatgtagacattttagtgaataatgcaggaataaatagagatgcactgttcgtcaaaatgacttatgaacaatgggatgaagtaattaaggtagatttatacagcatgtttaacatgactaaacaagttgttgatggtatggttaagaggaattacgggagaattataaatatatcatcattaagttggttaggaaatatagggcaagcaaactattcagcagctaaggctggagtgataggttttactaagacattagctagagaattaggtaaatataacataacagttaacgcgatttgtccagggtttattgatactccaatgactagggcagtaccagaaaaaataaggcaaagaattatagagagaattccaatgggtagaataggccaaccggaagatgttgcaaacttggttgcattcctcgcatcggatgaagcctcttatataactggagaagttataggtgttactggagggttagttctataa

SEQ ID NO: 118452 - protein, 250 aa, Sulfolobus tokodaii str. 7
MGIELNGKIAIVTGASSGIGRAIAFKLASRGANLILGDVKIDELRKVAEEIAKETKVKVIPLYVNVGDFNSTKEFYNKGISELGVDYVDILVNNAGINRDALFVKMTYEQWDEVIKVDLYSMFNMTKQVVDGMVKRNYGRIINISSLSWLGNIGQANYSAAKAGVIGFTKTLARELGKYNITVNAICPGFIDTPMTRAVPEKIRQRIIERIPMGRIGQPEDVANLVAFLASDEASYITGEVIGVTGGLVL

SEQ ID NO: 118453 - DNA, 738 bp, Sinorhizobium meliloti 1021
  CDS (1)..(738): transl_table=11
atgttcgatctttcaggccgcaaggctctcgttaccggcgcttccggtggtatcggcgaggaaatcgcccgcatgctgcatgcccagggcgccgtcgtcggactccatggtacccgcgtcgagaagctcgaaacgcttgccaacaccctcggcgagcgggttcagatattcccggcaaacctctccgatcgcgcggaagtcaaggcgctcggagagaaggcggaagccgatctcggcggcgtcgatatcctcgtcaacaacgccggcattaccaaggacgggctcttcgtccgcatgagcgacgaggactgggacaacgtcatcgaagtcaatctcacggccgtcttccggctgacgcgcgagctcacgcatccgatgatgcgccgtcgcttcggccgcatcgtcaacataacctcggtcgtcggtgtcaccggcaatccggggcaggcgaattactgcgcctcgaaggcgggcatgatcggcttctccaagtcgcttgcacaggaaatcgccacccgcaacgtcacggtcaactgcgtcgccccgggcttcatcgaaagcgcgatgacgggcaagctgaacgacaagcagaaggaagggatcatgtctgcgatcccgatgcggcggatgggaagcggagcggaagtcgcctccgccgtggcctatctcgcttctaacgaagcgggatatgtcaccggtcagacgatccacgtcaacggcggcatggcgatgatctga

SEQ ID NO: 118454 - protein, 245 aa, Sinorhizobium meliloti 1021
MFDLSGRKALVTGASGGIGEEIARMLHAQGAVVGLHGTRVEKLETLANTLGERVQIFPANLSDRAEVKALGEKAEADLGGVDILVNNAGITKDGLFVRMSDEDWDNVIEVNLTAVFRLTRELTHPMMRRRFGRIVNITSVVGVTGNPGQANYCASKAGMIGFSKSLAQEIATRNVTVNCVAPGFIESAMTGKLNDKQKEGIMSAIPMRRMGSGAEVASAVAYLASNEAGYVTGQTIHVNGGMAMI

SEQ ID NO: 118455 - DNA, 810 bp, Agrobacterium tumefaciens str. C58
  CDS (1)..(810): transl_table=11
atgggcaaatatatcactccacagacacgtaaaaggagtgaaaaaatgattgacttaacctcgtctcgatatcttccactgaacggaaagatcgcacttgtcacgggtggatcgcgatctattggcgcatcaattgcccagcgtctcgcagcggatggcgctcaggttgccttcacctatcgtggatcacctgcgaaggctgaggaagttgctgtcgccatagaaaaaacgggcgcgcgcgcgctggctattgccgcggatgccgctgatccggacgcgatacgcgctgccgttgccgcgacggtcgataagttcggcggcctcgacattttggtgaacaatgccggtattgcctttgccggtccgatcgacgaaatcgccttcgatgactatcaggcaatgctcgcaatcaacgtaaccggcgttttcgttgccacgcaggaggccgtacgccatatgaaggatggcggccggatcatacatattggcagttcgatcacgaaatatgccggggttcctgggctgtcagcatacggcctcaccaaaggggcagtcgccggtttcaaccgcagtttggctcatgacctcgggccacgcggcatcacagtcaacaccgtgcatccaggcccaaccgacactgatatgaaccctgttgatggtgagtttgccgctatgcagatctcgcgtatcgcggcgggccgctatggaaagccccgggaaattgcgaacgtggtggcattccttgcaagtccggaagcctcgtttgtaacaggtgccgacatccgggccgatggtggtttcacatcctga

SEQ ID NO: 118456 - protein, 269 aa, Agrobacterium tumefaciens str. C58
MGKYITPQTRKRSEKMIDLTSSRYLPLNGKIALVTGGSRSIGASIAQRLAADGAQVAFTYRGSPAKAEEVAVAIEKTGARALAIAADAADPDAIRAAVAATVDKFGGLDILVNNAGIAFAGPIDEIAFDDYQAMLAINVTGVFVATQEAVRHMKDGGRIIHIGSSITKYAGVPGLSAYGLTKGAVAGFNRSLAHDLGPRGITVNTVHPGPTDTDMNPVDGEFAAMQISRIAAGRYGKPREIANVVAFLASPEASFVTGADIRADGGFTS

SEQ ID NO: 118457 - DNA, 747 bp, Agrobacterium tumefaciens str. C58
  CDS (1)..(747): transl_table=11
ttgaaaggatttacgatggctcaaatgagtagcaaggttgccctggtcgtcgggggtgccaagggtatcggcttggcaattgcagagcggctttcagaggaaggggcgaaggtcttcatcaccagtcgtcgaagcgaagatgccgaaaaggcagcaacggctattggtcatggcgcgatcggtatcgccgccgatgccgcgatccccgaagatatggtggcgactgtcgaaaaagtgcgaaaggcacacggccgtatcgacgcgctcgtcttgaatgcgggtctttctgagcctgcgcagatcgccgagataactcctgaacatttcgaccgccacttcgacgtcaacgtccgcgggatggtcttcggcttccaggcggctctgcctgcaatgacggaaggcgggtcagtcgtccttgtcggatccattgctgatagtggcggctacgcttcctacggaacctacgctgctaccaaggcagccgtgcgttcctatgcccgaacctggacggcagagctcgcatccgtcggcatccgcgtcaacgtcgttgcacccggccctacagatacagaaatgatggctgcggttcagccagacatgcgcgcggccattgtcgctcctatcccgatggggcggatggcgcggccttccgaagtggctgcagccgccttgttcttattgagcgatgacgcgagttacatcgctggtgctgaattgtgcgtcgacggcggcttgcggcaggtctga

SEQ ID NO: 118458 - protein, 248 aa, Agrobacterium tumefaciens str. C58
MKGFTMAQMSSKVALVVGGAKGIGLAIAERLSEEGAKVFITSRRSEDAEKAATAIGHGAIGIAADAAIPEDMVATVEKVRKAHGRIDALVLNAGLSEPAQIAEITPEHFDRHFDVNVRGMVFGFQAALPAMTEGGSVVLVGSIADSGGYASYGTYAATKAAVRSYARTWTAELASVGIRVNVVAPGPTDTEMMAAVQPDMRAAIVAPIPMGRMARPSEVAAAALFLLSDDASYIAGAELCVDGGLRQV

SEQ ID NO: 118459 - DNA, 741 bp, Caulobacter crescentus CB15
  CDS (1)..(741): transl_table=11
atgtttgatctcaccggcaagaccgcgctcgtcaccggcgccacgggcggcatcggcggggctatcgcccgcgccctgcacgcccagggcgcgcatgtcgtgctctcgggcacgcgggaatcggccctggccgagctgaaggcggaactgggcgagcgcgcctcgaccgtcgtcgccaacctctccgacgccgaacaggtcgatggcctggtggccaaggccgaagaagccgccggcgcgccgctggatatcgtgatcgccaacgccggcgtcacccgcgacggcctgatcgtgcgtatgaaggacgaggactgggacaccgtcatcaaggtgaacctggaaggctatttccgcctgtcgcgcgctgcggccaagggcatgatgaagcgccgcgccggccggatcatcggcatcacctcgatcgtcggcgtcacgggcaatcccggccagaccaactacgccgcctccaaggccggcatgatcggcttctccaaggccctggcccaggaactggccagccggggcgtgaccgtcaactgtgtcgcccccggcttcatcgccagcccgatgactgacgccctgaacgagcaacagaaggccggtattctgtcgaccattcccgccggcaagctgggcgagggggcggatatcgccgccgcctgtgtctatctggccagcgaccaggccggttacgtcacgggtcagaccttgcacgtcaacggcggcatggcgatgatctaa

SEQ ID NO: 118460 - protein, 246 aa, Caulobacter crescentus CB15
MFDLTGKTALVTGATGGIGGAIARALHAQGAHVVLSGTRESALAELKAELGERASTVVANLSDAEQVDGLVAKAEEAAGAPLDIVIANAGVTRDGLIVRMKDEDWDTVIKVNLEGYFRLSRAAAKGMMKRRAGRIIGITSIVGVTGNPGQTNYAASKAGMIGFSKALAQELASRGVTVNCVAPGFIASPMTDALNEQQKAGILSTIPAGKLGEGADIAAACVYLASDQAGYVTGQTLHVNGGMAMI

SEQ ID NO: 118461 - DNA, 756 bp, Salmonella typhimurium LT2
  CDS (1)..(756): transl_table=11
atgaccggctttgatttttcagacaaaacggtatgggtgaccggggcggggaaagggatcggttacgcgacggcgctggcgtttgtcgacgccggggcgcgggtgatcggcttcgatcgcgaatttacgcaagagaattatccctttgctaccgaagtcatggatgtggcggatgccgcacaggttgcgcaggtgtgccagcgtgtgttgcaaaaaacgacgcggctggatgtgctggtcaacgccgccggtattttgcgtatgggagcgaccgatgcgcttagcgtcgacgactggcagcagacgtttgcggtcaatgtgggcggggcatttaacctgttttctcagacgatggcgcagtttcgccgtcagcagggaggggcgattgtcaccgtagcctcagatgcggcgcatacgccgcgcatcggtatgagcgcctacggcgcctctaaagcggcgctgaaaagcttggcgctaaccgtagggctggagctggcgggctgcggggtgcgctgtaatgtggtgtcgcctggttcgactgacaccgatatgcagcgcacgttatgggtgagtgaagatgccgaacagcagcgtattcgcggtttcggcgaacagtttaagctcggcataccgctcggtaaaatcgcccgtccgcaggagatagccaataccattttgtttcttgcctccgatctggccagccacattaccttgcaggatatcgtggtggacggcggttcaacattgggagcctga

SEQ ID NO: 118462 - protein, 251 aa, Salmonella typhimurium LT2
MTGFDFSDKTVWVTGAGKGIGYATALAFVDAGARVIGFDREFTQENYPFATEVMDVADAAQVAQVCQRVLQKTTRLDVLVNAAGILRMGATDALSVDDWQQTFAVNVGGAFNLFSQTMAQFRRQQGGAIVTVASDAAHTPRIGMSAYGASKAALKSLALTVGLELAGCGVRCNVVSPGSTDTDMQRTLWVSEDAEQQRIRGFGEQFKLGIPLGKIARPQEIANTILFLASDLASHITLQDIVVDGGSTLGA

SEQ ID NO: 118463 - DNA, 762 bp, Salmonella typhimurium LT2
  CDS (1)..(762): transl_table=11
atgattttgaatgcattttctcttgaaggtaaagtcgcggttgtgacggggtgcgataccggattggggcaggggatggcgttagggctggcggaagcgggctgtgacattgttggtattaacattgttgaaccgacggaaactattgcgcgcgtcaccgctctgggacgtcgttttttaagcctgacagccgatctgcgtcaaatcgatggcattccggcattactggaacgggcggtggcggaatacggtcatattgatattctggtgaataacgcgggtttgatccgtcgtgaagatgcgattgatttcacggaaaaagactgggatgacgttatgaacctgaacatcaagagcgtgttctttatgtctcaggcggcggcaaaacattttattgcccagggcaacggcggcaaaattattaatatcgcgtctatgctctccttccagggcggcattcgcgttccgtcttataccgcgtcgaaaagcggcgtaatgggaataacacgtctgatggcgaacgagtgggcgaaacacaatatcaatgtgaacgccatcgcaccgggctatatgtccacgaataatacccagcaattgcgcgctgatgcacaacgtagcgccgaaattctcgaccgtattccggctggacgttgggggctaccgggcgatttaatggggccggtagtcttcctggcatccagcgccgctgattatattaacggctataccatagcggtagatggcggttggctggcgcgttaa

SEQ ID NO: 118464 - protein, 253 aa, Salmonella typhimurium LT2
MILNAFSLEGKVAVVTGCDTGLGQGMALGLAEAGCDIVGINIVEPTETIARVTALGRRFLSLTADLRQIDGIPALLERAVAEYGHIDILVNNAGLIRREDAIDFTEKDWDDVMNLNIKSVFFMSQAAAKHFIAQGNGGKIINIASMLSFQGGIRVPSYTASKSGVMGITRLMANEWAKHNINVNAIAPGYMSTNNTQQLRADAQRSAEILDRIPAGRWGLPGDLMGPVVFLASSAADYINGYTIAVDGGWLAR

SEQ ID NO: 118465 - DNA, 744 bp, Listeria monocytogenes EGD-e
  CDS (1)..(744): transl_table=11
atgactttacaaggaaaagtagcagtagtaacaggtggatcacgcggaattggacgtgacattgccattaacttagccaaagaaggcgcgaatattttcttcaattacaatggtagcccagaagctgcggaagaaacagcaaaactcgttgctgaacatggtgttgaagtagaagcaatgaaagcaaacgtagccattgccgaagatgtagatgcctttttcaaacaagcaattgaacgctttggtcgtgtggatattctcgtgaataatgcgggaattacacgggataatttattaatgcgtatgaaagaagacgaatgggatgacgttattaacatcaacctaaaaggaactttcctttgtacaaaagcagtaagtcgtacaatgatgaaacaacgcgcaggtaaaattatcaacatggcatctgttgttggtttgattggtaatgcaggtcaagcaaattacgtagcaagtaaagcgggcgttatcggtttaacaaaaacaactgctcgagaacttgcgccccgtggtattaacgtaaatgctgttgctcctggtttcattacaacagatatgacagacaaattagacgaaaaaacaaaagaagcaatgttagcacaaattccgcttggtgcttacggaacaaccgaagatattgcgaatgcagttcttttcttagcaagtgatgcttcgaagtatattactggtcaaacactatccgttgatggcggaatggtgatgtaa

SEQ ID NO: 118466 - protein, 247 aa, Listeria monocytogenes EGD-e
MTLQGKVAVVTGGSRGIGRDIAINLAKEGANIFFNYNGSPEAAEETAKLVAEHGVEVEAMKANVAIAEDVDAFFKQAIERFGRVDILVNNAGITRDNLLMRMKEDEWDDVININLKGTFLCTKAVSRTMMKQRAGKIINMASVVGLIGNAGQANYVASKAGVIGLTKTTARELAPRGINVNAVAPGFITTDMTDKLDEKTKEAMLAQIPLGAYGTTEDIANAVLFLASDASKYITGQTLSVDGGMVM

SEQ ID NO: 118467 - DNA, 756 bp, Nostoc sp. PCC 7120
  CDS (1)..(756): transl_table=11
atggcaatcttaagtgaaaatttacgaggacaagttgccgttgttacaggcgcttcacgggggattggacgagcgatcgccttagaattagctaattatggtgctactgtagtggtcaattacgctagttctagcactgctgccgatgaggtagtagcagaaattacaggtgctggtggtgaagctgtagccttaaaagccgatgtttcacaagttgagcaagtagacaatctgatcaatggggcgatcgataagttcaaacgcatcgatattttggtaaataatgcaggtattacccgcgacacattgctattaagaatgaagccagaagactggcaagcagttattgaccttaacttaactggtgtatttttatgcactcgtgccgtcagtaaacttatgctcaagcaacgttctggcagaattatcaatattacctctgtagctggacaaatgggtaatcccggtcaggcgaattacagtgccgccaaagcaggtgtgattggctttacaaaaacagttgctaaagaattagcttctcgtggcattaccgttaacgccgtcgcccctggtttcatcgctacagacatgaccagcaacctcaaatctgagggtattttgcaatacatccctctaggtcgctatggtcaaccagaggaaattgccggtatggtacgtttcctagcagccgaccccgccgccgcctatattaccggacaagtatttaatgtcgatggcggtatggtgatggcttaa

SEQ ID NO: 118468 - protein, 251 aa, Nostoc sp. PCC 7120
MAILSENLRGQVAVVTGASRGIGRAIALELANYGATVVVNYASSSTAADEVVAEITGAGGEAVALKADVSQVEQVDNLINGAIDKFKRIDILVNNAGITRDTLLLRMKPEDWQAVIDLNLTGVFLCTRAVSKLMLKQRSGRIINITSVAGQMGNPGQANYSAAKAGVIGFTKTVAKELASRGITVNAVAPGFIATDMTSNLKSEGILQYIPLGRYGQPEEIAGMVRFLAADPAAAYITGQVFNVDGGMVMA

SEQ ID NO: 118469 - DNA, 750 bp, Ralstonia solanacearum GMI1000
  CDS (1)..(750): transl_table=11
atgacccaagcattgaacaaccaggtcgctctcgtcaccggcgcatcgcgcggcatcggccgggcgatcgccctggagctggcgcgccagggggccaccgtggtcggcacggccacctccgaggcaggcgcccaggcgatttccgcctactttgccgaagcgggtgtcaagggcgccggggtggtgctcaacgtcaacgatgcggcgcgctgcgaagccgtgatcgacgaagccatcaagacacacggcggcctgaatatcctcgtgaacaatgccggcatcacccaggacaacctggcgatgcgcatgaaggacgacgaatggatggccgtcatcgacaccaacctgagcgccgttttccgcttgtcccgcgccgtgctgcgtccgatgatgaaggcgcgtggcggtcgtatcatcaacatcacctcggtggtgggctcggccggcaacccgggccaggccaactatgcggccgccaaggcgggcgtggaaggcatggcacgggcgatggccaaggaaatcggcagccgtaacatcacggtcaacagcgttgcgcccggtttcatcgataccgacatgacgaaggtgctgtcggacgagcagcataccgcgctgaaggcgcagattccgctcggccgcctgggcatgccggaagacattgccaatgcggttgcttttctggcgtcaccggcggcgggctacatcacgggcgcgacgctgcacgtcaacggcggcatgtacatgggataa

SEQ ID NO: 118470 - protein, 249 aa, Ralstonia solanacearum GMI1000
MTQALNNQVALVTGASRGIGRAIALELARQGATVVGTATSEAGAQAISAYFAEAGVKGAGVVLNVNDAARCEAVIDEAIKTHGGLNILVNNAGITQDNLAMRMKDDEWMAVIDTNLSAVFRLSRAVLRPMMKARGGRIINITSVVGSAGNPGQANYAAAKAGVEGMARAMAKEIGSRNITVNSVAPGFIDTDMTKVLSDEQHTALKAQIPLGRLGMPEDIANAVAFLASPAAGYITGATLHVNGGMYMG

SEQ ID NO: 118471 - DNA, 777 bp, Agrobacterium tumefaciens str. C58
  CDS (1)..(777): transl_table=11
atgcatcggacagttatcgtgacaggctccacaagcggcatcggccttggcattgcgcaaagatttgcgcgggagggcgccaatatcgtgctgaacggttttggcgacgacgacgagatcgaaaaactgcgccttctgctggaagccgaaagcggcgggcgggtgctttaccatcccgccgatatgacgaaaccggacgagatcgccgatctcatccagtcctcacacgaaaaactcggctcggtggatgtgctcatcaacaatgccggtattcagcacatcgcgcccatcgaggagttcccgacggaaaaatgggactggatcatcgccatcaatctgaccagttcttttcacaccatgcgtgccgcgataccgctgatgaaaaaggcaggcaaaggccgcatcatcaacatttcctcagcccacggccttgtcgcctcgccgttcaaatcggcctatgtggcggccaaacacggcatcatgggcttgacgaaaacggcagcgctcgaacttgcgcaaacgggcgtcaccgtcaacgccatctgtcccggttacgtgctgacgccgctggtggaaaagcagataccggaaatggccaaggtgcgcggcatcagcgaagcggcggtgaagaacgacgtgatgctggaattgcaggcgaccaaacaattcgtcaccgtcgatgacgtcgccgccgctgcgatatttctggcaagcgacgccgcaagcaacatcaccggcacccatatttccgtagacggcggctggacggcacaataa

SEQ ID NO: 118472 - protein, 258 aa, Agrobacterium tumefaciens str. C58
MHRTVIVTGSTSGIGLGIAQRFAREGANIVLNGFGDDDEIEKLRLLLEAESGGRVLYHPADMTKPDEIADLIQSSHEKLGSVDVLINNAGIQHIAPIEEFPTEKWDWIIAINLTSSFHTMRAAIPLMKKAGKGRIINISSAHGLVASPFKSAYVAAKHGIMGLTKTAALELAQTGVTVNAICPGYVLTPLVEKQIPEMAKVRGISEAAVKNDVMLELQATKQFVTVDDVAAAAIFLASDAASNITGTHISVDGGWTAQ

SEQ ID NO: 118473 - DNA, 726 bp, Agrobacterium tumefaciens str. C58
  CDS (1)..(726): transl_table=11
atgcagttttccggaaaatccgtcatcatcaccggcgcgggcaaaggcatcggccgcgcctgcgcgcaactgatggccgcgcgcggtgcggaagtggtggcgatcagccgcacccagtccgatctcgacagcctgaaaagcgaaatcggtggacgttcgatccgtgtcgacctcgcagacatcgccgccacccgtgccgccatggcggaagctggcccgtgcgattttctcatcaacagcgccggcatcaacgtgctggaaagcgtgctagacatgagcgacgccggatatgaggcggtgctcggcatcaacctgcgtgctgcgctcgtcacctgccaggaatttgcccgcggccgcgtcgcaaatggcggcggcggtgccatcgtcaacatcacctcgattgccggccatcgcggttttcaggatcatttgtgctatgcggcatcgaaggccgggctcgaaggtgcaacccgcgttcttgccaaggagcttgggccccatggtatccgcgtcaacgccgtcgcgcccaccatcacgctgacggaactcgccgccgaagcctggaacgatcccgaaaagagccagccgatgatggttcgccatccgctcaaccgctttgcggaagcggaagaggtggcgcagagcatcgcgctgctgctatctgacgacagcaagatgatttccggcgccgtattgcctgttgatggcggtttcctcgccgtttga

SEQ ID NO: 118474 - protein, 241 aa, Agrobacterium tumefaciens str. C58
MQFSGKSVIITGAGKGIGRACAQLMAARGAEVVAISRTQSDLDSLKSEIGGRSIRVDLADIAATRAAMAEAGPCDFLINSAGINVLESVLDMSDAGYEAVLGINLRAALVTCQEFARGRVANGGGGAIVNITSIAGHRGFQDHLCYAASKAGLEGATRVLAKELGPHGIRVNAVAPTITLTELAAEAWNDPEKSQPMMVRHPLNRFAEAEEVAQSIALLLSDDSKMISGAVLPVDGGFLAV

SEQ ID NO: 118475 - DNA, 732 bp, Agrobacterium tumefaciens str. C58; identical to SEQ ID NO: 59446
  CDS (1)..(732): transl_table=11

SEQ ID NO: 118476 - protein, 243 aa, Agrobacterium tumefaciens str. C58; identical to SEQ ID NO: 59447

SEQ ID NO: 118477 - DNA, 765 bp, Agrobacterium tumefaciens str. C58
  CDS (1)..(765): transl_table=11
atgattgacttaacctcgtctcgatatcttccactgaacggaaagatcgcacttgtcacgggtggatcgcgatctattggcgcatcaattgcccagcgtctcgcagcggatggcgctcaggttgccttcacctatcgtggatcacctgcgaaggctgaggaagttgctgtcgccatagaaaaaacgggcgcgcgcgcgctggctattgccgcggatgccgctgatccggacgcgatacgcgctgccgttgccgcgacggtcgataagttcggcggcctcgacattttggtgaacaatgccggtattgcctttgccggtccgatcgacgaaatcgccttcgatgactatcaggcaatgctcgcaatcaacgtaaccggcgttttcgttgccacgcaggaggccgtacgccatatgaaggatggcggccggatcatacatattggcagttcgatcacgaaatatgccggggttcctgggctgtcagcatacggcctcaccaaaggggcagtcgccggtttcaaccgcagtttggctcatgacctcgggccacgcggcatcacagtcaacaccgtgcatccaggcccaaccgacactgatatgaaccctgttgatggtgagtttgccgctatgcagatctcgcgtatcgcggcgggccgctatggaaagccccgggaaattgcgaacgtggtggcattccttgcaagtccggaagcctcgtttgtaacaggtgccgacatccgggccgatggtggtttcacatcctga

SEQ ID NO: 118478 - protein, 254 aa, Agrobacterium tumefaciens str. C58
MIDLTSSRYLPLNGKIALVTGGSRSIGASIAQRLAADGAQVAFTYRGSPAKAEEVAVAIEKTGARALAIAADAADPDAIRAAVAATVDKFGGLDILVNNAGIAFAGPIDEIAFDDYQAMLAINVTGVFVATQEAVRHMKDGGRIIHIGSSITKYAGVPGLSAYGLTKGAVAGFNRSLAHDLGPRGITVNTVHPGPTDTDMNPVDGEFAAMQISRIAAGRYGKPREIANVVAFLASPEASFVTGADIRADGGFTS

SEQ ID NO: 118479 - DNA, 777 bp, Pseudomonas putida
  CDS (1)..(777): transl_table=11
atgagtactgaatttaatggcaagaagttgttggtcatcggcggcactagcgggatgggactgcaaactgcccgcatggttcttgagcaaggcggaagcgtcgtcatcgtcggtcaccgtgaagacaaggccgaagaggcccgcaaggcgctgtcgtcgttgggcaccgtgaccgccctgactgccgatctctcgcgagccgaagatgtgaagcgactcctgcataccatcgatgaacaccacaaggacatcaatcttctggtcaacgcggctggggtgttcttcccgaaggcgtttcttgagcacacggaaagtgattacgaacaatatttgacgttgaataaagcgttcttcttcatcacacaaaaagtcgtggccaatctcgtggccagcgagcgtcccggcgccattgtgaacatcggctcgatgtggggcaagcaggcgattgcggctacgccgtcgtccgcgtattcgatggcaaaagcaggtttgcattcgctgacccagcaccttgcgatggagctggcatccaaacaaatcagggtcaatgccgtttctccggcggttgtcgaaacgccgatttacgagggattcatacccaaggccgaggttcatggcgccttacagggattcaacagcttccacccaatcggcagggttgggacgccacaagacgtcgccgaggtcatcctcttcctgttgtcggacaaggcagcatgggtgacgggcgcaatctgggacgttgacggcggcgtgatggccgggcgtaacacataa

SEQ ID NO: 118480 - protein, 258 aa, Pseudomonas putida
MSTEFNGKKLLVIGGTSGMGLQTARMVLEQGGSVVIVGHREDKAEEARKALSSLGTVTALTADLSRAEDVKRLLHTIDEHHKDINLLVNAAGVFFPKAFLEHTESDYEQYLTLNKAFFFITQKVVANLVASERPGAIVNIGSMWGKQAIAATPSSAYSMAKAGLHSLTQHLAMELASKQIRVNAVSPAVVETPIYEGFIPKAEVHGALQGFNSFHPIGRVGTPQDVAEVILFLLSDKAAWVTGAIWDVDGGVMAGRNT

SEQ ID NO: 118481 - DNA, 756 bp, Drosophila melanogaster; identical to SEQ ID NO: 59450
  CDS (1)..(756)

SEQ ID NO: 118482 - protein, 251 aa, Drosophila melanogaster; identical to SEQ ID NO: 59451

SEQ ID NO: 118483 - DNA, 750 bp, Drosophila melanogaster; identical to SEQ ID NO: 59452
  CDS (1)..(750)

SEQ ID NO: 118484 - protein, 249 aa, Drosophila melanogaster; identical to SEQ ID NO: 59453

SEQ ID NO: 118485 - DNA, 747 bp, Corynebacterium glutamicum ATCC 13032; identical to SEQ ID NO: 59456
  CDS (1)..(747): transl_table=11

SEQ ID NO: 118486 - protein, 248 aa, Corynebacterium glutamicum ATCC 13032; identical to SEQ ID NO: 59457

SEQ ID NO: 118487 - DNA, 777 bp, Corynebacterium glutamicum ATCC 13032
  CDS (1)..(777): transl_table=11
atgagcaaagttgcaatggttaccggtggtgcacaaggcatcggtcgtggaatttcagagaagctggcagcagatggtttcgatattgccgtagccgacctgccacaacaggaagaacaagctgcagagaccatcaagttgattgaagctgcaggtcaaaaggctgtattcgttggattagatgtcaccgataaggctaatttcgacagtgcaattgatgaggcagcagagaaacttggcggcttcgatgtgctagtaaacaacgccggcatcgcacaaattaagccacttctggaagtcaccgaagaagacctaaagcagatctactccgtgaacgtttttagcgtattttttggtattcaagcagcatcccgaaagttcgatgagcttggcgtaaaaggcaagatcatcaacgctgcatcaatcgctgctatccaaggtttcccaatcttgagcgcctactccaccaccaaattcgcggttcgtggcctcacccaggctgctgcgcaagaactcgcacccaagggtcacaccgtgaatgcctacgcacctggcatcgtgggcaccggaatgtgggagcaaatcgatgccgagctttccaagatcaacggcaagccaatcggtgagaacttcaaggagtactcctcctcaatcgcattgggccgaccatcagtacctgaggatgtagccggtctggtttcgttcctggcttctgaaaactccaactacatcaccggacaggtcatgcttgtcgacggcggcatgctctacaactag

SEQ ID NO: 118488 - protein, 258 aa, Corynebacterium glutamicum ATCC 13032
MSKVAMVTGGAQGIGRGISEKLAADGFDIAVADLPQQEEQAAETIKLIEAAGQKAVFVGLDVTDKANFDSAIDEAAEKLGGFDVLVNNAGIAQIKPLLEVTEEDLKQIYSVNVFSVFFGIQAASRKFDELGVKGKIINAASIAAIQGFPILSAYSTTKFAVRGLTQAAAQELAPKGHTVNAYAPGIVGTGMWEQIDAELSKINGKPIGENFKEYSSSIALGRPSVPEDVAGLVSFLASENSNYITGQVMLVDGGMLYN

SEQ ID NO: 118489 - DNA, 732 bp, Fusobacterium nucleatum subsp. nucleatum ATCC 25586
  CDS (1)..(732): transl_table=11
atggaggacttaatgaatagactagaaggaaaagttgcagttgttactggaagtgcaagagggataggaagagctattgtcgaaaaacttgcagcacacggagcaaaaatggttatctcttgtgatatgggggaaacatcttatgaacaaggaaatgtagttcataaaattttaaatgttacagacagagaagctataaaagcatttgtagatgaagtcgaaaaggaatatggaaaaatagatattcttgtaaataatgcaggaattacaaaagatggattattaatgagaatgacagaagatcaatgggatgcagttataaatgtaaacttaaaaggagttttcaatatgacacaagctgtatcaagatcaatgttaaaagctagaaaaggttctattattactctatcatcagttgttggattacatggaaatgcaggacaaacaaactatgcagcaacaaaaggtggagtagtagcaatgtctaaaacttgggcaaaagaatttggtggaaggaatgtaagagctaactgtgttgctcctggttttattcaaacacctatgactgatgtattgtcagaagatacaataaaaggaatgttagatgctactcctcttggaagacttggacaagttgaagatatagcaaatactgtattatttttagcaagtgatgaatcttcatttataactggagaagtaatttctgtatctggtggtttgatgctttaa

SEQ ID NO: 118490 - protein, 243 aa, Fusobacterium nucleatum subsp. nucleatum ATCC 25586
MEDLMNRLEGKVAVVTGSARGIGRAIVEKLAAHGAKMVISCDMGETSYEQGNVVHKILNVTDREAIKAFVDEVEKEYGKIDILVNNAGITKDGLLMRMTEDQWDAVINVNLKGVFNMTQAVSRSMLKARKGSIITLSSVVGLHGNAGQTNYAATKGGVVAMSKTWAKEFGGRNVRANCVAPGFIQTPMTDVLSEDTIKGMLDATPLGRLGQVEDIANTVLFLASDESSFITGEVISVSGGLML

SEQ ID NO: 118491 - DNA, 744 bp, Thermoanaerobacter tengcongensis MB4
  CDS (1)..(744): transl_table=11
atggtagatgaaaagagggtggcatttgtcacaggaggttctagaggtataggcagagctattgctgtaagacttgctaaagatggctttaatattgctataacttatgtaaaggacgataagagtgcagaagaagttgttgaagaggtaaaaaaacacggagttgatgctctagcaataaaatgcgatgtttccaaataccatgaggttgaaaaagctgtagaaaaggttatagaggagtttggaagcatagatgtggtagttaacaatgcaggaattacaaaggacaatttgattttaaaaatggaagaagaagagtgggaccaagtaatagatgtaaatctcaaaggagcctttaatgtaataaaatttgcttcaaagtatatgataaaaaagagaaaggggaaaataataaacataagttctgtggtggggcttatgggaaatgtaggacaggctaattatgctgcttctaaagcaggaatcataggacttacaaagtcagtagctaaagagcttgctagcagaggaataactgtaaatgctgtagctcctggttttattgaaactgacatgaccaacgtattgaaagaagacataaaagaagcaatgctaaaaagcattcccttaaaaagggcaggaaaacctgaagaagttgcagaagttgtggcttttttggcaagctcagcctcagattacattactgggcaagtaataaatgttgacggaggaatggttatgtaa

SEQ ID NO: 118492 - protein, 247 aa, Thermoanaerobacter tengcongensis MB4
MVDEKRVAFVTGGSRGIGRAIAVRLAKDGFNIAITYVKDDKSAEEVVEEVKKHGVDALAIKCDVSKYHEVEKAVEKVIEEFGSIDVVVNNAGITKDNLILKMEEEEWDQVIDVNLKGAFNVIKFASKYMIKKRKGKIINISSVVGLMGNVGQANYAASKAGIIGLTKSVAKELASRGITVNAVAPGFIETDMTNVLKEDIKEAMLKSIPLKRAGKPEEVAEVVAFLASSASDYITGQVINVDGGMVM

SEQ ID NO: 118493 - DNA, 753 bp, Streptomyces coelicolor A3(2)
  CDS (1)..(753): transl_table=11
atgagcaacgcatttcacaacaaggtcgcggtcgtgacgggtggaagtgccggcatcgggcatgccaccgcgcggaagatcgccgaagggggcggcaccgtctacatcacgggacgggaccaggacgccgcgacggcggcggccgcggacataccgggtgatgtcatcggggtgcgggccgactcgcgctcgaccgacgacctcggccgactcttcgcgcaggtgaagcggcgcagcggccgtctggacgtgctggtcgtcaacgcggcggccatcgcgaccgcaccgctgggaaccatcaccgaggacgtcatcaggacggtcttcgacgtcaacatcaccggcacgatcatggccgtccagaaggcgttgccgctactggcggacggtggtgtcatcgtcctcaccggctcgatggccgctcacaaggcgtcgcgcgggcggagtctctacgcggcttccaaggccggggtccgcgctctcgcccgtacctgggcccttgagctgaccccacgcgggatccgggtgaacgtggtgagcccaggcccgacagatacgcccggtatcgcgcagctggccgccaccgccgaggaacgcgaggcgctcatcgccacgatgggcaccgggaccccgatgacccgggccggtaccgcggaagaggtcgccgccgtgatctcctttgtcgcctcggacgcggcctcccatgtcaacggcgccgattaccaggtcgatggtggttacggccaggtctga

SEQ ID NO: 118494 - protein, 250 aa, Streptomyces coelicolor A3(2)
MSNAFHNKVAVVTGGSAGIGHATARKIAEGGGTVYITGRDQDAATAAAADIPGDVIGVRADSRSTDDLGRLFAQVKRRSGRLDVLVVNAAAIATAPLGTITEDVIRTVFDVNITGTIMAVQKALPLLADGGVIVLTGSMAAHKASRGRSLYAASKAGVRALARTWALELTPRGIRVNVVSPGPTDTPGIAQLAATAEEREALIATMGTGTPMTRAGTAEEVAAVISFVASDAASHVNGADYQVDGGYGQV

SEQ ID NO: 118495 - DNA, 759 bp, Streptomyces coelicolor A3(2); identical to SEQ ID NO: 59462
  CDS (1)..(759): transl_table=11

SEQ ID NO: 118496 - protein, 252 aa, Streptomyces coelicolor A3(2); identical to SEQ ID NO: 59463

SEQ ID NO: 118497 - DNA, 801 bp, Streptomyces coelicolor A3(2); identical to SEQ ID NO: 59464
  CDS (1)..(801): transl_table=11

SEQ ID NO: 118498 - protein, 266 aa, Streptomyces coelicolor A3(2); identical to SEQ ID NO: 59465

SEQ ID NO: 118499 - DNA, 741 bp, Streptomyces coelicolor A3(2)
  CDS (1)..(741): transl_table=11
atgacccggcccatcacagtggtcaccggcggcagccgggggatcggagcggcgacctgtctgcgcctcgcggcggacggccacgacgtcgtcgtgggctacgcgcgcgactcgacggccgccgagacggtcgtggcgggggtgcgcgacgcgggcggccgcggagtcgcggtgcgcgcggacacgtccgtcgaggccgacgtcgagcggctcttcgacgtggcggaggagcggctgggcccggtcacggggctggtcaacaacgcggctgtgaccggcccgctgggacggctcgccgacagcgacaccgcggacctgcgccgggtcctcgacgtcaacctgctgggcgtgctgctgtgcgcccggcgggcggcgcggctgatgaccccgcgggggagtggcgcgatcgtgaacgtgtcgtcgggcgccgcgaccctcggcagccccggggagtacgtccactacgcggcgagcaaggcgggggtcgacgcggtgaccctgggcctggccaaggaactcggcccggacgggatccgggtcaacgccgtcgcgcccggggtgatcgacaccgggatgcacgcggcggcgggggacgccggccgggcggcccggatgggggcggcggtgccgatgggacgcgcgggccgggcggaggagatcgccgcggcgatctcctggttgctgtcgcccgacgcgtcgtacacgacggggacggtgctcagggtggcgggcgggcgctga

SEQ ID NO: 118500 - protein, 246 aa, Streptomyces coelicolor A3(2)
MTRPITVVTGGSRGIGAATCLRLAADGHDVVVGYARDSTAAETVVAGVRDAGGRGVAVRADTSVEADVERLFDVAEERLGPVTGLVNNAAVTGPLGRLADSDTADLRRVLDVNLLGVLLCARRAARLMTPRGSGAIVNVSSGAATLGSPGEYVHYAASKAGVDAVTLGLAKELGPDGIRVNAVAPGVIDTGMHAAAGDAGRAARMGAAVPMGRAGRAEEIAAAISWLLSPDASYTTGTVLRVAGGR

SEQ ID NO: 118501 - DNA, 762 bp, Streptomyces coelicolor A3(2)
  CDS (1)..(762): transl_table=11
atgtccaccactgagcagcgggtcgccgtagtcaccggagccgcgcgcggcatcggcgccgccaccgccctacgactggccgccgagggccgcgccgtcgccgtcatcgacctcgacgaggccgcctgcaaggacaccgtggagaagatcaccgcggccggcggcaaggcgatcgcggtcggctgcgacgtctccgacgaggcacaggtcgaggcggccgtcgcgcgcatcgccgaggagctgggcgcgccgacgatcctcgtcaacaacgcgggcgtgctgcgcgacaacctcctgttcaagatgagcgtctccgactgggacaccgtcatgaacgtgcacctgcgcggcgccttcctgatgacgaaggcctgccagaagcacatggtggacgccaagttcggccgtgtcgtcaacctgtcctcctcctccgccctcggcaaccgcggccaggtcaactactccgccgccaaggccggtctccagggcttcaccaagaccctcgccaaggagctgggcaagttcggcgtgaccgccaacgccgtcgcccccggcttcatcgccaccgagatgacgaaggccaccgccgaccgcgtcggcatgggcttcgacgacttcaaggccgccgccgccacccagatcccggtcgcgcgcgtgggtgagcccgacgacatcgccaacgccatcgccttcttcaccggcgaggccgccggcttcgtctccggccaggtcctgtacgtggccggcggaccgctcgactag

SEQ ID NO: 118502 - protein, 253 aa, Streptomyces coelicolor A3(2)
MSTTEQRVAVVTGAARGIGAATALRLAAEGRAVAVIDLDEAACKDTVEKITAAGGKAIAVGCDVSDEAQVEAAVARIAEELGAPTILVNNAGVLRDNLLFKMSVSDWDTVMNVHLRGAFLMTKACQKHMVDAKFGRVVNLSSSSALGNRGQVNYSAAKAGLQGFTKTLAKELGKFGVTANAVAPGFIATEMTKATADRVGMGFDDFKAAAATQIPVARVGEPDDIANAIAFFTGEAAGFVSGQVLYVAGGPLD

SEQ ID NO: 118503 - DNA, 705 bp, Streptomyces coelicolor A3(2); identical to SEQ ID NO: 59470
  CDS (1)..(705): transl_table=11

SEQ ID NO: 118504 - protein, 234 aa, Streptomyces coelicolor A3(2); identical to SEQ ID NO: 59471

SEQ ID NO: 118505 - DNA, 756 bp, Streptomyces coelicolor A3(2)
  CDS (1)..(756): transl_table=11
atggatcttggactgaaggaccgggtgtacgtcgtcacgggtgccacccggggcctgggcaacgccgccgcgcgcgagctggtcgccgacggggcgaaggtggtcgtcacggggcgggacgagaagagcgtcgctcaggcggccgcggcactgggaccggacgcggtcggcgtggccgcggacaacgccgacccggaggccgccgggcggctgatcgccaccgcccgtgagcgcttcggccgtttcgacggcgtactgatcagcgtgggcgggccgccgcccgggttcgtcgccgacaccacggacgagcagtggcagtcggcgttcgagtcggtgttcctcggcgcggtgcggctggcccgggcggcggcggccgagctggcggacggcggggtgatcgggttcgtgctgtcgggctcggtgcacgagccgatcccgggcctgaccatctccaacggtctgcgccccgggctcgcgggcttcgccaagtccctcgccgacgagctgggcccgcgcggcatccgcgtcgtcggcctgctgccggggcgcgtcgacaccgaccgggtgcgcgagctggacgggctgtcggccgacccggaggcgaccagggcggccgccgagtcccgcatcccgctgcgccgctacggcgccccggaggagttcggccgcgcgtcggcgttcctgctctcccccgcggcgtcgtacatcacgggcgtgatgctgccggtggacggcggcgtgcggcacgggttctga

SEQ ID NO: 118506 - protein, 251 aa, Streptomyces coelicolor A3(2)
MDLGLKDRVYVVTGATRGLGNAAARELVADGAKVVVTGRDEKSVAQAAAALGPDAVGVAADNADPEAAGRLIATARERFGRFDGVLISVGGPPPGFVADTTDEQWQSAFESVFLGAVRLARAAAAELADGGVIGFVLSGSVHEPIPGLTISNGLRPGLAGFAKSLADELGPRGIRVVGLLPGRVDTDRVRELDGLSADPEATRAAAESRIPLRRYGAPEEFGRASAFLLSPAASYITGVMLPVDGGVRHGF

SEQ ID NO: 118507 - DNA, 768 bp, Streptomyces coelicolor A3(2)
  CDS (1)..(768): transl_table=11
atgtccgtaaaggaaaacgtgccggagaacagggaactcgcgggaaagcgggccctggtcaccggcggtacgcgcggaatcggagcggcgatcgtccgccggctcctggaggccggcgccgaggtgatcaccaccgccaggtcggcgacgggcccggcgccggagggcgcgggtttcgtgcaggcggacgtgcggaccctcgccggggccgaggcgctcgccggggccgcgctggaggcgctcggcggggtggacatcctggtccacaacgcgggcggggcgcggccccacaaggacggcctggtcatccccgacgaggagtggctggacacgctgaacctgaacctcctcgcgtcggtccggctgaactcccttctggtaccgggcatgcgggagcggcgctcgggggcgatcgtgcacatctcctcggccgcggtcgcgcccccggcgccccccttcctgcactaccaggcggcgaaggcggcgctggacaactacagcgccggactggccgcgacgctggccccctccggcgtccgggtcaacaccgtcagccccggccggaccgccacccccggcggggaggagacccgggagcactgggcgagcctcgacgccggtccggccccgagcggcaccgccccgctgggacgcgacggcctgcccgacgacatcgcccacgcggtgctgtacctcgtgtccgaccgggcgggctgggtgaccgggaccagcctcgccgtggacggcggggaataccccaggggctga

SEQ ID NO: 118508 - protein, 255 aa, Streptomyces coelicolor A3(2)
MSVKENVPENRELAGKRALVTGGTRGIGAAIVRRLLEAGAEVITTARSATGPAPEGAGFVQADVRTLAGAEALAGAALEALGGVDILVHNAGGARPHKDGLVIPDEEWLDTLNLNLLASVRLNSLLVPGMRERRSGAIVHISSAAVAPPAPPFLHYQAAKAALDNYSAGLAATLAPSGVRVNTVSPGRTATPGGEETREHWASLDAGPAPSGTAPLGRDGLPDDIAHAVLYLVSDRAGWVTGTSLAVDGGEYPRG

SEQ ID NO: 118509 - DNA, 777 bp, Streptomyces coelicolor A3(2)
  CDS (1)..(777): transl_table=11
atgaccgggttgggcaggctcgacggcaagcggactctggtgatcgggggtggcggggcagggatcggccggagcatcgtccgttcctgtgcggccgcgggggcggcggtggcggtggccgacgtggatgccgcacgggcgaccgaggcggcggacgagttgcgggcggccggacacgtcgcccacgcgctgagcggcgacgtccgttcccgcgagcaactcgaagacgtgatcgtcggcgcggccgaccggctcggcgggctcgacgtcctgatcacggtggtcggcgggcaggtggccttcgtacccgcggtcagactgcacgagatggccgacgccgactgggacaccgtctacgaactgaacctgcgctatgtggctcgcgcggtgcgacgcgtgctgcggctgttcctggaacagggcaccggcgggaacatcgtcggcatcggctcggtcaccgggttcatggccgcgccgatgcaggccggttacggcgccgccaaggccggcctgcacagcctggcgcggaccgtcgcggccgagtacgcggccgacggcatccggatgaacgtcgtcgcgggcggggcgatcagtaccgccgtcaacgccggcccctccgacgcatgggttccggagataccggcgggccgctacggcacgtcggaggagatggctgccgcggccgtctacctggcctcggacgagtcgcgctacgtcaccggccagcagatcgtgctggacggcggggtctcggtccgcggtcccttccccgagtag

SEQ ID NO: 118510 - protein, 258 aa, Streptomyces coelicolor A3(2)
MTGLGRLDGKRTLVIGGGGAGIGRSIVRSCAAAGAAVAVADVDAARATEAADELRAAGHVAHALSGDVRSREQLEDVIVGAADRLGGLDVLITVVGGQVAFVPAVRLHEMADADWDTVYELNLRYVARAVRRVLRLFLEQGTGGNIVGIGSVTGFMAAPMQAGYGAAKAGLHSLARTVAAEYAADGIRMNVVAGGAISTAVNAGPSDAWVPEIPAGRYGTSEEMAAAAVYLASDESRYVTGQQIVLDGGVSVRGPFPE

SEQ ID NO: 118511 - DNA, 768 bp, Streptomyces coelicolor A3(2)
  CDS (1)..(768): transl_table=11
atgccttttgacctcacggggcgccgtgcgctcgtcaccggcgccgggcacggcatcggcgcggccattgcgctcgggctggcccgggcgggcgccgacgtgatcgttcaccatggtcactccgccgactcggcggagcgcgtcgtggccgatatcagcgcgctcggacgcaagtccaccgccatcgctgcggacgtcacggacgtgaccgcagtcgagcgcctggtcgacgaaagcgtcgccttcctcggcgggctcgacatcgtcgttgtcaacgccgggcatctcgtcgggagggttcccgtagccgacatgaccgaggaacacttccgtagcgtgatcgacgtcaacctcgtctccgccttcaggacgtgccgggcagccctgccgcacgtgcgggaagccggacgcgcgggacggatcatcctcatggcctcgcaggcggctcacgacggcggcggtcccggcgcgaccgcctacgcggcggccaaggcaggagtgatcggcttcgccaaggggctggccaaggagatcggcggcgccggggtcacggtcaacgccctggctccgggatacatcggcgataccgccttccacggcacgttcaccgcgcccgaggcacagcgcggcatcgtcgggaagctgcccatcggccgggcgggcaccgtggatgacgtcgcgggcacggccgtctacctggcctccggtgaggccggatacatcaccggcgccaccttcgacatcggtggcggcgcatggccgcgctga

SEQ ID NO: 118512 - protein, 255 aa, Streptomyces coelicolor A3(2)
MPFDLTGRRALVTGAGHGIGAAIALGLARAGADVIVHHGHSADSAERVVADISALGRKSTAIAADVTDVTAVERLVDESVAFLGGLDIVVVNAGHLVGRVPVADMTEEHFRSVIDVNLVSAFRTCRAALPHVREAGRAGRIILMASQAAHDGGGPGATAYAAAKAGVIGFAKGLAKEIGGAGVTVNALAPGYIGDTAFHGTFTAPEAQRGIVGKLPIGRAGTVDDVAGTAVYLASGEAGYITGATFDIGGGAWPR

SEQ ID NO: 118513 - DNA, 783 bp, Streptomyces coelicolor A3(2)
  CDS (1)..(783): transl_table=11
atgacaacgaccggttccgcactgtccggcgcgctgcccttcgccggtctcaccgcgctggtcaccggcggcgcctccgggatcggcctggccaccgcccggctgctcaccgcccagggcgcccgcgtggccgtcctggacctgtccgaaccgcagcccgccggcttcgcggcggccctgcgcgcggacatacgcgacgacgcctcggtggtggccgccgtcgacgcggcggtctcccggctcggcggactcgacatcgtggtcaacaacgcggggatcggggcgcagggcggcgtcgaggacaactccgacgaggagtggcaccgcgtcctggacaccaacgtcgtcggcatggtccgggtcacccgggccgcgctgcccgccctgcgggcctcccggcacgcggcggtcgtcaacgtcggttccatcgccgccaccgccgggctgccccagcgggtgctgtactcggccggcaagggcgccgtggtggcgatgacccgggccatggccgccgacctgctgccggagggcatccgggtcaacgcggtcaaccccgggaccgcggacacgccctggatcggccggctgctggaccgggccgccgatcccgccgccgagtacaccgccctggcggcccggcagccgcacggccgcctggtcgccgccgacgaggtcgccgccgcgatcgcctacctcgcctcgccggccgccgggtccaccacgggcacgtgcctggccgtggacggcggcatggacggcctgcggctgcgcaaggaggggtga

SEQ ID NO: 118514 - protein, 260 aa, Streptomyces coelicolor A3(2)
MTTTGSALSGALPFAGLTALVTGGASGIGLATARLLTAQGARVAVLDLSEPQPAGFAAALRADIRDDASVVAAVDAAVSRLGGLDIVVNNAGIGAQGGVEDNSDEEWHRVLDTNVVGMVRVTRAALPALRASRHAAVVNVGSIAATAGLPQRVLYSAGKGAVVAMTRAMAADLLPEGIRVNAVNPGTADTPWIGRLLDRAADPAAEYTALAARQPHGRLVAADEVAAAIAYLASPAAGSTTGTCLAVDGGMDGLRLRKEG

SEQ ID NO: 118515 - DNA, 765 bp, Streptomyces coelicolor A3(2)
  CDS (1)..(765): transl_table=11
gtgggcgaactggcgggcagaacggctctggtgacgggcgcgtcgcgcggcatcgggcaggcgatcgcgactcgactggcggccgaaggagtcacggtcatcgtgcacttcggcacggacgaggccggggccgcggcaacgctcgacgcgatggaacacgccggcgggtccggctttgccgtccgagccgaactgggcgtggatggcgacgtcgagacactcttcgccggcgtggaggctggcttgggcggtcggccgctcgacatcgtcgtcaacaatgccgcggccgcaccagccggcgcactcggcgtcacgacgcgggcggagttcgaccacttgttcgcagtgaacgtgcgggcaccgtacttcatcatcgaacgtgcactgcctctgttgcgcgagggcgcccggatcatctcgatctcgtcggtggcaacccggatggccaactcgtcccagacatccttcgccatgacgaagggcgcgatcgagacgatgaccaagaccctcgccgcccaactcggttctcgtgggatcacggtgaacgcggtcgctcctggggccaccaagacagcgagcaacggagctgtcttcgacgtgccgggcctcaccgaacagatctccggcatgacggcactcagcaggctgggcgcgcccgacgacgtagccgacgtggtcgccttcctcgcttccgatgccgcccgctgggtcactgggcagatcctcgacgcgagcggtggcctgttcctcggtccatgcatctga

SEQ ID NO: 118516 - protein, 254 aa, Streptomyces coelicolor A3(2)
MGELAGRTALVTGASRGIGQAIATRLAAEGVTVIVHFGTDEAGAAATLDAMEHAGGSGFAVRAELGVDGDVETLFAGVEAGLGGRPLDIVVNNAAAAPAGALGVTTRAEFDHLFAVNVRAPYFIIERALPLLREGARIISISSVATRMANSSQTSFAMTKGAIETMTKTLAAQLGSRGITVNAVAPGATKTASNGAVFDVPGLTEQISGMTALSRLGAPDDVADVVAFLASDAARWVTGQILDASGGLFLGPCI

SEQ ID NO: 118517 - DNA, 744 bp, Xanthomonas campestris pv. campestris str. ATCC 33913
  CDS (1)..(744): transl_table=11
atgagcaagccattgcagggcgagatcgctctggtcaccggcgccagccgcggcatcggcgcggccatcgccgatacgctggccgcccagggtgccacggtcatcggcacggccacctccgcctccggggccgctgccatcggcgagcgcctggctgccaacggcggccacggccgggagctcaatgtcaccgatgcggccgcggtcgatgccttgatcgatgcgatcggcaaggagttcggtgcggtctcgatcctggtcaacaacgccggcatcacccgcgacaacctgctgatgcggatgaaggacgacgattggcaggcgatcatcgacaccaacctgaccagtgtcttccggacctccaaggcggtgatgcgcggcatgatgaaagcgcgcaagggtcgcatcatcaacatcgcctcggtggtgggtgtgaccggtaatccgggccagaccaactacgcggcggccaaggccggcatcattgcgttttccaagtcgctggccaaggaaatcggctcgcgcgggatcactgtcaatgtggtcgcgcccggcttcatcgataccgatatgaccaaggcgctgccggaagatgccaagacagcgttgctgcagcagatcgcgctgggccatctggggcagccggacgacatcgccaatgcggtggcattcctggctggcccgcccgcccgttacatcactggtgagaccctgcacgtcaacggcggcatgtacatgccgtga

SEQ ID NO: 118518 - protein, 247 aa, Xanthomonas campestris pv. campestris str. ATCC 33913
MSKPLQGEIALVTGASRGIGAAIADTLAAQGATVIGTATSASGAAAIGERLAANGGHGRELNVTDAAAVDALIDAIGKEFGAVSILVNNAGITRDNLLMRMKDDDWQAIIDTNLTSVFRTSKAVMRGMMKARKGRIINIASVVGVTGNPGQTNYAAAKAGIIAFSKSLAKEIGSRGITVNVVAPGFIDTDMTKALPEDAKTALLQQIALGHLGQPDDIANAVAFLAGPPARYITGETLHVNGGMYMP

SEQ ID NO: 118519 - DNA, 774 bp, Drosophila melanogaster; identical to SEQ ID NO: 59480
  CDS (1)..(774)

SEQ ID NO: 118520 - protein, 257 aa, Drosophila melanogaster; identical to SEQ ID NO: 59481

SEQ ID NO: 118521 - DNA, 738 bp, Chlorobium tepidum TLS
  CDS (1)..(738): transl_table=11
atgttcacaggaaaaaccgccgtcgtcaccggcgcggcacgaggcatcggccagtcgatcgccctcgatctcgccgccaaaggcgctgatcttgttattggcgacatcaaggcggagtggctgaccgaaaccgaagaggcgctcaaacagctcggcgcaaaagtgagctgcaaggagctcgatgtcaccagcaccgacgcgtgccagaaggttttcgacgaagtggctaaagagaatggccgcatcgacattctcgtcaacaacgcaggcatcacccgcgacggccttctgatgcgtatgagcgaagaggactgggacgccgtgctgacggtgaacctcaagggcgtcttcaactgcaccaaggcggtcacgcgcaccatgatgaagcagcgttccggctcgatcatcaacatcgcctcgatcatcggcctcatgggcaacgccggacaggccaactacgcggcttcgaaaggcggcgtcatcgccttcaccaagtcgattgccagggagctggcttcgcgcaatgtgcgggccaacgctatcgcccccggcttcatttcatcgaaaatgaccgacgccctctccgaagaggtgcgccagaagatgctcgaagccattccgctcggcgtttttggcacgccccagcatgttgccgacgcggtggcatttctcgccagcgaccagtcagcctacatcaccggtcaggtgctgagcgtcaacggcggcatgtacatgtaa

SEQ ID NO: 118522 - protein, 245 aa, Chlorobium tepidum TLS
MFTGKTAVVTGAARGIGQSIALDLAAKGADLVIGDIKAEWLTETEEALKQLGAKVSCKELDVTSTDACQKVFDEVAKENGRIDILVNNAGITRDGLLMRMSEEDWDAVLTVNLKGVFNCTKAVTRTMMKQRSGSIINIASIIGLMGNAGQANYAASKGGVIAFTKSIARELASRNVRANAIAPGFISSKMTDALSEEVRQKMLEAIPLGVFGTPQHVADAVAFLASDQSAYITGQVLSVNGGMYM

SEQ ID NO: 118523 - DNA, 735 bp, Yersinia pestis KIM
  CDS (1)..(735): transl_table=11
atgagcttcgaaggaaaaattgcactggtcactggcgcgagccgtggtattggtcgcgctattgcagaattattggttgaacgcggtgcttgtgttattggtaccgcgaccagtgagaagggcgctgaagctattagcgcctacttgggtgagaacggaaaaggtttaatgttgaacgttgtggatcccacttcgatcgacacagtactggcaacgattcgtgcggaatttggcgaagtcgatattttagttaataatgctggtattacgcgtgataacctgctgatgcgtatgaaggatgatgagtggcaggatattattgacacgaatctgacttccgtattccgtctgtcaaaagcggtaatgcgcgctatgatgaaaaagcgatttggccgtatcatcaccatagggtctgttgttgggacaatgggcaatgcggggcaggttaactacgcggcagctaaagctggagttattggttttagcaagtctttggcgcgtgaggtggcttcacgtggcattactgtcaacgttgtggcacctggctttattgagacggacatgactaggacgttgacggatgatcaacgcgcaggcattttagcccaagtaccagctaaccggcttggggatgctaaagaaatcgccagcgctgttgcatttttagcctctgacgaggccagctacatttctggtgaaacgttacatgtcaatggcggcatgtatatgatttaa

SEQ ID NO: 118524 - protein, 244 aa, Yersinia pestis KIM
MSFEGKIALVTGASRGIGRAIAELLVERGACVIGTATSEKGAEAISAYLGENGKGLMLNVVDPTSIDTVLATIRAEFGEVDILVNNAGITRDNLLMRMKDDEWQDIIDTNLTSVFRLSKAVMRAMMKKRFGRIITIGSVVGTMGNAGQVNYAAAKAGVIGFSKSLAREVASRGITVNVVAPGFIETDMTRTLTDDQRAGILAQVPANRLGDAKEIASAVAFLASDEASYISGETLHVNGGMYMI

SEQ ID NO: 118525 - DNA, 738 bp, Thermosynechococcus elongatus BP-1
  CDS (1)..(738): transl_table=11
ttgagcgaaacagccgttgccattgtcactggtgcctcacgggggattggtcgagcgatcgccctcgaactggcgaaggaaggagccactgtagttgtcaactacgcccgttctgctgaggcggcccttgaagtagtgcagaggattgaacagcaagggggaacagcgatcgcgatcgctgccgatgtgtctgttcctgagcaggtcgatactctcgtggccaaaaccgtagaaacctatggccgtgtggatgtactggtcaacaatgccggtattacccgcgacaccctactgctgcgtatgagccttgaggactggcaggcggtgattaacctgaacctgaccggggttttcctgtgtacccgtgccgtgagtaaactgatgctgaagcaaaagcggggacgaattatcaacattgcgtcggtggcagggcaaatgggcaaccccggccaagccaactacagtgctgccaaagctggtgtgattgggtttagcaaaaccgtggccaaagaattagccagtcgaggcatcaccgtcaatgccgttgcccccggctttattgccactgagatgacagctgaactcaaagcagaggacattcttaaattcattcccctaggacggtatggcgaacccacagaagtggcggggatggtgcgctttttagccttggatccggcagccgcctacattacggggcaagtcttcaacgtggatggtggtatggtgatggcctag

SEQ ID NO: 118526 - protein, 245 aa, Thermosynechococcus elongatus BP-1
MSETAVAIVTGASRGIGRAIALELAKEGATVVVNYARSAEAALEVVQRIEQQGGTAIAIAADVSVPEQVDTLVAKTVETYGRVDVLVNNAGITRDTLLLRMSLEDWQAVINLNLTGVFLCTRAVSKLMLKQKRGRIINIASVAGQMGNPGQANYSAAKAGVIGFSKTVAKELASRGITVNAVAPGFIATEMTAELKAEDILKFIPLGRYGEPTEVAGMVRFLALDPAAAYITGQVFNVDGGMVMA

SEQ ID NO: 118527 - DNA, 741 bp, Oceanobacillus iheyensis HTE831
  CDS (1)..(741): transl_table=11
atgctacaagggaaaaatgcgatcgtaacaggagcttctcgaggtataggtagatctattgcacttgaacttgcaaaacaaggtgcaaatgttgtagtgaattatgcgggaagtgaagataaagcagaagaggtagttcaagaagcgataagtcttggtgttcgttcgttcaaattccaggcaaatatctcaaatgagtcagaagtaaaggaaatgatgaagtccgttacaaatgaatttggtactattgatattcttgtgaacaatgctgggataacaaaagataatctcttgatgcggatgaaagaagatgaatttgatcaagtagtacaaacaaatttaaaaggtacattcttatgtacgaaagcagttacacggcaaatgatgaaacaaaaatctggaagaattatcaatgtggcttctatcgtaggggtgagcggtaatccaggacaagcaaattatgtagctgcaaaagcaggagtaattggtttaacaaaaacatctgcaaaagaattagcttctagaaatattttagtaaatgcagtagctccaggttttatttctacggatatgacggatcaattaagtaaagaacaacaagattcactcctaagtcttgtgccattagagcgttttggtaaaccggaagatgtagcgagagtagttcgtttcttagcaacagaagatgccaattatattacaggtcaaacaatccatattgacggtggtatggtgatgtaa

SEQ ID NO: 118528 - protein, 246 aa, Oceanobacillus iheyensis HTE831
MLQGKNAIVTGASRGIGRSIALELAKQGANVVVNYAGSEDKAEEVVQEAISLGVRSFKFQANISNESEVKEMMKSVTNEFGTIDILVNNAGITKDNLLMRMKEDEFDQVVQTNLKGTFLCTKAVTRQMMKQKSGRIINVASIVGVSGNPGQANYVAAKAGVIGLTKTSAKELASRNILVNAVAPGFISTDMTDQLSKEQQDSLLSLVPLERFGKPEDVARVVRFLATEDANYITGQTIHIDGGMVM

SEQ ID NO: 118529 - DNA, 738 bp, Brucella suis 1330
  CDS (1)..(738): transl_table=11
atgtttgatctgactggccgcaaggctctggtgaccggcgcaaccggcggtcttggtgaggcgattgcccgcgcgctgcacgcgcagggcgcaattgtcggcctgcacggtacgcgcgaggaaaagctgaaggaattggctgcggagctgggtgaacgcattttcgtcttcccggccaatctgtccgaccgtgaagccgtcaaggcgcttggccagaaggccgaagaggaaatgggtggtgtcgatattctggtcaacaatgcgggcatcacccgtgatggccttttcgtgcgcatgagcgacgaggattgggatgcggttctgaccgtcaatctgacgtcggtattcaatctcacgcgcgaactgacccatcccatgatgcgccgccgcaacggccgcatcatcaacatcacctccattgtcggtgtgacgggcaatccgggtcaggcaaattattgcgcctcgaaggctggcctcatcggcttctccaagtcgctggcgcaagagatcgcaagccgcaacgtgaccgtcaattgcatcgcgccgggctttatcgaatcggccatgaccggcaagctgaatgagaagcagaaggacgcgatcatgggcaatattcccatgaagcgcatgggggtcggcgccgatattgctgctgccgtggtctatcttgcaagcgacgaggcggcctatgtgaccggccagaccttgcatgtaaatggcggcatggccatgatttga

SEQ ID NO: 118530 - protein, 245 aa, Brucella suis 1330
MFDLTGRKALVTGATGGLGEAIARALHAQGAIVGLHGTREEKLKELAAELGERIFVFPANLSDREAVKALGQKAEEEMGGVDILVNNAGITRDGLFVRMSDEDWDAVLTVNLTSVFNLTRELTHPMMRRRNGRIINITSIVGVTGNPGQANYCASKAGLIGFSKSLAQEIASRNVTVNCIAPGFIESAMTGKLNEKQKDAIMGNIPMKRMGVGADIAAAVVYLASDEAAYVTGQTLHVNGGMAMI

SEQ ID NO: 118531 - DNA, 765 bp, Leptospira interrogans serovar Lai str. 56601
  CDS (1)..(765): transl_table=11
atgatcgatttaaaaggaaaaaacgccgtagttaccggagccgctcgtgggatcggaaagtcaacggctttaactcttgcaaaagcaggagcaaatttagtaatcgcggacttaaacgaagaatctagtaaagcgaccgcggatgaaatttcaaaacagactggtgtaaaggcgattggaatcggaacgaatgtctcggatgtagattctgcagcaaaggcaattcaagcgtgtgtagatgaatttggatctgtagacatccttgtaaataacgcaggtattacaaaagatactcttcttatgagaatgaaaaaggagcagtgggatgctgtaattgctgtaaatctcaccgggaccttcaattgtacacaggccgctattaagtttatgatgaaaaatccaaatggaggatctattatcaatctatcatccattgctggggtaaacggaaacataggacagacaaattattctgcatctaaagcaggagtcattggttttacaaaagcggttgcattggaaatggcttctcgcaaggttcgttgtaatgcaattgcacccggctttatcgctactgaaatgacggacgcgattcctgaaaagattaggactgctatggttgcggcgattcctttaaaaagggcgggacaaccggaagatattgctaacacaatcgcatttttggcttccgatatttcttcttttatcactggtcaagtgattgaagtgaatggtggaggtttcttaccaggagcaaccgcctaa

SEQ ID NO: 118532 - protein, 254 aa, Leptospira interrogans serovar Lai str. 56601
MIDLKGKNAVVTGAARGIGKSTALTLAKAGANLVIADLNEESSKATADEISKQTGVKAIGIGTNVSDVDSAAKAIQACVDEFGSVDILVNNAGITKDTLLMRMKKEQWDAVIAVNLTGTFNCTQAAIKFMMKNPNGGSIINLSSIAGVNGNIGQTNYSASKAGVIGFTKAVALEMASRKVRCNAIAPGFIATEMTDAIPEKIRTAMVAAIPLKRAGQPEDIANTIAFLASDISSFITGQVIEVNGGGFLPGATA

SEQ ID NO: 118533 - DNA, 747 bp, Shewanella oneidensis MR-1
  CDS (1)..(747): transl_table=11
atgagtatcaatctgagtttagcgggcaaagttgccttagtgacaggtgcgagccgtggtattggccgcgcgattgccgaaaccttagtcgaagcgggtgcggttgtaataggaactgccacaagtgagaagggcgccgcagcaatccaagaatatctgggtgacaaaggttttggtttagtgcttaatgttaccgatagtcaatccgtcaccgatttattcgactcgatcaaagaaaaagcgggagatgttgatattctagtcaataacgcgggtatcacccgtgataacttgctgatgcgaatgaaagatgatgaatggaacgatatcattgataccaacctgacgtcattgttcagactatcaaaacctgtgatgcgtaccatgatgaaaaagcgctttggccggatcatcaatatcggttcagtggtaggcactatgggcaatgcaggtcaagttaactactcggcagcaaaggcgggtttgatcggatttacaaaatctcttgcaagagaggttgcatctcgtcaaattacagttaatgctatcgctcctggatttatccagaccgatatgactgatgagctgaccgaagatcagcaaaaagctatcatgtctcaggtaccgatggaacgattagggcaagcgcaagaaattgccaatgcagtgctctttttggcgtcggattctgccgcatatatcacaggcgagactttgcatgtgaatggcggaatgtacatggtttaa

SEQ ID NO: 118534 - protein, 248 aa, Shewanella oneidensis MR-1
MSINLSLAGKVALVTGASRGIGRAIAETLVEAGAVVIGTATSEKGAAAIQEYLGDKGFGLVLNVTDSQSVTDLFDSIKEKAGDVDILVNNAGITRDNLLMRMKDDEWNDIIDTNLTSLFRLSKPVMRTMMKKRFGRIINIGSVVGTMGNAGQVNYSAAKAGLIGFTKSLAREVASRQITVNAIAPGFIQTDMTDELTEDQQKAIMSQVPMERLGQAQEIANAVLFLASDSAAYITGETLHVNGGMYMV

SEQ ID NO: 118535 - DNA, 774 bp, Drosophila melanogaster; identical to SEQ ID NO: 59482
  CDS (1)..(774)

SEQ ID NO: 118536 - protein, 257 aa, Drosophila melanogaster; identical to SEQ ID NO: 59483

SEQ ID NO: 118537 - DNA, 795 bp, Drosophila melanogaster; identical to SEQ ID NO: 59484
  CDS (1)..(795)

SEQ ID NO: 118538 - protein, 264 aa, Drosophila melanogaster; identical to SEQ ID NO: 59485

SEQ ID NO: 118539 - DNA, 771 bp, Drosophila melanogaster; identical to SEQ ID NO: 59486
  CDS (1)..(771)

SEQ ID NO: 118540 - protein, 256 aa, Drosophila melanogaster; identical to SEQ ID NO: 59487

SEQ ID NO: 118541 - DNA, 735 bp, Streptococcus agalactiae NEM316
  CDS (1)..(735): transl_table=11
atgcaattaaaagataagaacatttttattacgggttcaagtagaggaatcggccttgcaattgcccatcaatttgcacaattaggtgctaatattgttttaaatggacgttctgaaatatcagaagacttaatagctgaatttgctgattatggtgtaaaagttattgctatttcaggagatgtttcttcttttgaagatgctaatcgcatgattaaagaagctattgcaagtctaggtagcgtggatgtgctcgttaacaacgctggtattactaatgataaattgatgcttaaaatgactgttgaagattttgagagcgttcttaaaattaatttaacaggtgcatttaatatgacacaatcagtcttgaaaccgatgacaaaagcgcgtcaaggtgctattattaatatctctagcgtcgttggattaactggaaatgtagggcaagctaattacgcagcctctaaagcaggtttaattggctttacaaaatcagttgccagagaagtagcagcacgaggcattcgtgtcaatgccattgctccaggctttatcgaatctgatatgacagatgttatcccagaaaaaatgcaagaagctattttagctcaaattccaatgaaacgtattggaaaaggtaaagaagtagcgcaggtagcgtctttcttagcagaacaagaataccttacaggacaagttattgccattgatggcggtatgacgatgcaatga

SEQ ID NO: 118542 - protein, 244 aa, Streptococcus agalactiae NEM316
MQLKDKNIFITGSSRGIGLAIAHQFAQLGANIVLNGRSEISEDLIAEFADYGVKVIAISGDVSSFEDANRMIKEAIASLGSVDVLVNNAGITNDKLMLKMTVEDFESVLKINLTGAFNMTQSVLKPMTKARQGAIINISSVVGLTGNVGQANYAASKAGLIGFTKSVAREVAARGIRVNAIAPGFIESDMTDVIPEKMQEAILAQIPMKRIGKGKEVAQVASFLAEQEYLTGQVIAIDGGMTMQ

SEQ ID NO: 118543 - DNA, 750 bp, Corynebacterium efficiens YS-314
  CDS (1)..(750): transl_table=11
atgaactcactcaacggacgcatctgcattgtcaccggcgcggcacagggaatcggcaagggcatcgccgagcgcctggccgccgagggcgccaccgtcgtggtcgccgacctcaacggcgaggccgccagcgccaccgccgcggaactgggcaacgactccatcggtgtcaccgtcgacatctccgaccgcaccgccgtggacgcgatggtcgccgaggcgaaggacaagtacgggcgtatcgacgtcctggtcaacaacgccggctgggacaagatcggtcccttcctggagatcgaaccggagatctgggaccgcatcatcaacatcaacctctacggcaccctgcactgctcccagtccgtggcacgcatcatggtggagcaggagggtgggggaaccatcatcaacatcggttccgatgccgcccgcgtgggttcctccggtgaggccgtctactccgcctgcaagggtggcgtggtctccttcaccaagacgcttgcccgtgaactcgcccgttatggggtcaccgcgaatgccatctgccccggacccgcggataccccgctgttcgcccagatctccgaggagaacccgaagctgcgcaccgccctggagaaggccatcccgctgcgtcgtctggcgcagccggaggacctggccaacgccgtcgccttcttcgcctcccctgagtcctcctacatcaccggtcagacgctgtccgtctccggtggcctgaccatgatctaa

SEQ ID NO: 118544 - protein, 249 aa, Corynebacterium efficiens YS-314
MNSLNGRICIVTGAAQGIGKGIAERLAAEGATVVVADLNGEAASATAAELGNDSIGVTVDISDRTAVDAMVAEAKDKYGRIDVLVNNAGWDKIGPFLEIEPEIWDRIININLYGTLHCSQSVARIMVEQEGGGTIINIGSDAARVGSSGEAVYSACKGGVVSFTKTLARELARYGVTANAICPGPADTPLFAQISEENPKLRTALEKAIPLRRLAQPEDLANAVAFFASPESSYITGQTLSVSGGLTMI

SEQ ID NO: 118545 - DNA, 762 bp, Pseudomonas putida KT2440; identical to SEQ ID NO: 59488
  CDS (1)..(762): transl_table=11

SEQ ID NO: 118546 - protein, 253 aa, Pseudomonas putida KT2440; identical to SEQ ID NO: 59489

SEQ ID NO: 118547 - DNA, 750 bp, Pseudomonas putida KT2440
  CDS (1)..(750): transl_table=11
atgtccaagcaacttacactcgaaggcaaagtggccctggttcagggcggttcccgaggcattggcgcagctatcgtaaggcgcctggcccgcgaaggcgcgcaagtggccttcacctatgtcagctctgccggcccggctgaagaactggctcgggaaattaccgagaacggcggcaaagccttggccctgcgggctgacagcgctgatgccgcggccgtgcagctggcggttgatgacaccgagaaagccttgggccggctggatatcctggtcaacaacgccggtgtgctggcagtggccccagtgacagagttcgacctggccgacttcgatcatatgctggccgtgaacgtacgcagcgtgttcgtcgccagccaggccgcggcacgctatatgggccagggcggtcgtatcatcaacattggcagcaccaacgccgagcgcatgccgtttgccggtggtgcaccgtacgccatgagcaagtcggcactggttggtctgacccgcggcatggcacgcgacctcgggccgcagggcattaccgtgaacaacgtgcagcccggcccggtggacaccgacatgaacccggccagtggcgagtttgccgagagcctgattccgctgatggccattgggcgatatggcgagccggaggagattgccagcttcgtggcttacctggcagggcctgaagccgggtatatcaccggggccagcctgactgtagatggtgggtttgcagcctga

SEQ ID NO: 118548 - protein, 249 aa, Pseudomonas putida KT2440
MSKQLTLEGKVALVQGGSRGIGAAIVRRLAREGAQVAFTYVSSAGPAEELAREITENGGKALALRADSADAAAVQLAVDDTEKALGRLDILVNNAGVLAVAPVTEFDLADFDHMLAVNVRSVFVASQAAARYMGQGGRIINIGSTNAERMPFAGGAPYAMSKSALVGLTRGMARDLGPQGITVNNVQPGPVDTDMNPASGEFAESLIPLMAIGRYGEPEEIASFVAYLAGPEAGYITGASLTVDGGFAA

SEQ ID NO: 118549 - DNA, 741 bp, Pseudomonas putida KT2440
  CDS (1)..(741): transl_table=11
atgagcctgcaaggtaaagttgcactggttaccggcgccagccgtggcattggccaggccatcgccctcgagctgggccgccagggcgcgaccgtgatcggtaccgccacgtcggcgtccggtgccgagcgcatcgctgccaccctgaaagaacacggcattaccggcactggcatggagctgaacgtgaccagcgccgaatcggttgaagccgtactggccgccattggcgagcagttcggcgcgccggccatcttggtcaacaatgccggtatcacccgcgacaacctcatgctgcgcatgaaagacgacgagtggtttgatgtcatcgacaccaacctgaacagcctctaccgtctgtccaagggcgtgctgcgtggcatgaccaaggcgcgttggggtcgtatcatcagcatcggctcggtcgttggtgccatgggtaacgcaggtcaggccaactacgcggctgccaaggccggtctggaaggtttcagccgcgccctggcgcgtgaagtgggttcgcgtggtatcaccgtcaactcggtgaccccaggcttcatcgataccgacatgacccgcgagctgccagaagctcagcgcgaagccctgcagacccagattccgctgggccgcctgggccaggctgacgaaattgccaaggtggtttcgttcctggcatccgacggcgccgcctacgtgaccggcgctaccgtgccggtcaacggcgggatgtacatgtaa

SEQ ID NO: 118550 - protein, 246 aa, Pseudomonas putida KT2440
MSLQGKVALVTGASRGIGQAIALELGRQGATVIGTATSASGAERIAATLKEHGITGTGMELNVTSAESVEAVLAAIGEQFGAPAILVNNAGITRDNLMLRMKDDEWFDVIDTNLNSLYRLSKGVLRGMTKARWGRIISIGSVVGAMGNAGQANYAAAKAGLEGFSRALAREVGSRGITVNSVTPGFIDTDMTRELPEAQREALQTQIPLGRLGQADEIAKVVSFLASDGAAYVTGATVPVNGGMYM

SEQ ID NO: 118551 - DNA, 738 bp, Pseudomonas putida KT2440
  CDS (1)..(738): transl_table=11
atgactcagaaaatagctgtcgtgaccggcggcagtcgcggcattggcaagtccatcgtgctggccctggccggcgcgggttatcaggttgccttcagttatgtccgtgacgaggcgtcagccgctgccttgcaggcgcaggtcgaagggctcggccgggactgcctggccgtgcagtgtgatgtcaaggaagcgccgagcattcaggcgttttttgaacgggtcgagcaacgtttcgagcgtatcgacttgttggtcaacaacgccggtattacccgtgacggtttgctcgccacgcaatcgttgaacgacatcaccgaggtcatccagaccaacctggtcggcacgttgttgtgctgtcagcaggtgctgccctgcatgatgcgccaacgcagcgggtgcatcgtcaacctcagttcggtggccgcgcaaaagcccggcaagggccagagcaactacgccgccgccaaaggcggtgtagaagcattgacacgcgcactggcggtggagttggcgccgcgcaacatccgggtcaacgcggtggcgcccggcatcgtcagcaccgacatgagccaagccctggtcggcgcccatgagcaggaaatccagtcgcggctgttgatcaaacggttcgcccggcctgaagaaattgccgacgcggtgctgtatctggccgagcgcggcctgtacatcacgggcgaagtcctgtccgtcaacggcggattgaaaatgccatga

SEQ ID NO: 118552 - protein, 245 aa, Pseudomonas putida KT2440
MTQKIAVVTGGSRGIGKSIVLALAGAGYQVAFSYVRDEASAAALQAQVEGLGRDCLAVQCDVKEAPSIQAFFERVEQRFERIDLLVNNAGITRDGLLATQSLNDITEVIQTNLVGTLLCCQQVLPCMMRQRSGCIVNLSSVAAQKPGKGQSNYAAAKGGVEALTRALAVELAPRNIRVNAVAPGIVSTDMSQALVGAHEQEIQSRLLIKRFARPEEIADAVLYLAERGLYITGEVLSVNGGLKMP

SEQ ID NO: 118553 - DNA, 765 bp, Pseudomonas putida KT2440; identical to SEQ ID NO: 59492
  CDS (1)..(765): transl_table=11

SEQ ID NO: 118554 - protein, 254 aa, Pseudomonas putida KT2440; identical to SEQ ID NO: 59493

SEQ ID NO: 118555 - DNA, 768 bp, Pseudomonas putida KT2440
  CDS (1)..(768): transl_table=11
atgcagccgaaccttgcccgactgttcgccctcgacgggcgtcgcgccctggtgaccggggcctccagcggcctgggccgtcacttcgccatgaccctggccgccgcaggcgccgaggtggtggtgaccgccagacgccaggcgccgctgcaggcgttggtggaggccatcgaggtggccggagggcgggcgcaggcctttgccctcgatgtgacgagccgtgaggacatctgccgggtgctcgatgccgccggcccgctggatgttctggtcaacaatgcgggggtgagcgacagccagcctttgctagcctgcgatgatcaaacctgggaccacgtgctcgacaccaacctcaagggcgcctgggccgtggcccaggaaagcgcccggcgcatggtggtggcggggaaggggggcagcctgatcaatgtcacctcgatcctcgccagccgtgtggccggcgccgtcggcccttacctggcggccaaggccggcctggcccacctgacccgcgccatggcgctggagttggcgcgccatggtatccgggtgaacgccctggcgcccggctacgtgatgactgatttgaacgaggccttcctggccagcgaggccggtgacaagttgcgctcgcggatccccagccgccgcttcagcgtgccgtcggacctggacggcgccttgctgctgctcgccagcgatgccgggcgggcgatgagcggcgctgagatcgtggtcgatggcggccacctgtgcagcagcctgtaa

SEQ ID NO: 118556 - protein, 255 aa, Pseudomonas putida KT2440
MQPNLARLFALDGRRALVTGASSGLGRHFAMTLAAAGAEVVVTARRQAPLQALVEAIEVAGGRAQAFALDVTSREDICRVLDAAGPLDVLVNNAGVSDSQPLLACDDQTWDHVLDTNLKGAWAVAQESARRMVVAGKGGSLINVTSILASRVAGAVGPYLAAKAGLAHLTRAMALELARHGIRVNALAPGYVMTDLNEAFLASEAGDKLRSRIPSRRFSVPSDLDGALLLLASDAGRAMSGAEIVVDGGHLCSSL

SEQ ID NO: 118557 - DNA, 768 bp, Pseudomonas putida KT2440
  CDS (1)..(768): transl_table=11
atgtccaagacccacctgttcgacctcgacggcaagattgcctttgtttccggcgccagccgtggcatcggcgaggccatcgcccacttgctcgcgcagcaaggggcccatgtgatcgtttccagccgcaagcttgacgggtgccagcaggtggccgacgccatcattgccgccggcggcaaggccacggctgtggcctgccacattggtgagctggaacagattcagcaggtgttcgccggcattcgcgaacagttcgggcgactggacgtgctggtcaacaatgcagccaccaacccgcaattctgcaatgtgctggacaccgacccaggggcgttccagaagaccgtggacgtgaacatccgtggttacttcttcatgtcggtggaggctggcaagctgatgcgcgagaacggcggcggcagcatcatcaacgtggcgtcgatcaacggtgtttcacccgggctgttccaaggcatctactcggtgaccaaggcggcggtcatcaacatgaccaaggtgttcgccaaagagtgtgcacccttcggtattcgctgcaacgcgctactgccggggctgaccgataccaagttcgcttcggcattggtgaagaacgaagccatcctcaacgccgccttgcagcagatccccctcaaacgcgtggccgaccccaaggaaatggcgggtgcggtgctgtacctggccagcgatgcctccagctacaccaccggcaccacgctcaatgtcgacggtggcttcctgtcctga

SEQ ID NO: 118558 - protein, 255 aa, Pseudomonas putida KT2440
MSKTHLFDLDGKIAFVSGASRGIGEAIAHLLAQQGAHVIVSSRKLDGCQQVADAIIAAGGKATAVACHIGELEQIQQVFAGIREQFGRLDVLVNNAATNPQFCNVLDTDPGAFQKTVDVNIRGYFFMSVEAGKLMRENGGGSIINVASINGVSPGLFQGIYSVTKAAVINMTKVFAKECAPFGIRCNALLPGLTDTKFASALVKNEAILNAALQQIPLKRVADPKEMAGAVLYLASDASSYTTGTTLNVDGGFLS

SEQ ID NO: 118559 - DNA, 744 bp, Xylella fastidiosa Temecula1
  CDS (1)..(744): transl_table=11
atgaacaaacccttacagggtgaggttgcgttagtgactggtgctagccgtggcatcggcgctgcagtggctgatcttttggctgatcatggggctaccgtgattggtacggcaacgtctgcttctggtgcgcagttaattggtgatcgtttggccttgctgggtggtcatggtcgcgctctggatgtgaccgatactgctgcagttggtgcattggtagaggagattgctgaacaattcggttcggtttcgattctggttaataatgctggtatcacacgagacaatctgttgatgcggatgaaggatgaggattgggagtccattgttgacactaatctgagcagtatttttcgtaccagcagggcggtggttcgcaacatgatgaaggcgcgcaagggccgtatcatcaacattgcttcggttgttggcgtgactggtaatgccggtcaggcaaactatgctgcggccaaagctggtgtgattgggtttaccaagtcactggctaaggaagttggcccacgtgggatcactgtcaatgtggtcgctccggggtttatcgataccgacatgactcgtgtgctgtctgagggtgtacgcaatgatatccttaaccacgtcccgcttggtcatttaggtgatccggtggatattgcgaacgcggtcgcttttctggctgccccagcagcacgctacattactggtgagacattacatgtcaacggtggtatgtatatgccgtga

SEQ ID NO: 118560 - protein, 247 aa, Xylella fastidiosa Temecula1
MNKPLQGEVALVTGASRGIGAAVADLLADHGATVIGTATSASGAQLIGDRLALLGGHGRALDVTDTAAVGALVEEIAEQFGSVSILVNNAGITRDNLLMRMKDEDWESIVDTNLSSIFRTSRAVVRNMMKARKGRIINIASVVGVTGNAGQANYAAAKAGVIGFTKSLAKEVGPRGITVNVVAPGFIDTDMTRVLSEGVRNDILNHVPLGHLGDPVDIANAVAFLAAPAARYITGETLHVNGGMYMP

SEQ ID NO: 118561 - DNA, 717 bp, Tropheryma whipplei TW08/27
  CDS (1)..(717): transl_table=11
atgtctagcaagagaacagtttttataaccgggggaaaccgggggataggtcgcgcaattgctgaaaagttcaagagcttcaactacaatgtcgcgattggagtaaggcaacctgaagctttcaaggatgctggctgccttgcagttgagtgcgatgtaaccgtctctagctcgcttacaaaagctttcaaagaggtagaagagagattcggttttgttgatgtggcgattgcaaatgctggaattatcagggacacacttgttctacggatgaaagaggatgattttcaacatatccttgataccaatctgacaggcgcgtggaggcttgccaaacttgcgagtagatcgatgatgcgaaataagtttggtcgcatagtttttatatcaagtgtttctgctgggatgggtggtattggtcagacaaattattcagcatctaaggctggaatgataggccttgctagagctttaacccgtgagcttgcaagttttggcattactgtgaatgttgtagctcccggaatagtgcagacggatatggtatcgtcaatccctgacaatttgagagaggaattgatacaaagggtgccaatacgtcgaattggtctgccagaggaagttgctaatgccgttttttggctttccagtgatgaggcaagttatgtatccggagttgtattgcctgtggacggtggcttatcaatgggtttttaa

SEQ ID NO: 118562 - protein, 238 aa, Tropheryma whipplei TW08/27
MSSKRTVFITGGNRGIGRAIAEKFKSFNYNVAIGVRQPEAFKDAGCLAVECDVTVSSSLTKAFKEVEERFGFVDVAIANAGIIRDTLVLRMKEDDFQHILDTNLTGAWRLAKLASRSMMRNKFGRIVFISSVSAGMGGIGQTNYSASKAGMIGLARALTRELASFGITVNVVAPGIVQTDMVSSIPDNLREELIQRVPIRRIGLPEEVANAVFWLSSDEASYVSGVVLPVDGGLSMGF

SEQ ID NO: 118563 - DNA, 747 bp, Bacteroides thetaiotaomicron VPI-5482
  CDS (1)..(747): transl_table=11
atgggattattagacggaaaaacagccattgtaaccggtgccgcccgtggtattggcaaggctatcgctctgaagtttgctgccgaaggtgcaaacattgcatttactgacctggtcattgacgaaaatgcagaaaaaacaagggtagaactggaagcaatgggtgtgaaagccaaaggttatgcttctaacgctgctaactttgaagatactgcaaaggtcgtagaagaaatccataaggacttcggacgtatcgatattctggtgaacaatgccggtatcactcgtgacggtctgatgatgcgtatgagcgaacaacaatgggatatggtaatcaatgtgaacctgaagtctgcatttaacttcatccacgcttgtacacctgttatgatgcgtcagaaagctggtagcattatcaacatggcatctgtagtgggtgttcacggtaatgcgggacaggctaactatgctgcttccaaagccggcatgattgcattggccaagtctatcgcacaagaactgggctctcgtggcatccgtgccaacgccattgctccgggattcatcctgacagatatgactgctgctctttctgacgaagtgagagctgaatgggcaaagaaaattcctttgcgtcgtggcggtactcctgaagatgtggcaaacatcgctaccttcctggcatcagatatgtcttcttacgtatcaggtcaggtgattcaggtagatggtggtatgaatatgtaa

SEQ ID NO: 118564 - protein, 248 aa, Bacteroides thetaiotaomicron VPI-5482
MGLLDGKTAIVTGAARGIGKAIALKFAAEGANIAFTDLVIDENAEKTRVELEAMGVKAKGYASNAANFEDTAKVVEEIHKDFGRIDILVNNAGITRDGLMMRMSEQQWDMVINVNLKSAFNFIHACTPVMMRQKAGSIINMASVVGVHGNAGQANYAASKAGMIALAKSIAQELGSRGIRANAIAPGFILTDMTAALSDEVRAEWAKKIPLRRGGTPEDVANIATFLASDMSSYVSGQVIQVDGGMNM

SEQ ID NO: 118565 - DNA, 738 bp, Enterococcus faecalis V583
  CDS (1)..(738): transl_table=11
atggaattaacaggaaaaaacgtatttattactggaagcactcgtgggattggtaaagcagttgcgttagcttttgcgaaagagggcgccaatattgtcttaaacggtcggagtgagattacgccagaacaacgacaagaaattgaagcctttggggtaaaatgtattggcctttctggagatatttccgattttgatgcggcaggtgagatgattcaagcaacagttgaccaattaggctcgattgatattctggtgaataacgctgggattacgaatgacaaattattattacgaatgacaaaagaggattttaatgcctgtttagatattaacttggtaggaacttttaacatgacccagcaagcggttaaacgtatgatgaaacaacgaagtggtcggattattaatatggctagcgtttctggtttaatgggaaatgttggtcaagcaaactacgctgcgagtaaagccggtgtcgttggttttactaaatcggtggcacgagaagttgcgccgcgcggtattacctgcaatgcgattgcaccagggtttatccaaacagaaatgacggatgttttatcggaaaaagttaaaacacaaatgaatgcgcaaattcccttacaaacgtttgggcaagtcgaagatgtcgcagctacagcgattttcttagctaaaagtccctatattactgggcaagtcgtgaatgtcgatggcggcttagtcatgcacggataa

SEQ ID NO: 118566 - protein, 245 aa, Enterococcus faecalis V583
MELTGKNVFITGSTRGIGKAVALAFAKEGANIVLNGRSEITPEQRQEIEAFGVKCIGLSGDISDFDAAGEMIQATVDQLGSIDILVNNAGITNDKLLLRMTKEDFNACLDINLVGTFNMTQQAVKRMMKQRSGRIINMASVSGLMGNVGQANYAASKAGVVGFTKSVAREVAPRGITCNAIAPGFIQTEMTDVLSEKVKTQMNAQIPLQTFGQVEDVAATAIFLAKSPYITGQVVNVDGGLVMHG

SEQ ID NO: 118567 - DNA, 750 bp, Coxiella burnetii RSA 493
  CDS (1)..(750): transl_table=11
atgcctacactgctcaaaggaaaaaccgccctcgtaacgggcgcttctcggggcatcggcgcttccattgcggccgaactcgggcgccagggagctatcgttcttggaacggccaccacggaggcgggggcaaagaagattacccagatgctgatggaagaaaaagtggagggaaaaggctatgctctcgatatttgtgatcaagaaaggatgaaagcaattctatccgatattcaaggtgattttgacgcgccatcgatcttggtcaacaatgcggggataacacgggataatatccttctgcgaatgagatccgaacagtgggacgaggtcatcaatacgaacctcaacggcgtttttcatctcacgaaagcttgcctaaaatcgatggtaaaggctcgctcgggacgaattattaatataagttcagtagtggcgacaatgggcaatgcgggtcaagccaactatgtggctgccaaagcgggacttgttgggtttaccaaagtcgttgctatggaatatgcggcctacggaatcaccgctaattgtatcgctcccggctttattgaaacggaaatgacaggcgcattatccgaacagcaacgagaagcgatactggcccgagtgccaatgaaacgcatgggtcagcctaatgaaatcgctcaggcggcggcttttttggcctctgacaacgcggcgtatattacgggggagacattgcatatcaacggtggaatgtgtatggtatag

SEQ ID NO: 118568 - protein, 249 aa, Coxiella burnetii RSA 493
MPTLLKGKTALVTGASRGIGASIAAELGRQGAIVLGTATTEAGAKKITQMLMEEKVEGKGYALDICDQERMKAILSDIQGDFDAPSILVNNAGITRDNILLRMRSEQWDEVINTNLNGVFHLTKACLKSMVKARSGRIINISSVVATMGNAGQANYVAAKAGLVGFTKVVAMEYAAYGITANCIAPGFIETEMTGALSEQQREAILARVPMKRMGQPNEIAQAAAFLASDNAAYITGETLHINGGMCMV

SEQ ID NO: 118569 - DNA, 744 bp, Nitrosomonas europaea ATCC 19718
  CDS (1)..(744): transl_table=11
atgctactggaacataaaatcgcactggtaacgggcgcaagccgtggaatcggcaaagctatcgcacttgagctgggaaagcatggcgctaccgtcatcggaaccgccacttccgaaactggagccggccatatcagtcagtatctcagcgaagctcgcatttcggggatggggctgatcatggatgtcagcaacatcgagcatatcaagagtggtattgagaccatacaacaatcactgggagatgttgcaatactgatcaacaacgccggtatcacacgagacaacctgctggcccgcatgaaggacgatgaatgggataacgttatccagaccgatttgaaatccgtgttctgtctcagtcgtgccgtactgcgcaccatgatgaaagcacgcagcggtcggatcatcaatatctcatcagtagtgggcgcaaccggaaatcctggacaaaccaactatgcagcggccaaggctgggatgatcggtttcagcaagtcactcgcaaaagaaattggcagcagaaacatcactgtgaactgtgtagctccaggctttatcgataccgatatgacccgttctctttcgccagatcaacaacaatcactgattcagcatatccctctcggaagattcgggcgccctgaagatgtcgctgcggctgtcgtttttctggcttctccggcagcagactatatcactggagccacacttcacgtcaatggcggaatgtatatggagtga

SEQ ID NO: 118570 - protein, 247 aa, Nitrosomonas europaea ATCC 19718
MLLEHKIALVTGASRGIGKAIALELGKHGATVIGTATSETGAGHISQYLSEARISGMGLIMDVSNIEHIKSGIETIQQSLGDVAILINNAGITRDNLLARMKDDEWDNVIQTDLKSVFCLSRAVLRTMMKARSGRIINISSVVGATGNPGQTNYAAAKAGMIGFSKSLAKEIGSRNITVNCVAPGFIDTDMTRSLSPDQQQSLIQHIPLGRFGRPEDVAAAVVFLASPAADYITGATLHVNGGMYME

SEQ ID NO: 118571 - DNA, 765 bp, Streptomyces rochei
  CDS (1)..(765): transl_table=11
atgggtacgctggcaggcaagacggccctggtcacaggggcgggacggggcataggccggggcatcgcccgtcgcctggcggcggacggcgcgctggtcgccgtccactaccgggccgacgagaccgcggcacgcagcaccgtcgcgatgatcacggacagcggtggtcgcgccgtcatggtgcacgccccgctcggcgtgcccgacgacgcgcggcacctgtacgagcgattcgacgcggcgctgagggagcagggcgcggaaccggccctcgacatcctggtcaacaacgcggggaccaacacacggggctcggtgtccgatgtgacgccgccggacttcgacgagctgatggccctgcacgccaaggcgccgcttttcctcgtccagcacgcgctgggccggctgcgcgacggcggacggatcgtcaacatcagttccgccgcgaccagggtggcccttcccgagtccatcgcctactgcatggcgaaggcggccgtcgaggccatgactcgcgcgctggccaaggacctgggccggcgcggcatcacggtgaacgccgtggcgcccggattcgtgaagacggacatgaacgccggacgctgggccacacccgagggcgaggccgcgcacgcggccctctcggtcttccggcgcatgggagagaccgcggacatcgccgacatcgtcgccttcctcgcctcggacgactcccggtggatcaccggtcagtgcctggacgcctcgggcggcgggggcctgtag

SEQ ID NO: 118572 - protein, 254 aa, Streptomyces rochei
MGTLAGKTALVTGAGRGIGRGIARRLAADGALVAVHYRADETAARSTVAMITDSGGRAVMVHAPLGVPDDARHLYERFDAALREQGAEPALDILVNNAGTNTRGSVSDVTPPDFDELMALHAKAPLFLVQHALGRLRDGGRIVNISSAATRVALPESIAYCMAKAAVEAMTRALAKDLGRRGITVNAVAPGFVKTDMNAGRWATPEGEAAHAALSVFRRMGETADIADIVAFLASDDSRWITGQCLDASGGGGL

SEQ ID NO: 118573 - DNA, 750 bp, Streptomyces rochei
  CDS (1)..(750): transl_table=11
atggggcagcttgacggaaagaccgccgtggtaaccggtggcaacagtggcatcggactggccagcgccaagcgcttcgccgccgagggcgcgcatgtattcatcaccgggcgacggcaggaggcactggacgccgcactcgccgagatcggcccgaacgccaccgccgtccgcagcgacatctccgatccggccgacatcgaccggctctacgccgccgtcgccgaccaggggcggcgggtggacgtcctgttcgccaacgcgggcggcggtgagttctctaccctggagcaagtcaccgagcagcacttcgacaccaccttcgacaccaatgtgcggggcaccctcttcactgtccagaaggcgttgccgctgctgaacgacggtgcctcggtgatcctcaccggctccaccgccgcgacctccggtggcgaggcgttcggcgtctacgccgcgtccaaagccgccatccgttcgttctcccgtacctgggccaacgagctcaggcaccgagagatccgtgtcaacaccctcgtccccggccccatcgagacacccgggaacgccggcctcgcccccgatgcggacgaggcgaccaagctgtggggcttcttcgcgagccaggtgcccctgggccgcatgggccgccccgatgaggcagccgccgcggcgctcttccttgccagcgaccagagcagcttcatcaccggtacggaactcttcgtcgacggcggcctcaaccaaatctga

SEQ ID NO: 118574 - protein, 249 aa, Streptomyces rochei
MGQLDGKTAVVTGGNSGIGLASAKRFAAEGAHVFITGRRQEALDAALAEIGPNATAVRSDISDPADIDRLYAAVADQGRRVDVLFANAGGGEFSTLEQVTEQHFDTTFDTNVRGTLFTVQKALPLLNDGASVILTGSTAATSGGEAFGVYAASKAAIRSFSRTWANELRHREIRVNTLVPGPIETPGNAGLAPDADEATKLWGFFASQVPLGRMGRPDEAAAAALFLASDQSSFITGTELFVDGGLNQI

SEQ ID NO: 118575 - DNA, 759 bp, Rhodopirellula baltica SH 1
  CDS (1)..(759): transl_table=11
atggatctctctctgtcggttgatttgaaagatcaagtcgccatcgtcaccggtgccagccaaggcctcggacgcgctgtcgccgtcgcactgggacaaaacggagcccatgtggtctgcgtcgctcgcaatgcagagaagctggccgccaccgtcgccgaaatcgaagcggccggcggaaaaggcgaagcactgccatgcgacgtcaccgatcgcaaagcggccgcggaagccatcgagggaactcacaaaaagcacggtcgtctggatatcctggtcaacaacgccgggatcactcgcgacaaactgatgcgtggcatgtccgacgaagaatgggattccgtcatcgccaccaacctgacaagttgcttcgtgtgctgccgatcggccgccggagtgatgcggcggagcaagtacggccgaatcatcaacatggccagtatctcgggcctgatcggcaaccccggtcaagccaactactcggccagcaaagcgggcatgattggaatgacgcgaacgatgagcaaagagctcgtctcacgaggcgtgaccgtcaacgcggttgcccccggtttcatcgcgagcgaaatgacggcggaacttggcgaagtcgttttggaagaagtcaagaaacgaatccctgccaagcgagttggacaacccgaggacgtcgccgcggcggtattgttcttggccagtcgcgatgccagctacatttcagggcaaaccatcgtcgttgacggtggaatggtcggctaa

SEQ ID NO: 118576 - protein, 252 aa, Rhodopirellula baltica SH 1
MDLSLSVDLKDQVAIVTGASQGLGRAVAVALGQNGAHVVCVARNAEKLAATVAEIEAAGGKGEALPCDVTDRKAAAEAIEGTHKKHGRLDILVNNAGITRDKLMRGMSDEEWDSVIATNLTSCFVCCRSAAGVMRRSKYGRIINMASISGLIGNPGQANYSASKAGMIGMTRTMSKELVSRGVTVNAVAPGFIASEMTAELGEVVLEEVKKRIPAKRVGQPEDVAAAVLFLASRDASYISGQTIVVDGGMVG

SEQ ID NO: 118577 - DNA, 735 bp, Wigglesworthia glossinidia endosymbiont of Glossina brevipalpis
  CDS (1)..(735): transl_table=11
atgaattttaataaaaaaatttcattagtgacaggagctaatagaggaattggaaaatcaatagcaaaagaactattaaaaagaaattctattgttattggaacatctacttctaaagaaggagtggatataataaacaattatgtaaaaaagcaaggaaaaggaattgtattaaatttattagataaaaattcaatcaaattatgcatagaaaaaataaaaaaaaatttcggagatgtagatatacttataaacaatgcaggaactaataaagatgaattgttaatcagaatgaaagaaaatagtttaaatcatgtaataaatataaatcttatatctgtttttataatatctaaaatagttataaaaggaatgataaaaaaaagatacggaagaattattaacattggatcagtatctggattcacaggtaatataggtcaaacaaattattctgcgtctaaatctggattaacaggattcaccaaatctttggctagagaagttgcaaaaaaaggaattacggttaatatggtatctccgggatttattaaaacagatatgacaaaatctttatctgaaaataacaaaaaaaatatattatctaatataccagtaaacagatttggatctacaaaagacgtagcaaatgcagttattttttttgcttctgatttatcatcttatattaccggagaaactatgcacgttaatggcggaatatatatgaaataa

SEQ ID NO: 118578 - protein, 244 aa, Wigglesworthia glossinidia endosymbiont of Glossina brevipalpis
MNFNKKISLVTGANRGIGKSIAKELLKRNSIVIGTSTSKEGVDIINNYVKKQGKGIVLNLLDKNSIKLCIEKIKKNFGDVDILINNAGTNKDELLIRMKENSLNHVININLISVFIISKIVIKGMIKKRYGRIINIGSVSGFTGNIGQTNYSASKSGLTGFTKSLAREVAKKGITVNMVSPGFIKTDMTKSLSENNKKNILSNIPVNRFGSTKDVANAVIFFASDLSSYITGETMHVNGGIYMK

SEQ ID NO: 118579 - DNA, 735 bp, Candidatus Blochmannia floridanus
  CDS (1)..(735): transl_table=11
atgacttttaagggaaaaattgtattagtgacgggagcgcgtagtggaattggtcaagctatttctgaacaatttattaaatatggggctatagtaataggtactgctactgattatataggagtaagagatattaatgtacgtttcggtaaccaaggtaaaggtatgcaattaaatgttacgaatcagcattcaattgattgttgtatacaggaagtacgttcggagtttggagatattaatatattagtaaataatgctggtattgttcaggataatattttattacatatgatggaaaatgaatggcaatcagtgatagatgtaaatttaactgcagtatatcgtatgtctaaagctgtaatcaaaccaatgatgaaaaatcgttacggtagaattattaatataggttctataataggtatgactggaaatgttggtcaagtaaattattcagcatctaaatcgggattaattgggttaaccagatcattagctagagaggtggcgtctagaggtattacagtaaatttggtaacaccaggttttatttgtactaatatgacaaaaaaattaaccgataaacaaaaaaaaaatattttatctaaaattccaattgctcgttttggagagcctcaagatgttgcaaatgcagtgatattttttgcatctgataattcagaatatattacgggtcagaccatacatattaatggaggtatgtatatggggtaa

SEQ ID NO: 118580 - protein, 244 aa, Candidatus Blochmannia floridanus
MTFKGKIVLVTGARSGIGQAISEQFIKYGAIVIGTATDYIGVRDINVRFGNQGKGMQLNVTNQHSIDCCIQEVRSEFGDINILVNNAGIVQDNILLHMMENEWQSVIDVNLTAVYRMSKAVIKPMMKNRYGRIINIGSIIGMTGNVGQVNYSASKSGLIGLTRSLAREVASRGITVNLVTPGFICTNMTKKLTDKQKKNILSKIPIARFGEPQDVANAVIFFASDNSEYITGQTIHINGGMYMG

SEQ ID NO: 118581 - DNA, 753 bp, Bordetella bronchiseptica RB50
  CDS (1)..(753): transl_table=11
atggaaaaaacctccacggaactgcagggcaagatcgcgctggtgaccggcgcgacgcgcggcatcggccgcgccatagcccaggaactggcggcgcgcggcgccacggtggtcggtacggccacgtccgaggcgggcgcccaggccatcaccgaggcgctggccgcccagggcgggcggggcgtggtgctggacgtgaccgatgcccaggcctgcgaggcgctgatcgagcagcttggcaaggatggcggcggcccgcacatcctggtcaacaacgccggcatcacgcgcgacacgctggccatgcgcatgaaggacgacgactggtcggccgtcatcgataccaacctggcggcggtcttccgcctgtcgcgcgccgtgctgcgcggcatgatgaaggcgcgttggggccggatcatcaatatcacgtcggtggtgggcgcaagcggcaacgctggccaggccaactacgccgccgccaaggccggcgtggcgggcatggcgcgggcgctggcgcgcgagctcggcagccgcaacatcaccgtcaactgcgtggcacccggctttatcgataccgatatgacgcgtatcctgggcgaagaccagacggcggcgctgctgcagcagattccgctgggccgcctgggcgcgcccgccgacatcgcccatgcggtcgcctttctggccgggccgcaggcgggttacattaccggtaccacgctgcacgtcaacggcggcatgtatatgcaatag

SEQ ID NO: 118582 - protein, 250 aa, Bordetella bronchiseptica RB50
MEKTSTELQGKIALVTGATRGIGRAIAQELAARGATVVGTATSEAGAQAITEALAAQGGRGVVLDVTDAQACEALIEQLGKDGGGPHILVNNAGITRDTLAMRMKDDDWSAVIDTNLAAVFRLSRAVLRGMMKARWGRIINITSVVGASGNAGQANYAAAKAGVAGMARALARELGSRNITVNCVAPGFIDTDMTRILGEDQTAALLQQIPLGRLGAPADIAHAVAFLAGPQAGYITGTTLHVNGGMYMQ

SEQ ID NO: 118583 - DNA, 738 bp, Chromobacterium violaceum ATCC 12472
  CDS (1)..(738): transl_table=11
atgagtctgcaaggcaaagtggcgctggtgaccggcgcctcgcgcggcataggcgcggcgatcgccgacgcgctggccgccgagggcgccgtcgtcatcggcaccgccacgtcggaatccggcgcggccgccatccatgagcgcctgtccgccacgggcggcgcgggccgcgtgctgaacgtcaccgaggagggcgccgtcgacgcgctgatcgaatcggtggagaaggacttcggcgcggtcgcgattctggtcaacaacgccggcatcacccgcgacggcttgttgatgcggatgaaggacgaggactgggacgccatcatggacaccaatctgaaatcggtgttcaagacctccaaggccgtgatgcgcggcatgatgaaggcccgcagcggccgcatcatcaatatcgcttccgtggtcggcgcgatgggcaatgccggccaggccaactacgcggccgccaaggcgggcatcatcggcttcaccaagtcgatggcgcgcgaggtcggcagccgcaacatcaccgtcaactgcgtggcgccgggcttcatcgacaccgacatgacccgcgcgctgccggaagcgcagcgcgaggcgctggtgggccaaatttccctaggccgcctgggcgaagccaaggacatcgccgatgccgtggtattcctggcatcggaccgcgcggcttatattacgggccagactttgcacgtgaacggcggcatgctgatgccttaa

SEQ ID NO: 118584 - protein, 245 aa, Chromobacterium violaceum ATCC 12472
MSLQGKVALVTGASRGIGAAIADALAAEGAVVIGTATSESGAAAIHERLSATGGAGRVLNVTEEGAVDALIESVEKDFGAVAILVNNAGITRDGLLMRMKDEDWDAIMDTNLKSVFKTSKAVMRGMMKARSGRIINIASVVGAMGNAGQANYAAAKAGIIGFTKSMAREVGSRNITVNCVAPGFIDTDMTRALPEAQREALVGQISLGRLGEAKDIADAVVFLASDRAAYITGQTLHVNGGMLMP

SEQ ID NO: 118585 - DNA, 747 bp, Porphyromonas gingivalis W83
  CDS (1)..(747): transl_table=11
atgaaattattggagaacaaggtagctctcattacgggagccggacgcggtatcggccgtgccatagcttataagtatgcaacggaaggtgccgatgtggctattactgatctgaatatcgatgagggcgtacaggctttcgtagaagaactcaaagggctcggagtacgtgcagcggcatacgcttccaatgcagcggatttcgatgcagcacatacagtggtggaacagatcaaggctgacttcggtcggatcgatattttggtgaacaatgccggtattactcgcgatggccttatgatgcgtatgaccgagcaacaatgggatgccgtgatcaacgttaatctgaagtcagcgttcaacatgatccatgccgtgactcccatcatgatgggacagcgcaccggcagtatcatcaatatggcttctgtggtaggtgtatcaggcaatgcaggacaatccaactactcagcttctaaagccggtatgatcggtttggccaagagtgtcgccaaagagctgggctcacgtggcgtgcgtgccaatgcgattgcaccgggttttatcatcaccgatatgactgccgtgcttagcgaagaagtgaagaagcaatgggcggcacagatacctctgcgtcgtggtggtacgcccgaagatgtggctaacgtagctaccttccttggcagtgacctctcttcgtacgtgacgggacaggtagtccacgtttgtggcggtatgaatatgtaa

SEQ ID NO: 118586 - protein, 248 aa, Porphyromonas gingivalis W83
MKLLENKVALITGAGRGIGRAIAYKYATEGADVAITDLNIDEGVQAFVEELKGLGVRAAAYASNAADFDAAHTVVEQIKADFGRIDILVNNAGITRDGLMMRMTEQQWDAVINVNLKSAFNMIHAVTPIMMGQRTGSIINMASVVGVSGNAGQSNYSASKAGMIGLAKSVAKELGSRGVRANAIAPGFIITDMTAVLSEEVKKQWAAQIPLRRGGTPEDVANVATFLGSDLSSYVTGQVVHVCGGMNM

SEQ ID NO: 118587 - DNA, 744 bp, Wolinella succinogenes DSM 1740
  CDS (1)..(744): transl_table=11
atgaaattcagcggaaaaaatgtcctcatcacgggctctagccgaggaatcggagccgatattgcacgagttttggccgaaatgggcctcaaagtctggatcaattaccgaagccaaagctccctagccgatgagctcaaagcagagattgaggccaagggggggcaagcggcagttatctcttttgatgccaccgatgaagaggctttcatcagtggaattaagaccatcattgatgctgatggagagctcgcttacctcgtcaacaacgcaggaatcaccaacgacaaactcgccattcgaatgaagaccgaagagtttcgctccgtgattgaggccaacctcacttcggcttttatcggaagccgcgaagcccttaagagcatgagcaagcaacgctttggaagcgtggttaatatctcctctatcgttggagagaggggaaatgcagggcagaccaactactcagccagcaaaggaggcatgatcgccatgaccaaatcctttgcctttgagggcgctcctagaaatgtccgattcaactgcgtcaccccaggattcatccaaacggatatgacgcatgggctcaaagaggaggtcaaagaggcctacatcaaaaatattcctctagggcgttttggcgattctaaagagatcgctcatgccgttgcctatcttttgagcgactactccagctacatcactggcgagattctcaaggttaatggcggtctttatatgtag

SEQ ID NO: 118588 - protein, 247 aa, Wolinella succinogenes DSM 1740
MKFSGKNVLITGSSRGIGADIARVLAEMGLKVWINYRSQSSLADELKAEIEAKGGQAAVISFDATDEEAFISGIKTIIDADGELAYLVNNAGITNDKLAIRMKTEEFRSVIEANLTSAFIGSREALKSMSKQRFGSVVNISSIVGERGNAGQTNYSASKGGMIAMTKSFAFEGAPRNVRFNCVTPGFIQTDMTHGLKEEVKEAYIKNIPLGRFGDSKEIAHAVAYLLSDYSSYITGEILKVNGGLYM

SEQ ID NO: 118589 - DNA, 747 bp, Gloeobacter violaceus PCC 7421
  CDS (1)..(747): transl_table=11
atgacgggattgctcacaggcaaagttgccctggtcaccggcgccggccgcggcatcggccgcgcctgcgcccttgccctcgcctcggagggagccgccgtggccgtcaactacagccgctccgaagaggccgcccagcaagtggtggcggcaattgaagcggccggggggcaggctgtcgccctcaaggcggatgtggccgaccccgagcaggtggagcgcctgtttgcagacttgctcgccaagtacggacggctcgacgccctggtcaacaacgccgggattacccgcgacggtctaatactgcgcatgtcgctcgaagactggaacgatgtggtatccctcaacctcaccggcaccttcttgtgcctgaaggcggcaagccggatcatgctcaagcagcgctccgggcgggtggtgaatatctcttcgacctcgggagtggccggcaacgccggtcaggccaactacagcgccgccaaggccggggtgttgggcctcacccgctccgccgcccgcgaactgggatcgcggggaatcaccgtcaacgcggtagcccccggcttcattgccaccgatatgaccagtgccctggaactggaaccgatcctcgctcaggtgccgctcaggcgcgtcggtcaacctgaggaagtagccgggctggtgcggtttttgtgcgccgacccggccgccgcctacatcacaggccaggtgattacgatcgacggcggcatggtgatggcctga

SEQ ID NO: 118590 - protein, 248 aa, Gloeobacter violaceus PCC 7421
MTGLLTGKVALVTGAGRGIGRACALALASEGAAVAVNYSRSEEAAQQVVAAIEAAGGQAVALKADVADPEQVERLFADLLAKYGRLDALVNNAGITRDGLILRMSLEDWNDVVSLNLTGTFLCLKAASRIMLKQRSGRVVNISSTSGVAGNAGQANYSAAKAGVLGLTRSAARELGSRGITVNAVAPGFIATDMTSALELEPILAQVPLRRVGQPEEVAGLVRFLCADPAAAYITGQVITIDGGMVMA

SEQ ID NO: 118591 - DNA, 735 bp, Photorhabdus luminescens subsp. laumondii TTO1
  CDS (1)..(735): transl_table=11
atgagattagatggaaagattgcattagtaacaggcgctagccgtgggatcggccgtgcaactgctgagctattagcagagcgtggagcctatatcattggtacagcaacaagcgataaaggcgctgaagtcattagtgcttacctcggtgaaaaaggtaaaggttttgtactgaatgtcactgatccggaatcgattgaacagcttatgtctaccatccgaacagagcatggcgggcttgacattttagtgaacaatgcgggtatcaccggtgataatctggtgatgcgcataaaggatgatgagtggcagcatgttattgacactaatctttcatctgttttccgtatgacaaaagcggcaatgcgcttcatgataaaaaaacgttatggtcgtatcatctctattggttctgttgttggatcgatggggaacgctgggcaggcaagctatgcagcggcgaaagcagggcttgttggtttcagtaagacattggctcgcgaagtgatttcccgtggtattactgttaacgttgtcgcgccagggcttattgaaactgatatgctaagagcgttgccagaggagcagttggcgaacttttcgaatgatatccccgctaaacggcttggggatgtaaaagaaattgctagtgctgtggctttcttcgcttctgatgaagcggcttacatcacaggcgaaacattacatgtcaatggcggcatgtatatgaactaa

SEQ ID NO: 118592 - protein, 244 aa, Photorhabdus luminescens subsp. laumondii TTO1
MRLDGKIALVTGASRGIGRATAELLAERGAYIIGTATSDKGAEVISAYLGEKGKGFVLNVTDPESIEQLMSTIRTEHGGLDILVNNAGITGDNLVMRIKDDEWQHVIDTNLSSVFRMTKAAMRFMIKKRYGRIISIGSVVGSMGNAGQASYAAAKAGLVGFSKTLAREVISRGITVNVVAPGLIETDMLRALPEEQLANFSNDIPAKRLGDVKEIASAVAFFASDEAAYITGETLHVNGGMYMN

SEQ ID NO: 118593 - DNA, 738 bp, Rhodopseudomonas palustris CGA009
  CDS (1)..(738): transl_table=11
atgttcgatctgacaggcagaaccgcgctggtcaccggcgcaaccggtggcatcggcggcgcgatcgcccaggcgctgcacggccagggcgccaccgtggcgatctccggcacgcggcgcgaggcgctcgacgcgctggccgccaagctcggcgaacgcgtgcacgtgctgccttgcaatctgtcggacgcggcggacgtcgaggcgctggtgccggctgcggccgaagccatgggcgggctcgacatcctagtatgtaacgcaggtatcacccgcgacaatctgttcgtgcaattgcgcgacgaggattgggacgaggtgatcaaggtcaacctcacggcgaccttccggctgacgcgcgctgccaccaagctgatgatgcgcaagaagttcggccgcatcatcgcgatcacttcggtggtcggtgtcaccggcaatccggggcagggcaactacacggcctcgaaggcgggcttgattggcatgatcaagacgatcggcgccgaatacgccaagcgcaacgtcacggcgaactgcattgcgccgggcttcatcgcgacgccgatgaccgacgttctcaatgacaagcagcgcgaggcgattctcggcaaggtgccggccggccggctcggcacgccggacgacattgcggctgcggcggtttatctcagttcgaatgaggccgcctacgtcaccggtcagaccattcacgtcaacggcgggatggcgatgatctga

SEQ ID NO: 118594 - protein, 245 aa, Rhodopseudomonas palustris CGA009
MFDLTGRTALVTGATGGIGGAIAQALHGQGATVAISGTRREALDALAAKLGERVHVLPCNLSDAADVEALVPAAAEAMGGLDILVCNAGITRDNLFVQLRDEDWDEVIKVNLTATFRLTRAATKLMMRKKFGRIIAITSVVGVTGNPGQGNYTASKAGLIGMIKTIGAEYAKRNVTANCIAPGFIATPMTDVLNDKQREAILGKVPAGRLGTPDDIAAAAVYLSSNEAAYVTGQTIHVNGGMAMI

SEQ ID NO: 118595 - DNA, 735 bp, Wolbachia endosymbiont of Drosophila melanogaster
  CDS (1)..(735): transl_table=11
atgtttggattggaaagcagaaagttcctgattactggtgcatcaggcggaatagggcaagcaattgtaaaaattatgcacaaagccggagcaactttatgtgtttctggcacaaaaaaagaagtgctcgaagaagttgctaaacaatatgaaaaaaatatgcacgtactcccttgtgatttatcaaatgctgaggaagtaaatcaactagtaaacagagcaagtgagttgatggaaggctttgacgggcttgtatgcaacgcgggcattacgcaagacagtttattattgagaatgacagatgaaacatggcaaaaagtaattgatattaacttgagttctacatttaagctgagtagagaagcatgcaggaaactaattaagaataattggggaagaattataaatatttcctcaataatagggctgacaggaaacgccgggcaagcaaattatgcagcgtctaaagctggaataatagctatgagcaaatctatagcaaaagaagttgcaagtcgtaatataacagtaaattgtattgctcctgggtttatagatactaaaatgactgaagttttaaatgaagtgcaaaagggaaaaatattagataatattccaatgaaaagaatgggaacaggggaagaaatagcagcaggggtcttatttttagcaagtgatgaagcaaaatatataacagggcatgtgcttaacattaatggtgggttatttatgtag

SEQ ID NO: 118596 - protein, 244 aa, Wolbachia endosymbiont of Drosophila melanogaster
MFGLESRKFLITGASGGIGQAIVKIMHKAGATLCVSGTKKEVLEEVAKQYEKNMHVLPCDLSNAEEVNQLVNRASELMEGFDGLVCNAGITQDSLLLRMTDETWQKVIDINLSSTFKLSREACRKLIKNNWGRIINISSIIGLTGNAGQANYAASKAGIIAMSKSIAKEVASRNITVNCIAPGFIDTKMTEVLNEVQKGKILDNIPMKRMGTGEEIAAGVLFLASDEAKYITGHVLNINGGLFM

SEQ ID NO: 118597 - DNA, 771 bp, Bdellovibrio bacteriovorus HD100
  CDS (1)..(771): transl_table=11
ttgcttaaaaggattttgcacatgagcggaaagtcgcttcaaggaaagaaaattgttgtcactggtggcagccgcggaattggcgctgctatcgttaagcttcttgctgatgaaggcgctcaagttgccttcacttactcttcccgcgaagaggccgctcaacaggtggctcactctttgaccggcgaaggtcacttttacatcaaaatggacatcgcgaacgaagaatctgtgaactctgctgtagatcacattctggaaaaatggagcgacatcgacggcgttgtgaacaatgccggcatcaccaaagacgggttgcttctgcgcatgaaatcagaagatttcgattctgtggtgaacaccaacctgcgcggcaccttcctggtgaccaaagcctttaccaaacccatgatgaaagcgcgcaaaggttccatcgtgaacatcgtgtctatcattggtgagactggcaacgccggtcaggcaaactatgccgcttccaaagccggcacgattgcgtttagcaaatccgtggcgctggagctgggttcccgcaatgtgcgcgtgaacaacgtggcccctggatacatcgcaacggaaatgacagatgttctttctgaagatgtgaaatccaaaatgatggagaaaattcccttggcaaaaatcggcgaaggatccgacgtggcgcaagccgtgcgcttccttttgagcgacgaatccaagtacatcaccggtcacaccttggatgtgaacggcggaatgcacatgaactaa

SEQ ID NO: 118598 - protein, 256 aa, Bdellovibrio bacteriovorus HD100
MLKRILHMSGKSLQGKKIVVTGGSRGIGAAIVKLLADEGAQVAFTYSSREEAAQQVAHSLTGEGHFYIKMDIANEESVNSAVDHILEKWSDIDGVVNNAGITKDGLLLRMKSEDFDSVVNTNLRGTFLVTKAFTKPMMKARKGSIVNIVSIIGETGNAGQANYAASKAGTIAFSKSVALELGSRNVRVNNVAPGYIATEMTDVLSEDVKSKMMEKIPLAKIGEGSDVAQAVRFLLSDESKYITGHTLDVNGGMHMN

SEQ ID NO: 118599 - DNA, 741 bp, Bacillus cereus ATCC 10987
  CDS (1)..(741): transl_table=11
atgttaaaagggaaagtagcattagtaacgggtgcttcacgtggaattggtcgtgcaattgcgattgatttagcaaaacaaggggcaaatgttgtagtaaattatgctggtaacgagcaaaaggcaaatgaagtagttgatgaaataaagaaattaggttcggatgcaattgcagtaagagcagatgttgcaaatgctgaagacgttacaaatatggtgaaacaaactgtagatgtatttggacaagttgatattcttgtaaataatgcaggtgtaacaaaagataatttattaatgcgtatgaaagaagaagaatgggatacagttattaatacaaacctaaaaggtgtattcttatgtacaaaggcagtatctcgatatatgatgcgtcaacgtcatggacgtattgtaaatatcgcttctgttgtcggagtaacgggaaacccaggacaagcaaactatgttgctgctaaagcgggtgtaatcggattaacaaaaacatcagcaaaagagctagcaagccgcaatattactgtaaatgcaattgctcctggatttattgcgacagatatgacagacgtattagatgaaaatataaaagctgaaatgttaaaattaattcctgcggctcagtttggtgaagcgcaagatatcgcaaatgctgtaacgttttttgcttctgatcaaagcaaatatattacaggtcaaacgttaaatgttgatggcggtatggtaatgtaa

SEQ ID NO: 118600 - protein, 246 aa, Bacillus cereus ATCC 10987
MLKGKVALVTGASRGIGRAIAIDLAKQGANVVVNYAGNEQKANEVVDEIKKLGSDAIAVRADVANAEDVTNMVKQTVDVFGQVDILVNNAGVTKDNLLMRMKEEEWDTVINTNLKGVFLCTKAVSRYMMRQRHGRIVNIASVVGVTGNPGQANYVAAKAGVIGLTKTSAKELASRNITVNAIAPGFIATDMTDVLDENIKAEMLKLIPAAQFGEAQDIANAVTFFASDQSKYITGQTLNVDGGMVM

SEQ ID NO: 118601 - DNA, 753 bp, Strongylocentrotus purpuratus; identical to SEQ ID NO: 59498
  CDS (1)..(753)

SEQ ID NO: 118602 - protein, 250 aa, Strongylocentrotus purpuratus; identical to SEQ ID NO: 59499

SEQ ID NO: 118603 - DNA, 735 bp, Nasonia vitripennis; identical to SEQ ID NO: 59502
  CDS (1)..(735)

SEQ ID NO: 118604 - protein, 244 aa, Nasonia vitripennis; identical to SEQ ID NO: 59503

SEQ ID NO: 118605 - DNA, 753 bp, Nasonia vitripennis
  CDS (1)..(753)
atgacgccgggtcttttagctggaaaactcgctatcgtaacgggcgcgggcagtggcatcggcagggcagtctgcagactgttcgcgcgcgaaggtgccaaggtcatagccgctgatcaaaatgtcaaggccgccgaggaaacagccgacacactcgaaggatcggaacacgtgccggtggaaatcgacgtgaagagcccggagagcatcgagaatgccttcacccacgcgaaaaagcacttcttggtaccgccgaccatcgtcgtcaactcggctggtatcaccagagacaactttttgctgaagctcagcgaggaggacttcgatgctgtactcaatgtcaatctcaaagggacgttcctcataacgcagtatgctgccaaggtaatgataaactccggaatatcggagggcggctcggtgatcaacgtagcttcgatcattggaaaaactggaaacatcggccagagtaactatgcggcgtccaaggctggtgtcgaggctttcacgaaaactgcggcgatggagtttggacagtttggcattcgagtgaacgctgtgctacctggcttcatagaaacaccaatgactgacatggttcctgacaaagtgaagcaaatgtttgttgagaggatcccattgagacgtatgggaaaaccaatcgaagtggcagaattgattctgtttttggcctcggtaaagagctcctacatcaatggggcttccatcgatgtcactggtggtttgcactaa

SEQ ID NO: 118606 - protein, 250 aa, Nasonia vitripennis
MTPGLLAGKLAIVTGAGSGIGRAVCRLFAREGAKVIAADQNVKAAEETADTLEGSEHVPVEIDVKSPESIENAFTHAKKHFLVPPTIVVNSAGITRDNFLLKLSEEDFDAVLNVNLKGTFLITQYAAKVMINSGISEGGSVINVASIIGKTGNIGQSNYAASKAGVEAFTKTAAMEFGQFGIRVNAVLPGFIETPMTDMVPDKVKQMFVERIPLRRMGKPIEVAELILFLASVKSSYINGASIDVTGGLH

SEQ ID NO: 118607 - DNA, 768 bp, Nasonia vitripennis; identical to SEQ ID NO: 40425
  CDS (1)..(768)

SEQ ID NO: 118608 - protein, 255 aa, Nasonia vitripennis; identical to SEQ ID NO: 40426

SEQ ID NO: 118609 - DNA, 783 bp, Nasonia vitripennis; identical to SEQ ID NO: 40427
  CDS (1)..(783)

SEQ ID NO: 118610 - protein, 260 aa, Nasonia vitripennis; identical to SEQ ID NO: 40428

SEQ ID NO: 118611 - DNA, 795 bp, Anopheles gambiae str. PEST; identical to SEQ ID NO: 59506
  CDS (1)..(795)

SEQ ID NO: 118612 - protein, 264 aa, Anopheles gambiae str. PEST; identical to SEQ ID NO: 59507

SEQ ID NO: 118613 - DNA, 738 bp, Anopheles gambiae str. PEST
  CDS (1)..(738)
atggccactcctttagcaggaaagctagcccttgtgaccggtgccggttctggaattggccgtgcgacaaccaaactgttggcacgcgatggagcgatcgttgtagcggtcgatcgtaacgtacaggcggcccaggaaacgatcgcatcgctcacggcgggcgacaatgcggcctacgagatggacgtctcgtccggcgacagtgttgatgccgtgctgaaggaagtgattggccggtacaagcgcccaccgacagtggtcgttaattcggccggtattacccgcgataacttcctgctgaagatgcccgagtccgactttgatgcggtgatcaacgtgaacctgaagggtacgtggttggtgctgcaacgtttcggccgggccatgatcgagcacgagctggccggttcgatggtgaacgtgtcgtcgatcgttgcccgcaccggcaacatcggacagtcgaactattctccgagcaaggccggggtggaagcgatgaccaaggtggtggcacgcgagttcggccggtacaacatccgggtgaatgcgatcgtgcccgggttcatccacacgccgatgacggggacggtgccgcagaaggtgaaagatatgatcatcatgcaatgtgccttgaggcgcttcggaaatccggaagaaattgcggaggtagcagcctttctggcatcggaaaagagcagctacgtaaacggtacctcgatcgaagtcactggcggatag

SEQ ID NO: 118614 - protein, 245 aa, Anopheles gambiae str. PEST
MATPLAGKLALVTGAGSGIGRATTKLLARDGAIVVAVDRNVQAAQETIASLTAGDNAAYEMDVSSGDSVDAVLKEVIGRYKRPPTVVVNSAGITRDNFLLKMPESDFDAVINVNLKGTWLVLQRFGRAMIEHELAGSMVNVSSIVARTGNIGQSNYSPSKAGVEAMTKVVAREFGRYNIRVNAIVPGFIHTPMTGTVPQKVKDMIIMQCALRRFGNPEEIAEVAAFLASEKSSYVNGTSIEVTGG

SEQ ID NO: 118615 - DNA, 792 bp, Apis mellifera
  CDS (1)..(792)
atgcaacaaattaatcgcaatttatcagaaataaaatataaacggctagaaggaaaagtagcaattgttacagcatcaacacaaggcattggttttgcaatagcaaaacgtttagctgaagaaggtgctaaagtaatgattagtagtcgtaaggaagaaaatgtacaaaatgctttaaaggaacttaagtctaaaaatttaaatgtctgtggtatgacatgtcatgttggcaaaaatgaagatagaaaatctctacttgaaaaaaccatacaagaatttcatggtttggatattctagtattgaatgcaggtataaatccaagtgcttccactttttttgaaacttcagaatcagtatgggataaaatttttgagattaatgttaaaagtacatttcttctattaagagattccttaccatttttaagaaagagcaaatcagcatcagtaatacttttatcttcaatagtcggatattcaccatttgatatgttaggtgtatattctattagcaaaacaacaatattaggaattaatcaagtagctgctaatattcttgcacctgaaggaattcgtgttaattgcatagcacctggtattataaaaactaaattttcacaaatactttatgaaaatgaaacaggggaaatgatgttatcaaaaataccaatgaataaatttggaaaatcagataatataggaagtgttgctgcatttttagcaagtgatgatgcttcatatattactggtgaaactattgttgttgctggtggaatgcgaagtagactttaa

SEQ ID NO: 118616 - protein, 263 aa, Apis mellifera
MQQINRNLSEIKYKRLEGKVAIVTASTQGIGFAIAKRLAEEGAKVMISSRKEENVQNALKELKSKNLNVCGMTCHVGKNEDRKSLLEKTIQEFHGLDILVLNAGINPSASTFFETSESVWDKIFEINVKSTFLLLRDSLPFLRKSKSASVILLSSIVGYSPFDMLGVYSISKTTILGINQVAANILAPEGIRVNCIAPGIIKTKFSQILYENETGEMMLSKIPMNKFGKSDNIGSVAAFLASDDASYITGETIVVAGGMRSRL

SEQ ID NO: 118617 - DNA, 741 bp, Apis mellifera
  CDS (1)..(741)
atggtagctggaaaaatagcttttgtaacaggtgctggaagcggtataggtagaaaagtatgccatattttggcaaaacaaggggctagtgttattgctaccgatataaacttaaaaaatgctgaagaaactattagatctttaaatgatagcagacatttagcattaaatgtagaagtcttaaatgaacaaagtattaaagaagcatttaaaaatgtaataaataaatattcaactccacctactattatagttaattctgctggcattacaagtgatcaatttattttgaaacttactaatgaagattttgataaagtacttaatgtgaatttaaaaggaactttttttataatccaaacagcagtaaaagaaatgattaatgctaatgtaaataaaggtggttcaattgttaatataagttctattattggaaaaataggaaacatgggacaagccaattatgctgcatcaaaagctggagtaatagcacttacaaaaactgcttctcttgaatttggacaatttggaattcgtgttaatactgtgctaccaggttttatagaaactcctatgacaaaaactatacctgagaatataaagcaattatttataaaaagaattccccttcatagaatgggaaaaccagaagaagtggcagaagttatcagttttttagcatcttccaagagttcttatattaatggtgcatccatagatgttacaggaggattatattaa

SEQ ID NO: 118618 - protein, 246 aa, Apis mellifera
MVAGKIAFVTGAGSGIGRKVCHILAKQGASVIATDINLKNAEETIRSLNDSRHLALNVEVLNEQSIKEAFKNVINKYSTPPTIIVNSAGITSDQFILKLTNEDFDKVLNVNLKGTFFIIQTAVKEMINANVNKGGSIVNISSIIGKIGNMGQANYAASKAGVIALTKTASLEFGQFGIRVNTVLPGFIETPMTKTIPENIKQLFIKRIPLHRMGKPEEVAEVISFLASSKSSYINGASIDVTGGLY

SEQ ID NO: 118619 - DNA, 810 bp, Strongylocentrotus purpuratus; identical to SEQ ID NO: 59514
  CDS (1)..(810)

SEQ ID NO: 118620 - protein, 269 aa, Strongylocentrotus purpuratus; identical to SEQ ID NO: 59515

SEQ ID NO: 118621 - DNA, 744 bp, Strongylocentrotus purpuratus; identical to SEQ ID NO: 59516
  CDS (1)..(744)

SEQ ID NO: 118622 - protein, 247 aa, Strongylocentrotus purpuratus; identical to SEQ ID NO: 59517

SEQ ID NO: 118623 - DNA, 753 bp, Strongylocentrotus purpuratus; identical to SEQ ID NO: 59518
  CDS (1)..(753)

SEQ ID NO: 118624 - protein, 250 aa, Strongylocentrotus purpuratus; identical to SEQ ID NO: 59519

SEQ ID NO: 118625 - DNA, 753 bp, Tribolium castaneum
  CDS (1)..(753)
atggccgggagtttggctgggaaattggctttcgtaacaggggctgggtcgggcattggccgggcaacttgcggcattttggcccgtgagggggcttccgtggtcgcagctgaccgcaacttggccagttgtaacgaaactgtgaccaatatcgtacaagggggctctcagagtcacatctcgttagagctggacgtgggggagcaaaaaagcatagaaagtgccttaaaatcggtgctccaacagtacaaaaagccaccttcaattatcgtaaattccgctggtatcacacgcgacgattttttggtcaaactgactgaaaataattttgatgatgtgatcaggattaacttaaaaggcacgttcatggtcattcagaccttcgccagggctataatcgagcagggggtgcaagggggctctattgtgaacattgccagtacttcgggcaaatatggtaatctggggcaggccaattacagtgcgagtaaggccggggttgaaggtttgacgaaaacagcggctaaagaatttgggaaatttggaattcgggtaaattgtgttttaccagggatgatagcgacgcctatgacggacgcagtccctgagaaagttagggagaagagtcttaaatttatccctttgggccggtttggcaaacctgaggaggtgggagaagttattgcatttttggcctctgataaaagctcatacgttgatggggcctctgttgacatcactgggggaatttaa

SEQ ID NO: 118626 - protein, 250 aa, Tribolium castaneum
MAGSLAGKLAFVTGAGSGIGRATCGILAREGASVVAADRNLASCNETVTNIVQGGSQSHISLELDVGEQKSIESALKSVLQQYKKPPSIIVNSAGITRDDFLVKLTENNFDDVIRINLKGTFMVIQTFARAIIEQGVQGGSIVNIASTSGKYGNLGQANYSASKAGVEGLTKTAAKEFGKFGIRVNCVLPGMIATPMTDAVPEKVREKSLKFIPLGRFGKPEEVGEVIAFLASDKSSYVDGASVDITGGI

SEQ ID NO: 118627 - DNA, 768 bp, Tribolium castaneum
  CDS (1)..(768)
atggttctctcgatggaaaaatgggttgggaaagttgcaatagtaacaggtgctagttccggaattggggctgctattgcagaaaaacttgttgaacaaggcttaacggttgttggagtcgcccgtcgagtcgcacttatcgaaacccaagcccaaaaactatcaaacaaaaaaggaaaattacacgccgtcaaagccgatttaactgtggaaactgatgttttggacgcatttaaatggactttggaaaatttaggcccggtacacattcttgtaaacaatgccggcattttgaaagaagaattactaacaaggggccaatctgaagactggaaaagagcatttgaagtcaatgttttagccctgtgtattgcgacaagagaggcagttaaaataatgaatgctcacaatattgatggtcatattatccatattaatagcattctaggccatcacgtggcaattgagccaaaattaaacgtttacccggcgactaaacatgccgtcacagctttgacggagactttaagacaagaattgaattctctggggagcaaaataaaagtgacgagcataagtcctggacttgtagtaagtgaattgactcttttgagtaaaaacatttcagaagaaaggaggaaaaattttgagggaagacctattttacaagcggaagatattgcagatggggttgtttatgccttatcgactcctcctcacgtccaggtgcacgagctaacaatcaaaccggtaggagaacccatttaa

SEQ ID NO: 118628 - protein, 255 aa, Tribolium castaneum
MVLSMEKWVGKVAIVTGASSGIGAAIAEKLVEQGLTVVGVARRVALIETQAQKLSNKKGKLHAVKADLTVETDVLDAFKWTLENLGPVHILVNNAGILKEELLTRGQSEDWKRAFEVNVLALCIATREAVKIMNAHNIDGHIIHINSILGHHVAIEPKLNVYPATKHAVTALTETLRQELNSLGSKIKVTSISPGLVVSELTLLSKNISEERRKNFEGRPILQAEDIADGVVYALSTPPHVQVHELTIKPVGEPI

SEQ ID NO: 118629 - DNA, 801 bp, Tribolium castaneum; identical to SEQ ID NO: 59520
  CDS (1)..(801)

SEQ ID NO: 118630 - protein, 266 aa, Tribolium castaneum; identical to SEQ ID NO: 59521

SEQ ID NO: 118631 - DNA, 777 bp, Tribolium castaneum; identical to SEQ ID NO: 59522
  CDS (1)..(777)

SEQ ID NO: 118632 - protein, 258 aa, Tribolium castaneum; identical to SEQ ID NO: 59523

SEQ ID NO: 118633 - DNA, 735 bp, Tribolium castaneum
  CDS (1)..(735)
atggaaattaacttcaagggtaaaagggctctagttacaggagctggctccggtattggacgagcccttgcccttaaactggcccaatgtggtgccactgtcttagcaatcgacctatcttctactgctttagaaacactgaaacaggaaataccgaacggagaattcgccgctgttgacatttccaactgggaagcaacaaacaccacccttagaaaactcctcccaattgaccttttagtgaacaatgctggcatagcgttcactgaccccttggagtcaatcacacaagaacaatgcgacaggatatttgctgtcaacgttaaagctttgataaacatcaccaagactgtgataagcgacatggttgccaggaaatcacccggcgccatagtcaacatctcgtcccaagcctccaaagcagcccttttgaaccactcgctctactgtgccaccaaaggcgcagtcgatgctttcacaagggctgtggcccttgaattcggcccttgcaacatcaggataaactgcgtgaaccctactgttgttatgacagatctgggcagaaaaatttggagtgacccgaaaatgggcggccctatgttggccaaaattcccttaaatcggtttgccgaaattgaggatgtggttgatggtgtcttgtttttattgagtgataaggcgcaaatgatcacagggagttgcgtccccattgatgggggatttttggcgtgttag

SEQ ID NO: 118634 - protein, 244 aa, Tribolium castaneum
MEINFKGKRALVTGAGSGIGRALALKLAQCGATVLAIDLSSTALETLKQEIPNGEFAAVDISNWEATNTTLRKLLPIDLLVNNAGIAFTDPLESITQEQCDRIFAVNVKALINITKTVISDMVARKSPGAIVNISSQASKAALLNHSLYCATKGAVDAFTRAVALEFGPCNIRINCVNPTVVMTDLGRKIWSDPKMGGPMLAKIPLNRFAEIEDVVDGVLFLLSDKAQMITGSCVPIDGGFLAC

SEQ ID NO: 118635 - DNA, 735 bp, Tribolium castaneum; identical to SEQ ID NO: 59524
  CDS (1)..(735)

SEQ ID NO: 118636 - protein, 244 aa, Tribolium castaneum; identical to SEQ ID NO: 59525

SEQ ID NO: 118637 - DNA, 771 bp, Tribolium castaneum; identical to SEQ ID NO: 40435
  CDS (1)..(771)

SEQ ID NO: 118638 - protein, 256 aa, Tribolium castaneum; identical to SEQ ID NO: 40436

SEQ ID NO: 118639 - DNA, 729 bp, Tribolium castaneum
  CDS (1)..(729)
atggagatctcctttgagggtaaaagggcgctagttacgggggcttcgagggggatagggagggctattgtgggccagttggccaaatgtggggcccaagttgttgccgtgggacgctccaaagctgacttagaggcactgaaagctgaaacaggggttgaaaccctgattttggacatctcggactgggacaagaccgaaaaagttttaagccaactcgattcgattgatttactggtcaataacgccggcgaagggatgatcaaacctttgattgatttggaagaaggggatattgaccgaattttttccttgaatttgaagggcctaattaatgttactcgcttaatagccaaaaacatgattaggaaaaaatcaggtgcgattgtaaatatctcatctcaagcctctttggctggtcttttgaaccacactgtttattcggcgagtaaaggtggagtcgacgcttttaccagagcttgtgcccttgagttgggtcctcacaacattagggttaattcggtcaatcccactgtgattatgactgaaatgggccgaaaatggtggagcgaaccgtcacgtgctgggacaatgctacacaaaataccattgggacggtttggggaagtacaggaagtggtcgatgccgttttgtttctcctgagcgacaaggctgccatgattacggggacgtgtctccccattgacggcggttttgtatcgtcttaa

SEQ ID NO: 118640 - protein, 242 aa, Tribolium castaneum
MEISFEGKRALVTGASRGIGRAIVGQLAKCGAQVVAVGRSKADLEALKAETGVETLILDISDWDKTEKVLSQLDSIDLLVNNAGEGMIKPLIDLEEGDIDRIFSLNLKGLINVTRLIAKNMIRKKSGAIVNISSQASLAGLLNHTVYSASKGGVDAFTRACALELGPHNIRVNSVNPTVIMTEMGRKWWSEPSRAGTMLHKIPLGRFGEVQEVVDAVLFLLSDKAAMITGTCLPIDGGFVSS

SEQ ID NO: 118641 - DNA, 732 bp, Tribolium castaneum; identical to SEQ ID NO: 59526
  CDS (1)..(732)

SEQ ID NO: 118642 - protein, 243 aa, Tribolium castaneum; identical to SEQ ID NO: 59527

SEQ ID NO: 118643 - DNA, 735 bp, Tribolium castaneum
  CDS (1)..(735)
atggaaattagtttccacggaaaaagagcccttgtcacaggagccagccaaggaattggccgtgatatcgccctccaattggccaaatgtggagccaaagtgatagcagtggcccgaaataaagaactgttggatgagttaaaaaacgagaacccgtccattgacacactttccgtcgatttatccgactggaaagccactcaaaacacactatccaacattttcccaattgaccttctagtcaacaatgccggaattgtgattttgaagcccgttccgacctttgacgagtcagacgtcgaccgtattttcgacatcaacgtcaaggctctcataaatgtgactcaaatggtcactagagacctcctctccaggaaatcccccggttccattgtcaacatatcgtctcaaacggccaaagtcggccttgaaagacactcagtctactgtgggaccaagggcgccgtcgacgcctacacaagggccgtagccctggaacttggcccttacaacatccgggttaattgtgttaaccccactgttatcatgaccgaaatgggcaaaaagggctatgcggacccgaaactagccgaacccttgaaacagaaaatccccttgaggcggttcggggaagtccgggaagtaaccgacgctgttttgtttctattaagtgacaaggcgactatgattaccggcgagtcgcttctagtagatggaggatatgtacaagcttag

SEQ ID NO: 118644 - protein, 244 aa, Tribolium castaneum
MEISFHGKRALVTGASQGIGRDIALQLAKCGAKVIAVARNKELLDELKNENPSIDTLSVDLSDWKATQNTLSNIFPIDLLVNNAGIVILKPVPTFDESDVDRIFDINVKALINVTQMVTRDLLSRKSPGSIVNISSQTAKVGLERHSVYCGTKGAVDAYTRAVALELGPYNIRVNCVNPTVIMTEMGKKGYADPKLAEPLKQKIPLRRFGEVREVTDAVLFLLSDKATMITGESLLVDGGYVQA

SEQ ID NO: 118645 - DNA, 768 bp, Tribolium castaneum; identical to SEQ ID NO: 59528
  CDS (1)..(768)

SEQ ID NO: 118646 - protein, 255 aa, Tribolium castaneum; identical to SEQ ID NO: 59529

SEQ ID NO: 118647 - DNA, 744 bp, Herminiimonas arsenicoxydans
  CDS (1)..(744): transl_table=11
atgactacagttgaattggcaggtcaggttgccctcgtaaccggcgcatcgcgcggcatcggccgtgcaattgcgcaggcattggcgaagcagggcgtgaaagtaatcggcacggcaacgtcggaatccggcgcggccgccatctcggaatatcttgccgaaagcggcaagggtgtggtgctggatgtcaacgatgctgcgcgctcggtggcgttaatcgacgaaatccagaaggaattcggtacggtaaccattctcgtcaataatgcgggtatcactcaggatcagcttgccatgcgcatgaaagatgaagagtgggacagcgtgattgcgaccaatctgacctcggtggggcgcttgtcgcgcgccgtcttgcgcggcatgatgaaagccaagcatggtcgtattattaacattacatcggttgtgggttctactggtaatgcgggtcaaatgaattatgctgcagccaaggcaggagtggctggcatgagtcgtgcgctggcgcgtgaaattggcagccgcaacattactgtcaattgcgtggcgcctggttttatcgataccgatatgaccaaaacattaagcgaacagcaaatttctgccttgctgcaacaggttccgttagggcgtttgggtgtgccggaagacatcgctgcggctgtcagcttccttgcatcgcctcaggcgagttacattacgggtaccaccttgcatgtcaacggcgggatgtacatgaattaa

SEQ ID NO: 118648 - protein, 247 aa, Herminiimonas arsenicoxydans
MTTVELAGQVALVTGASRGIGRAIAQALAKQGVKVIGTATSESGAAAISEYLAESGKGVVLDVNDAARSVALIDEIQKEFGTVTILVNNAGITQDQLAMRMKDEEWDSVIATNLTSVGRLSRAVLRGMMKAKHGRIINITSVVGSTGNAGQMNYAAAKAGVAGMSRALAREIGSRNITVNCVAPGFIDTDMTKTLSEQQISALLQQVPLGRLGVPEDIAAAVSFLASPQASYITGTTLHVNGGMYMN

SEQ ID NO: 118649 - DNA, 750 bp, Burkholderia vietnamiensis G4
  CDS (1)..(750): transl_table=11
atggaaaagactctcgacaaacaggtcgcgatcgtgaccggcgcatcgcgcggcatcggccgtgcgatcgcgctcgaactcgcgcgcctgggcgcgacggtgatcggcacggcgacgagcgaatcgggcgcggccgcgattagcgccgggttcgcggaagcgggcgtgacgggtcgcggcgcggtgctgaacgtcaacgacgcggctgcggccgaagcgttgatcgacgcgaccgtgaaggaattcggcgcgctgaacgtgctcgtcaacaacgccgggatcacgcaggaccagctcgcgatgcggatgaaggacgaggactgggacgcggtgatcgacaccaacctgaagtcggtgttccggctgtcgcgcgcggtgctgcgcccgatgatgaaggcccgcggcgggcgcatcatcaacatcacgtcggtggtcggctcggccggcaatccggggcaggccaactacgcggccgcgaaggccggcgtggcgggcatgacgcgcgcgctggcccgcgaaatcggcagccgcggcatcacggtcaactgcgtggcgccgggcttcatcgacaccgacatgaccaagacgctgccggaagaacagcaggccgcgctcaagacccagattccgctcggccgcctcggcagcccggaggacatcgcccatgccgtcgcgtttctcgcgtcgccgcaggccggttacatcaccggcacgacgctgcacgtgaacggcggcatgtacatgtcgtaa

SEQ ID NO: 118650 - protein, 249 aa, Burkholderia vietnamiensis G4
MEKTLDKQVAIVTGASRGIGRAIALELARLGATVIGTATSESGAAAISAGFAEAGVTGRGAVLNVNDAAAAEALIDATVKEFGALNVLVNNAGITQDQLAMRMKDEDWDAVIDTNLKSVFRLSRAVLRPMMKARGGRIINITSVVGSAGNPGQANYAAAKAGVAGMTRALAREIGSRGITVNCVAPGFIDTDMTKTLPEEQQAALKTQIPLGRLGSPEDIAHAVAFLASPQAGYITGTTLHVNGGMYMS

SEQ ID NO: 118651 - DNA, 738 bp, Thermus thermophilus HB27
  CDS (1)..(738): transl_table=11
atgcggctcaaggacaaggcggtgctcatcacaggggcggcccacggcatcggccgggccacgttggagctcttcgccagggaaggggcgaggctcgtggcctgcgacatagaggaaggccccttaagggaggcggcggaggcggtgggggcccatccggtggtgatggacgtggccgaccccgcctccgtggagcgggggtttgccgaggccctggcccacctgggccggctggacggggtggtgcactacgccgggatcacccgggacaacttccactggaagatgcccctggaggactgggagcttgttctccgggtgaacctcacggggagcttcctggtggccaaggcggccagcgaggccatgcgggagaaaaaccctgggagcatcgtcctcaccgcgagccgggtctacctggggaacctggggcaggcgaactacgccgcctccaaggcgggggtggtggggcttacccggacgttggccctggagcttgggcggtgggggatccgggtgaacgccctggccccggggttcattgagacgcggatgacggccaaggtgccggagaaggtgcgggagaaggccatcgccgccacccccttgggccgggcggggaagcctttggaggtggcctacgccgccctctttttggtctccgacgagtccagcttcatcaccggccaggtcctcttcgtggacggggggaggaccatcggggcggccccggcctaa

SEQ ID NO: 118652 - protein, 245 aa, Thermus thermophilus HB27
MRLKDKAVLITGAAHGIGRATLELFAREGARLVACDIEEGPLREAAEAVGAHPVVMDVADPASVERGFAEALAHLGRLDGVVHYAGITRDNFHWKMPLEDWELVLRVNLTGSFLVAKAASEAMREKNPGSIVLTASRVYLGNLGQANYAASKAGVVGLTRTLALELGRWGIRVNALAPGFIETRMTAKVPEKVREKAIAATPLGRAGKPLEVAYAALFLVSDESSFITGQVLFVDGGRTIGAAPA

SEQ ID NO: 118653 - DNA, 735 bp, Acinetobacter sp. ADP1
  CDS (1)..(735): transl_table=11
atgacacaacaacgtaaagttgcattagtcacaggcgcaagccgtggaattggtgcagcaattgcagaacagctcattcaagacggtttttttgttgttggaacagcaacaagtgagtcaggtgctgaaaaattggcagcgcagtacggtgagcagggaactggtcttgtacttgatgtgcgtcatctggatgaaattgaagcggttgttaccacaatcgaacaaaattatggtcctgtgcttgtacttgtgaataatgcaggtattacacgtgacaatctgttgttgcgtatgtctgaagatgactgggatgatattttaaatattcatttgaaagcggtttaccgtttgtcaaagcgtgtattgaagggtatgaccaaagctcgctttggccgtattatcaatatcagttcagtggttgcacattttgcaaacccaggtcaggcaaactattcagctgctaaagcgggtattgaggcatttagtcgcagccttgcaaaagagatgggcagtcgccagattacggtaaatagcgttgctcctggcttcattgcaactgaaatgacagatgctttaagcgaagatttacgtaaaaaaatgagtgatcaagtcgctttaggtcgtcttggtgaaccacaagatatcgcaaatgcggtaagtttcttggcttctgagaaggcaagttatattactggtacggtattacatgtaaatggtggtttatacatggcctaa

SEQ ID NO: 118654 - protein, 244 aa, Acinetobacter sp. ADP1
MTQQRKVALVTGASRGIGAAIAEQLIQDGFFVVGTATSESGAEKLAAQYGEQGTGLVLDVRHLDEIEAVVTTIEQNYGPVLVLVNNAGITRDNLLLRMSEDDWDDILNIHLKAVYRLSKRVLKGMTKARFGRIINISSVVAHFANPGQANYSAAKAGIEAFSRSLAKEMGSRQITVNSVAPGFIATEMTDALSEDLRKKMSDQVALGRLGEPQDIANAVSFLASEKASYITGTVLHVNGGLYMA

SEQ ID NO: 118655 - DNA, 735 bp, Erwinia carotovora subsp. atroseptica SCRI1043
  CDS (1)..(735): transl_table=11
atgagttttgaggggaaaattgcactggttaccggtgcaagccgtggtatagggcgtgccatcgccgagacgttggttgctcgcggggcaaaagtcattggtactgcaaccagcgaaaaaggtgctgaagccattagcagctggctgggtgagaacggtaaaggttatatgctgaatgttgctgatgcagcatcagtagaaagcgtgttagcagaaattcgcgcagaattcggggaaattgatattcttatcaataacgcgggtatcacccgtgataacctgctgatgcgtatgaaagatgatgaatggcacgatattctggataccaatttgacctcggtattccgtatgtctaaagcagttatgcgtgccatgatgaagaaacgttttggccgtatcattaccatcggttccgttgtgggaacgatgggcaatgcaggacaagctaactacgcggcagcgaaggcggggctgattgggttcagcaaatccctcgcgcgtgaagtggcttctcgtggtattacggtcaacgtggtcgcgcctggttttatcgaaacagatatgactcaggcattgacagaagaacagcgagcaggcattttgacgtcggttccagctaaccgactcggtgatgctaaagaaatcgccagtgctgttgtatttttagcctctgatgaagctgcttacattactggcgaaacattgcatgtcaacggcggcatgtatatgatctaa

SEQ ID NO: 118656 - protein, 244 aa, Erwinia carotovora subsp. atroseptica SCRI1043
MSFEGKIALVTGASRGIGRAIAETLVARGAKVIGTATSEKGAEAISSWLGENGKGYMLNVADAASVESVLAEIRAEFGEIDILINNAGITRDNLLMRMKDDEWHDILDTNLTSVFRMSKAVMRAMMKKRFGRIITIGSVVGTMGNAGQANYAAAKAGLIGFSKSLAREVASRGITVNVVAPGFIETDMTQALTEEQRAGILTSVPANRLGDAKEIASAVVFLASDEAAYITGETLHVNGGMYMI

SEQ ID NO: 118657 - DNA, 720 bp, Propionibacterium acnes KPA171202
  CDS (1)..(720): transl_table=11
atgagtctagacaccccggggcgcgtcgccctcgtcaccggcggatcgcgcggtatcggtgctgcgatcgccgcagatctgcacgcacagggataccgagtggccgcaacgagtcgctcggctaccgcgcccgaaggggtgctgccgatcgcctgcgacgtcactgacgccgactcggttgacgtggcgttcagccaggtcgagcaggagcttggcccagtcgaggtgctggttgctaatgccggaattacccgggacggactgctcgcccgcatgaaggaggaggacttcaccgaggtcatcgacactaatctcaccggcgcttaccgcgttatccgccgcgctgccagggcgatgacccgggcccgttttggccgcatcgttttgacttcgtcagtggtaggtctgctcggttcccccgggcaagtcaactatgcggcgtcgaaggctgggatgctgggcatggcccgctctgtgacccgtgaactagggtctcgcggcgttacctgcaaccttgtcgctcccggtttcatctccacggacatgaccgagggactgccggagaagcttgtttccgggtacctcgagcgcatcccggccaagcggctgggatcggtcgacgatgtcgttgcggtcgtccgatttctcgtctccgatgccgccagctacgtctctggggctgtgatccctgtcgacggaggactcggcatgggccactga

SEQ ID NO: 118658 - protein, 239 aa, Propionibacterium acnes KPA171202
MSLDTPGRVALVTGGSRGIGAAIAADLHAQGYRVAATSRSATAPEGVLPIACDVTDADSVDVAFSQVEQELGPVEVLVANAGITRDGLLARMKEEDFTEVIDTNLTGAYRVIRRAARAMTRARFGRIVLTSSVVGLLGSPGQVNYAASKAGMLGMARSVTRELGSRGVTCNLVAPGFISTDMTEGLPEKLVSGYLERIPAKRLGSVDDVVAVVRFLVSDAASYVSGAVIPVDGGLGMGH

SEQ ID NO: 118659 - DNA, 765 bp, Desulfotalea psychrophila LSv54
  CDS (1)..(765): transl_table=11
ttgaaaaaagaggaaaatcttgtgattcttgacggaaaaatagctgtagtgacaggtggcagtcgaggaataggtcgtggcatagccctgcgtcttgccggtatgggagctcttgtgtatatcaactacgtgagtcgcccggatgctgccattgaaacaaaagaactgatagaaaaggctggtggtaaggctgagatcattggctttaatgttgccgatggggaaaaggttcaggagagtttgaatcaaattgttgccgatgccggagccattgatattttggtaaataatgcgggtataacccgtgatggtcttcttgcccgaatgaaagaggccgattgggatgcggtgcttgatactaatctcaagggtgcgtttctttgttctaaggctgctgcccgttttatgatgaaaaagagatggggcagaattgtaaatatatcctctgtgatcggttttgccggtaatgcaggacaggcaaattatgccgctgccaaggcaggacttgttggttttagtaagtccatggcacgtgaatatgctgctcgaaatattaccgttaactgtgttgctcccggttatgttgtcactgaaatgacagaagaattagatgagaagattcaagagaaaattaaagcagagattcctcttggatcttttggccgcacggaagatattgccgctgctgttgcctaccttgtctcagaagacggtcgctatctcacggggcaaacgctccatgtgaatggcggcatgtacatgtaa

SEQ ID NO: 118660 - protein, 254 aa, Desulfotalea psychrophila LSv54
MKKEENLVILDGKIAVVTGGSRGIGRGIALRLAGMGALVYINYVSRPDAAIETKELIEKAGGKAEIIGFNVADGEKVQESLNQIVADAGAIDILVNNAGITRDGLLARMKEADWDAVLDTNLKGAFLCSKAAARFMMKKRWGRIVNISSVIGFAGNAGQANYAAAKAGLVGFSKSMAREYAARNITVNCVAPGYVVTEMTEELDEKIQEKIKAEIPLGSFGRTEDIAAAVAYLVSEDGRYLTGQTLHVNGGMYM

SEQ ID NO: 118661 - DNA, 747 bp, Symbiobacterium thermophilum IAM 14863
  CDS (1)..(747): transl_table=11
atgaacctatctacgcaggtggcaattgttaccggtgccacaggcggtctgggccgggcgatcagcctcgccctggcccgggagggcgccgcggtggtggtgaactacgcccggagcgcggagaaggccgccgggctggtggaggagatctccgcccaggggggccgggcgctcgcggtgcaggccgacgtcggaaccgccgaaggggccgaggccctggtgaaggcggccctggaccacttcggccgggtcgacatcctggtgaacaacgccggcatcaaccgggataccctgatcatgcggatgaaggagtccgactgggatgacgtcctcgatacgaatcttaagggcgccttcctctgcatcaaggcggtgtcacggccgatgatgaaggcccggtacgggcgcatcatcaacatcggctccgtggcaggactggcgggcaacgccgggcaggccaactactccgccgccaaggccgggctggtggggctgacccgggcggtggcccgggaactgggcagccggaacatcacggtcaactgcatcgcccccggcgcgatcgatgccggcatgctgctggagctcagtgaggagcagcggagcaactacctgcgacagattcccctggagcgctttggcaggcccgaggacgtcgccgcagcggtggtgttcctcgccggtccgggcggtgcgtacatcaccggacagacgatcgcggtcgacggcggcctgaccatgtactag

SEQ ID NO: 118662 - protein, 248 aa, Symbiobacterium thermophilum IAM 14863
MNLSTQVAIVTGATGGLGRAISLALAREGAAVVVNYARSAEKAAGLVEEISAQGGRALAVQADVGTAEGAEALVKAALDHFGRVDILVNNAGINRDTLIMRMKESDWDDVLDTNLKGAFLCIKAVSRPMMKARYGRIINIGSVAGLAGNAGQANYSAAKAGLVGLTRAVARELGSRNITVNCIAPGAIDAGMLLELSEEQRSNYLRQIPLERFGRPEDVAAAVVFLAGPGGAYITGQTIAVDGGLTMY

SEQ ID NO: 118663 - DNA, 744 bp, Bacillus licheniformis ATCC 14580
  CDS (1)..(744): transl_table=11
atgctggaaaataaaacagccgttgtgacaggagcctcaagaggaatcggccgcgcgatcgccctggacctggcgaaaaacggagcaaatgtcgtcgtcaactacgcgggaaatgaagcgaaagcgaacgaagtcgtagacgaaatcaaagcgctcggccgcgatgcgtttgcttttaaagcggacgtttccaatgcggatgaggttcaggcgatgatgaaggaagcggtcggacgcttcggcacgcttgacatccttgtcaacaatgcgggcattactaaagacaatctgttcatgagaatgaaagaagatgaatgggacgacgtcattaacataaacttaaaaggtgtgttcaattgttcaaaagctgtgacaagacagatgatgaaacaaagaagcggccggatcatcaatatcacctcggttgtaggcgtcgtcggtaacgccgggcaggccaactatgtcgcggctaaatcaggcgtgatcggcttgacgaaaacgctggcaaaagaactggcgtcaagaaacatcactgtgaatgcgatcgctccgggattcatttcgacggaaatgacggacaagctgacaaaagacattcaagacgaaatgctgaagcagattccgcttgcgcggttcggcgagccgtctgacatcagcagcgccgttgttttcctcgcatctgaccatgcgagctacatgaccggccagacgctgaacatcaacggcggaatggctatggtttaa

SEQ ID NO: 118664 - protein, 247 aa, Bacillus licheniformis ATCC 14580
MLENKTAVVTGASRGIGRAIALDLAKNGANVVVNYAGNEAKANEVVDEIKALGRDAFAFKADVSNADEVQAMMKEAVGRFGTLDILVNNAGITKDNLFMRMKEDEWDDVININLKGVFNCSKAVTRQMMKQRSGRIINITSVVGVVGNAGQANYVAAKSGVIGLTKTLAKELASRNITVNAIAPGFISTEMTDKLTKDIQDEMLKQIPLARFGEPSDISSAVVFLASDHASYMTGQTLNINGGMAMV

SEQ ID NO: 118665 - DNA, 747 bp, Legionella pneumophila subsp. pneumophila str. Philadelphia 1
  CDS (1)..(747): transl_table=11
atgatcaatttagaaggtaaaattgcattagttactggtgccagccgtggcataggtcgtgctgttgccgagaaattggcaagaaatggtgcctttgtttttggaacagcaaccactgaacagggtgctgcgtctattaattctttttttgaaaaagaaaaattggctggtaaaggcatcgttttggatgtaaccagcactgagcaagtagaaaatttgatgtctaccttgtctgataatgatcagtgtccttctattcttgttaataatgctggcattaccgcagataacctgttattgcgtatggatgatgatgaatggtacaaagtaatagaaacaaatttgaattctatttacagaatgactaaagcttgcttaaaacctatgttcagagcgcgttggggaagaataatttctataggctctgtggtaggtgccagtggcaattctggacaggtaaactatactgcagccaaggctggagttattggtttttccaagtctttggcacaggaaattggtagtagaggaataactgtaaacgtggtagcccccgggtttatcgacacagatatgactactgcattgcctgatatggtgaaagaagaaatgttaaaaagaattcccatgcgtaagctgggccagccagaagatgttgctgatgctgtagcttttctagcatcagacagcgcaaaatatatcacaggtgaaacaattcatgtcaatggcggtatgtatatgagttaa

SEQ ID NO: 118666 - protein, 248 aa, Legionella pneumophila subsp. pneumophila str. Philadelphia 1
MINLEGKIALVTGASRGIGRAVAEKLARNGAFVFGTATTEQGAASINSFFEKEKLAGKGIVLDVTSTEQVENLMSTLSDNDQCPSILVNNAGITADNLLLRMDDDEWYKVIETNLNSIYRMTKACLKPMFRARWGRIISIGSVVGASGNSGQVNYTAAKAGVIGFSKSLAQEIGSRGITVNVVAPGFIDTDMTTALPDMVKEEMLKRIPMRKLGQPEDVADAVAFLASDSAKYITGETIHVNGGMYMS

SEQ ID NO: 118667 - DNA, 738 bp, Methylococcus capsulatus str. Bath
  CDS (1)..(738): transl_table=11
atgacggaccagatagccattgtcacgggggccagccgaggaatcgggcgggcgatcgcccatcgtttggcgcaggccggtcatacggtcgtaggcaccgccacctcggaagacggagccgcagcgatcggatccgcgctcaccgatgccggcctgaacggctgcgggcgggtgctggacgtgagcgatcccgcttcggtcgaggccttcgtggccgccgtcagcgatgaattcggcataccgacgatcctggtcaacaacgccggcattacccgtgacggtctgctgatgcgtatgaaagatgaagactgggatgcgatcatcgacaccaatttgtcttccgtctaccgcatgagcaaggcttgcctcaaaggcatgatgaaggcccgtaccggccgcattgtcaacatcacttcggtcgtggggttgaccggtaatgccgggcagaccaactatgcggcggccaaggccggtatcatcggtttcaccaaatccctggccaaagagattggctcgcgcggcattacggtgaattcggtggcgccgggcttcatcgataccgatatgacccgcgctcttccggaggcacacaagacggccctgctggcgtcgattcccctgggacggctgggacaggccgaggagattgcgggggccgtggcttttctgtgctccgacgacgccgcttacatcaccggagaaaccctccatgtcaatggcggtatgttcatgccctga

SEQ ID NO: 118668 - protein, 245 aa, Methylococcus capsulatus str. Bath
MTDQIAIVTGASRGIGRAIAHRLAQAGHTVVGTATSEDGAAAIGSALTDAGLNGCGRVLDVSDPASVEAFVAAVSDEFGIPTILVNNAGITRDGLLMRMKDEDWDAIIDTNLSSVYRMSKACLKGMMKARTGRIVNITSVVGLTGNAGQTNYAAAKAGIIGFTKSLAKEIGSRGITVNSVAPGFIDTDMTRALPEAHKTALLASIPLGRLGQAEEIAGAVAFLCSDDAAYITGETLHVNGGMFMP

SEQ ID NO: 118669 - DNA, 738 bp, Silicibacter pomeroyi DSS-3
  CDS (1)..(738): transl_table=11
atgtttgatctgaccggaaagaatgccctgatcaccggtgcctcgggtggcatcgggggcgccatcgcgcgcgcgctgcatgctgccggcgcctcggtggtgctgtcgggcacccgggtcgagccgcttcaggcgctggccgacgagctgggcgaacgcgcccatgtgctgacctgcaatctgagcgatatggcggccgtcgaggcgctgccgaaacaggccgccgacctgttgggctcggtcgatatcctggtgaacaatgccggcatcacgcgcgacaacctgttcatgcgtatgtcggatgacgaatggcaaagcgtgatcgacgtcaacctgaccgccaccatgaaactgtgcaagggcgtgctgcgcggcatgatgaaggcgcgctggggccggatcgtgaatatctcgtctgtggtgggtgccatcggcaacccggggcagggcaattatgccgcctccaaggcgggtgtcgtcggcatgtccaaggcgctggcctatgaggtcgccagccggggaatcaccgtcaacgcggtggcaccgggctttatcaccacggcaatgaccgacaagctgacggatgagcagaaatcgggcctgctgacgcaggttcccgctggccgcatgggttcgcccgaggaaatcgcggcggcggtcctgtatcttgccagtcccgaggccgcttatgtgaccggtgccaccttgcatgtgaacggcggtatggccatgttgtga

SEQ ID NO: 118670 - protein, 245 aa, Silicibacter pomeroyi DSS-3
MFDLTGKNALITGASGGIGGAIARALHAAGASVVLSGTRVEPLQALADELGERAHVLTCNLSDMAAVEALPKQAADLLGSVDILVNNAGITRDNLFMRMSDDEWQSVIDVNLTATMKLCKGVLRGMMKARWGRIVNISSVVGAIGNPGQGNYAASKAGVVGMSKALAYEVASRGITVNAVAPGFITTAMTDKLTDEQKSGLLTQVPAGRMGSPEEIAAAVLYLASPEAAYVTGATLHVNGGMAML

SEQ ID NO: 118671 - DNA, 747 bp, Chlamydophila abortus S26/3
  CDS (1)..(747): transl_table=11
atgaatggtatattgtcgggaaagaaagcgatcgttacagggggatctagaggtataggatttgccattagtaagctttttgtagagcaaggtgcggacgttgagatttggggaataaatgacgagggtggtaagcaggctgctcaagagttatcgaaaataggaagacccgcgacttttgctaaagttgatgtgagtaagagtcaatctgtaaaagatgctgttcagaattttattacagcacatggtaatattgatattttagtaaataatgcggggattactcgagataatcttttaatgcgtatgtctgaagaagagtggtccgctgttattaacactaatttaaattccctatactatgtatgttctagtgtgattcgtcccatgattaaagctcgttctgggtcgatcattaacattagttcagttgttggtttaatggggagtccagggcagaccaattatgcagctgcgaaggctggtattatagggtttagtagagctttagctaaagaagttgctgcaagaaacattagagtgaactgcatagctccggggtgtattgatactgatatgaccagggtattaaatgataatttaaaaactgaatggttaaaaaatgttcctatggggagaatgggttttcctgaagaaattgctaacgcagcgttatttcttgcttcacccttatcttcttatataacttctcaggtattgagtgttgatggaggtatgacatactaa

SEQ ID NO: 118672 - protein, 248 aa, Chlamydophila abortus S26/3
MNGILSGKKAIVTGGSRGIGFAISKLFVEQGADVEIWGINDEGGKQAAQELSKIGRPATFAKVDVSKSQSVKDAVQNFITAHGNIDILVNNAGITRDNLLMRMSEEEWSAVINTNLNSLYYVCSSVIRPMIKARSGSIINISSVVGLMGSPGQTNYAAAKAGIIGFSRALAKEVAARNIRVNCIAPGCIDTDMTRVLNDNLKTEWLKNVPMGRMGFPEEIANAALFLASPLSSYITSQVLSVDGGMTY

SEQ ID NO: 118673 - DNA, 729 bp, Haemophilus influenzae 86-028NP
  CDS (1)..(729): transl_table=11
atgcaaggtaaaattgctttagtgacaggggctagccgtggtatcggtcgtgcgattgcagaagaacttagttcaaaaggtgcatttgtaattggtaccgcaacctctgaaaagggtgcagaggcgatctcggcttatttaggggataaaggtaaaggtttagttttaaacgtaacggataaagaatctatcgaaactttacttgagcaaattaaaaatgattttggcgatattgatattctcgtgaataacgcaggtattactcgcgataatttattgatgcgtatgaaagatgaggaatggtttgatattatgcaaactaacttaacttctgtgtatcatctttctaaagccatgttacgttcaatgatgaaaaaacgttttggtcgtatcatcaatattggttcagtggttggttcaacgggtaatccaggacaaactaactattgtgcggcaaaagcgggtgtggttggtttttctaaatctttagcgaaagaagtagctgcacgtggtgttactgtaaatgtggttgcaccaggttttattgcaacagatatgacagaagtgcttacggatgaacaaaaagcggggatcttatctaatgttccagctggacgtttaggcgaagcaaaagacatagctaaagccgttgctttcttagcttctgatgatgcaggttatatcacgggtacaacgttacacgtgaatggtggcttatacttaagctaa

SEQ ID NO: 118674 - protein, 242 aa, Haemophilus influenzae 86-028NP
MQGKIALVTGASRGIGRAIAEELSSKGAFVIGTATSEKGAEAISAYLGDKGKGLVLNVTDKESIETLLEQIKNDFGDIDILVNNAGITRDNLLMRMKDEEWFDIMQTNLTSVYHLSKAMLRSMMKKRFGRIINIGSVVGSTGNPGQTNYCAAKAGVVGFSKSLAKEVAARGVTVNVVAPGFIATDMTEVLTDEQKAGILSNVPAGRLGEAKDIAKAVAFLASDDAGYITGTTLHVNGGLYLS

SEQ ID NO: 118675 - DNA, 741 bp, Pseudomonas fluorescens Pf-5
  CDS (1)..(741): transl_table=11
atgagtctgcaaggtaaagttgcactggtgaccggcgccagccgtggtatcggccaggccatcgcgcttgagctggggcgtatgggcgccaccgtggtgggtaccgccacgtccgcttcgggtgccgagcgcattgctgccaccctcaaggaaaatggcatccagggcaccggccttgagctgaacgttaccagtgacgagtccgtggctgcagtcctggccagcatcaccgagcagttcggtgcgccggcgatcctggtgaacaacgccggcatcactcgcgacaacctgatgatgcgcatgaaagatgacgaatggtacgacgtggtcgataccaacctgaacagcctgtatcgcctgtccaagggcgttctgcgtggcatgaccaaggctcgttggggtcgaattatcagtattggctcggttgtgggtgccatgggcaacgcaggccaagtaaactacgcggccgccaaggctggtctcgaaggtttcagccgtgccctggcccgtgaagtgggttcgcggtcgatcacggtgaactcggttgctccaggttttatcgacaccgatatgacccgcgaactgccggaagcgcagcgtgaagcgctgctgacgcaaattccgctgggtcgtctgggccaggctcaagagatcgcgcaagtggtcgcttttctggcatccgacggtgcggcatacgttactggggctacaatcccggtcaacggcgggatgtatatgtga

SEQ ID NO: 118676 - protein, 246 aa, Pseudomonas fluorescens Pf-5
MSLQGKVALVTGASRGIGQAIALELGRMGATVVGTATSASGAERIAATLKENGIQGTGLELNVTSDESVAAVLASITEQFGAPAILVNNAGITRDNLMMRMKDDEWYDVVDTNLNSLYRLSKGVLRGMTKARWGRIISIGSVVGAMGNAGQVNYAAAKAGLEGFSRALAREVGSRSITVNSVAPGFIDTDMTRELPEAQREALLTQIPLGRLGQAQEIAQVVAFLASDGAAYVTGATIPVNGGMYM

SEQ ID NO: 118677 - DNA, 729 bp, Psychrobacter arcticus 273-4
  CDS (1)..(729): transl_table=11
atgagccgtacaatcacattagtaacaggcgcaagccgtggtattggcaaagccatcgccaaacgttttgctaaagaaggacactttgtcattggtactgccaccactgaaaaaggtgcggcacagattgatgaatatctgaacgatagcggtggtattggtcgagtgttagatgtacgcgataccgcacaaatcgacaagctatttgaagagatagaaagcgtttatggcgccgtgcaagtattggtcaataatgccggtattacccaagatggcttattgatgcgtatgaaagatgaagattgggataatgtgattgataccaatctgacctctgtgtatcgtatgagcaaacgtgctattcgcggcatgatgaaagcacgccgcggtcgtatcattaatattacctctgtgattgctcaaatgggaaatgctggtcaatctaactatgccgcgaccaaagctggtgtagaaggttttagccgtacgctagcacgcgaaataggctcacgccaagtaacaattaactgtgtcgcgccaggtttgattgaaaccgatatgacggatgagctggatgagcgcttattgaattcaatgttagatgccgtgcctatcagccgtcttggtcagccagaagatatcgcggcagccgtactgtttttagcaagtgatgaagccagctatattactggtgcagttctgcctgttaatggtggcatgtatatgtag

SEQ ID NO: 118678 - protein, 242 aa, Psychrobacter arcticus 273-4
MSRTITLVTGASRGIGKAIAKRFAKEGHFVIGTATTEKGAAQIDEYLNDSGGIGRVLDVRDTAQIDKLFEEIESVYGAVQVLVNNAGITQDGLLMRMKDEDWDNVIDTNLTSVYRMSKRAIRGMMKARRGRIINITSVIAQMGNAGQSNYAATKAGVEGFSRTLAREIGSRQVTINCVAPGLIETDMTDELDERLLNSMLDAVPISRLGQPEDIAAAVLFLASDEASYITGAVLPVNGGMYM

SEQ ID NO: 118679 - DNA, 747 bp, Colwellia psychrerythraea 34H
  CDS (1)..(747): transl_table=11
atgttttctttagaaggtaaagtcgctttagttactggcgcaagtcgtggtattggtaaagcaatagctacacaattacagtcattgggtgcaacggtaattggtaccgcgacatcagaaaatggtgctaataacataactaagtatttaactgctgataacggtagtggtatggggttggtgctaaacgtgacaagtgatgaatctatcgctgaaatgtttgtagctattaaagaagcacatggttccatgatatttctagtaaataatgctggtatcacccgtgataatttatttatgcgtatgaaagatgatgagtggtcagacattattgaaactaacttaacgtctgtttttaaagtaagcaaagctgctattcgtcctatgatgaagaaacgtacaggccgtatcatcaatattggctctgttgtaggtaccatgggtaatgctggccaagttaactatgcaacagctaaagcgggtttattaggtttcactaaggccttagcacgtgaagttgcttctcgtggtattactgtaaatactgtttcacctggctttatcgatacagatatgacacaaacgttaacagatgaacaaaaagaaggtatattttcacaggttcctgcgaatcgtttaggtaaaccagaagaaattgctagtactgtcgcttttttagcatcagatgccgcagcttatgttacgggtgagacaatccacgttaatggtggcatgtatatggtgtaa

SEQ ID NO: 118680 - protein, 248 aa, Colwellia psychrerythraea 34H
MFSLEGKVALVTGASRGIGKAIATQLQSLGATVIGTATSENGANNITKYLTADNGSGMGLVLNVTSDESIAEMFVAIKEAHGSMIFLVNNAGITRDNLFMRMKDDEWSDIIETNLTSVFKVSKAAIRPMMKKRTGRIINIGSVVGTMGNAGQVNYATAKAGLLGFTKALAREVASRGITVNTVSPGFIDTDMTQTLTDEQKEGIFSQVPANRLGKPEEIASTVAFLASDAAAYVTGETIHVNGGMYMV

SEQ ID NO: 118681 - DNA, 747 bp, Dechloromonas aromatica RCB
  CDS (1)..(747): transl_table=11
atgaatatgctgaccgataaaattgcgctggtgaccggtgcgacccggggtatcgggcgggctattgctctggagcttggcaagcagggggcaaccgtgattggtactgctaccagtgaagaaggtgcaggaaaaatctccgcctatcttttggaagcgggtatcaagggcaagggaattgcgctgaatgtctgcgacgtagcgcagacggatgctgccttatccgatatcgccaaggaattcggtgccataaccattttggttaataacgctggtattactcgtgacaatctcaccatgcgcatgggtgacgacgagtgggatgctgtcattgatacgaacctgaaggcggttttccgactttcccgtggcgtgatgcggggcatgatgaaggcgcgttttggccgcatcgtcaatatttcctcggtggttggttactccggcaatgctgggcaggccaactactgtgcagccaaggctggcgtggctggcctgagtcgttcgctggctcgcgaattaggtagccgcaacatcactgtcaattgcgttgcaccgggttttatcgccactgacatgacgcacgccttgaccgaagagcagaaggcagccatgctggcgtccattccgctggctcgagccggcactccggaggatatcgccggtgccgtgggttttctggtttctcccgctgcctcgtatgtcacgggcactaccgtgcatgtgaatggcggcatgtttatggattga

SEQ ID NO: 118682 - protein, 248 aa, Dechloromonas aromatica RCB
MNMLTDKIALVTGATRGIGRAIALELGKQGATVIGTATSEEGAGKISAYLLEAGIKGKGIALNVCDVAQTDAALSDIAKEFGAITILVNNAGITRDNLTMRMGDDEWDAVIDTNLKAVFRLSRGVMRGMMKARFGRIVNISSVVGYSGNAGQANYCAAKAGVAGLSRSLARELGSRNITVNCVAPGFIATDMTHALTEEQKAAMLASIPLARAGTPEDIAGAVGFLVSPAASYVTGTTVHVNGGMFMD

SEQ ID NO: 118683 - DNA, 705 bp, Thermobifida fusca YX
  CDS (1)..(705): transl_table=11
atgtctcgctcggttctggtcaccggtggcagccgcggaatcggtctggccatcgccagggagctcaaggaagcgggcgacgacgtcgcggtgacctaccgcaccgggcagcccccggaaggactgttcggggtccaatgcgacatcaccgacagcgcccaggtggacgccgctttcaagcaggtggaggaggcccacggcccggtcgaggtcctggtcgccaacgcgggcatcaacaaggaccagttgctggccctcatgagcgaagaagacttcaacgcggtgctcgacaccaacctgaccggcgcgttccgggtggccaagcgcgcagtgcgcggcatgatgcgtaaacgcagtggccgcatcatcctcatctcctccgtggtcggcctggccgggtcgccgggacaggcgaactacgccgcatccaaggccgggctcgtgggcttcgcccgctcgctcgcccgggaactcgggtcccgcaacatcaccgtcaacgtggtcgcccccggctacatcgagaccgacatgaccgcggcgctgcccgagaaacgccaggaggagatcaagaagaacgtgccgctgggccggtacggcaccaccgccgacgtggcgaaagccgtgcggttcctcgccagcgaggacgccggctacatcacgggtgcggtcatccccgtcgacggcggcctcggcatgggccactga

SEQ ID NO: 118684 - protein, 234 aa, Thermobifida fusca YX
MSRSVLVTGGSRGIGLAIARELKEAGDDVAVTYRTGQPPEGLFGVQCDITDSAQVDAAFKQVEEAHGPVEVLVANAGINKDQLLALMSEEDFNAVLDTNLTGAFRVAKRAVRGMMRKRSGRIILISSVVGLAGSPGQANYAASKAGLVGFARSLARELGSRNITVNVVAPGYIETDMTAALPEKRQEEIKKNVPLGRYGTTADVAKAVRFLASEDAGYITGAVIPVDGGLGMGH

SEQ ID NO: 118685 - DNA, 735 bp, Ehrlichia canis str. Jake
  CDS (1)..(735): transl_table=11
atgtttaacctatcacaaaagagatttttaattactggtgcatctggtggtcttggtcaagctataacaaaagctttatcaaatgcaggagccacactttgtatttcaggaaccagagagtctgtgttagaaaaaattgctgaacaatatccaaatacatatgttctaccttgtgatttaaccaataatgaacatgttaatagtttaattaataacgcctgtaaagctatgtctggaattgatggaatagtatgtaatgctggtattactctagataaattaacattacgtactactgatgaagattggaataaagttatcaatacaaatttaacaacaacttttaagttaaaccgtaatgcatgccgtgcaatgttaaaaaataatcaaggaagagtcattaacatatcctcagttgtggcattcactggcaatctaggacaagcaaattattcagcatctaaagctggtatgatagctatgagcaaatcaatagcaagagaatttgcaagcagaaatataactgtaaattgcatagcaccaggttttattgaaacaccaatgacagacgtattatcagaagaacaacgtaataatattctaacacatattcctatgcagagaatgggcacaccagaagaagtagctgcagcagttttattcttagctagtgatgaaagcagatacattacaggtcagactttacatgtaaatggcggaatgctaatgtattaa

SEQ ID NO: 118686 - protein, 244 aa, Ehrlichia canis str. Jake
MFNLSQKRFLITGASGGLGQAITKALSNAGATLCISGTRESVLEKIAEQYPNTYVLPCDLTNNEHVNSLINNACKAMSGIDGIVCNAGITLDKLTLRTTDEDWNKVINTNLTTTFKLNRNACRAMLKNNQGRVINISSVVAFTGNLGQANYSASKAGMIAMSKSIAREFASRNITVNCIAPGFIETPMTDVLSEEQRNNILTHIPMQRMGTPEEVAAAVLFLASDESRYITGQTLHVNGGMLMY

SEQ ID NO: 118687 - DNA, 771 bp, Thiobacillus denitrificans ATCC 25259
  CDS (1)..(771): transl_table=11
atggaggagggacgcttcgcacagcgtgcgaatctgcaaggccgggtcgcgctggtcaccggcgcgagccggggcatcggtcaggcgatcgcgctcgcgctcggcgaggcgggggccaccgtggtcggcacagcgaccagcgacaagggtgcacaggcgatcggcgactacctcgtcgcggccggcgtcaaaggcgcgggcatgacgctcgacgtcaccgacgccgccgaagtcgatgccgtcatcgcggccatcggcaagcagttcggcgacatcggcgtgctcgtcaacaacgccggcatcacccgcgacaacctgctgatgcgcatgaaggacgaggagtgggacgacatcctggcgaccaatctgacctcggtcttccgcctgtcgcgcgccgtgctgcgcgcgatgatgaaggcgcgcagcggccgcatcatctcgatcgcgtcagtggtcggggcgatgggtaacgccgggcagaccaactacagcgcggccaaggccgggatcatgggcttcacgaagtcgctggcgcgcgaagtcggcagtcgcaacatcacggtcaattgcgtcgcgcccggcttcatcgataccgacatgacccgtgcactgcccgacgcccaacgcgaggccttgcttgcgcatattccgctcggcagactgggcgccgccgacgatatcgcacaggctgtcgccttcctggcgtcgcccgcggcgggctatatttcgggcacgaccttgcacgtcaacggcggtatgtacatggcgtga

SEQ ID NO: 118688 - protein, 256 aa, Thiobacillus denitrificans ATCC 25259
MEEGRFAQRANLQGRVALVTGASRGIGQAIALALGEAGATVVGTATSDKGAQAIGDYLVAAGVKGAGMTLDVTDAAEVDAVIAAIGKQFGDIGVLVNNAGITRDNLLMRMKDEEWDDILATNLTSVFRLSRAVLRAMMKARSGRIISIASVVGAMGNAGQTNYSAAKAGIMGFTKSLAREVGSRNITVNCVAPGFIDTDMTRALPDAQREALLAHIPLGRLGAADDIAQAVAFLASPAAGYISGTTLHVNGGMYMA

SEQ ID NO: 118689 - DNA, 756 bp, Anabaena variabilis ATCC 29413
  CDS (1)..(756): transl_table=11
atggcgatcttaagtgaaaatttacgaggacaagttgccgttgttacaggtgcttcacggggtattggacgagcgatcgccttagaattagctaattatggtgctactgtagtggtcaattacgctagttctagcactgctgccgatgaagtggtagcagaaattacaggggctggtggtgaggctgtagctctacaagccgatgtttcccaagttgatcaagtagataatctcatcgatggggcgatcgataaattcaaacacattgatattttagtaaataatgcaggtattacccgcgatacactgctactaagaatgaagccagaagactggcaagcggtcattgaccttaacttaactggtgtatttttatgcactcgtgccgtcagtaaactcatgcttaagcaacgttctggcagaattattaacattacctctgtggctggacaaatgggtaatcccggccaggcgaattacagcgctgccaaagcaggtgtgattggctttacgaaaacagttgctaaagaattagcttctcgcggcattaccgttaacgctgtcgctcctggtttcatcgctacagacatgaccagcaacctcaaatctgagggtattttgcaatacatccctctaggtcgttatggtcaaccagaggaaattgctggtatggtacgcttcctagccgccgatcccgccgccgcttatatcactggacaagtctttaatgtcgatggcgggatggtaatggcttaa

SEQ ID NO: 118690 - protein, 251 aa, Anabaena variabilis ATCC 29413
MAILSENLRGQVAVVTGASRGIGRAIALELANYGATVVVNYASSSTAADEVVAEITGAGGEAVALQADVSQVDQVDNLIDGAIDKFKHIDILVNNAGITRDTLLLRMKPEDWQAVIDLNLTGVFLCTRAVSKLMLKQRSGRIINITSVAGQMGNPGQANYSAAKAGVIGFTKTVAKELASRGITVNAVAPGFIATDMTSNLKSEGILQYIPLGRYGQPEEIAGMVRFLAADPAAAYITGQVFNVDGGMVMA

SEQ ID NO: 118691 - DNA, 738 bp, Rhodobacter sphaeroides 2.4.1
  CDS (1)..(738): transl_table=11
atgttcgatctgacgggaaaatcggcgctcatcaccggcgcttcgggcggcatcggcggcggcatcgcgcgcgcgctccatgcggcgggggcgacggtggcgctctccggcacgcggacgggaccgctcgaagagctggcggccgagctgggggatcgcgcccatgtgctcgcctgcaacctctcggatgcggcggccgtcgaggcgctgccgaagcaggcggccgaggcgatgggcgcggtcgacatcctcgtgaacaatgcgggcatcacccgcgatcagctcgccatgcgcatgtcggacgaggattgggagcaggtgatcgaggtgaacctgacctcgaccttccggctctgccgcggcgtgctgcgcggcatgatgaaggcgcgctgggggcggatcgtcaacatcacctccatcgtgggcgcgacgggcaatccggggcaggccaattatgccgcctcgaaggcgggcgtcgtggccatgtcgaaaagctttgcggccgaggtggcgagccgcggcatcaccgtcaatgcggtggcgccgggcttcatcgcgaccgcgatgaccgacaagctgaacgacgagcagaaggcgcggattctgggtcaggtgccgatgggccggatgggcgcccccgacgatatcgcggcggccgtgctctatctggccagtcccgcggcgggctatgtgacgggggccacgctccatgtgaacggcggcatggcgatgctgtga

SEQ ID NO: 118692 - protein, 245 aa, Rhodobacter sphaeroides 2.4.1
MFDLTGKSALITGASGGIGGGIARALHAAGATVALSGTRTGPLEELAAELGDRAHVLACNLSDAAAVEALPKQAAEAMGAVDILVNNAGITRDQLAMRMSDEDWEQVIEVNLTSTFRLCRGVLRGMMKARWGRIVNITSIVGATGNPGQANYAASKAGVVAMSKSFAAEVASRGITVNAVAPGFIATAMTDKLNDEQKARILGQVPMGRMGAPDDIAAAVLYLASPAAGYVTGATLHVNGGMAML

SEQ ID NO: 118693 - DNA, 741 bp, Geobacter metallireducens GS-15
  CDS (1)..(741): transl_table=11
atgagtcttgaaggtaaggttgcaatcgtaacgggagcctcaaggggaatcggcagggccatcgccctaaaactcgccagggagggggccagtgtggtggtgacggccacgacactggaaagcgcccggaaaactgcggcagagattgaagcgctcgggcacaaagccctgtctctggccgtagatgttgccgactcgtctgcagtggaagccatgttcgtatcggcggtcggagcttttgggaaggttgatatccttgtgaacaacgcgggtatcacgaaggacggccttctcctcagaatgaaagatgccgattgggatgcggttatcgatgtgaacctcaagggagctttcaactgcatccgcgaggcggcaaagctcatggtcaaggctcgtagcggccgcattgtcaatatcagttccgttgttggcgagatgggtaatgcaggacagatcaactattgcgcaagcaaggcaggcatgatcgggcttacaaaatcggcagcccgcgagcttgccaagcggggaattacggtcaatgccgtaacgcccggattcattgagacgaatatgacgtcggttctttccgacaaggtgcgcgaagggctcttacaacaaattcctcttgagcgtctcggcacgtcggatgatgttgcaaatgctgtttttttccttgtctcgtcaatgggggactacataacagggcatgtcctttcagtaaatggcggcatgtacatgtga

SEQ ID NO: 118694 - protein, 246 aa, Geobacter metallireducens GS-15
MSLEGKVAIVTGASRGIGRAIALKLAREGASVVVTATTLESARKTAAEIEALGHKALSLAVDVADSSAVEAMFVSAVGAFGKVDILVNNAGITKDGLLLRMKDADWDAVIDVNLKGAFNCIREAAKLMVKARSGRIVNISSVVGEMGNAGQINYCASKAGMIGLTKSAARELAKRGITVNAVTPGFIETNMTSVLSDKVREGLLQQIPLERLGTSDDVANAVFFLVSSMGDYITGHVLSVNGGMYM

SEQ ID NO: 118695 - DNA, 744 bp, Desulfovibrio desulfuricans G20
  CDS (1)..(744): transl_table=11
atgagcgaacttatctccaccgcactggtcacgggcggctcacgcggcatcggcaaatgcattgccgaaacactggccgcgcaaggttttcaggtactgcttacctatgtgagcaaacctgaagaagccgaaaccgtggccgagtccatccgcactgcgggcggacaggcaagggcccttcgtctgaatgtgggcgaccccgaagaggtggccgcattctttaaaaacgaagtgaaggacaaagtccggctggatgtgctggtgaacaacgccggcataaccaaagacgggctgctcatacgcatgaaagatgaggactttgcacgggttgtcagtgtaaacctgcagggcgccttttcatgcagccgcgaagcggccaaaataatgagcagacaacgctgcggccgcatcatcaacatcacctcggtggtgggccagatgggcaacgccggacaagccaactactgctccgccaaggccggtcttataggacttaccaagtccgccgccaaggagcttgcagcgcgcaacatcaccgtaaacgccgtggcacccggtttcatagagaccgacatgaccagagcgcttgccgacaatgtgcgcgaacagtacctttccgccattccgctgcgccgtctcggcagtgcacaggatgtggcggatgccgtggcctttcttgcttctgacaaggctggctacattaccgggcaggtcatcgccgtcaacggcggtctgtacacctag

SEQ ID NO: 118696 - protein, 247 aa, Desulfovibrio desulfuricans G20
MSELISTALVTGGSRGIGKCIAETLAAQGFQVLLTYVSKPEEAETVAESIRTAGGQARALRLNVGDPEEVAAFFKNEVKDKVRLDVLVNNAGITKDGLLIRMKDEDFARVVSVNLQGAFSCSREAAKIMSRQRCGRIINITSVVGQMGNAGQANYCSAKAGLIGLTKSAAKELAARNITVNAVAPGFIETDMTRALADNVREQYLSAIPLRRLGSAQDVADAVAFLASDKAGYITGQVIAVNGGLYT

SEQ ID NO: 118697 - DNA, 738 bp, Rhodospirillum rubrum ATCC 11170
  CDS (1)..(738): transl_table=11
atgttcgatctgaccggcaagaaagccctggtgaccggggcgtctggtgggctgggtgcgtcgatcgccaaggctctggccgatcgcggcgccagcgtcgccctgtcggggacccgcgaggcggccttgaacgagaccgccgtgttcctgggcaaggacgtgcccatcctgccctgcgacctgtccgacaccgctgcggtcgagcggctgatcccggcggccgaagccgccctctcgggtcttgatatcctggtcaacaacgccggattgacccgcgacatgctgtcgatgcggatgaaggacgaggaatgggatcaggtgatcgccgtcaacctcagcgccgccttccgcctgtcgcgctcggcggtgaagggcatgatgaaacggcgctggggccgcatcgtcaatatcacctcgatcgtcggcgtcaccggcaatcccggtcaggccaattacgccgcctccaaggccggcctgatcggcctgagcaagtcgatggccgccgaagtggcggcgcgccacatcaccgtcaattgcgtggcgcccggtttcatcgccacggcgatgaccgataagttgaacgaaaagcaaaaagaggccatcttgccccatatccccgccggacgcatgggggcgcccgaggacgtggccgccgccgtcgtttatttggcgagcgaagaggcggcctatgtcaccggccagaccttgcatgtcaacggcggcatggcgatgatttga

SEQ ID NO: 118698 - protein, 245 aa, Rhodospirillum rubrum ATCC 11170
MFDLTGKKALVTGASGGLGASIAKALADRGASVALSGTREAALNETAVFLGKDVPILPCDLSDTAAVERLIPAAEAALSGLDILVNNAGLTRDMLSMRMKDEEWDQVIAVNLSAAFRLSRSAVKGMMKRRWGRIVNITSIVGVTGNPGQANYAASKAGLIGLSKSMAAEVAARHITVNCVAPGFIATAMTDKLNEKQKEAILPHIPAGRMGAPEDVAAAVVYLASEEAAYVTGQTLHVNGGMAMI

SEQ ID NO: 118699 - DNA, 750 bp, Moorella thermoacetica ATCC 39073
  CDS (1)..(750): transl_table=11
atgatccttgatggccaggtggccgttgtaaccggggcttcccgggggattggccgggcgacggccatagaaatggcccgggccggggccagggtggtcgtcaattatgctcgccaggaaggggctgctgccgaggtggtcgccgccattcgcgatggtggaggtcaggctatagctgtgcaagccgatataagtgaccacacggcagccagggagttaatccaggcaactatccaggagtttgggaggctggatatcctggtcaataatgccgggatcgcccgggacaacctggcagccaggttaaaaccggaggactggacggcagtcctccagaccaacctgacgggtattttcaattgctgccaggcggctctaaaacccatgcttcgccagcgccaggggcgtataatcaacctgacttcagtagtcgctctgcgaggcaatgtcggccaggtaaactatgccgcagccaaggccggggtaatcgggtttaccagatctctggctaaagaggttgcctcccggggcatcctggttaatgccgtggctcctggtttcattaccaccgagatgaccgcagtcctggacgaggaaacccggaaagaattttaccggcacatacccctgggtcggccgggtgaaccggaggaggtcgccggagtagtccttttcctggcttcaccggcagccaggtatatgacaggacaggtactggttgtcgacgggggtttgaccctggccctgtaa

SEQ ID NO: 118700 - protein, 249 aa, Moorella thermoacetica ATCC 39073
MILDGQVAVVTGASRGIGRATAIEMARAGARVVVNYARQEGAAAEVVAAIRDGGGQAIAVQADISDHTAARELIQATIQEFGRLDILVNNAGIARDNLAARLKPEDWTAVLQTNLTGIFNCCQAALKPMLRQRQGRIINLTSVVALRGNVGQVNYAAAKAGVIGFTRSLAKEVASRGILVNAVAPGFITTEMTAVLDEETRKEFYRHIPLGRPGEPEEVAGVVLFLASPAARYMTGQVLVVDGGLTLAL

SEQ ID NO: 118701 - DNA, 780 bp, Syntrophus aciditrophicus SB
  CDS (1)..(780): transl_table=11
gtgccgccagttcatgaccatctcgaagttcgcggagtaaaaattatggataaggataaacgccgtacagccctggtcacgggcgcgagccgggggatcgggcgcgctgtggcccttgaactgtcccgagccggatatcatgtggcggttaattaccgctctgatgacgcgagagccgaggaaaccgttttcctgatcgaggctgagggcggcaccgcggagaaactgcgctttgacgtcgttgatcccattgagagtcggcgttgtctcgatgagctgctggccagccgtccatcgctggatgttctggtgaacaatgcgggaatcacggcagataatcttttcctgatgatgccggaagctgactggaactcggtcatccagacgaccctcaacgggttttacaatgtcacgcaacccgtgatcaaggcgatgatgaaagcccgccggggttcagtggtttccatgtcttcgatctcagctctggtgggaaatcggggacagaccaattacgccgcggccaaggcggggctgatcgcggcgagccgctcgctcgccgccgaggtggccagactggggatacgggtcaatgtggttgcaccggggttgatccggacggacatgacacaggatctttcccaggagcggattagggagatgatccccatgaggcgggcgggagagccggaagaagtagccaaggttgtccgttttctctgctcacccgatgcgtcctacatcaccggtcaggtgatctgtgtgaacggcggcatggtctga

SEQ ID NO: 118702 - protein, 259 aa, Syntrophus aciditrophicus SB
MPPVHDHLEVRGVKIMDKDKRRTALVTGASRGIGRAVALELSRAGYHVAVNYRSDDARAEETVFLIEAEGGTAEKLRFDVVDPIESRRCLDELLASRPSLDVLVNNAGITADNLFLMMPEADWNSVIQTTLNGFYNVTQPVIKAMMKARRGSVVSMSSISALVGNRGQTNYAAAKAGLIAASRSLAAEVARLGIRVNVVAPGLIRTDMTQDLSQERIREMIPMRRAGEPEEVAKVVRFLCSPDASYITGQVICVNGGMV

SEQ ID NO: 118703 - DNA, 738 bp, Frankia sp. CcI3
  CDS (1)..(738): transl_table=11
gtggccgctaccatccgacccatgggcgcaaatgagggtcgtgtcgcactggtaacaggtggtaatcgggggatcggcgccgcctgcgccgccgccctgacggccgcgggtgagcgggtcgcggtcgccagccgcgggggcaccgcccccgcggggatgctgggcgtccgtctggatgtcgccaacagtgagagcgtcgacaaggcgttcacggagatcgaagccgagctcgggccggtggagatcgtggtgtccaacgccgggatcgtgcgggacaccctgctggcgacgatgagcgaggacgcgttccaggaggtcgtggacacgaacctgctcggtgcctaccgggtggccaagcgtgcctcccggccgatgatgcggctgcgtcgtggtcggctcatcttcatctcctccgtcgtcgcctccgtcggcggccccggccagtccaactacgcggcgtccaaggccggcctgatcggcttcgcccgttccctcgcccgcgagctggctccgcgcaacatcacctcgaacgtggtcgctccggggccgatccggaccgacatgaccgacgcgctgaccgaggcgcagcgggagcagctcaccgccggcgtccccggtggccgcatgggtgaggccgaggacgtcgcagccctcgtcgccttcctcgcctccccgcaggccggttacatcaacggtgcgctgatccccgtggacggcgggctgagcatggggcactga

SEQ ID NO: 118704 - protein, 245 aa, Frankia sp. CcI3
MAATIRPMGANEGRVALVTGGNRGIGAACAAALTAAGERVAVASRGGTAPAGMLGVRLDVANSESVDKAFTEIEAELGPVEIVVSNAGIVRDTLLATMSEDAFQEVVDTNLLGAYRVAKRASRPMMRLRRGRLIFISSVVASVGGPGQSNYAASKAGLIGFARSLARELAPRNITSNVVAPGPIRTDMTDALTEAQREQLTAGVPGGRMGEAEDVAALVAFLASPQAGYINGALIPVDGGLSMGH

SEQ ID NO: 118705 - DNA, 765 bp, Novosphingobium aromaticivorans DSM 12444
  CDS (1)..(765): transl_table=11
atggaaaatcgtctcttcgaccttaccggcatgaccgccctcgtgacgggcgcggccggcggcatcggctcgtcgatctgccatgcgctggcccggcagggtgcgcggatcgcgctttctggcacaaatccggccaagctccgcgcgttccgcgaggaactgaacgacacttacggcaacgaccatgtcgagatcacctgcgacctctcgaacaccgagcaggtcgagcatctcgtcccggcggcgctcgacacgctgggcaagctcgacatcctcgtgaacaacgccggcatcacccgcgacaacctggcgatgcggatgaaggacgaggaatgggacgcggtgatccgcgtgaacctcgaggcggccttccgccttatgcgggccgcgaccaagccgatgatgaaggcgcgtttcggacgcatcgtgaccatcaccagcgtggtcggcgccaccggcaaccccggccaggtcaactacgccgccgccaaggctgggcttgtcggcatgtcgaagtcgctgggccaagaactggcaagccggggcgtcacggtaaactgcgtcgcgcccggtttcatccggacggcgatgaccgacgtgctgcccgacgggcagaaggacgctctcaacgcccgcattccgatggggcgcatgggcgagggaagcgacatcggcgcggcggttgcatacctcgcgtcgaaggaagcaggttacgttaccgggcagacgctgcacgtgaacggcggcatggcgatgatttcctga

SEQ ID NO: 118706 - protein, 254 aa, Novosphingobium aromaticivorans DSM 12444
MENRLFDLTGMTALVTGAAGGIGSSICHALARQGARIALSGTNPAKLRAFREELNDTYGNDHVEITCDLSNTEQVEHLVPAALDTLGKLDILVNNAGITRDNLAMRMKDEEWDAVIRVNLEAAFRLMRAATKPMMKARFGRIVTITSVVGATGNPGQVNYAAAKAGLVGMSKSLGQELASRGVTVNCVAPGFIRTAMTDVLPDGQKDALNARIPMGRMGEGSDIGAAVAYLASKEAGYVTGQTLHVNGGMAMIS

SEQ ID NO: 118707 - DNA, 738 bp, Anaplasma phagocytophilum HZ
  CDS (1)..(738): transl_table=11
atgtttgatttgcagggcaagaagtttctagttacaggtgcatctagtggcataggggcagccatatctcttatgttatcaaaagctggagctcagttatgcctctcaggcaccagaattgaggctctacaagaagtggcagctgcttgtgagaatgggactcacgttttgcagtgtaacttgctaaattctgataaggtagacaccttagtagacaaggctgtagactgtatgtctggcatggatggggtaatatgtagcgctggaataacgagagacaaattgtctttgcgcatcacagatgatgactggaatcaagtaattgcggtaaatcttactgcgatatttaagataaaccgaaatgcttgcaaggcgatgctgaagaataagagtggtagaatcataaacttatcctccgtggttggcatatctggaaatgtaggacaagcaaactatacagcttcaaaggctgggattattggtatgagtaagtcgcttgctcttgaatttgcttctcgtggcattacagtcaactgcatagcaccgggctttatagatactcctatgacttctgtattacaagacaaacaaaaaggatacatactgaactctatccctatgggccgtatgggaactgctgaggagattgcttccgttgcgttgtttctcgcaagtgatgcaagtaagtacatcacagggcagaccatacatgtaaatggtgggatgctcatgtattaa

SEQ ID NO: 118708 - protein, 245 aa, Anaplasma phagocytophilum HZ
MFDLQGKKFLVTGASSGIGAAISLMLSKAGAQLCLSGTRIEALQEVAAACENGTHVLQCNLLNSDKVDTLVDKAVDCMSGMDGVICSAGITRDKLSLRITDDDWNQVIAVNLTAIFKINRNACKAMLKNKSGRIINLSSVVGISGNVGQANYTASKAGIIGMSKSLALEFASRGITVNCIAPGFIDTPMTSVLQDKQKGYILNSIPMGRMGTAEEIASVALFLASDASKYITGQTIHVNGGMLMY

SEQ ID NO: 118709 - DNA, 741 bp, Neorickettsia sennetsu str. Miyayama
  CDS (1)..(741): transl_table=11
atgggttttagtctccgtgataagcgcatactggtcaccggggcatctggaggtataggagaagctttaattaggtatcttcatgccttgggagccagacttgttatttcgggcactaaagaggcgaaattgcacgccctgaacgcaagtattgattgcggagcacatgttattgtgcaggacctttcagatttggagaatgtgcacctgctcatagaaggctgtaaggaaaaactaggtggtctggacggcttagtttgtaatgctggaatcacggatgataaattgtccttacgtatggggctagattcgtggcagaaggttatcaatgtcaatttaacgtcaagttttatactcaataaaaatgctgcagtgctgatgatgcgtcaaaaatatgggagaatagtgaacatttcttcagtcgttgcggttatgggtaactcaggtcaggtgaactattgtgccgcaaaagctgggatcataggtatgtcaaaaagttttgctcgtgagtttgcatctaaaggggtactggtgaattgcattgcgcctggcttcatcaagactaacatgacggataagctcaccgaagagcaacttgcacaagtacttcctaccattccgatgaagcgggttggattacctgaggaactatgtggtattgtcgctcttctactcagtgatatggcaagttatattacagggcagactttccacgtgaatggcggaatgttgatggtatag

SEQ ID NO: 118710 - protein, 246 aa, Neorickettsia sennetsu str. Miyayama
MGFSLRDKRILVTGASGGIGEALIRYLHALGARLVISGTKEAKLHALNASIDCGAHVIVQDLSDLENVHLLIEGCKEKLGGLDGLVCNAGITDDKLSLRMGLDSWQKVINVNLTSSFILNKNAAVLMMRQKYGRIVNISSVVAVMGNSGQVNYCAAKAGIIGMSKSFAREFASKGVLVNCIAPGFIKTNMTDKLTEEQLAQVLPTIPMKRVGLPEELCGIVALLLSDMASYITGQTFHVNGGMLMV

SEQ ID NO: 118711 - DNA, 744 bp, Desulfitobacterium hafniense Y51
  CDS (1)..(744): transl_table=11
atgttgctgaataatagcgtagccattgtcaccggaggaagtcgcggcattggacgtgccattgccttggaactggcccgtgcaggggctaaagtggtggtgaactatgccggacatggggaaaaggcggaagagactctgagcctgattcaggaagcgggcggagaggctttggcagttcaggctgatgtcagccaggttgaagatgtggaacggctgattcagaccacccttaaaacctatggcaagatcgatattctggtcaataatgccggaattacccgtgacaccttgctgctgcggatgaaggaaacagattgggatgcggtgctggataccaatctcaaaggggttttcttatgcacgaaggcggtcagcaagtccatgatgaagcaacgctccggagttattatcaatatctcctctgtggtcggtattaccggcaatgcgggacaagcgaattacgcggcggccaaagcgggaatcatcggctttaccaaatccatcgccaaagagctgggctcccgtggcatccgggtcaatgcagtggctccggggtatatttctacagatatgacggaatccttaggagaagaggtccgggagcaggtcatgacccagattccgctgggcagaatgggtcagcctgaagatatagccaagacggttgtctttttggcttcaccggccgcttcctacatcaccgggcaaacattagccgtagacggcggcatggctatgtaa

SEQ ID NO: 118712 - protein, 247 aa, Desulfitobacterium hafniense Y51
MLLNNSVAIVTGGSRGIGRAIALELARAGAKVVVNYAGHGEKAEETLSLIQEAGGEALAVQADVSQVEDVERLIQTTLKTYGKIDILVNNAGITRDTLLLRMKETDWDAVLDTNLKGVFLCTKAVSKSMMKQRSGVIINISSVVGITGNAGQANYAAAKAGIIGFTKSIAKELGSRGIRVNAVAPGYISTDMTESLGEEVREQVMTQIPLGRMGQPEDIAKTVVFLASPAASYITGQTLAVDGGMAM

SEQ ID NO: 118713 - DNA, 744 bp, Saccharophagus degradans 2-40
  CDS (1)..(744): transl_table=11
atgtcattcgaaaataaggtagccatcgtaacgggtgcaagccgcggtattggtgaggctattgcaactgcattggcagaagctggtgctactgttattggtacagctacatctgatgctggcgcggctaaaattactgcgcgtatcgctgaggcgggccacaagggcgagggcatgacccttaacgtatcagatgctgattcagtagccgctgtgattaaagctgttacagacaaatatggcgctgctcaaattcttgttaacaatgcaggtatcactaaagataacctattaatgcgtatgagcgatgaagagtggtttgacgtggttaacaccaacttaagcgccatattccgcatgagtaagggttgtttgcgcggcatgatgaaagcgcgctggggccgtattgttaatatcagctcgattgttggtcaaatgggtaatgctggtcaaaccaactactctgcaaccaaagcgggcgtaatgggttttgctcgctctttggccaaagaagtgggttcacgtaacattacagtaaacagcgtttcgccaggttttatcgatacggatatgaccaaagtactgccagaagaacaaaaacaagccatgcaaacagccattgctttggggcgtttggggcagccagaagagattgccaaggttgtaaaattcctttgcagcgaggatgcaagctacattaccggtgaaaatattcacgttaacggtgggatgtacatgtgctaa

SEQ ID NO: 118714 - protein, 247 aa, Saccharophagus degradans 2-40
MSFENKVAIVTGASRGIGEAIATALAEAGATVIGTATSDAGAAKITARIAEAGHKGEGMTLNVSDADSVAAVIKAVTDKYGAAQILVNNAGITKDNLLMRMSDEEWFDVVNTNLSAIFRMSKGCLRGMMKARWGRIVNISSIVGQMGNAGQTNYSATKAGVMGFARSLAKEVGSRNITVNSVSPGFIDTDMTKVLPEEQKQAMQTAIALGRLGQPEEIAKVVKFLCSEDASYITGENIHVNGGMYMC

SEQ ID NO: 118715 - DNA, 735 bp, Methylobacillus flagellatus KT
  CDS (1)..(735): transl_table=11
atgttggaaggacaagttgccctagtcaccggcgccagccgtgggattggcgccgccattgcgcaggagctggcaaaacagggcgccaaggtagtcggcaccgcgaccagcgagtccggcgctgccaatattacgcagtcgttgagcgcccacggcggcatcggattagcgcttgatgtcaacgacgccgggcaggtcgaggctgtattgaagaatattgccggccagtttggcgatgtcaccatcctggtgaataatgcgggcatcacgcgcgataccttgttgatgcgtatgaaagacgaggattgggatgccgtgatcgcgaccaacctgacatccgtctaccggatgtcgcaagcggtgctgcgcccgatgatgaaggcaagaagtggccgtatcatcaatatctcttcggtggtaggccatatgggcaaccccggccaggccaactatgctgcggccaaggccggcatggcaggattcacacgctcgctggcggcagaggtcggcagccgtggtattacagttaactgtgtagcgcccggcttcatcgataccgatatgacgcgggaactgcctgataatgtccgcgaggaattattgaagcgcgtgccggcagggcgctttggcgatgtaaaggatattgcggcagctgttgcctttctggcgtcaccagcagctggctacattactggggaaaccctgcatgtgaatggtggcatgtacatggcgtaa

SEQ ID NO: 118716 - protein, 244 aa, Methylobacillus flagellatus KT
MLEGQVALVTGASRGIGAAIAQELAKQGAKVVGTATSESGAANITQSLSAHGGIGLALDVNDAGQVEAVLKNIAGQFGDVTILVNNAGITRDTLLMRMKDEDWDAVIATNLTSVYRMSQAVLRPMMKARSGRIINISSVVGHMGNPGQANYAAAKAGMAGFTRSLAAEVGSRGITVNCVAPGFIDTDMTRELPDNVREELLKRVPAGRFGDVKDIAAAVAFLASPAAGYITGETLHVNGGMYMA

SEQ ID NO: 118717 - DNA, 747 bp, Acidobacteria bacterium Ellin345
  CDS (1)..(747): transl_table=11
atgtccggtgtgcagggaagagtcgcgttgatcacgggagcttcgcaggggataggccgcgcgtgcgcgctggcattgggcgaagccggcgccacagtcgcgctcgccgctcgtaatcgcgagaagctcgacgaagtcgccgctcagatcacaaacgccggtggtcaagcctcggtcttcccgctcgacgtcaccgacgaagagcagatcaaggccacggtcaaagaagtgctcgcgaagcacggccacgtcgacatcctcgtcaacaatgcgggcgtgacgaaggaccagctcttcatgcggatgaagcgcgccgactgggaaaccgtgatgaataccaacctcaccagcgccttcctgctctcgcaggccgtcatcggctcaatgatgaagcagcgctgggggcgcatcgtgaacatcaccagcatcgttggccaaaccggacaggcaggccaggtgaactacgcgtcctcgaaagctggcttgatcggcctcaccatgtcggtcgcgcgtgaagtcgcgtcgcgcaatatcacctgcaatgccgttgcgccggggttcatcgagactgcgatgaccgccgtccttggcgacgatgtgaaagcgaagatcaacgagcagatcccgctgggccggcagggaagcgattcggacattgcccaagccgtgaagttcctggcgtctgaagaagcgggttatatcaccgggcacgtgctgaacgtgaacggcggaatgttgatgggctaa

SEQ ID NO: 118718 - protein, 248 aa, Acidobacteria bacterium Ellin345
MSGVQGRVALITGASQGIGRACALALGEAGATVALAARNREKLDEVAAQITNAGGQASVFPLDVTDEEQIKATVKEVLAKHGHVDILVNNAGVTKDQLFMRMKRADWETVMNTNLTSAFLLSQAVIGSMMKQRWGRIVNITSIVGQTGQAGQVNYASSKAGLIGLTMSVAREVASRNITCNAVAPGFIETAMTAVLGDDVKAKINEQIPLGRQGSDSDIAQAVKFLASEEAGYITGHVLNVNGGMLMG

SEQ ID NO: 118719 - DNA, 750 bp, Myxococcus xanthus DK 1622
  CDS (1)..(750): transl_table=11
atgagcggcttcaaggacaaggtcgtgctcgtgacgggtggctcgcgcggcatcggccgggcgtgcgcggtggccttcgccaaggcgggggcctccaccgtggtcatcagctatgcgggcaacgaggcggcggcccaggagacggtggccctgctccaggcggagggcgccaaggcggaggccatccgcttcgacgtgtccgacagcgccgcctgcgccagcgccgtggacggcatcgtcaagggccacggccggctggacgtgctcgtcaacaacgcgggcgtcgcggtggacggcctggtgatgcgggtgaaggacgaggactgggacaagcagttggacaccaacctcaagggcgccttctcgctcatccgcgccgtcagccggcccatgatgaagcagaagggcggcgccatcatcaacatcacctccgtggtgggggagatgggcaacggcggtcaggcggcctactcggcgtccaaggcggggctcatcggcctgaccaagtccgtggcgcgcgagctgtccagccggaacatccgcgtcaacgccgtgtcccccggcttcatcgggacggacatgacgcatcagatcaatgacgagatgcgccagaagatgctggagggcatccccctgggtcggttgggcaatccggaggaggtcgccggcgccgtgctcttcctggcgggggacgccgcgtcctacatcaccggcgaggtcctgaaggtcaacggcggaatgtacatgtaa

SEQ ID NO: 118720 - protein, 249 aa, Myxococcus xanthus DK 1622
MSGFKDKVVLVTGGSRGIGRACAVAFAKAGASTVVISYAGNEAAAQETVALLQAEGAKAEAIRFDVSDSAACASAVDGIVKGHGRLDVLVNNAGVAVDGLVMRVKDEDWDKQLDTNLKGAFSLIRAVSRPMMKQKGGAIINITSVVGEMGNGGQAAYSASKAGLIGLTKSVARELSSRNIRVNAVSPGFIGTDMTHQINDEMRQKMLEGIPLGRLGNPEEVAGAVLFLAGDAASYITGEVLKVNGGMYM

SEQ ID NO: 118721 - DNA, 747 bp, Rubrobacter xylanophilus DSM 9941
  CDS (1)..(747): transl_table=11
atgatagccgaaggaagggtggcggtggtcaccgggggagggaggggcatcgggcgcgcggtcgccgtgcggctggccggggagggggcgcaggtggcgctctcctaccgctccaacgacgccgccgcggaggagaccgcggagctggtgcgcggggccggggtccgctgcgagctcttcaggggggacgtcgcctcctccggcgacgtcaaggccctcttcgacggcgtcgccggggccttcggacgggtcgacatcctcgtcaacaacgccggcatcacccgggacaacatcatgctccgcatgaaagaggaggagttcgacgaggtgctcaggaccaacctcaagggcacctacctctgcacccgggcggcgctgcggcccatgctgcgggcgcggtggggcaggatcgtcaacatcagcagcgtggtcggtttggtgggcaacgccgggcaggccaactacgccgcctccaaggccgggatcatcggcttcaccaagagcgtggcgcgggaggtcgcccagcgcggcatcaccgtcaacgccgtggcgcccgggtacgtggagaccgagctcaccggcggcctcccggaggacataaagcggggcatcctcgcccagaccccggccgggcgcttcggggagcccggggaggtcgcggaggtcgtcgcctttctggccggggagggggccggctacgtaaccggacagaccatcgccgtcgacggcggcatgaccatgcactag

SEQ ID NO: 118722 - protein, 248 aa, Rubrobacter xylanophilus DSM 9941
MIAEGRVAVVTGGGRGIGRAVAVRLAGEGAQVALSYRSNDAAAEETAELVRGAGVRCELFRGDVASSGDVKALFDGVAGAFGRVDILVNNAGITRDNIMLRMKEEEFDEVLRTNLKGTYLCTRAALRPMLRARWGRIVNISSVVGLVGNAGQANYAASKAGIIGFTKSVAREVAQRGITVNAVAPGYVETELTGGLPEDIKRGILAQTPAGRFGEPGEVAEVVAFLAGEGAGYVTGQTIAVDGGMTMH

SEQ ID NO: 118723 - DNA, 738 bp, Mesorhizobium sp. BNC1
  CDS (1)..(738): transl_table=11
atgtttgatctcaatggccgcaaggctctcgtcacgggagcaaccgggggcatcggcgaggcgatcgccagggcgcttcacaagcagggcgcgattgtgggcctgcacgggacgcgggtggaaaaactcgaagcgcttgcaggcgaacttggcgaaagggcaaagatatttgccgcgaatctttcggaccgcgatgacgtgaaggctttcgccgagcgcgccgaatcagagctcgaagggatcgacattctcgtcaacaatgcagggatcacccgcgacgggcttttcgtgcgcatgagcgacgaggactgggacgcggtgatcgaaaccaatctgactgccgccttcaggctcacccgcgcgctgacgcatcccatgatgcgccgccgctggggccgcatcatcaacatttcctccgtggtgggcgtggccggcaatccagggcaggcgaattattgcgcttccaaggccggtctcatcgggttttccaagtcgctcgcccaggaggtcgccagccgcaacatcacggtcaattgcgtggcgccgggtttcattgagacggcgatgacggacaagctgaacgagaagcagcgcgaatccatcatgggcgccattcccatgaggcgcatgggctcaggagaggagattgccacggctgtggtctatcttgcctccgaggaggcggcctatgttaccggccagaccattcacgtgaatggcgggatgctgatggtctaa

SEQ ID NO: 118724 - protein, 245 aa, Mesorhizobium sp. BNC1
MFDLNGRKALVTGATGGIGEAIARALHKQGAIVGLHGTRVEKLEALAGELGERAKIFAANLSDRDDVKAFAERAESELEGIDILVNNAGITRDGLFVRMSDEDWDAVIETNLTAAFRLTRALTHPMMRRRWGRIINISSVVGVAGNPGQANYCASKAGLIGFSKSLAQEVASRNITVNCVAPGFIETAMTDKLNEKQRESIMGAIPMRRMGSGEEIATAVVYLASEEAAYVTGQTIHVNGGMLMV

SEQ ID NO: 118725 - DNA, 747 bp, Cytophaga hutchinsonii ATCC 33406
  CDS (1)..(747): transl_table=11
atgggcttacttagtggaaaaactgctctggtaacaggagcatcaaaaggcataggaaaatcgatcgcgatgcgttacgcacaggaaggtgctaatgtggcgttcacctatctttcaagcgttgaaaaaggtcaggcattagaaaaagaattacaggcattgggtatcaaagcaaaaggataccgctcagatgcatctaaatatacagaagcagaagaattagtaacttccgtattagcagactttggacagcttgatattgttgtaaacaatgcaggtattacaaaagatggcttattaatgcgtatgacagaagaacaatgggattctgttatggaagtaaatttaaaatcggtatttaacctgacaaaagcggcattaaaaccaatgatgaaagcgaaagcaggttctattataaatatgacttctgttgtgggcatcagcggtaacgccggccagacaaactacgctgcctctaaagcaggtatcattggtttcacaaaatcagtagcgcaggaattgggttcacgcaacatccgctcaaacgcaattgccccgggttttattgaaacagaaatgacggaagtactggacccgaaagtgaaagctgaatgggaaaacggaattccgttgaaacgtgccggaaaaagtgaagatgtagcgaatgcctgtgtattccttgcatcagatctttcaacatacattaccggacaggtattacaggttgatggcggaatgctgacctag

SEQ ID NO: 118726 - protein, 248 aa, Cytophaga hutchinsonii ATCC 33406
MGLLSGKTALVTGASKGIGKSIAMRYAQEGANVAFTYLSSVEKGQALEKELQALGIKAKGYRSDASKYTEAEELVTSVLADFGQLDIVVNNAGITKDGLLMRMTEEQWDSVMEVNLKSVFNLTKAALKPMMKAKAGSIINMTSVVGISGNAGQTNYAASKAGIIGFTKSVAQELGSRNIRSNAIAPGFIETEMTEVLDPKVKAEWENGIPLKRAGKSEDVANACVFLASDLSTYITGQVLQVDGGMLT

SEQ ID NO: 118727 - DNA, 750 bp, Rhodococcus sp. RHA1
  CDS (1)..(750): transl_table=11
atgtctaccccacaaactactgacgcgtcagttaggacggtgtccactcctcggtcggtgctcgtcaccggcggcaaccgcgggatcggcctcgctgtcgcgcagcgcctcgcggcggacggccacaaggtcgcggtcacgcaccgcggctcgggtgcgccggacggcctgttcggcgtccagtgcgacgtcaccgacaccgagtcggtcgaccgcgccttcaaggaggtggaagcgcaccagggtcccgtcgaggttctcgtcgcgaacgccggcatcaccgacgacacgctgatcatgcggatgaccgaggagcagttcacctccgtcgtcgacgccaacctgaccggcgcgttccgtgtcgcgaagcgggccacacggtcgatgctgcgggcgcggttcggccggttcgtgttcctcgggtccgtcgtcggtctggccggtggtcccggccaggtgaactacgcggcgtcgaaggccggcgtggtcggcatcgcacggtcgctgacccgtgagctcggttcccggtcgatcaccgcaaacgtggtggccccgggattcatcgacaccgacatgactgcggtcctggacgacaagtacaaggacatgatcaccggcgcggttccgttgcagcggcagggcaagcccgaggaggtcgccgcggtggtgagcttcctggcctccgacgattccgcctacgtctccggcgcggtgatccccgtcgacggcggcctcggcatgggccactag

SEQ ID NO: 118728 - protein, 249 aa, Rhodococcus sp. RHA1
MSTPQTTDASVRTVSTPRSVLVTGGNRGIGLAVAQRLAADGHKVAVTHRGSGAPDGLFGVQCDVTDTESVDRAFKEVEAHQGPVEVLVANAGITDDTLIMRMTEEQFTSVVDANLTGAFRVAKRATRSMLRARFGRFVFLGSVVGLAGGPGQVNYAASKAGVVGIARSLTRELGSRSITANVVAPGFIDTDMTAVLDDKYKDMITGAVPLQRQGKPEEVAAVVSFLASDDSAYVSGAVIPVDGGLGMGH

SEQ ID NO: 118729 - DNA, 759 bp, Trichodesmium erythraeum IMS101
  CDS (1)..(759): transl_table=11
atggaagcattgccagaaacattacaacgtttaaaaggaaaagtagcaatagttacaggtgcatccagaggaattggccgagcaacagctttagcattagcaatggaaggggcaaatgtagttgttaactatgctaaatctagtgatactgctgaggaagtagtagcagaaatagttgcggcgggtggtaacggtctggcactacaagcagatgtttctcaagttgaggaagtggataacttaattaaagaagtgatggaaaagtggagtcgtgttgatatcttagttaataatgctggtattactcgcgatacattactgctgcggatgaaactagaagactggcagtcagtaatagacttaaatttgacaggagtatttctttgtactcgtgctgtgagtaaaattatgctcaaacaaaaaagtgggcgcattattaatgttgcttcagtgtccgggcaaatgggtaatcctggtcaagctaattatagcgcagcaaaagcaggagtaattggctttactaaaactgtggccaaagaacttgctaatagaggaattacagcaaatgtggttgctcctgggtttattgagactgatatgactaaagacctgaaaaattctgaggaaattattaagtttattcctctaggtcgttatggtaaaccagaagaggtagcaggtatgattaggtttttagctgctgatgatgcggcgagttatattacggctcaagtatttaatgtagatgggggtttttaa

SEQ ID NO: 118730 - protein, 252 aa, Trichodesmium erythraeum IMS101
MEALPETLQRLKGKVAIVTGASRGIGRATALALAMEGANVVVNYAKSSDTAEEVVAEIVAAGGNGLALQADVSQVEEVDNLIKEVMEKWSRVDILVNNAGITRDTLLLRMKLEDWQSVIDLNLTGVFLCTRAVSKIMLKQKSGRIINVASVSGQMGNPGQANYSAAKAGVIGFTKTVAKELANRGITANVVAPGFIETDMTKDLKNSEEIIKFIPLGRYGKPEEVAGMIRFLAADDAASYITAQVFNVDGGF

SEQ ID NO: 118731 - DNA, 753 bp, Synechococcus sp. CC9311
  CDS (1)..(753): transl_table=11
atgagttcatccgcttctcttgacggtcaaaccgctcttgttacaggtgcaagtcgtggcatcggacgtgcagtggccttggctttggccgctgagggtgcagaagtggtggtgaattacgccagttcttctgatgcggctgaggcagtggttgccgaaattcaggccaagggcggctccgcttatgccctccaggccgatgttgctgatgaggcttcggtggacgatttgattaaaacggtgttgaagcgaagtgaacgcatcgacgtgctggtgaataacgcggggattacgcgggacggcttgttgatgaggatgaaaaccgaggattggcaggcggtgatcaatctcaatctcactggagtctttctctgtacgagggccgtgacacgcccaatgttgaaacagcggagtggtcgcatcatcaacatcacctcggtggttgggctgatgggcaacgccggacaagccaattacgcagcagccaaagccggcgttgtgggactgacgcgaagtagcgccaaggagatggcaagccgtggaatcacggtgaatgccgtggcacctggtttcattgccactgatatgacgaaagaccttgaggcagatgccatcctttctgccattcctttgggacggtttggatcccctgatcaggtggctggagctgtgaggttcttagctgctgaccctgccgctgcttacatcacggggcaagtgcttcaggtggatggtgggatggtcatgagttga

SEQ ID NO: 118732 - protein, 250 aa, Synechococcus sp. CC9311
MSSSASLDGQTALVTGASRGIGRAVALALAAEGAEVVVNYASSSDAAEAVVAEIQAKGGSAYALQADVADEASVDDLIKTVLKRSERIDVLVNNAGITRDGLLMRMKTEDWQAVINLNLTGVFLCTRAVTRPMLKQRSGRIINITSVVGLMGNAGQANYAAAKAGVVGLTRSSAKEMASRGITVNAVAPGFIATDMTKDLEADAILSAIPLGRFGSPDQVAGAVRFLAADPAAAYITGQVLQVDGGMVMS

SEQ ID NO: 118733 - DNA, 756 bp, Alkalilimnicola ehrlichei MLHE-1
  CDS (1)..(756): transl_table=11
atgttcagcaatcaggcgctggagaatcaggtggccctggtcaccggggccacccgcggaatcggccgcgccatcgcgctccaactgggcgccatgggtgcaacggtggtgggcaccgccacctccgagaagggcgccgagcgcatcggtgagaccctgagcgcccagggcatcgccgggggcggccgggtgttggacgtgaccgatcccgaccaggtggccgaggtggtcaaggccatcggcgccgacttcggcgccccgacggtgctggtgaacaacgccggcatcacccgcgacaacctgatgatgcgcatgaaggaggaggactggagtcggatcctcgacaccaacctcagctccgctttccggatggtaaaggcctgcatgcgcggcatgatgaaggcccgccagggccggatcatcaacatcggttcggtggtggcgtctgcgggtaacgccggtcaggccaactactgcgccgccaaggcgggcttggagggcctgacccgctccctggcccgtgagctgggcagccgcgggatcacggtgaacaccgtggcaccgggctttatcgaaaccgacatgactcgggagatgcccgaggcgcagcgtgaggccctggtgggccagatcgcgctggagcgcctgggccaacccgaggacattgccgccaccgtgggctttctggccacaccggcggccggttacatcaccggtagcaccctgcatgtcaacggcggcatgtatatgggctaa

SEQ ID NO: 118734 - protein, 251 aa, Alkalilimnicola ehrlichei MLHE-1
MFSNQALENQVALVTGATRGIGRAIALQLGAMGATVVGTATSEKGAERIGETLSAQGIAGGGRVLDVTDPDQVAEVVKAIGADFGAPTVLVNNAGITRDNLMMRMKEEDWSRILDTNLSSAFRMVKACMRGMMKARQGRIINIGSVVASAGNAGQANYCAAKAGLEGLTRSLARELGSRGITVNTVAPGFIETDMTREMPEAQREALVGQIALERLGQPEDIAATVGFLATPAAGYITGSTLHVNGGMYMG

SEQ ID NO: 118735 - DNA, 738 bp, Hyphomonas neptunium ATCC 15444
  CDS (1)..(738): transl_table=11
atgtttgacctgaccggccgcacggcccttgttaccggcgcatcgggcggcattggccgcgccatcgcccaggcgctttccgattgcggggcaaaggtggctctctccggcacccgcgaagcggtcctgcaggaggttgcctccaccctgaagggggaaacggccatcgtgccgtgcaacctgtctgatccggctgctgtggacgcgctggtcgggcaggcggaagcggccattggcccgctggatattctgatcgcgaacgccggcatcacgcgcgacaaactactcatccagatgaaggatgaggactggaatgatgtgctcaatgttaacctgggaagctatttccgcctgacgaaatcagctgtcaggggaatgatgaagcgccgccatggccgcatcattggaatcacttcggtcgtcggcgttaccggaaatccgggccagacaaattattgtgcatcaaaagcgggtatgatcggcttcacaaaatcgatcgctcaggaggtcgcttcaaggggcatcacggccaatacaattgcacctggcttcatcgaatcaccgatgaccgaaggcctgccggaagcccagaaaacggcgcttttggggcagattccaacaggaaggctcggtcagggcggcgacattgctgctgcggcagtgtatcttgcttcgaatgaagcggcttatgtcaccggccagacgctgcacgtaaatggcggtatggcaatgatttag

SEQ ID NO: 118736 - protein, 245 aa, Hyphomonas neptunium ATCC 15444
MFDLTGRTALVTGASGGIGRAIAQALSDCGAKVALSGTREAVLQEVASTLKGETAIVPCNLSDPAAVDALVGQAEAAIGPLDILIANAGITRDKLLIQMKDEDWNDVLNVNLGSYFRLTKSAVRGMMKRRHGRIIGITSVVGVTGNPGQTNYCASKAGMIGFTKSIAQEVASRGITANTIAPGFIESPMTEGLPEAQKTALLGQIPTGRLGQGGDIAAAAVYLASNEAAYVTGQTLHVNGGMAMI

SEQ ID NO: 118737 - DNA, 726 bp, Hyphomonas neptunium ATCC 15444
  CDS (1)..(726): transl_table=11
atggcgaaaacggctctggtgaccggcggtacgcgcggcatcggcaaggcaatcagcgaaatgctgcaagcgaaaggctactcagtggccgccaattatggtggcaatgacgcagccgccgcagcattttcaaaggaaaccggcatcaaggtcttcaaattcgacgtggccgattatgacgcggtcggcgtgggcctgaaggcggtcgaggcggaagtcggtcccgtggacgtgctggtgaataatgccgggatcacccgcgacgcgcccttccacaagatgacgctggcccattggcaggaggtcatcaatgtcgacctgacctccgccttcaacgtcacccggcaggtatgggacgggatgcgggagcgcaatttcggccggatcatcaatatttcctcgatcaacggccagaaaggccagttcacgcaggccaactattctgccgccaaggccggcctgatcggcttcaccaaggcgctggcctatgaaggcgccaagaagggaatcacctcgaacgtcgtggcgccgggctatatcgacaccgagatgttgcaggcggtgaagcccgaagtactcgaagggatcattgccacgatcccggtggggcgcctgggcaaggccgaagagatcgcctcgatgtgcgcttatctggcgtccgaagaagccgccttcatcaatggcgcgaccatgacggtgaacggcgcgcagtatatcgcgggctga

SEQ ID NO: 118738 - protein, 241 aa, Hyphomonas neptunium ATCC 15444
MAKTALVTGGTRGIGKAISEMLQAKGYSVAANYGGNDAAAAAFSKETGIKVFKFDVADYDAVGVGLKAVEAEVGPVDVLVNNAGITRDAPFHKMTLAHWQEVINVDLTSAFNVTRQVWDGMRERNFGRIINISSINGQKGQFTQANYSAAKAGLIGFTKALAYEGAKKGITSNVVAPGYIDTEMLQAVKPEVLEGIIATIPVGRLGKAEEIASMCAYLASEEAAFINGATMTVNGAQYIAG

SEQ ID NO: 118739 - DNA, 729 bp, Pediococcus pentosaceus ATCC 25745
  CDS (1)..(729): transl_table=11
gtgattattaaagatacagtggcagttgttactggtggaactcaaggaatcggattagcaatcgcaatggatttagctaagaaaggttcaaaggtttttatcactgctcgccatgatatttcggatgatgcagtaaaagaacaaattcaaggacttgatatcaactttaaagaacttgacattcgtgatgatgcaaagattggcgaattgttaaacgacattaaagaagaatttggtcacttagatattattgtaaataatgctggaattacaaaagataagttactaagtcgaatgtcagttgaagattttaatgacgtaattgcaactaacttagttggtacattttcaatgacaaaatatgccatgaaaattatgcaaaaacaacgttcaggtaacattgtcaatatttcaagtatttcgggaactcatggaaatgttggacaagctaactattcagcaagtaaagctgggattgttggtttaacaaaaactacagctcgtgaaggtcttttgagaaatattagatgtaatgctgtggctccagggatgattgaaacagccatgactggaaaattaagtgaaaaggttcgtgaaaaaacagaagaaatgattccaatgcaccgtttcggtcaaccagaagaaatttcttcaacagtagcctttttacttgaaaatgattatataactggtcaagtacttaccgttgacggtggaatgaccctttag

SEQ ID NO: 118740 - protein, 242 aa, Pediococcus pentosaceus ATCC 25745
MIIKDTVAVVTGGTQGIGLAIAMDLAKKGSKVFITARHDISDDAVKEQIQGLDINFKELDIRDDAKIGELLNDIKEEFGHLDIIVNNAGITKDKLLSRMSVEDFNDVIATNLVGTFSMTKYAMKIMQKQRSGNIVNISSISGTHGNVGQANYSASKAGIVGLTKTTAREGLLRNIRCNAVAPGMIETAMTGKLSEKVREKTEEMIPMHRFGQPEEISSTVAFLLENDYITGQVLTVDGGMTL

SEQ ID NO: 118741 - DNA, 732 bp, Leuconostoc mesenteroides subsp. mesenteroides ATCC 8293
  CDS (1)..(732): transl_table=11
atggcagattttacagataaaactgttttagtaacaggctcatcacgtggtataggacttgcaattgcaaaggcatttgatgctgcaggagcaaacgtcattttacatgcacgttcagaaattagtcctgaaactttaacagagtttaagtcagaaccaaaaacattacagtttgatattgctgatgcagaagcagcagaagacagtttgaaagtattatacaagcaagaaaacttttcaggtattgacatattaatcaacaatgccggtattacaaaggatcagctagctattgcaatgacaccagcagattttgcacaggttgttaacgtaaacttaaacggtacttttaatgtgacacaacctgtatttaaaaagatgattcgacaaaagcatggggcgattattaatctagcctctgttgttggattaatgggtaacatgggtcaagcgaattattctgcatcaaaagctggtctggtcggattgacaaagactctagctaaagaaggtgcacgtcgccacatccgagtaaatgcgattgcccctggtatgattgtttcagatatgactggtgctttgccagaaaagacacaggaagagattctaaaaaatattccattatctcgttttggtgaagcttcggaaattgcagatgtagcattattcttggcaggtaatgattatattaccggtcaaacaatcacagttgatggtgggttatacatttaa

SEQ ID NO: 118742 - protein, 243 aa, Leuconostoc mesenteroides subsp. mesenteroides ATCC 8293
MADFTDKTVLVTGSSRGIGLAIAKAFDAAGANVILHARSEISPETLTEFKSEPKTLQFDIADAEAAEDSLKVLYKQENFSGIDILINNAGITKDQLAIAMTPADFAQVVNVNLNGTFNVTQPVFKKMIRQKHGAIINLASVVGLMGNMGQANYSASKAGLVGLTKTLAKEGARRHIRVNAIAPGMIVSDMTGALPEKTQEEILKNIPLSRFGEASEIADVALFLAGNDYITGQTITVDGGLYI

SEQ ID NO: 118743 - DNA, 738 bp, Magnetococcus sp. MC-1
  CDS (1)..(738): transl_table=11
atgcaaaatcgcgttgcaattgtaacaggctccaccgctggcattggtcaggaagcggctaagttgttggctaaacgcggctgtcgtgtggtgatcacgggaacccgtgaaacaaagattatggagacggttgaggccattcgcgccgagggtggggttgctgcgggggtggctgccaatattggtgtggatgctgatctggataagctggttgcctttgcccaagagcagtttggtgaggttgaaattttggtcaataatgccggtattacccgtgacaacctctttatgcgtatgaaagatgaagagtgggatgaggtgatggcgctgaatttaaccagcgtttttaagctctctaagcgggtcattcgcgccatgatgaagggccggtatgggcgcatcgtcaatgtgacctcagtggtgggctttagtggcaatgcgggtcaggctaactatacggcggccaaggcgggtttggtggggtttaccaaatctttggcgcaagaggtggcaacacggggtattacggtgaacggtgttgcccctgggtttattcaaacagccatgaccgataagctgaatgaaaagacccaagaggcgattttggcccaaatccccatggggaaaatgggaagtgtcgaagatatcgctgcggccattgcctttttagcatcggatgaagcacggtatattacgggtgagaccattcacgtcaatggtggtatgtatatgggatga

SEQ ID NO: 118744 - protein, 245 aa, Magnetococcus sp. MC-1
MQNRVAIVTGSTAGIGQEAAKLLAKRGCRVVITGTRETKIMETVEAIRAEGGVAAGVAANIGVDADLDKLVAFAQEQFGEVEILVNNAGITRDNLFMRMKDEEWDEVMALNLTSVFKLSKRVIRAMMKGRYGRIVNVTSVVGFSGNAGQANYTAAKAGLVGFTKSLAQEVATRGITVNGVAPGFIQTAMTDKLNEKTQEAILAQIPMGKMGSVEDIAAAIAFLASDEARYITGETIHVNGGMYMG

SEQ ID NO: 118745 - DNA, 768 bp, Mycobacterium smegmatis str. MC2 155
  CDS (1)..(768): transl_table=11
atgactgtgactgacaatccggccgacaccgcgggcgaggccactgcaggccgcccggcgttcgtctcccgttcggtgctggtgaccggtggtaaccgcggcatcggcctggcgatcgcgcgacggctggccgccgacgggcacaaggtggccgtcacccaccgcggttccggtgcacccgacgacctgttcggtgttcaatgtgacgtcaccgacagcgctgctgtcgaccgcgccttcaaagaggtcgaggagcaccagggcccggtcgaggtgctggtggccaacgcaggcatctccaaggacgcattcctcatgcgcatgaccgaggagcggttcgaagaggtcatcaacaccaacctcacgggcgcgttccggtgcgcccagcgggcgtcgcgcaccatgcagcgcaagcggttcgggcgcatcatcttcatcgggtcggtctcgggcatgtgggggatcggcaatcaggccaactacgcggccgccaaggcgggcctgatcggcatggcccgctcgatctcccgtgagctggccaaggcgggcgtcaccgcgaacgtggtggcccccggttacatcgacaccgagatgacccgggcgctcgacgagcgcatccaggcgggcgcgctcgacttcatcccggccaagcgggtcggcacggccgaggaggtcgcgggcgcggtcagcttcctggcctcggaggacgcctcctacatcgcgggcgcggtcatccccgtcgacggcggcatgggcatgggccactag

SEQ ID NO: 118746 - protein, 255 aa, Mycobacterium smegmatis str. MC2 155
MTVTDNPADTAGEATAGRPAFVSRSVLVTGGNRGIGLAIARRLAADGHKVAVTHRGSGAPDDLFGVQCDVTDSAAVDRAFKEVEEHQGPVEVLVANAGISKDAFLMRMTEERFEEVINTNLTGAFRCAQRASRTMQRKRFGRIIFIGSVSGMWGIGNQANYAAAKAGLIGMARSISRELAKAGVTANVVAPGYIDTEMTRALDERIQAGALDFIPAKRVGTAEEVAGAVSFLASEDASYIAGAVIPVDGGMGMGH

SEQ ID NO: 118747 - DNA, 720 bp, Nocardioides sp. JS614
  CDS (1)..(720): transl_table=11
gtgacccagacccacgagcccaggtccgtcctggtgaccggcggcaaccgcgggatcggccgcgcgatcgcggaggcgtacgtcgcccagggcgaccgcgtcgccgtcaccacccgcagcggcggtgcccccgacggcgccctcgacctgcgctgtgacatcaccgaccccgcgcaggtggacacggcgttcgcccgggccgaggaggctcacggcccggtcgaggtgctggtcgcgaacgccgggatcaccgcggacacgctgctgctgcggatgagcgaagaggactggtcctcggtcctcgacacgaacctcaccgcctcgttccggctggcgaagcgcgccgccaagggcatgctccggctgcgccgggggcggatcgtcttcatctcctcggtcgtcggcctgctcggctcggccggccaggtgaactacgcggcgtccaaggccggtctggtcggcatggcgcgctcgatcgcgcgggagctgggctcccggtccatcaccgcgaacgtggtggcccccggcttcatcgagaccgacatgacggccgtgctgaccgaggaccagcgggccgcgatcaaggcccaggtgccgctggggcgctacggcacgacggaggagatcgcgaagacggtgctgtggctgaccggcgacggcgcggcgtacgtcaccggggccgtgatcccggtcgacggtggactcggaatggggcactga

SEQ ID NO: 118748 - protein, 239 aa, Nocardioides sp. JS614
MTQTHEPRSVLVTGGNRGIGRAIAEAYVAQGDRVAVTTRSGGAPDGALDLRCDITDPAQVDTAFARAEEAHGPVEVLVANAGITADTLLLRMSEEDWSSVLDTNLTASFRLAKRAAKGMLRLRRGRIVFISSVVGLLGSAGQVNYAASKAGLVGMARSIARELGSRSITANVVAPGFIETDMTAVLTEDQRAAIKAQVPLGRYGTTEEIAKTVLWLTGDGAAYVTGAVIPVDGGLGMGH

SEQ ID NO: 118749 - DNA, 750 bp, Azoarcus sp. BH72
  CDS (1)..(750): transl_table=11
atgagtttttcgctggaaggacagatcgcgctggttaccggcgcctcgcgcgggatcggtcgcgcggtagcgatggaactggcccggctcggcgccgtcgtggtcggcaccgccacctccgaagcgggtgcggcggacatcgacaacgccttggcggaggcgggtttcaagggcgccggtctggcgcttgacgtcaccgacgttgccgcctgtgaaggcctgattgcggaagtcgagaagcgttttggcgcggtctgcatcctggtgaacaacgccggcatcactcgtgacaatctcgcgatgcggatgaaggacgacgaatgggacgcggtcatcgacaccaacctgaaggcggtgttccggatgtcccggctggtcatgcgcggcatgatgaaggcgcgcaccggccgcatcatcaacatcacctccgtggtgggcagcgccggcaatgccggccaggccaactacgcagcggccaaggccggcgtggcgggcatgagccgcgccctcgcgcgtgagctgggcagccgcaacatcacagtcaactgcgtcgccccgggcttcatcgacaccgacatgacccgggcgctacccgactcggcgcgcgacgcgctgctgggaagcatcgcgctcggccgccttggtcgccccgaggaaatcgctgccgccgtggccttcctggcctcgcctgcagcggcctacgtcactggcactactttgcatgtcaacggcggcatgtatatgtcatga

SEQ ID NO: 118750 - protein, 249 aa, Azoarcus sp. BH72
MSFSLEGQIALVTGASRGIGRAVAMELARLGAVVVGTATSEAGAADIDNALAEAGFKGAGLALDVTDVAACEGLIAEVEKRFGAVCILVNNAGITRDNLAMRMKDDEWDAVIDTNLKAVFRMSRLVMRGMMKARTGRIINITSVVGSAGNAGQANYAAAKAGVAGMSRALARELGSRNITVNCVAPGFIDTDMTRALPDSARDALLGSIALGRLGRPEEIAAAVAFLASPAAAYVTGTTLHVNGGMYMS

SEQ ID NO: 118751 - DNA, 741 bp, Acidovorax sp. JS42
  CDS (1)..(741): transl_table=11
atgagtgaatccgcctctccccagattgcgctggttaccggcgccacccgcggcatcggagccgccattgccgccgagctcgcccagcggggcttgcgcgtgattggtacggccaccacagatgaaggcgcgcagcgcatcggccaggccctggtggcctacggcggcaagggcgtcaaactgaacgtgaccgacggcgcagccgtggacgcgctggtggatgccatcgtcaaggagcatgggggcctgcatgtgctggtgaacaacgctggcatcacgcgtgacacgctggccatgcgcatgaaggacgacgactgggatgccgtgcttgacaccaatctcaaggccgttttccgcgttagccgtgcggctattcggcccatgatgaaacagcgctttgggcgcatcatcagtatcaccagcgtggtgggcgcatcgggcaaccccggacaggccaactacgcggccgcgaaggctggtgtggctggtatgacccgcgcgttggcgcgtgaactgggcagccgcggtatcacggtgaactgcgtggctccgggcttcattgccaccgacatgactgccgatctgccggaagagcagaaaaaagcgctgaaatcccagatcgccatgggcgaattggggcagcccagtgacatcgcccatgccgtggcttaccttgcctcggctggtgcaggttatgtgacgggacaggagttgcatgtcaatggcggcatgtacatgtaa

SEQ ID NO: 118752 - protein, 246 aa, Acidovorax sp. JS42
MSESASPQIALVTGATRGIGAAIAAELAQRGLRVIGTATTDEGAQRIGQALVAYGGKGVKLNVTDGAAVDALVDAIVKEHGGLHVLVNNAGITRDTLAMRMKDDDWDAVLDTNLKAVFRVSRAAIRPMMKQRFGRIISITSVVGASGNPGQANYAAAKAGVAGMTRALARELGSRGITVNCVAPGFIATDMTADLPEEQKKALKSQIAMGELGQPSDIAHAVAYLASAGAGYVTGQELHVNGGMYM

SEQ ID NO: 118753 - DNA, 738 bp, Magnetospirillum magnetotacticum MS-1
  CDS (1)..(738): transl_table=11
atgttcgatcttaccggcaagaccgccctggtgaccggcgcttcgggcggcatcggcggcgccatcgccaaagccctgcatgcccagggggccactgtcggcctgcacggcacccggcgcgaggctcttgacgccctggccgccgaactgggcgagcgcgtccatgtgctgcccgccaatctgtccgacggggcggctgtcgagcaacttgccaaggatgccgaggccgccttgggctccatcgacatcctggtcaacaacgcgggcctgaccaaggacggtctggtgctgcgcatgaaggacgaggactggcagacggtgctggacgtcaatctcaccgccgccttccgcctgtcgcgcgccgccgtgaaaggccagatgaagcgccgctggggccgcatcatcaacatcacctccatcgtgggcgtcaccggcaatccggggcaggtcaactatgccgcttccaaggcgggcatgatcggcatgagcaaggccctggcccaggaagtggccagccgcaacatcacggtgaattgcgtggcgccgggcttcatcagttcggccatgaccgacgtgctgtccgatgaccagaagaccaagctgaacgcgggcattcccgccgggcggatgggtacggccgaggagattgccgcctcggtggtctatctcgccagcgccgaggccgcctatgtgacggggcagacgctccacgtcaacggcggcatggcaatgatctaa

SEQ ID NO: 118754 - protein, 245 aa, Magnetospirillum magnetotacticum MS-1
MFDLTGKTALVTGASGGIGGAIAKALHAQGATVGLHGTRREALDALAAELGERVHVLPANLSDGAAVEQLAKDAEAALGSIDILVNNAGLTKDGLVLRMKDEDWQTVLDVNLTAAFRLSRAAVKGQMKRRWGRIINITSIVGVTGNPGQVNYAASKAGMIGMSKALAQEVASRNITVNCVAPGFISSAMTDVLSDDQKTKLNAGIPAGRMGTAEEIAASVVYLASAEAAYVTGQTLHVNGGMAMI

SEQ ID NO: 118755 - DNA, 726 bp, Rickettsia akari str. Hartford
  CDS (1)..(726): transl_table=11
atgattgatttaacagctaaaactgctttaattacgggagcttcaggaggtataggtggagctatagcgaggttactgcacaaactcggaagtcatgtaattattagcggtagtcatgaggaaaaattaaaatcccttggaaatgttttaaaagataattatacgatagcagtatgtaatcttgcagataaagaagagtgcagcaatttaatatctaaagcactaaagctagatattttagtatgtaacgcgggtattactagcgatacactagcaattagaatgaaagatgaagattttaacaaagttattgatattaatttaaaagcaaattttattttaaatcgtgaagcaataaaaaaaatgatgcaaaacagatatggacgcattattaacatatcttcaatagtaggaatttcaggtaacccagggcaggctaattattgtgcttctaaagcaggcttaataggtatgaccaaatcgctctcttatgaagttgcaaccagaggaattacggttaatgcagtagctccaggatttattaaatcagatatgaccgataaactaaacgcacaacaaagagaagccatagtacaaaaaattccgctaggcacttacggtatgccggaagacgtggcaaacgcagtagcatttttagcaagcgatcaggcatcatatattaccggccaaactattcacgtaaacggtggaatgttaatggtgtaa

SEQ ID NO: 118756 - protein, 241 aa, Rickettsia akari str. Hartford
MIDLTAKTALITGASGGIGGAIARLLHKLGSHVIISGSHEEKLKSLGNVLKDNYTIAVCNLADKEECSNLISKALKLDILVCNAGITSDTLAIRMKDEDFNKVIDINLKANFILNREAIKKMMQNRYGRIINISSIVGISGNPGQANYCASKAGLIGMTKSLSYEVATRGITVNAVAPGFIKSDMTDKLNAQQREAIVQKIPLGTYGMPEDVANAVAFLASDQASYITGQTIHVNGGMLMV

SEQ ID NO: 118757 - DNA, 807 bp, Crocosphaera watsonii WH 8501
  CDS (1)..(807): transl_table=11
atgtgcgaaaaaaataatataattgtcaagcaattgaaaaaaggaagtattatgtcaactgtcgccccacccctaaatgaacaagttgccgtcattaccggagcatcacggggtatcggtagagcgatcgccctagctctgggaaccctgggtttaaaagtagttgtcaactacgctagttccagtgatgcagccgacgaagtggttaaactgattacagaaggctcaggagaagcgatcgcagttcaaggagatgtctctaaaagcgaagaggtagacaacctcttcaaaaccactttagataagtttgggcgcatcgatattttagtcaacaacgcaggtatcacccgtgacaacctcttaatgcgcatgaaaccccaagactggcaagcagttatcgatctcaacctcacgggggttttcctctgcaccaaagccgtcaccagacctatgttaaaacaaaaaagtgggcgtattatcaatatttcctcagtagtcggggaaatggggaaccctggccaagccaactatagcgcagctaaagcaggagttattggtttaaccaaagcagtggccaaagaagttgctccccgtggtgttaccgttaatgcagtggctccgggctttattgtcaccgatatgacagagaaagttaaaacagacgatcttctacagtttatccctttggcaaggttaggaaccgtcgaagaggtagcaggaatggtgagatttttagccaccgatccagccggcgcttacatcacaggacaagttttcaatgtagatggtggtatggttatggcctaa

SEQ ID NO: 118758 - protein, 268 aa, Crocosphaera watsonii WH 8501
MCEKNNIIVKQLKKGSIMSTVAPPLNEQVAVITGASRGIGRAIALALGTLGLKVVVNYASSSDAADEVVKLITEGSGEAIAVQGDVSKSEEVDNLFKTTLDKFGRIDILVNNAGITRDNLLMRMKPQDWQAVIDLNLTGVFLCTKAVTRPMLKQKSGRIINISSVVGEMGNPGQANYSAAKAGVIGLTKAVAKEVAPRGVTVNAVAPGFIVTDMTEKVKTDDLLQFIPLARLGTVEEVAGMVRFLATDPAGAYITGQVFNVDGGMVMA

SEQ ID NO: 118759 - DNA, 732 bp, Exiguobacterium sibiricum 255-15
  CDS (1)..(732): transl_table=11
ttgaataaggtagcactcgtcacaggcgcctcacgtggaatcggagccgctatcgccaaacggttggcggcagacggattccggatcgtcgtgaactacgccgggaatacagcaaaagcagaagaagttgtttcggctatcgtcgatgcgggcggtgaggccatcgccgtccaggcagacgtggctgatgccgagcaagtcaaggcattgctgaaaacggcactcgatacttacggtcagttggattgtgtcgtcaacaatgccggaatcacgcgtgacggtctgttaatgcgaatgaaagaagcagatttcgatgcggttctaaacaccaatttaaaaggtgcgtttcttgtgacacaagcggcgacgcggccattattaaaaacgagcggtcgcatcatcaatattgcttccgtcgtcggcattaccggtaatcccggtcaagctaactatgtagcggcgaaagcgggactgatcggatttacgaagtcggtcgcacgtgaactggcaagtaaaggcgttacggcaaatgcgatttgtcccggtttcattgaaaccgatatgacggatgaattgacagaagcgcaacgtaatcagacgctcgatcaaattccgttaaaacgatttggtcagacggacgatatcgcatcgctcgtcagtttcatcgcatcagacaatgcccgttacatcactggtcaaactttggcagtcgatggcggcatgacaatgtaa

SEQ ID NO: 118760 - protein, 243 aa, Exiguobacterium sibiricum 255-15
MNKVALVTGASRGIGAAIAKRLAADGFRIVVNYAGNTAKAEEVVSAIVDAGGEAIAVQADVADAEQVKALLKTALDTYGQLDCVVNNAGITRDGLLMRMKEADFDAVLNTNLKGAFLVTQAATRPLLKTSGRIINIASVVGITGNPGQANYVAAKAGLIGFTKSVARELASKGVTANAICPGFIETDMTDELTEAQRNQTLDQIPLKRFGQTDDIASLVSFIASDNARYITGQTLAVDGGMTM

SEQ ID NO: 118761 - DNA, 744 bp, Prosthecochloris aestuarii DSM 271
  CDS (1)..(744): transl_table=11
atgagcatgtttgaaggcaaaaccgccgtcatcaccggcgctgcacgaggtatcggccaggctatcgctatcgaccttgcagaaaaaggcgctgatatcgtcctctgcgacctgcaggaagagtggcttgaggaaacggccgctgcagtagcaaaaacaggcaaaaaagttatctgcaaagaactcgacgtcaccagtcatgatgctgcccagagcgtctttcaggaaatcgcggcagaatcaggctcaatagatatcctcatcaacaatgcagggatcacccgtgacggtctgctcatgcgcatgagcgaagcagactgggattcagtgcttgccgtcaacctgaaaggaacgttcaactgcacgaaagcagtcaccagaaccatgatgaagcagcgtagcggtgcaatcgtcaatatagcctccattatcggtctgatgggcaacgccggtcaggcaaactacggagcatcaaaagccggcgtcatcgcgttcacaaaatccattgcaaaagaactttcatcgcgcaacatccgcgtcaatgctgttgcgccgggcttcatctcctcaaaaatgaccgatgctctctcggaagatgtccgcaacgccatgcttgaggcaattccgctcaaacgtttcggtgaaccgaaagatgttgcaaacgtcgtcaccttcctggcaagcgatatggcaggctatattaccggagaggtcatcaacatcagcggcggcatggtcatgtaa

SEQ ID NO: 118762 - protein, 247 aa, Prosthecochloris aestuarii DSM 271
MSMFEGKTAVITGAARGIGQAIAIDLAEKGADIVLCDLQEEWLEETAAAVAKTGKKVICKELDVTSHDAAQSVFQEIAAESGSIDILINNAGITRDGLLMRMSEADWDSVLAVNLKGTFNCTKAVTRTMMKQRSGAIVNIASIIGLMGNAGQANYGASKAGVIAFTKSIAKELSSRNIRVNAVAPGFISSKMTDALSEDVRNAMLEAIPLKRFGEPKDVANVVTFLASDMAGYITGEVINISGGMVM

SEQ ID NO: 118763 - DNA, 825 bp, Kineococcus radiotolerans SRS30216
  CDS (1)..(825): transl_table=11
ttgggttcctggtcctgcacgcatccacgctacgtccgatgccgggcccccacccgtcgcagggcacccccggatgcgttagcttcgccactcgtgtcccagccgaacgcccccgtcagtgaacgaaccccccgcagcgtcctggtgaccggcggcaaccgcggcatcggcctcgccgtcgcccgggccttcgccgacgccggtgaccgggtcgcggtgacccaccgctccggggaaccgcccgcggggttcttcggggtccgcgccgacgtcaccgaccccgcctccctcgacgccgccttcgccgcggtggaggccgagcagggcccggtcgaggtgctcgtcgccaacgccggcaccacccgcgaccagctgctcatgcggatgagcgacgaggagttcgacagcgtcctggacgccaacctcgccggggcctggcgggtggcgcgccgggcggtgcggggcatggtccgcgccaagcggggccgcatcatcttcatgtccagcgtcgtcgggctctacggctcccccgggcagacgaactacgccgcctccaaggcggggatgatcggcctggcccggtccatcgcccgcgagctgggcagccgcggcatcaccgccaacgtcatcgcaccggggttcatcgacaccgacatgacccgcgagctgcccgaggccaccgcggccgactacaagggccgcatccccgccgggcgcttcggcgaggtcgccgacatcgcccaggccgcgctgttcctcgccgacgccgggtacgtcaacggcgccgtgctgcccgtcgacggtggcctcgggatggggcactga

SEQ ID NO: 118764 - protein, 274 aa, Kineococcus radiotolerans SRS30216
MGSWSCTHPRYVRCRAPTRRRAPPDALASPLVSQPNAPVSERTPRSVLVTGGNRGIGLAVARAFADAGDRVAVTHRSGEPPAGFFGVRADVTDPASLDAAFAAVEAEQGPVEVLVANAGTTRDQLLMRMSDEEFDSVLDANLAGAWRVARRAVRGMVRAKRGRIIFMSSVVGLYGSPGQTNYAASKAGMIGLARSIARELGSRGITANVIAPGFIDTDMTRELPEATAADYKGRIPAGRFGEVADIAQAALFLADAGYVNGAVLPVDGGLGMGH

SEQ ID NO: 118765 - DNA, 738 bp, Sulfitobacter sp. EE-36
  CDS (1)..(738): transl_table=11
atgtttgatcttactggaaaaaatgcgctggtcaccggggcttcgggtggtatcggcgcggaaatcgcgcgcagcctgcatgcccgtggcgcgaccgtgggcctgtccggcacccgcaccgaacctcttgaggcgctggcggccgaactgggcgagcgcgcccatgtgctgccctgtaacctgagcgatatggacgccgttgacgcgctgcccaaacaggcggccgaagcgatgggatcggttgatattctggtcaataacgccggcatcacccgcgacaacctgttcatgcgcatgtcggatgatgaatggaattcggtccttaacgtcaacctgaccgcgaccttcaagctgtgcaaaggcgtgatgcgcggcatgatgaaggcgcgttggggccggatcgtgaatatctcgagcgtggtcggggccaccggtaaccccggtcaggcgaattatgccgcgtccaaggccggtatggtgggcatgtccaaatcgcttgcctatgaggttgccagccgcgggatcaccgtgaacgcggtcgcccccggtttcattaccacggcaatgacggacaagctgaccgacgaccaaaaggcgggaatcatggggcaaattcctgcgggccgtatgggcgaagcctccgaaatcgcgtcggctgttgtctatctggcaagcgcggaagccgcctatgttaccggaaccaccttgcatgtgaacggcggcatggccatgttgtga

SEQ ID NO: 118766 - protein, 245 aa, Sulfitobacter sp. EE-36
MFDLTGKNALVTGASGGIGAEIARSLHARGATVGLSGTRTEPLEALAAELGERAHVLPCNLSDMDAVDALPKQAAEAMGSVDILVNNAGITRDNLFMRMSDDEWNSVLNVNLTATFKLCKGVMRGMMKARWGRIVNISSVVGATGNPGQANYAASKAGMVGMSKSLAYEVASRGITVNAVAPGFITTAMTDKLTDDQKAGIMGQIPAGRMGEASEIASAVVYLASAEAAYVTGTTLHVNGGMAML

SEQ ID NO: 118767 - DNA, 738 bp, Roseovarius nubinhibens ISM
  CDS (1)..(738): transl_table=11
atgtttgatctcactgggaaaaacgcattggtcaccggcgcgtcgggcggcattggcggggcgattgccaaggcgctgcatggcgcgggggcgaccgtcgggctgagcgggacgcgggttgagccgctcgaggcgctggccgccgagctcggcgagcgggcgcatgtgctgccctgcaacctgtcggatggcgacgcggtcgatgcactgccgaaacaggcgatcgaggcgatgggcgggctcgatattctcgtcaacaatgccgggatcacccgcgaccagattttcatgcgcatgtcggacgaggagtggcagcaggtgctcgacgtcaacctgaccagcacgatgcgcctgtgccggggcgtgatgcgcccgatgatgaaggcgcgttggggccggatcatcaacatcagctccatcgtcggcaccaccggcaatcccgggcaggtcaactatgccgcctccaaggcgggcatggtcggcatgaccaaatccatcgcctatgaggtggcgagccggggcatcacggccaatgccgtggcaccggggttcattgccacggcgatgaccgaaaagctcaacgatgatcaaaaggccgccatcaatggcaagattcccgccgcccgcatgggcacgcccgaggaaatcgccgcggcggtgctctatctggcgagccccgaggcgggctatgtcaccggcagcacgctgcatgtgaacggcggaatggcgatgatctaa

SEQ ID NO: 118768 - protein, 245 aa, Roseovarius nubinhibens ISM
MFDLTGKNALVTGASGGIGGAIAKALHGAGATVGLSGTRVEPLEALAAELGERAHVLPCNLSDGDAVDALPKQAIEAMGGLDILVNNAGITRDQIFMRMSDEEWQQVLDVNLTSTMRLCRGVMRPMMKARWGRIINISSIVGTTGNPGQVNYAASKAGMVGMTKSIAYEVASRGITANAVAPGFIATAMTEKLNDDQKAAINGKIPAARMGTPEEIAAAVLYLASPEAGYVTGSTLHVNGGMAMI

SEQ ID NO: 118769 - DNA, 738 bp, Oceanicola batsensis HTCC2597
  CDS (1)..(738): transl_table=11
atgttcgatctgacgggaaagtcggcgctggtgaccggagcgtcgggaggcatcgggggcgcgatcgcccgggctcttcatgatgcgggggccacggtcgggctgtcgggaacgcgggtcgagccgctggaggcgcttgcggccgagctgggcgagcgggcgcatgtgctgccctgcaacctgggcgatgcggaggcggtcgaggcgctgccgaaacaggcggtcgaggccatgggaggactggacatcctggtgaacaacgccgggatcaccaaggaccagatcttcatgcgcatgtccgacgaggactgggcgcaggtgatcgaggtgaacctgacctcgaccatgcggctgtgccgtgcggtaatgcggccgatgatgaaggcgagatgggggcggatcgtcaacatctcgtccatcgtcggggccacgggcaatcccgggcaggtgaactatgccgcctcgaaggccgggatggtcgggatgaccaagtcgatcgcctacgaggtcgcctcgcgcgggatcacggcgaactgcgtggcgcccggcttcatcgcgacggcgatgaccgggaagctgaacgacgaccagaaggccaagatcgacgcgcagatccccgccggccgcatgggcgcgcccgaggaaatcgcggccgcggtgctgtatctcgcctcgcccgaggcgggatacgtgacgggatcgaccctgcatgtgaacggcggcatggcgatgctctga

SEQ ID NO: 118770 - protein, 245 aa, Oceanicola batsensis HTCC2597
MFDLTGKSALVTGASGGIGGAIARALHDAGATVGLSGTRVEPLEALAAELGERAHVLPCNLGDAEAVEALPKQAVEAMGGLDILVNNAGITKDQIFMRMSDEDWAQVIEVNLTSTMRLCRAVMRPMMKARWGRIVNISSIVGATGNPGQVNYAASKAGMVGMTKSIAYEVASRGITANCVAPGFIATAMTGKLNDDQKAKIDAQIPAGRMGAPEEIAAAVLYLASPEAGYVTGSTLHVNGGMAML

SEQ ID NO: 118771 - DNA, 753 bp, Prochlorococcus marinus str. MIT 9211
  CDS (1)..(753): transl_table=11
atgactaatcaaaatctttgtgaagggcaaactgttttagtaactggagccagtagaggtattgggcgagcaattgctttaaatcttgctacaacaggcgcagaaattgttgtgaactatgcgaattctgccgaaagcgccaaggatgtcgtccaggcaatcaccgcttcaggaggcaaagcatattcacttcaagccaatgtcgcagatgaagaatctgtaaatgatctaataaaaaaagtcttagaaagaagtggccgaatagatgccctaatcaataatgcaggcataactaaagacggattattaatgaggatgagaacagaagattggcagtcagttattaatctcaacttgaccggggtcttcctttgtacaagggcggtagcaagacccatgcttaagcagaaaacaggtcggattgtaaatatcacttccgtcgtaggtctaatgggtaatgctggacaagcaaattatgctgcagcaaaagctggagtagtgggtctaacaaaaagcacagccaaagagtttgccagtagaggcataacagttaatgcagtagcacctgggtttattgagacagatatgacaaaagaccttgattcagaacaaatcctctctgcaattccactaggtgaatttggaagtccagagcatattgctggaacagtgcgatttcttgccacagacccagcagcagcttatataactggacaagttttacaagtagatggaggtatgttaatgagttaa

SEQ ID NO: 118772 - protein, 250 aa, Prochlorococcus marinus str. MIT 9211
MTNQNLCEGQTVLVTGASRGIGRAIALNLATTGAEIVVNYANSAESAKDVVQAITASGGKAYSLQANVADEESVNDLIKKVLERSGRIDALINNAGITKDGLLMRMRTEDWQSVINLNLTGVFLCTRAVARPMLKQKTGRIVNITSVVGLMGNAGQANYAAAKAGVVGLTKSTAKEFASRGITVNAVAPGFIETDMTKDLDSEQILSAIPLGEFGSPEHIAGTVRFLATDPAAAYITGQVLQVDGGMLMS

SEQ ID NO: 118773 - DNA, 732 bp, Erythrobacter sp. NAP1
  CDS (1)..(732): transl_table=11
atgaacgcgctggtcaccggcgcaagcggcgggatcgggtcggcaatcgcgattgcattggcgaagcagggcgcgcgggtggcgctgtcgggctcgaatggccagaaactgcgcgccttccgcgagcaactgcatgaagagcatggcggcgagcatgtcgagatcacctgcgacctttccaacaccgagcaggtcgaggaactgatcccagcaacgctcgatacgctgggcggcatcgacattctcgtgaacaatgccggcatcacacgcgatgggctcgccatgcggatgaaggatgaggactggcaccaggtcgtctcgatcaacctcgaagccgctttccgcctgatgcgcggcagcgctcgacccatgatgaaagcgcgctttggccgcatcatcaacatcaccagcgtagttggacacaccggcaatccgggccagatgaactactgcgccgccaaggcaggcctgaccgggatgactaagagcttcgcgcaggaagtcgcaagccgcggcatcaccgccaattgcgtcgctcctggttttatccgaaccgcgatgaccaccgcgctcgacgaaaagcagaccgagacgatcaacgcccgcattccgatgggcaagatgggcgcaggcgacgatatcggtgcggccgtgagcttcctcgccagccgcgaggccggctatattacgggcgagacgctgcacgtgaacggcggcatggcgatggtctga

SEQ ID NO: 118774 - protein, 243 aa, Erythrobacter sp. NAP1
MNALVTGASGGIGSAIAIALAKQGARVALSGSNGQKLRAFREQLHEEHGGEHVEITCDLSNTEQVEELIPATLDTLGGIDILVNNAGITRDGLAMRMKDEDWHQVVSINLEAAFRLMRGSARPMMKARFGRIINITSVVGHTGNPGQMNYCAAKAGLTGMTKSFAQEVASRGITANCVAPGFIRTAMTTALDEKQTETINARIPMGKMGAGDDIGAAVSFLASREAGYITGETLHVNGGMAMV

SEQ ID NO: 118775 - DNA, 747 bp, Pseudoalteromonas tunicata D2
  CDS (1)..(747): transl_table=11
atgaataatttattttctttagcgggtaaaattgtactcgtaacaggtgcaagtcgcggtattggtaaatcaatcgcagaaaccttagttgcacaaggtgctacggttgtgggtacagctacaagtgaaactggcgctgcggcaatttcagaatatttaggtcaggctggtaaaggttatgcgttaaatgtgactgatattgcatcggttgaagcggtattagctgcaattcaagctgattttggtgatattgatgtacttgttaataacgccggtatcacacgtgataatttgttaatgcgtatgaaagaccaagagtgggatgacatcattgataccaacttaacgtcaattttccgcttatcaaaagctgtattacgtccgatgatgaaaaaacgtgctggccgtattattaatattggttctgtagtgggtacaatggggaatgcgggtcaagcaaactacgcagcagcaaaagcgggtgtgattggtttttcaaaagcgcttgcgcgtgaagttgcatcacgtggtattacagtcaacgtcgttgctcctggttttattcaaacggatatgaccgatgaattaacagctgagcaaaaagctgcgacgcttgccaatgtgcctgcaggtcgtttaggtttaccaaatgaaattgcagccgcagtggcttatttagcatctgatatggcggcgtatgtcacaggtgagactctccatgtaaatggtgggatgtacatgatctaa

SEQ ID NO: 118776 - protein, 248 aa, Pseudoalteromonas tunicata D2
MNNLFSLAGKIVLVTGASRGIGKSIAETLVAQGATVVGTATSETGAAAISEYLGQAGKGYALNVTDIASVEAVLAAIQADFGDIDVLVNNAGITRDNLLMRMKDQEWDDIIDTNLTSIFRLSKAVLRPMMKKRAGRIINIGSVVGTMGNAGQANYAAAKAGVIGFSKALAREVASRGITVNVVAPGFIQTDMTDELTAEQKAATLANVPAGRLGLPNEIAAAVAYLASDMAAYVTGETLHVNGGMYMI

SEQ ID NO: 118777 - DNA, 735 bp, Photobacterium sp. SKA34
  CDS (1)..(735): transl_table=11
atgagcctggaaggtaaagttgcactagttacaggtgcaagccgtggtatcggtcgtgcaattgctgaaattttagtagagcgtggcgcaacagttattggtactgcaacatctgaaagtggtgctgaagctattagtgcgtatcttggtgacaaaggtaaaggtctcgctctaaatgtgacttcacctgagtctattgaatcagttttaaaacaaattaaagtagattttggcgatgttgacattttggtgaacaatgctggtatcactcgtgataatctgttgatgcgcatgaaagatgatgaatggcaagatatcctagatacgaacctaacatctatcttccgcctttctaaagcggtactgcgtgcaatgatgaaaaaacgtaatggtcgtatcatcagtatcggctctgttgtgggtacgatgggtaatgcggggcagacgaactacgcagcagcaaaagctggcctattaggtttcacaaaatcaatggcacgcgaagtagcttctcgtggtattactgtgaacgcagtcgcgccaggttttattgaaacagatatgaccaaagcgttaaatgatgaccaacgtgcagcaacacttgcaaatgtacctgctggtcgtttaggcgatccgcgtgaaattgcagcagcagttgcatttttagcctcggatgatgctgcttacgtaacgggcgaaactttgcacgttaacggcggtatgtacatgatttaa

SEQ ID NO: 118778 - protein, 244 aa, Photobacterium sp. SKA34
MSLEGKVALVTGASRGIGRAIAEILVERGATVIGTATSESGAEAISAYLGDKGKGLALNVTSPESIESVLKQIKVDFGDVDILVNNAGITRDNLLMRMKDDEWQDILDTNLTSIFRLSKAVLRAMMKKRNGRIISIGSVVGTMGNAGQTNYAAAKAGLLGFTKSMAREVASRGITVNAVAPGFIETDMTKALNDDQRAATLANVPAGRLGDPREIAAAVAFLASDDAAYVTGETLHVNGGMYMI

SEQ ID NO: 118779 - DNA, 744 bp, Oceanospirillum sp. MED92
  CDS (1)..(744): transl_table=11
atgagtattgaaggtaaagtagcgcttgttaccggtgctacccgcggtatcggtaaagcaattgctgaagagctgggtaagcaaggggctgttgtcgtaggtactgctacgagtgaaaatggcgctgcggctatcagcgcttaccttgaagaggctggtgttaaaggcacgggcctggttcttgatgttgctgatgctgattccgttacagctgttttgaaagctatccaggaagattttggtaccattgaaattttagtaaataacgcaggtattacacgcgataatatcttgatgcgcatgaaggatgatgagtgggattcggttttgaataccaatctgaactccatctaccgcttagttaaaggctgtttgcgtggcatgactaaagcgcgctggggccgtatcatcagtgtaagctctgttgttgcatctatgggtaatgcgggtcaggcaaactatgctgctgccaaatcaggcatggagggctttacacgagctttagcacgtgaagtaggttctcgtaacattactgttaactgtgtagctcctggttttatcgatacagacatgactagtggtctggcagatgagcataaagatgcgttgaaatcacagatcccaatgaaccgtctgggtcaaccagaagaaattgcagctgttgttggatttttggccggacagagcggtggttatgtgaccggtgagtcgattcaggtcaatggcggcatgtatatgggttaa

SEQ ID NO: 118780 - protein, 247 aa, Oceanospirillum sp. MED92
MSIEGKVALVTGATRGIGKAIAEELGKQGAVVVGTATSENGAAAISAYLEEAGVKGTGLVLDVADADSVTAVLKAIQEDFGTIEILVNNAGITRDNILMRMKDDEWDSVLNTNLNSIYRLVKGCLRGMTKARWGRIISVSSVVASMGNAGQANYAAAKSGMEGFTRALAREVGSRNITVNCVAPGFIDTDMTSGLADEHKDALKSQIPMNRLGQPEEIAAVVGFLAGQSGGYVTGESIQVNGGMYMG

SEQ ID NO: 118781 - DNA, 744 bp, Xanthobacter autotrophicus Py2
  CDS (1)..(744): transl_table=11
atgtttgatctttccggcaagaccgcgctcgtcaccggcgccaccggcggcatcggcggcgcgatcgccaaggcgctgcacgcccagggcgccgtcgtcgccatttccggcacccgcaaggaggccctggacgccctcgccggcgagctgggcggcgaccgcgtccacgtgctgccctgcaatctcggcagcacggaagaggtggagaagctggtgccggacgccgaaacggcgctgggcggccacatcgacatcctcgtcaacaatgccggcatcacccgcgacaacatcttcatgcgcctctccgacgaggcgtgggaccaggtgatcgcggtgaacctcaccgccgccttccgcctgtcgcgcgcggccgtgcgcaccatgatgcgccgccgctcgggccgcatcatctccatcacttccatcgtcggtgtcaccggcaatgcgggccagggcaattatgccgccgccaaggccggcatgatcggcatgtccaagtcgctggcccaggaagtggcctcgcgcggggtgacggtaaactgcgtcgcccccggcttcatcgccacccccatgaccgacgccctcaacgacaagcagcgcgagagcatcctgaaggcggtgccggcggccaagctcggcacccccgaggacatcgccgccgcctgcgtctacctcgcctccaacgaggccgcctatgtcacgggccagaccctgcacgtgaatggcggcatggccatgatctga

SEQ ID NO: 118782 - protein, 247 aa, Xanthobacter autotrophicus Py2
MFDLSGKTALVTGATGGIGGAIAKALHAQGAVVAISGTRKEALDALAGELGGDRVHVLPCNLGSTEEVEKLVPDAETALGGHIDILVNNAGITRDNIFMRLSDEAWDQVIAVNLTAAFRLSRAAVRTMMRRRSGRIISITSIVGVTGNAGQGNYAAAKAGMIGMSKSLAQEVASRGVTVNCVAPGFIATPMTDALNDKQRESILKAVPAAKLGTPEDIAAACVYLASNEAAYVTGQTLHVNGGMAMI

SEQ ID NO: 118783 - DNA, 747 bp, Flavobacteria bacterium BBFL7
  CDS (1)..(747): transl_table=11
atgaaattactcgaaggaaaaacagctcttataacaggagcaagtagaggtataggtaaaggaattgcacaagtttatgcacagcatggagcaaatgtagcttttacttatagtagttctgaaggaccagctttagaactagaaaaagaactgacagcactaggcatacaagctaaagcttataaaagtaatgctgctagttttcaagaatctcaagatctagttgaagaggttgttaaagattttggtaccgttgatattctaatcaacaacgcaggtattacaaaggataacttgttaatgcgtattagcgaggaagactttgatcaagtaattgaagttaaccttaagtctgttttcaacatgactaaagctgttcaacgtaccatgttgaaaaaacgctcaggtagtattattaacatgagtagtgtagtaggagttaaaggtaatgctggacagactaactatgcagccagtaaagcaggaattataggtttttcaaaatctgtcgcgctcgaattgggatctagaaatataagatgtaactccatagctccaggatttatcgagactgaaatgaccggtaaattaaatgaagaagttgttcaaggctggagagatgctattccattaaaacgtggtggttccccagaagatgttgcaaacgcttgtgtgtttttaggtagtgatttatcgacatatgttacgggtcagacacttaatgtggatggtggtatgctcacttaa

SEQ ID NO: 118784 - protein, 248 aa, Flavobacteria bacterium BBFL7
MKLLEGKTALITGASRGIGKGIAQVYAQHGANVAFTYSSSEGPALELEKELTALGIQAKAYKSNAASFQESQDLVEEVVKDFGTVDILINNAGITKDNLLMRISEEDFDQVIEVNLKSVFNMTKAVQRTMLKKRSGSIINMSSVVGVKGNAGQTNYAASKAGIIGFSKSVALELGSRNIRCNSIAPGFIETEMTGKLNEEVVQGWRDAIPLKRGGSPEDVANACVFLGSDLSTYVTGQTLNVDGGMLT

SEQ ID NO: 118785 - DNA, 744 bp, marine gamma proteobacterium HTCC2207
  CDS (1)..(744): transl_table=11
atgaatctcaatgataaagtagcactggttactggcgccacccgcggcattggtgctgctatagcagaagcgctgggtaaagccggagctactgtagttggcacagccacatctgaggctggcgccgcatcaatcagtcagcgttttgctgataatggcgtaaacggcataggtatggtgctcaatgtcaccgatgctgagtctgtcgccaacgtgatcaaagccattactgagcagtttgcggcaccgactattctggtcaataacgccggtataaccaaagacaatatcctaatgcgcatgaaagatgatgagtggatggacgtcttggacaccaatctgacttcggtatttcgtctggctaaagggtgtgtgcgcccgatgaccaaagcgcgctggggtcgtattattaacatcagctctgtcgttggtgccatgggcaatgctgggcagagtaattattcagcatccaaagcgggtgtcggtggttttacccgcgctttagccaaagagttgggttctcgaaacattaccgttaatacagtagcgccgggttttattgatactgacatgaccaaggatctggctgaaacaagtaaggaagctatgctgacacagatacctctggcccgtttgggagccccagaagagatcgcagcagtggtctgttttcttgctggagacgccgctggctacatcacaggtgagacaattcacgtgaacggcggcatgtacatgtcgtaa

SEQ ID NO: 118786 - protein, 247 aa, marine gamma proteobacterium HTCC2207
MNLNDKVALVTGATRGIGAAIAEALGKAGATVVGTATSEAGAASISQRFADNGVNGIGMVLNVTDAESVANVIKAITEQFAAPTILVNNAGITKDNILMRMKDDEWMDVLDTNLTSVFRLAKGCVRPMTKARWGRIINISSVVGAMGNAGQSNYSASKAGVGGFTRALAKELGSRNITVNTVAPGFIDTDMTKDLAETSKEAMLTQIPLARLGAPEEIAAVVCFLAGDAAGYITGETIHVNGGMYMS

SEQ ID NO: 118787 - DNA, 747 bp, delta proteobacterium MLMS-1
  CDS (1)..(747): transl_table=11
atgggtttgcaagataaagtggcggtggttaccggtggcagccgggggattggtcgggcggtctgtcagcgcctggcggccatgggtgccctggtggtggtcaattatgtcagccagccggaggcggccgaggtggtggccgatgacatccgggccggcggcggccgggccgaaacccgggcctttaacgtggctgacacgacggccaccgaagcggcttttaaagagattttggccgaccatgggcgggtcgatatcctgatcaacaacgccggtatcacccgggatggcttgatggtcaagatgaaagaagcccagtgggatgaggtgctggataccaatctcaagggtgctttcacctgcttaaaggcggtgagccgggcgatgatgaagcagcgctggggacggatcattaatatttcctcggtgatcggctttgccggtaacgccgggcagctcaactacgccgccgccaaggccggcatgatcgggttgacccggtcggcggcccgggagctggcgccccgccagatcacggtcaacggggtggccccgggctatatcgtcaccgatatgacccgtgatctgcccgccgaaatcaacgagcagatcaaggccgggatccccctggggaccctgggggaagccgaggatgtggccgctgcagtggcctatctggcctccgaggaggcccgttacgtgaccggtcagtttatccatgtcaatggtggtctctatatgggctga

SEQ ID NO: 118788 - protein, 248 aa, delta proteobacterium MLMS-1
MGLQDKVAVVTGGSRGIGRAVCQRLAAMGALVVVNYVSQPEAAEVVADDIRAGGGRAETRAFNVADTTATEAAFKEILADHGRVDILINNAGITRDGLMVKMKEAQWDEVLDTNLKGAFTCLKAVSRAMMKQRWGRIINISSVIGFAGNAGQLNYAAAKAGMIGLTRSAARELAPRQITVNGVAPGYIVTDMTRDLPAEINEQIKAGIPLGTLGEAEDVAAAVAYLASEEARYVTGQFIHVNGGLYMG

SEQ ID NO: 118789 - DNA, 741 bp, Rickettsiella grylli
  CDS (1)..(741): transl_table=11
atgttattaaaaaataaagtagccttagtaaccggtgcaagtcgtggtattggcgctgccattgctattggattagcaaaacaaggcgcattggtctggggaactgcgacaacagaaagtggtgcggaaaaaatttcacagtcctttcaagagcacgggttgcacggaaaaggttgggtattaaatataaacgatgaccacgctataaaaaatctaatggacgcgttacaggtagtgaatttacccaatatcttggtgaacaatgcaggaattacacgagataatttgttattacgtatgaaaatggatgaatggaatgcagtgctggaaactaatttaagtgctattttcaaattaacgcaattatgtttaaaaccgatgctaaaagcacgttatggacgtattattaatatttcttctatcgtggggtgtacaggaaattcaggtcaagcgaattatgccgcagccaaagcagggttgattggatttacaaaagcattggcacaggaagttgcaacacgtcatattactgccaatgtgatagcacccggatttatagaaacggatatgacccatcaattaaatgaaagtcatcggactgcgttattggaaaaaattccagccaaacgattaggcagtgtggaagatattgcaaatgcctgcgtttttttagcttcagattgggcaagctatatcacagggagcacattgcatgtcaatggtggaatgtacatgaattaa

SEQ ID NO: 118790 - protein, 246 aa, Rickettsiella grylli
MLLKNKVALVTGASRGIGAAIAIGLAKQGALVWGTATTESGAEKISQSFQEHGLHGKGWVLNINDDHAIKNLMDALQVVNLPNILVNNAGITRDNLLLRMKMDEWNAVLETNLSAIFKLTQLCLKPMLKARYGRIINISSIVGCTGNSGQANYAAAKAGLIGFTKALAQEVATRHITANVIAPGFIETDMTHQLNESHRTALLEKIPAKRLGSVEDIANACVFLASDWASYITGSTLHVNGGMYMN

SEQ ID NO: 118791 - DNA, 726 bp, Oceanobacter sp. RED65
  CDS (1)..(726): transl_table=11
gtggatcgaaagattgcggttgtcactggcgcaagccgaggcattggacacgccatagcccagcagttaaaagaagatggcttttttgttgtggggacagcaaccagtgagtctggtgtcgataaagtaaaagaggcactagccgatcaaggaactgctatcgtattgcggcaggatgatgttgaaagttgtgatggtttcataaaagcggtggccgagttgggtccagtttcagtgttggttaataatgcgggcatcacgcgcgataatctaatgctgcgcatgaaacaagatgattgggatgcggttttaaataccaatttatccggcgtttatcgcatctgtaaaggtttcttgaagcctctaatgaaacagaggggcgggcgtattattaatattagttctgttgttggttcaatgggtaaccctggtcaggcgaattattgcgccagtaaagcaggaattgaagggtttactcgctcgttggctgtagaaatcggttctcgtaacattactgtaaatgcggttgccccaggttttattgcgacagatatgaccgaagagctgagtgatgagcaacgtcaggtcatgttgaataatattccactgggccgttacggtgatgcaaaagaagtggcggcagccgtttctttcttagcttctgatgcatcgagttacataaccggtcaggtcatacaggttaatggcggcctatttatgggctga

SEQ ID NO: 118792 - protein, 241 aa, Oceanobacter sp. RED65
MDRKIAVVTGASRGIGHAIAQQLKEDGFFVVGTATSESGVDKVKEALADQGTAIVLRQDDVESCDGFIKAVAELGPVSVLVNNAGITRDNLMLRMKQDDWDAVLNTNLSGVYRICKGFLKPLMKQRGGRIINISSVVGSMGNPGQANYCASKAGIEGFTRSLAVEIGSRNITVNAVAPGFIATDMTEELSDEQRQVMLNNIPLGRYGDAKEVAAAVSFLASDASSYITGQVIQVNGGLFMG

SEQ ID NO: 118793 - DNA, 747 bp, Alteromonadales bacterium TW-7
  CDS (1)..(747): transl_table=11
atgtctaacttattttctctagagggcaaagttgtcctaattacaggcgcaagccgtggtattggtaaagcaattgcaactatgctggttgcacaaggcgcaaaagtagccggtacagcaacaagtgagtcgggtgcggctaacattagtgactatttaggtgataacggtaaaggttatgcattaaacgtcaccgatcctgcttcaattgaggcaactttagcggcaataaaagccgacttaggcgatattgacgtactcgtaaataatgcaggtatcacgcgtgacaacttacttatgcgtatgaaagaagctgaatgggacgatattatcgacaccaacctaagctctattttccgtttatctaaggctgttttacgcccaatgatgaagaaaaagaacggccgtattatcaatattggctcggtagtgggcactatgggtaacgcagggcaagctaactacgctgcggctaaagcgggtgtaattggtttttctaagtcgcttgcacgtgaagtggcctcgcgtggtattacagtaaacgtaattgctccgggctttattcaaacagatatgaccaacgagctaaccgatgaccaaaaagcagccactttagctaatgtgccagcgggtcgtttaggtcaacctgacgaaattgcagcggcagtgtgttatttagcatctgacgcagctgcgtatgtatcaggcgaaactttgcatgtaaatggcgcgatgtatatggtttaa

SEQ ID NO: 118794 - protein, 248 aa, Alteromonadales bacterium TW-7
MSNLFSLEGKVVLITGASRGIGKAIATMLVAQGAKVAGTATSESGAANISDYLGDNGKGYALNVTDPASIEATLAAIKADLGDIDVLVNNAGITRDNLLMRMKEAEWDDIIDTNLSSIFRLSKAVLRPMMKKKNGRIINIGSVVGTMGNAGQANYAAAKAGVIGFSKSLAREVASRGITVNVIAPGFIQTDMTNELTDDQKAATLANVPAGRLGQPDEIAAAVCYLASDAAAYVSGETLHVNGAMYMV

SEQ ID NO: 118795 - DNA, 738 bp, marine gamma proteobacterium HTCC2143
  CDS (1)..(738): transl_table=11
atgacagataaaattgctttggtgacaggggccagccgaggtattggtcaagccattgcgctgcagttaggtaaggatggctttaccgttataggcacctcgaccacacagagcggtgctgcgagtattaccgaatatttaggggatgctgggattggcggagagggcatggtcttaaatgtaactagctctgtgtcagtaacagccgtcataaagacgattagtgagaagtacgcagctccattggtcctcgttaacaatgcagggattacaaaagataatattctgatgcgcatgaaagaagatgaatggaatgatgttgttaataccaatctaagttctatttttaggttgtcgaagtcgtgtgttcgaggtatgaccaaagctaagtgggggcgtatcataagtatcagctcagttgtaggagcgatgggtaatgccggtcaatcaaactatgccgccacaaaagctggaatggaaggattttcacggtcattggcaaaagaattagggtcccgtaatataacgattaactgcgtcgctccaggttttattgataccgatatgacgaaagaactgtcggaagataacaagaatatgatgctggctaagatccctctgtcacgcttaggtgaaccggaggaggtcgccgctgtagtcgcctttttggctggggatgggggcgcgtacgtgaccggtgaaacaattcatgtcaatggtggtatgtatgtgagttaa

SEQ ID NO: 118796 - protein, 245 aa, marine gamma proteobacterium HTCC2143
MTDKIALVTGASRGIGQAIALQLGKDGFTVIGTSTTQSGAASITEYLGDAGIGGEGMVLNVTSSVSVTAVIKTISEKYAAPLVLVNNAGITKDNILMRMKEDEWNDVVNTNLSSIFRLSKSCVRGMTKAKWGRIISISSVVGAMGNAGQSNYAATKAGMEGFSRSLAKELGSRNITINCVAPGFIDTDMTKELSEDNKNMMLAKIPLSRLGEPEEVAAVVAFLAGDGGAYVTGETIHVNGGMYVS

SEQ ID NO: 118797 - DNA, 741 bp, marine gamma proteobacterium HTCC2080
  CDS (1)..(741): transl_table=11
atgagtgattcccatccccctgttgcccttgtaaccggtgctagccgaggtatcggtcgtgcgatcgcggatacgcttactcaggaaaacatgatcgttatcggtacggcgaccaccgaggctggtgcagccggcattgaggaaaggctgtcgccgcttggaggtgctgggttagtcctagatgttgctagtgaaaaaagtattgatgagttgatgagcacgatcaaagcgcgcttcggagcaccactaatattggtaaataacgctggcattactcgagacaatattctcatgcgaatgaaagccgaagagtgggatagtgtcatcgataccaacctaagttcagttttccgcttgagcaaggcttgcctgagaggaatgaccaaagcaaggtggggacgtatcgttaccattacctctgtggtgggttccatgggcaatgctggccaggctaattacgcagcgacgaaggctggagcagagggtttcacccgagcgcttgctcgagaggttggttctcgatctatcacagtcaatgcggttgccccaggctttatagataccgatatgacacgcgaattgtcggatgaaaaccgtaacctcatgcttggtcagataccactggcgcgcctcggtagtcctgtagaaatcgcagaaactgtcaagttcttggtaggcgatgcggccgcttacatcaccggggaaactatccatgtcaatggcggcatgtacatggcctaa

SEQ ID NO: 118798 - protein, 246 aa, marine gamma proteobacterium HTCC2080
MSDSHPPVALVTGASRGIGRAIADTLTQENMIVIGTATTEAGAAGIEERLSPLGGAGLVLDVASEKSIDELMSTIKARFGAPLILVNNAGITRDNILMRMKAEEWDSVIDTNLSSVFRLSKACLRGMTKARWGRIVTITSVVGSMGNAGQANYAATKAGAEGFTRALAREVGSRSITVNAVAPGFIDTDMTRELSDENRNLMLGQIPLARLGSPVEIAETVKFLVGDAAAYITGETIHVNGGMYMA

SEQ ID NO: 118799 - DNA, 753 bp, Candidatus Desulfococcus oleovorans Hxd3; identical to SEQ ID NO: 59566
  CDS (1)..(753): transl_table=11

SEQ ID NO: 118800 - protein, 250 aa, Candidatus Desulfococcus oleovorans Hxd3; identical to SEQ ID NO: 59567

SEQ ID NO: 118801 - DNA, 753 bp, Escherichia coli B; identical to SEQ ID NO: 59568
  CDS (1)..(753): transl_table=11

SEQ ID NO: 118802 - protein, 250 aa, Escherichia coli B; identical to SEQ ID NO: 59569

SEQ ID NO: 118803 - DNA, 771 bp, Pseudomonas putida GB-1
  CDS (1)..(771): transl_table=11
atgaccctcaacggcaagactgcactcgtcaccggttccaccagcggcatcggcctgggcatcgcccaggtgttggcccgcgcgggtgccaacatcgtgctcaacggctttggcgacccggcaccggccatggccgagattgcccggcacggggtgaaggtggtccatcacccggcagacctgtcggacgtggcccagatcgaggccttgttcaacctggcagaaggccaatttggcggcgtcgacattctggtcaacaacgccggtattcagcatgtggcgccggtggagcagttccccaccgaaagctgggacaagatcattgccctgaacctgtcggctgtattccatggcacccgtttggcgctgccgggcatgcgcacgcgcaactgggggcggatcatcaacatcgcttcggtgcatggtttggtgggttcgaccggcaaggcagcctacgtggcggccaagcacggtgtagtcgggctgaccaaggtggtaggcctggaaaccgccaccagcaaggtcacctgcaacgcgatctgcccaggttgggtattgaccccgctggtacagaaacagatcgacgatcgtgccgccaacggtggcgatccactgcaagcgcaacacgatctattggcagaaaagcaaccgtccttggccttcgttacccccgagcacttgggtgaactggtactattcttgtgcagcgaggccggtagccaggttcgcggcgccgcctggaacgtcgatggtggctggttggcccagtga

SEQ ID NO: 118804 - protein, 256 aa, Pseudomonas putida GB-1
MTLNGKTALVTGSTSGIGLGIAQVLARAGANIVLNGFGDPAPAMAEIARHGVKVVHHPADLSDVAQIEALFNLAEGQFGGVDILVNNAGIQHVAPVEQFPTESWDKIIALNLSAVFHGTRLALPGMRTRNWGRIINIASVHGLVGSTGKAAYVAAKHGVVGLTKVVGLETATSKVTCNAICPGWVLTPLVQKQIDDRAANGGDPLQAQHDLLAEKQPSLAFVTPEHLGELVLFLCSEAGSQVRGAAWNVDGGWLAQ

SEQ ID NO: 118805 - DNA, 741 bp, Pseudomonas putida GB-1
  CDS (1)..(741): transl_table=11
atgagccagtacctgcaaggccagaccgcaatcgtcaccggagggatgcgtggcatcggcctggcgattgcccagcgcctgcatgccgccggcgcccaggttgtgatctgggacctcgccgtggagggttggagcaacgcggaaaacggctttgagcccgtgctgcgccaggcggtggatgtatcgtcgctggcctcggtagagacagccttcgccgagacgctgaggcgtatagggcaggtgcagattctggtcaacaacgctggcatcaatggccctgtggtgtcgtcgtgggagtacccgccagaggcctgggacaaggtcatcgccattgacctgaacggcgtgttctattgctgccgtaccgccatcccgcatatgcgtgacaacggctacgggcgcatcgtcaatatcgcctccatggccggcaaggatggcgtgcagtacatctcggcctattcggcagccaaggctggggtcatcgcctttaccaaggcagcggccaaggagctggcgcaggacggcgtgctgctcaactgcgtggcaccggccatggtcgagaccccgctgatggccgagatgacggccgagcacattgccgcgagcaaggccaagatccccatggggcggttcctcaaggccgaggagatcgccaatatggtcagctggattgccgggccggagtgcagctttaccaccggcttcgtcttcgacctcagcggcgggagggcgacctattga

SEQ ID NO: 118806 - protein, 246 aa, Pseudomonas putida GB-1
MSQYLQGQTAIVTGGMRGIGLAIAQRLHAAGAQVVIWDLAVEGWSNAENGFEPVLRQAVDVSSLASVETAFAETLRRIGQVQILVNNAGINGPVVSSWEYPPEAWDKVIAIDLNGVFYCCRTAIPHMRDNGYGRIVNIASMAGKDGVQYISAYSAAKAGVIAFTKAAAKELAQDGVLLNCVAPAMVETPLMAEMTAEHIAASKAKIPMGRFLKAEEIANMVSWIAGPECSFTTGFVFDLSGGRATY

SEQ ID NO: 118807 - DNA, 750 bp, Pseudomonas putida GB-1
  CDS (1)..(750): transl_table=11
atgtccaagcaactttcactcgaaggcaaagtggccctggttcagggcggttcccgcggtattggtgcggccatcgtacggcgcctggcccgcgaaggcgcgcacgtggccttcacctatgtcagctctgccggcccggcagaagaactggcccgcgaaatcagcgaaaacggtggcaaagccctggccctgcgggccgacagcgccgatgcagcggccgtgcaactggcagtggatgacgccgtgaaggccttcggcaggctggatatcctggtcaacaacgccggcgtgctggcggtggccccgctggccgaattcgacctggccgacttcgaccgcatgctggcggtgaacgtacgcagtgtgttcgtcgccagccaggccgccgcacgctacatgggccagggtgggcgcatcatcaacattggcagcaccaatgccgagcgcatgccgtttgccggcggtgcgccgtacgccatgagcaagtctgcgctggttggcctgacccgcggcatggcgcgtgacctcgggccgcagggcattaccgtgaacaacgtacaaccggggccagtggacaccgacatgaacccggccagcggcgagtttgccgagagcctgatcccgttgatggcgatcggccggtatggcgagccagaggaaattgccagcttcgtggcttacctggcggggcctgaagccgggtacatcaccggggccagcctgacggtggacggtgggtttgcagcctga

SEQ ID NO: 118808 - protein, 249 aa, Pseudomonas putida GB-1
MSKQLSLEGKVALVQGGSRGIGAAIVRRLAREGAHVAFTYVSSAGPAEELAREISENGGKALALRADSADAAAVQLAVDDAVKAFGRLDILVNNAGVLAVAPLAEFDLADFDRMLAVNVRSVFVASQAAARYMGQGGRIINIGSTNAERMPFAGGAPYAMSKSALVGLTRGMARDLGPQGITVNNVQPGPVDTDMNPASGEFAESLIPLMAIGRYGEPEEIASFVAYLAGPEAGYITGASLTVDGGFAA

SEQ ID NO: 118809 - DNA, 777 bp, Pseudomonas putida GB-1
  CDS (1)..(777): transl_table=11
atggatctaggtattaccggccgctgggccatcgtctgcgcggccagccagggcctgggcaaaggctgcgccgaggcgcttggcaaagagggcgtcaacctggtcatcaatgcccgtaccgacgccaccttgcagcagaccgccaatgagttgcgcgcggctaatccgggcatcgaggtgcgtaccgtagccggtgatgtagccgatgccgaggtacgtcaggcgctgctggcggcctgcccgcaggtcgatattctggtcaacaacgccggtggcccgccaccgggggacttccgtgactgggggcgtgaagactggctgaaggcgttggacgccaacatgctcacccccatcgagctgatcaaagcggtggtcgatggcatggccgagcgggggttcggccgggtggtgaatatcacttcaggcgcggtgaaggcaccgatcgacatactgggcctgtccaatggcgcccgcagtggcctgaccggcttcatcgccggactggcccggcagcagcgcctggcgggcagcaacgtgacgctgaacaacctgctgcctggggcattcgacacggcgcgtctgcaaaagacgttgaaggcggcaggcggtgatgtgcaagccactgcccaggcgcggcgcaaggccattccggcggcacgctttggtgatgccggggagttcggcgcttattgcgcgtttctgtgcagcgcgcaggccgggtacatcaccgggcagaacctgctgattgatggcggggcgtatccgggtacgttctga

SEQ ID NO: 118810 - protein, 258 aa, Pseudomonas putida GB-1
MDLGITGRWAIVCAASQGLGKGCAEALGKEGVNLVINARTDATLQQTANELRAANPGIEVRTVAGDVADAEVRQALLAACPQVDILVNNAGGPPPGDFRDWGREDWLKALDANMLTPIELIKAVVDGMAERGFGRVVNITSGAVKAPIDILGLSNGARSGLTGFIAGLARQQRLAGSNVTLNNLLPGAFDTARLQKTLKAAGGDVQATAQARRKAIPAARFGDAGEFGAYCAFLCSAQAGYITGQNLLIDGGAYPGTF

SEQ ID NO: 118811 - DNA, 774 bp, Pseudomonas putida GB-1
  CDS (1)..(774): transl_table=11
atgctgacttcactacaaggcaaaagcgtattggtcaccggcggtaccagcggtatcggcctgggcatcgccgtcggcttcgcccgccagggcgccaaggtggcgatcagtggccggcaccgggacaaggttgaggctgtcgccagccgcttgcgtgatcaaggcctggccgtcatcggcctggtggccgatgtgggtgaccgcgcgcaggtgctgcggatgatcgaagaggtggcgcaggcccagggcgggctcgatgtactgtgcgccaatgccggggtcttcccctctgccgcactggccgagatgagcgataccgactgggacaaggtgctcggcaccaatgccaaaggcaccttcctctgcgtgcaggcggcgctgccgtatttgcgcagggccgagtacggccgggtgatcctgacctcgtccatcaccgggccagtcaccggctttccaggctgggcgcactacggcgcgagcaaggcagcgcagctgggtttcatgcgtaccgcagcgatcgagctggcccgcgatggcatcaccatcaatgccctgctgccaggcaacatcgttaccgaaggcttgcagggcatgggcgaggactaccaggccagcatggccgcgtccattccgctcaagcgcctcggccaggtcgaggacattgccaatgccgcgttgttctttgcttccagagaggccggctacatcactgggcaaagcctgatcatcgatggtgggcagatcctgcccgagtccctgcaagcactggcctga

SEQ ID NO: 118812 - protein, 257 aa, Pseudomonas putida GB-1
MLTSLQGKSVLVTGGTSGIGLGIAVGFARQGAKVAISGRHRDKVEAVASRLRDQGLAVIGLVADVGDRAQVLRMIEEVAQAQGGLDVLCANAGVFPSAALAEMSDTDWDKVLGTNAKGTFLCVQAALPYLRRAEYGRVILTSSITGPVTGFPGWAHYGASKAAQLGFMRTAAIELARDGITINALLPGNIVTEGLQGMGEDYQASMAASIPLKRLGQVEDIANAALFFASREAGYITGQSLIIDGGQILPESLQALA

SEQ ID NO: 118813 - DNA, 744 bp, Marinobacter sp. ELB17
  CDS (1)..(744): transl_table=11
atgtctctggaaggcaaagttgcactggttaccggtgctacccggggaattggtaaagccgtagcccgggctttggcagagcagggtgccgaagtgatcggtaccgccaccaccaccgcaggtgctgaatcgatcagcgccgaattgcaggccggtggcttcaaaggctacggtttggtgatgaacgttgccaacccgaagagcattgaagacggtttgaaaacgatcgccgaaaaatctggcgctccgctgattctggtcaataacgccggtattacccgtgataaccttctactacgcttaaaagatgatgactgggccgatgtgctggaaaccaacctgaccagcgtataccgcaccagtaaagcggtactgcgcggtatggcaaaagcgcgctggggccgggtgattaatatcagctcggtcgttgccagcatgggtaacgcgggtcaaggtaactactgtgcggccaaggccggtgttgaagggtttactagaagcctggcaaaagaaatgtctgcccgtggaattactgccaactgtgtggctccagggtttattgatactgatatgacccgtaaactggacgacggtcagcgtgacgctatgctgaacgttattcccgcgggtcgtttgggtgagccggaagaagtcgcggcagttgtcgcgtttctggcatcgaatgcagctgcctatgtgacgggtgaaaccattcacgtaaacggcggtatgtacatgggttaa

SEQ ID NO: 118814 - protein, 247 aa, Marinobacter sp. ELB17
MSLEGKVALVTGATRGIGKAVARALAEQGAEVIGTATTTAGAESISAELQAGGFKGYGLVMNVANPKSIEDGLKTIAEKSGAPLILVNNAGITRDNLLLRLKDDDWADVLETNLTSVYRTSKAVLRGMAKARWGRVINISSVVASMGNAGQGNYCAAKAGVEGFTRSLAKEMSARGITANCVAPGFIDTDMTRKLDDGQRDAMLNVIPAGRLGEPEEVAAVVAFLASNAAAYVTGETIHVNGGMYMG

SEQ ID NO: 118815 - DNA, 786 bp, Streptomyces echinatus
  CDS (1)..(786): transl_table=11
atggtgaacgacgatcggcgggtggccctcgtcacgggcgccaccagcggcatcgggctgtccgtcgcccgggacctggcccgcgcgggcctggcggtgttcctctgcgcccgggacacggacgccgtgaagcggacggtggaggaactgcgggccgtcggtcacgaggccgacggcacgtcgtgcgacgtacgggacaagacctcggtccgggccctggtggactccgccctcggggcgtacggccgggtcgacgtcctggtgaacaacgccggccgcaacggcggcggggtcaccgccgatctccccgacgagacctggtacgacgtcatcgacaccaacctcaacagcgtcttcctggtcacccgtgaggtgctcaagcgctccggtatgcgggagcgcggctggggccgggtcatcagcatcgcctccaccggcggcaaacagggcgtggtgctcgcggcgccctactcggcgtccaagcacggggtgatcggcttctccaaagcgctcggcaaggagctcgcgccgaccggcgtcaccgtcaacgcggtgtgcccgggctacgtcgagaccccgatggcccagcgggtgcgggccggctacgccgccgcctgggagaccaccgaggaggacgtactggagcagttccaggccaagatcccgctggggcgctactccacgccggaggaggtggccggcctcgtcggctatctggtgagcgacacggcggcgtccatcacggcccaggcgctgaacgtctgcggcggcctgggcaactactga

SEQ ID NO: 118816 - protein, 261 aa, Streptomyces echinatus
MVNDDRRVALVTGATSGIGLSVARDLARAGLAVFLCARDTDAVKRTVEELRAVGHEADGTSCDVRDKTSVRALVDSALGAYGRVDVLVNNAGRNGGGVTADLPDETWYDVIDTNLNSVFLVTREVLKRSGMRERGWGRVISIASTGGKQGVVLAAPYSASKHGVIGFSKALGKELAPTGVTVNAVCPGYVETPMAQRVRAGYAAAWETTEEDVLEQFQAKIPLGRYSTPEEVAGLVGYLVSDTAASITAQALNVCGGLGNY

SEQ ID NO: 118817 - DNA, 744 bp, uncultured bacterium
  CDS (1)..(744): transl_table=11
atggctcagagaatcgcgctggtgacgggcggaatgggcggcctcggcgaggccatctgcatgaagctcgagaagatgggcatcaaggtcgtcgtcacctactcgccgggcaacaccaagcacaaggactggctcaaggagatggaggcccagggccacaagttcgtggcctatccgtgcgacgtggcggatttcgactcgtgccagaaggcgatcgcggaagtggtgaagggggtcggcccgatcgacatcctcatcaacaacgccggcatcacgcgcgacatgaccttcaagaagatgaccaaggtcgactgggacgcggtgatgaagaccaacctcgacagcgtcttcaacgtgaccaagcccgtggtcgacggcatggtcgagcgcggctgggggcgcgtgatcaacgtctcctcggtgaacggccagaagggcgcgttcggccagaccaactactcggcggccaaggcggggatgcacggcttttccaaggcgcttgcgctcgaggtcgcgcgcaagggtgtcaccgtcaacacgatctcgcccggctacatcgggaccaagatggtgctcgcgattcccaaggacgtgctcgactcgaagatcattccgcagatcccgatggggcggctgggcaagcccgacgaggtcgcggggctgtgcgcctacctggcctccgacgaggccgcgttcctcaccggcgcgaacatcgccatcaacggcgggcagcacatgcagtga

SEQ ID NO: 118818 - protein, 247 aa, uncultured bacterium
MAQRIALVTGGMGGLGEAICMKLEKMGIKVVVTYSPGNTKHKDWLKEMEAQGHKFVAYPCDVADFDSCQKAIAEVVKGVGPIDILINNAGITRDMTFKKMTKVDWDAVMKTNLDSVFNVTKPVVDGMVERGWGRVINVSSVNGQKGAFGQTNYSAAKAGMHGFSKALALEVARKGVTVNTISPGYIGTKMVLAIPKDVLDSKIIPQIPMGRLGKPDEVAGLCAYLASDEAAFLTGANIAINGGQHMQ

SEQ ID NO: 118819 - DNA, 735 bp, Streptomyces coelicolor
  CDS (1)..(735): transl_table=11
gtgaccgggggaagccggggcatcggacgcggtatcgccctgcggctggccgcggacggggcgctcgtggcagtccactacggcagcagcgaggcggcggcgcgagagaccgtcgagaccatccggagcagcggcggacaggcgttggccatccgggccgaactcggcgtcgtgggtgacgcggccgcgctctacgcggcgttcgacgccgggatgggcgagttcggagtgccgcccgagttcgacatcctggtgaacaacgcgggcgtcagcggctcgggacggatcacggaagtcaccgaggaggtcttcgaccgactggtcgccgtcaacgtccgggcaccgctgttcctggtccagcacggactgaaacgactgcgcgacggcgggcggatcatcaacatctcgtctgccgcgacccggcgcgcgttccccgagtccatcggatacgcgatgaccaagggtgcggtggacacgctcacgctcgccctggccaggcaactgggggaacgggggatcacggtcaacgcggtggcgccgggtttcgtggagacggacatgaacgcacggcggcggcagacccccgaggcggccgcggcactggccgccaactccgtgttcaaccgcatcggcagacccgacgacatcgccgacgtggtggcctttctggcctccgacgactcacggtggatcaccggccagtacgtcgatgccacaggcggaacgattctctga

SEQ ID NO: 118820 - protein, 244 aa, Streptomyces coelicolor
MTGGSRGIGRGIALRLAADGALVAVHYGSSEAAARETVETIRSSGGQALAIRAELGVVGDAAALYAAFDAGMGEFGVPPEFDILVNNAGVSGSGRITEVTEEVFDRLVAVNVRAPLFLVQHGLKRLRDGGRIINISSAATRRAFPESIGYAMTKGAVDTLTLALARQLGERGITVNAVAPGFVETDMNARRRQTPEAAAALAANSVFNRIGRPDDIADVVAFLASDDSRWITGQYVDATGGTIL

SEQ ID NO: 118821 - DNA, 771 bp, Aedes aegypti; identical to SEQ ID NO: 59588
  CDS (1)..(771)

SEQ ID NO: 118822 - protein, 256 aa, Aedes aegypti; identical to SEQ ID NO: 59589

SEQ ID NO: 118823 - DNA, 765 bp, Streptomyces argillaceus
  CDS (1)..(765): transl_table=11
gtgaccacgcaccactccacagccccggccctgaccggccgcaccgcgctggtgaccggcgccacccggggcgtgggcttcgccatcgcccgcaaactgtgcgcccgcggcgccgacgtcctgctcgactacgccgaggacgaggcgaacgccgcgcgggccgtcggggcgctggccggcctgccgggccgggccgccgccgtccgggccgatgtcaccgtcgacttcgacgccctgtgcgacgaggtcgggcagcgcttcggccacctcgacatcttcgtccacaacacctcctacttccggcccgcgcccaccctcgccaccacgccggagcaggtggaccgctccctggccgtggcgctgcgtcccctgctcaccggggcctcccggctggccgggctaatggcgggacgcccaggcaggatcgtcgccgtctccagcaccggtgcccaccgggtggtgccccggtacgccggggcgggcatggccaaggccgcgctggagtccctcgtgcggtacctcgcggtggagctggccggacgcggcatcgccgtcaacgcggtcgccgcggccaaggtcgacaagggggacgggaccgttccggccgaggtcgccgaggcgatcaccgcacgtacgcccgggggacggctcacccgccccgaggacgtcgccgacgccgtcagcctgctgtgcacggacgaggcgcgctggctgcagggccaggtcgtgacggtcgacggcggcctgggtctggtggcgggctga

SEQ ID NO: 118824 - protein, 254 aa, Streptomyces argillaceus
MTTHHSTAPALTGRTALVTGATRGVGFAIARKLCARGADVLLDYAEDEANAARAVGALAGLPGRAAAVRADVTVDFDALCDEVGQRFGHLDIFVHNTSYFRPAPTLATTPEQVDRSLAVALRPLLTGASRLAGLMAGRPGRIVAVSSTGAHRVVPRYAGAGMAKAALESLVRYLAVELAGRGIAVNAVAAAKVDKGDGTVPAEVAEAITARTPGGRLTRPEDVADAVSLLCTDEARWLQGQVVTVDGGLGLVAG

SEQ ID NO: 118825 - DNA, 762 bp, Streptomyces argillaceus
  CDS (1)..(762): transl_table=11
atggacatgggactgacaggccgcagggtgctcgtcacgggcgggtcctccggaatcggtgcggccgtcgcgcgcgcctacgcggacgagggggcgcgggtcgccctcacctaccgcggcggcgacgaggcggccgaacggctcgcccgtgaactcggcgcgggccggcacgcggcaatggcggtgcggtactccctcggggagccggacaccgtggagtcggccgtcgccacggtgaccgaacgctggggcggggtggacgtgctcgtcgcgaacgcggtgcgctgggctccccgccgggcgcccggcacccggttcgaggaggtcgcgtccggggactggcggggtttcctcgacgacaacctggcgccgaccctgcgtaccgtgcagctggtggtggccgggatgcgggcgcggtcctggggcaggatcgtgctcatctcctcgcatgtggccctcgacggccaccgcgggcaggagttctacggcgccgccaagtcggcgctgcacggcttcgcccgcagtctggcctgggacgtgggccgtgacggtgtcctggtgaacgtcgtgtgcccggggctgaccaccaccgagcgcgtgctcaccgggctgcccgacgagatccgcgagcgtgagctcggctcgacccccaccggtcggctcagcagccccgaggacatcgccggcgcggtgctcttcctgggctcggcggccaacgccaacacgacgggccagaccctcacggtctccggcggccgctga

SEQ ID NO: 118826 - protein, 253 aa, Streptomyces argillaceus
MDMGLTGRRVLVTGGSSGIGAAVARAYADEGARVALTYRGGDEAAERLARELGAGRHAAMAVRYSLGEPDTVESAVATVTERWGGVDVLVANAVRWAPRRAPGTRFEEVASGDWRGFLDDNLAPTLRTVQLVVAGMRARSWGRIVLISSHVALDGHRGQEFYGAAKSALHGFARSLAWDVGRDGVLVNVVCPGLTTTERVLTGLPDEIRERELGSTPTGRLSSPEDIAGAVLFLGSAANANTTGQTLTVSGGR

SEQ ID NO: 118827 - DNA, 738 bp, Bacillus amyloliquefaciens
  CDS (1)..(738): transl_table=11
atgaataacggaaaagtagcggtcgtcagcggaggaagccggggcctgggaaaagcgattgtacagacgcttttggatgaggattacaaagtagccgctttcagccgcagtgaatctgattttattaacacattgagagagagtgaaaagtaccgcggccgcttttattgggatgcggcggatgcggcggatgatgccgccatgaaacagtttgttcttcaagtataccgcaagttttccagaatagacggcttggtcaataacgccggtttgaaccttgatcagctgctgcccctgaccaatgatgaagacattgaccgcatcctcaatctgaatatcggttcagtcatcaagctgacccgaaacgtttcccgggtcatgctgaaacaaaattccggatcaatcgttaacataagctccattatcggctcaagaggatttaaaggcacttcagtctacagcgcatccaaagcggctcttgacggcttgacgcgaagcctggccagggagctcgggtctaaaggaatccgtgtcaattcacttgcgcccggttttgtggacaccgatatgacgaaaaatatgccggaaaaacaaaaatcgcagattatcagaaggacaccgatgggacgtttaggcgaaacagacgatatgaccggactcgttcgtttcctgctttctcctgaatcgtcctttatgaccggacagacaatggcaatagacggcggattaacttgttaa

SEQ ID NO: 118828 - protein, 245 aa, Bacillus amyloliquefaciens
MNNGKVAVVSGGSRGLGKAIVQTLLDEDYKVAAFSRSESDFINTLRESEKYRGRFYWDAADAADDAAMKQFVLQVYRKFSRIDGLVNNAGLNLDQLLPLTNDEDIDRILNLNIGSVIKLTRNVSRVMLKQNSGSIVNISSIIGSRGFKGTSVYSASKAALDGLTRSLARELGSKGIRVNSLAPGFVDTDMTKNMPEKQKSQIIRRTPMGRLGETDDMTGLVRFLLSPESSFMTGQTMAIDGGLTC

SEQ ID NO: 118829 - DNA, 771 bp, Streptomyces hygroscopicus
  CDS (1)..(771): transl_table=11
gtgcttccccctgcgccaggaatcgatgacgtgagcgaccgggcagccctggtgaccgggggttccggcccgctggggcgggcgatcgcccagcagttgtcccgatcgggctacgccgtgggggtgcacgcgcaccggaacgaggaagcggcggcggccgtggccgaggagctccggacggcgggcgcggccgcggtcgcgttgtcggccgacctgacccgcccggacagcggcagacgggtcgtcgggcgggtcgtcgaggaattcggccgtctggacgccctggtggtcaatgccggggtgcaccgggaccggctgctgctgggcgttccggaggacgagtgggacgagcagatcgcggtcaatctcagcggggcgttccgctgtctgcaggccggggtgcgggccatgacgcggcacgcgggcggacgcgtcgtcctggtgtcctcggtggcgggcctgcgggggcagccgggccaggccgcctacgcggccggcaagtccggtctgcacgggctggcatggacggtggccagggagtacgggcggtacgggatcacctgcaactgcgtggcccccggcctggtcgccgacacccccgcctatcacctcctgcccgccagggcgcgggacgaggtggtgagccggacaccgctcgggcgggcgggccgtgccgaggagatcgcctcggtggtggccttcctgtgctcctcttcggcgtcgtacgtcaccgggcaggtgatcgcggtggacggcggaatgacggcctga

SEQ ID NO: 118830 - protein, 256 aa, Streptomyces hygroscopicus
MLPPAPGIDDVSDRAALVTGGSGPLGRAIAQQLSRSGYAVGVHAHRNEEAAAAVAEELRTAGAAAVALSADLTRPDSGRRVVGRVVEEFGRLDALVVNAGVHRDRLLLGVPEDEWDEQIAVNLSGAFRCLQAGVRAMTRHAGGRVVLVSSVAGLRGQPGQAAYAAGKSGLHGLAWTVAREYGRYGITCNCVAPGLVADTPAYHLLPARARDEVVSRTPLGRAGRAEEIASVVAFLCSSSASYVTGQVIAVDGGMTA

SEQ ID NO: 118831 - DNA, 816 bp, Lactuca sativa
  CDS (1)..(816)
atggcaaccactacaagaaggttagaagggaaggtagccttgataactggagcagcaagcggtattggggaatgtgctgcaaagctctttgctgaacatggtgcaaaaatcgtcatcgcagacattcaagaccaacttggtcaagcggtttgtgaggccataggatcatcaaactcgatatatatccattgtgatgtaaccaacgaagaagatgtcagaaaagctgtagatatagcaatcgccacatatggaaaacttgatatcatgttttgtaatgcaggaataatcgatcctaacaaggatcacatcatcgataatgaaaaatcggattttgaacgtgtgcttagtgtcaacgtcacaggtgtctttctaagcatgaaacatgcagctagggttatggttccaacacgagctgggtcaataatatcaacagctagtgttgtgtcaaatatcggtggcttgtgcccacatgcttacacttgttcaaagcatgctgtagctggtttaaccaagaatcttgcagttgagcttggacaatttggtattcgagtcaattgtctttcaccttacgcaatagatacaccacaagccacaggtttcacgggtcttaaaggggaggatttcaagaacaaggtaaactcagttgcaaaccttaagggtgtgacacttacaacagatgatgttgctaaagctgctgtttttttggcgagtgatgaggctaagtatattagtggacataatttgtttattgatggtggatttagcattgttaacccatcattcaatatgtttcaatatccagagaaccctttataa

SEQ ID NO: 118832 - protein, 271 aa, Lactuca sativa
MATTTRRLEGKVALITGAASGIGECAAKLFAEHGAKIVIADIQDQLGQAVCEAIGSSNSIYIHCDVTNEEDVRKAVDIAIATYGKLDIMFCNAGIIDPNKDHIIDNEKSDFERVLSVNVTGVFLSMKHAARVMVPTRAGSIISTASVVSNIGGLCPHAYTCSKHAVAGLTKNLAVELGQFGIRVNCLSPYAIDTPQATGFTGLKGEDFKNKVNSVANLKGVTLTTDDVAKAAVFLASDEAKYISGHNLFIDGGFSIVNPSFNMFQYPENPL

SEQ ID NO: 118833 - DNA, 813 bp, Lactuca sativa
  CDS (1)..(813)
atgacaagtattacaaaaaggctagaagggaaggtagcattgatcaccggagcagcaagtggtattggtgagtgcactgcaaaactatttgctgaacatggagcaaaagtagtaatcgcagacatccaagaccaacttggtcaagcagtttgtgaggccataggcacatcaaactccatatatgtccattgtgatgtaaccaacgaagaagatataaaaaacgctgtagatactgcagtcactacttatggaaaacttgatatcatgtttaacaatgcgggggtagtagatcctatcaaagcacgtattatcgacaatgagaaaacaaactttgaacgtgtgcttaatgttaatgtaacaggggtcttcctttgcatgaaacatgctgctagggtcatggttccacagcgatcgggcacaataatatcatcgtccagcctttcttcacatcttggtggtatcgcctctcatgcttactgttgttcaaagcatgcaatagcaggtctaaccaagaacctagcagtagagcttggacaatttggcattcgagtcaactgtttgtcagcttatggaatagctacaccattaactaaaaaaattactgggcttgaaaaggaggcttttgagagcgcaatgaacttaacagcaaacctaaagggggtgacactcaaaacagatgatgctgcatatgctgcactttttctggtaagcgacgaggctaagtacataagtggacagaatctacttattgacggtggattgagctatgctaatacatcattcaacttctttaaatatggtgaggaactataa

SEQ ID NO: 118834 - protein, 270 aa, Lactuca sativa
MTSITKRLEGKVALITGAASGIGECTAKLFAEHGAKVVIADIQDQLGQAVCEAIGTSNSIYVHCDVTNEEDIKNAVDTAVTTYGKLDIMFNNAGVVDPIKARIIDNEKTNFERVLNVNVTGVFLCMKHAARVMVPQRSGTIISSSSLSSHLGGIASHAYCCSKHAIAGLTKNLAVELGQFGIRVNCLSAYGIATPLTKKITGLEKEAFESAMNLTANLKGVTLKTDDAAYAALFLVSDEAKYISGQNLLIDGGLSYANTSFNFFKYGEEL

SEQ ID NO: 118835 - DNA, 765 bp, Aspergillus oryzae
  CDS (1)..(765)
atggcatcctactcgggcagaaacgcggttgtcatcggtggtagtcatggcatcggcctatcaacagctcagcttctggttgacaagggtgcaaaagtcctcgtcaccggtcgaagccttggacccattgaagcagcaaagcaacaactaaaagatacggccgagattgtaccatgtgatatcacttcaaccgctgccatatctgatcttgttcagacggtgcagtccttttttggtgctggacaaagcatcgatcttctctttgtcaacgctggttatgcctctctggagccattcgctactgtgtcagaggagtcttttcgacgaacattcgacactaacgtattcggtgccttcttcgtcgcacaaaagcttacccctctccttaaagatggtggttccatcgtattcaccacctcggtcgcaaaccaggtcggcatccctggcatggcgacgtactcggcttccaaggctgccgtccggtctttcgtgcagacattagcagcagagctggttaatcggagaatacgggtcaacgcagtctctcccggttttgtgaaaaccccaacgatgggtgttgcaagcgcctcgagtgatgatctacgggagttcgaaaaccagggtgttcagactacacccttaggtagggttggagaaccgatcgaggttgcgcgtgccgttttgttcctcgcgttcgaggccaccttcacaacgggctcggaggtgacacttgatggtgggttagcgctactgaaggcgcattag

SEQ ID NO: 118836 - protein, 254 aa, Aspergillus oryzae
MASYSGRNAVVIGGSHGIGLSTAQLLVDKGAKVLVTGRSLGPIEAAKQQLKDTAEIVPCDITSTAAISDLVQTVQSFFGAGQSIDLLFVNAGYASLEPFATVSEESFRRTFDTNVFGAFFVAQKLTPLLKDGGSIVFTTSVANQVGIPGMATYSASKAAVRSFVQTLAAELVNRRIRVNAVSPGFVKTPTMGVASASSDDLREFENQGVQTTPLGRVGEPIEVARAVLFLAFEATFTTGSEVTLDGGLALLKAH

SEQ ID NO: 118837 - DNA, 771 bp, Aspergillus oryzae
  CDS (1)..(771)
atgaccgcccaacagtcgctgcggggcaaaaatgccatcgtgaccggtgggtcccgcggcatcggcaaaggaatcgcccttgaactcgccagtcgtggcgccaatatcctcctgacatacaacagctcccgtcaacaggccgaagaggtcgcttcgcagattcggagggtcggagtagatgcaatcgcagttgaaggcaaagcggatgatttgtcggcaccgaaaaacatcgtcgatgcagccgctgagcgatggggctgcattgacatcgtcattaacaatgccggcgctcgagaagactaccccgtcgaggcaatgacatatgaggcatttgatcgccaaatcgcggtgaacctgcgattcccggtatttctcatcaaagaggcgacgcgacattttggaaagacgccgcgcattgtcaacctttcgagtgtgtatgctcgggatgggcagccgggatgtctggcatatgtggcaagtaaaggcgccatggagagtctcacgcgatctttggccaaagagttgggacataagtacaacgcaaccattaactgtgtgagtcccggcccggtaaataccgagctgtgggcctctacccttcaatctgaagagaaagagcaatgggatcaggtcattcaaagtacccctgctgcgccgagggtggcagaggtggatgatattgctcagattgtcgcgtttctctccgaagaagggagtagatggactacggggagcttgatcaatgctaacggagggctcctgtttgtttaa

SEQ ID NO: 118838 - protein, 256 aa, Aspergillus oryzae
MTAQQSLRGKNAIVTGGSRGIGKGIALELASRGANILLTYNSSRQQAEEVASQIRRVGVDAIAVEGKADDLSAPKNIVDAAAERWGCIDIVINNAGAREDYPVEAMTYEAFDRQIAVNLRFPVFLIKEATRHFGKTPRIVNLSSVYARDGQPGCLAYVASKGAMESLTRSLAKELGHKYNATINCVSPGPVNTELWASTLQSEEKEQWDQVIQSTPAAPRVAEVDDIAQIVAFLSEEGSRWTTGSLINANGGLLFV

SEQ ID NO: 118839 - DNA, 792 bp, Aspergillus oryzae; identical to SEQ ID NO: 40511
  CDS (1)..(792)

SEQ ID NO: 118840 - protein, 263 aa, Aspergillus oryzae; identical to SEQ ID NO: 40512

SEQ ID NO: 118841 - DNA, 765 bp, Aspergillus oryzae
  CDS (1)..(765)
atggagcaacaaaatgacatcagtggccgattggtcctgattactggagcttctggaggtattggggcagcttgtgctcgccagctagctgcgaaaggtgtccatcttgccttgacgtattccacgaatgtatcttcgacatcttctctcgccgaagagctcaaatccaaacactcagacagctacagtctccgggtttcaatccataaggtggacgtgtcttccgcggacgaaatacagcgtatgttcgaggagattgaccaacaacataacaagcgaccggacatcttggtctccaatgctggatacggcaagcgagtcccacaggtttgggacatttccctcgaagaattcgattacaccatcaatgtgaacctacgtgcttcgttcattttggtgaagggcgtggtggagcacatgaagagtcagcgatggggtcggatagtgttcatgtcctctattgccggccaaggaggtgggatcaatggatgtcactacgctgcttccaaaggggggctgacgggaatgatgaagaatctttccacgaggctagctgaatacaatattagtgtcaatgatgttgcgcctgccatgatcggtgaaaccggtatgatccccagcgctgcggccattcctgaggttgccgctggtattcctttgggccgactgggtcttccggatgaagtggccaacgtggtgactatgcttgtgacgaccggttacatgactggtcaaagtctgctgcttggaggaggattgaaatag

SEQ ID NO: 118842 - protein, 254 aa, Aspergillus oryzae
MEQQNDISGRLVLITGASGGIGAACARQLAAKGVHLALTYSTNVSSTSSLAEELKSKHSDSYSLRVSIHKVDVSSADEIQRMFEEIDQQHNKRPDILVSNAGYGKRVPQVWDISLEEFDYTINVNLRASFILVKGVVEHMKSQRWGRIVFMSSIAGQGGGINGCHYAASKGGLTGMMKNLSTRLAEYNISVNDVAPAMIGETGMIPSAAAIPEVAAGIPLGRLGLPDEVANVVTMLVTTGYMTGQSLLLGGGLK

SEQ ID NO: 118843 - DNA, 780 bp, Aspergillus oryzae
  CDS (1)..(780)
atggtcgcagaccccagaccccaaacactagccggcaaagtcgccattgtgacaggcgcaacgagaggaatcggcgccgggctggctgaagaattagcccgtcgaggagccaaagtcttgatcacatacacatcagcgagcagcgaacccatcgctgataaactaatcgagaaaatcaaaaacttcaacaacggctccaaggcagccaaagtccgcgccgatctccgcgatctatcagctggagaaacgatcgtcgaagcctcaatccaagcattcggccccaacatcgatatcctggttaacaacgccggcgtggaagtagtgaagcccctttcagatctcacggtggaagactacaacctcgtttacgacctgaacgtccgcggggctatctttctgacgcaggctgttctcccgcatctacgtgcacccggtcggatcatcaatatcagttcagttggtgcacgggcgggattcgctaatttgtcgatttattgctcgtccaaggcggccttggagggcttgacgcgatgctgggctgcggagttgggtgatgctgggcatacggtgaatgctgttaatccggggccagtgcagacggctttgctggagaatattccgaaggagttggtggagatgcagaagtctgctacgccggttgagcatcgggtggggacgattgatgatgttgcgcaggtggtggcgtggcttgcttctgaggagagtcggtgggtttctgggcaggcgattgctgcttctggggggtttgcgatgtattga

SEQ ID NO: 118844 - protein, 259 aa, Aspergillus oryzae
MVADPRPQTLAGKVAIVTGATRGIGAGLAEELARRGAKVLITYTSASSEPIADKLIEKIKNFNNGSKAAKVRADLRDLSAGETIVEASIQAFGPNIDILVNNAGVEVVKPLSDLTVEDYNLVYDLNVRGAIFLTQAVLPHLRAPGRIINISSVGARAGFANLSIYCSSKAALEGLTRCWAAELGDAGHTVNAVNPGPVQTALLENIPKELVEMQKSATPVEHRVGTIDDVAQVVAWLASEESRWVSGQAIAASGGFAMY

SEQ ID NO: 118845 - DNA, 780 bp, Aspergillus oryzae
  CDS (1)..(780)
atggctactttatccggtaaaacctgccttgttactggaggagccggcgggctgggcaaagctatcgccacgaagtttctcgaggctggagccaacgtggtgatttgtgacatcaacgacgatcgacttcaagaaacctctgcagaactttcagtgaaaggcccgttgaaagcagtcaatgccgatattacctccgcctctgcagtgcagggtctgttcgacacaatcgtttccgagtttggaaaagtggatatactgataaacaatgctgggatcatggaccgttttgaccctgttggggacttggatgaggaactgtgggatcgcgtcatggccgtcaatttgacggcaccttttcttctgagcagactagctgttcgcaatatgcttgaacagccaaacccaaatggttatatcatgaatgttgtctcgttggcgggcaaagctggttggacagcaggtgccgcatacaccgcgagtaagcatggattggttggtttgaccaagaatacagccgcattctacggaaacaagggtattcggtgcaatgccctcatgataggtggcatggacaccaatatcaccgaggcattcatgagaggtgtcaatgaagagggaaaggacaaggtggtaggtattatgggggccgtgccgtcccccctatgtgacatagatgaggttgcggaagtgtgtgtctctatgacatgcggcaaggggagcaggctaatcaatggtgcctgtatcccgattgaccatgggttttctggtacggtcgggtag

SEQ ID NO: 118846 - protein, 259 aa, Aspergillus oryzae
MATLSGKTCLVTGGAGGLGKAIATKFLEAGANVVICDINDDRLQETSAELSVKGPLKAVNADITSASAVQGLFDTIVSEFGKVDILINNAGIMDRFDPVGDLDEELWDRVMAVNLTAPFLLSRLAVRNMLEQPNPNGYIMNVVSLAGKAGWTAGAAYTASKHGLVGLTKNTAAFYGNKGIRCNALMIGGMDTNITEAFMRGVNEEGKDKVVGIMGAVPSPLCDIDEVAEVCVSMTCGKGSRLINGACIPIDHGFSGTVG

SEQ ID NO: 118847 - DNA, 801 bp, Aspergillus oryzae
  CDS (1)..(801)
atgcctatccccgtcccctccgccaactccctgaccgacctcctcagcctcaagggcaaggtcgtcgtcgtaacgggcgcctccggcccccgcggcatgggaatcgaagccgcccgcggctgcgccgaaatgggcgccaacatcgccctcacctatgcctcgcgtcctcaaggcggcgaaaagaacgcagaagaactcaagaaaacctacggcgtcgaagccaaggcctacaaatgcgacatcggcaacatggagagcgtccagaagctcgttgacgacgtgatcaaggactttggacagattgacgccttcatcgccaacgctggtcgtaccgctgacggcggcgtcttggagtccactgtcgaggcgtggatggaggtcgtgcagacggatctcaacggaacctaccactgcgctaaggccgtggggccacactttaagaagcggggcaagggcagtctggtcatcacggccagtatgtccggtcacattgccaacttcccgcaggagcagacctcctacaatgtggctaaggctgggtgtatccacatggcacgttcgctggcgaatgagtggagagactttgctcgtgtgaacagtatctcgcctggttatatcgatacgggattgtcggatttcgtggaccagaagattcaggatctctggttgagtatgattcccatgggtcggaatggtgatgcaaaggagttgaagggtgcttatgtgtacctgtgcagtgatgccagttcgtacatgactggtagtgatctccgtattgatggtggttactgtgtgcggtaa

SEQ ID NO: 118848 - protein, 266 aa, Aspergillus oryzae
MPIPVPSANSLTDLLSLKGKVVVVTGASGPRGMGIEAARGCAEMGANIALTYASRPQGGEKNAEELKKTYGVEAKAYKCDIGNMESVQKLVDDVIKDFGQIDAFIANAGRTADGGVLESTVEAWMEVVQTDLNGTYHCAKAVGPHFKKRGKGSLVITASMSGHIANFPQEQTSYNVAKAGCIHMARSLANEWRDFARVNSISPGYIDTGLSDFVDQKIQDLWLSMIPMGRNGDAKELKGAYVYLCSDASSYMTGSDLRIDGGYCVR

SEQ ID NO: 118849 - DNA, 771 bp, Aspergillus oryzae; identical to SEQ ID NO: 59602
  CDS (1)..(771)

SEQ ID NO: 118850 - protein, 256 aa, Aspergillus oryzae; identical to SEQ ID NO: 59603

SEQ ID NO: 118851 - DNA, 774 bp, Aspergillus oryzae
  CDS (1)..(774)
atggatctcttttcgctcacagacagaacagcccttgttacgggtggaactagaggcattggacagcagatggccattgctatggccgaagctggtgcggatatcattctggttcagagagacactagcaatcaagacacgaggcaaaagatcgaagacctagggcgcaaggcgacgatttacacggccgatctatcttctcgggagtctgtctcttccttagtatcgaacgtcttgaatgatgggcatgatatcgacatccttctcaactgcgcggggatacaacggcgacatccgagtcatatttttccagataatgactgggacgaggtcctgcaagtcaatctttccaccattttcaccctctgccgagatatcggcgcctatatgctcacccggaccccggattcctccggtcaccgcgggaatatcatcaacatcgcctctctcgtttcattccaaggtggattgaccgtgccggcttatgcagctgcaaaaggtggcgtggcgcaactgaccaaggcgttatcaaatgaatgggccgccaaaggaatcaacgttaatgcgatcgccccgggttatgtagctacagacatgaacacggcgttgttgcaagacccagagcggtcggcaagtattttggcaagaatccccgcgggacgatgggcaaccccggaggatttcaagggagtgacaatattcttggcgagtcgagcgagtggatatgtctctggcgagattttgacggtagatggcgggtggatggggaggtga

SEQ ID NO: 118852 - protein, 257 aa, Aspergillus oryzae
MDLFSLTDRTALVTGGTRGIGQQMAIAMAEAGADIILVQRDTSNQDTRQKIEDLGRKATIYTADLSSRESVSSLVSNVLNDGHDIDILLNCAGIQRRHPSHIFPDNDWDEVLQVNLSTIFTLCRDIGAYMLTRTPDSSGHRGNIINIASLVSFQGGLTVPAYAAAKGGVAQLTKALSNEWAAKGINVNAIAPGYVATDMNTALLQDPERSASILARIPAGRWATPEDFKGVTIFLASRASGYVSGEILTVDGGWMGR

SEQ ID NO: 118853 - DNA, 765 bp, Aspergillus oryzae
  CDS (1)..(765)
atggacgggaaaagcctcgccgacaaagtggcaatcgtcagtggttcctcatcaggaattggcgctgctattatacgagagctctcatcccgcggcgccaatacagtggtgaactacccattcgcgcacttgaagaatgaagcagacagcttagtggcatctcttccctcgctatctattgccgttgaagcggatatgtcattagcgacatccccacagaaactagtagatgctgcggtttcaaaatggggtcgaattgatattgtggttaattgtgtcgcgctagccgtgaataagccatttgaatcacagaccctagaagactgggacttgttggtcaatacaaacggacggagtactttcctcttgactcaggcaagcctgcctcatttgacgaaagggcgtgggaggattgtgaatatcgtcagtatttctggtcgtgggcctccgccaaaccagaccatttatgcgggaacgaaagggatggtggactcttttacaaaatgctgggccaaggagctgccacctaaatacggctgcacagttaatgctgttagtcccggtcctacaaagacagaaggcttttcggctgccggtgaggaacagatgaagattctgcagccaattattgaccaaaccccggttggaccgaggatggcggagccagaggagattgcttttgcggttgcatttctatgcgaggagcgtgccagatggatcaatggagctcatatcgttgcatctggtggactttttattgattaa

SEQ ID NO: 118854 - protein, 254 aa, Aspergillus oryzae
MDGKSLADKVAIVSGSSSGIGAAIIRELSSRGANTVVNYPFAHLKNEADSLVASLPSLSIAVEADMSLATSPQKLVDAAVSKWGRIDIVVNCVALAVNKPFESQTLEDWDLLVNTNGRSTFLLTQASLPHLTKGRGRIVNIVSISGRGPPPNQTIYAGTKGMVDSFTKCWAKELPPKYGCTVNAVSPGPTKTEGFSAAGEEQMKILQPIIDQTPVGPRMAEPEEIAFAVAFLCEERARWINGAHIVASGGLFID

SEQ ID NO: 118855 - DNA, 774 bp, Streptomyces natalensis; identical to SEQ ID NO: 59608
  CDS (1)..(774): transl_table=11

SEQ ID NO: 118856 - protein, 257 aa, Streptomyces natalensis; identical to SEQ ID NO: 59609

SEQ ID NO: 118857 - DNA, 768 bp, Lysiphlebus testaceipes; identical to SEQ ID NO: 40521
  CDS (1)..(768)

SEQ ID NO: 118858 - protein, 255 aa, Lysiphlebus testaceipes; identical to SEQ ID NO: 40522

SEQ ID NO: 118859 - DNA, 786 bp, Streptomyces chartreusis
  CDS (1)..(786): transl_table=11
atgacggacaacattgagcggacagccatcgtcaccggcgcgagcaatgggatcggccgggcgatcgccgccacactggcggcggaaggcgtacgcgtacatatctgcggcagggacgccgaaaccgtcgagaagacggtgaccgaactgcgggcggacagaggccaggtcagtggccaggcgtgcgacgtcaccaagcccgaccaggtgaccgcgttggtggcggactgcgtcgcacggtacggaccggtggacatcctggtgaacaacgccggccggcccggcggaggaatcaccgcgaacatcgacaacgaattgtggtacgccaccatcgacaccaatctcaacggtgttttcctgatgtccaaatccgtgctgaacgaagggcgcatgacggagcggcagaacggccgcatcatcaacatcgcctcggtgtggggaaaacagggaacgatcggaggcgcgccctacgcggccgccaaacacggcgtcatcggattcagccgctgcctcgcgctggaactcgcgaagaccgggatcacggtcaatgctgtgtgccccggatatgtcgagaccccgatgtcggtcaacgtacgcgcctgccaggcgggcatctggcaggtggacgaggaggaggccctgcgccgcctggcctccgacatccccatcggccggtacagcgagccggaggaggtcgcctggatggtctcctacctcgcctcgtccaaggccgcctcggtcaccggccaggcgctcaacgtgtgcggcggcttcggtgtccactga

SEQ ID NO: 118860 - protein, 261 aa, Streptomyces chartreusis
MTDNIERTAIVTGASNGIGRAIAATLAAEGVRVHICGRDAETVEKTVTELRADRGQVSGQACDVTKPDQVTALVADCVARYGPVDILVNNAGRPGGGITANIDNELWYATIDTNLNGVFLMSKSVLNEGRMTERQNGRIINIASVWGKQGTIGGAPYAAAKHGVIGFSRCLALELAKTGITVNAVCPGYVETPMSVNVRACQAGIWQVDEEEALRRLASDIPIGRYSEPEEVAWMVSYLASSKAASVTGQALNVCGGFGVH

SEQ ID NO: 118861 - DNA, 765 bp, Serratia marcescens; identical to SEQ ID NO: 59614
  CDS (1)..(765): transl_table=11

SEQ ID NO: 118862 - protein, 254 aa, Serratia marcescens; identical to SEQ ID NO: 59615

SEQ ID NO: 118863 - DNA, 789 bp, Streptomyces nogalater
  CDS (1)..(789): transl_table=11
atgccggacacggacgggcgggtcgccgtcgtcacaggcggcaccagcgggataggactcgcggtggtgaaggcactggctgcgacaggatatgcgtgtcgttccctgtgtgcccggagccaggacgccgtcgacagcaccgtggaggagctgcgcgacgagaagctggaggtggacgggcgctcctgcgacgtgcgttccacggacgacgtacgggagttcatcggcttcgccacgcggcgcttcggcggcgtggacgtgctggtcaacaacgccggccgcaacggcggaggcccgaccgcgcggataaccgacgagctgtggctcgacgtcatcgagaccaacctcaccagcgtcttccgcgtcacccgcgaggtgctgaccaccggagggatgctcgccgccggacgcggcaggatcatcaacatcgcctccaccggcggcaaacagggtgtcgtcctcggtgccccgtactcggcctccaagcacggcgtcgtcggcttcaccaaggcactgggcctggagctggccaagagcggcatcaccgtcaacgccgtctgcccgggctatgtcgagactcccatgggcgagcgggtcggtcgcggctacgccgaggtctgggacacctccgaggaggcggtgctggagcgcttccaggcgaagatcccgctcggccgctacgcgcagcccgaggaggtcgccggcctcgtcacctacctgaccacgcccaccgccgactccatcaccgcgcaggcgctcaacgtctgcggcggcctgggaaactactga

SEQ ID NO: 118864 - protein, 262 aa, Streptomyces nogalater
MPDTDGRVAVVTGGTSGIGLAVVKALAATGYACRSLCARSQDAVDSTVEELRDEKLEVDGRSCDVRSTDDVREFIGFATRRFGGVDVLVNNAGRNGGGPTARITDELWLDVIETNLTSVFRVTREVLTTGGMLAAGRGRIINIASTGGKQGVVLGAPYSASKHGVVGFTKALGLELAKSGITVNAVCPGYVETPMGERVGRGYAEVWDTSEEAVLERFQAKIPLGRYAQPEEVAGLVTYLTTPTADSITAQALNVCGGLGNY

SEQ ID NO: 118865 - DNA, 756 bp, Streptomyces peucetius; identical to SEQ ID NO: 40535
  CDS (1)..(756): transl_table=11

SEQ ID NO: 118866 - protein, 251 aa, Streptomyces peucetius; identical to SEQ ID NO: 40536

SEQ ID NO: 118867 - DNA, 795 bp, Streptomyces venezuelae
  CDS (1)..(795): transl_table=11
atgtcccagcaggagaagcaggagaagagggtcgccctcgtcaccggagccaccagtggcatcggcctcgccgtcgcccggctcctggcgtcccagaaccaccgggtgttcctcggtgcccgcaacgccgagaacgtcgccgccaccgtcaagcagctccaggacgagggccttgaggtcgacggcaccaccctcgacgtgcgctccggcgaggacgtcaaggccttcgtccaggccgccgtcgaccgcttcggcaccgtcgagctcctcgtgaacaacgcgggccgcagcggcgcgggcgtcaccgccgacatcgccgacgagctgtggaacgacgtcatcgacaccaacctcaactgcgtcttccggctcacccgcgaggccctgaccaccggcggcatgcgcgagaagtcccgcggccggatcatcaacatggcctcgaccgccggcaagcagggcgtcgtcctcggcgccccctactcggcctcgaagcacggcgtcgtcggcttcaccaaggccctcggcaacgagctcgccccgaccggcatcaccgtcaacgcggtctgccccggttacgtcgagacgccgatggcccagcgcgtccgccagggctacgccgccgcgtacgagacctccgaggacgccatcctcgagaagttccagtcgaagatcccgctcggccgctactccacgcccgaggaggtcgccggtctcgtcggctacctggcctccgacaccgcggcctccatcacctcgcaggcgctcaacgtctgcggcggcctgggcaacttctga

SEQ ID NO: 118868 - protein, 264 aa, Streptomyces venezuelae
MSQQEKQEKRVALVTGATSGIGLAVARLLASQNHRVFLGARNAENVAATVKQLQDEGLEVDGTTLDVRSGEDVKAFVQAAVDRFGTVELLVNNAGRSGAGVTADIADELWNDVIDTNLNCVFRLTREALTTGGMREKSRGRIINMASTAGKQGVVLGAPYSASKHGVVGFTKALGNELAPTGITVNAVCPGYVETPMAQRVRQGYAAAYETSEDAILEKFQSKIPLGRYSTPEEVAGLVGYLASDTAASITSQALNVCGGLGNF

SEQ ID NO: 118869 - DNA, 786 bp, Streptomyces aureofaciens
  CDS (1)..(786): transl_table=11
atgtcggatcaggacaagcgggtcgccgtcgtcaccggtgccaccagcggaatcgggctggccgtggcgcggctgctggcggcgcaggaccaccgggtcttcatcggcgcccgcagcgccgagaacgtggcgcagaccgtcaaggagctccaggacgagggtctggaggtcgacggagcggtggtcgacgtccgctccaccgacggggtacgggcctggatccaggccgcggtggaccgtttcggcagcgtggacgtggtcgtgaacaacgcggggcgttcgggtggcggtgtgacggccgacatcgccgaggagctgtggcacgacgtgatcgacacgaacctcaacagtgtcttccgtgtcacgcgtgaggcgctgaccacgggcgggctgcgggcgaaggaccgcggccggatcatcaacatcgcgtccacggccgggaagcagggcgtggtgctgggcgccccgtactccgcttccaagcacggggtggtgggcttcacgaaggcgctcggcaacgagctggcccccaccggtatcaccgtgaacgccgtctgcccgggttatgtggagacgccgatggcgcagcgcgtgcggcagggttacgcggccgcctatgacgcgacggaggaggcgatcctggagaagttccaggcgaagatccccctcggccgttactcgacgccggaggaagtggccggcctggtgggttacctggcttccgacgccgccgcctccatcaccttgcaggcgctgaacgtctgcggcggcctcggcaacttctga

SEQ ID NO: 118870 - protein, 261 aa, Streptomyces aureofaciens
MSDQDKRVAVVTGATSGIGLAVARLLAAQDHRVFIGARSAENVAQTVKELQDEGLEVDGAVVDVRSTDGVRAWIQAAVDRFGSVDVVVNNAGRSGGGVTADIAEELWHDVIDTNLNSVFRVTREALTTGGLRAKDRGRIINIASTAGKQGVVLGAPYSASKHGVVGFTKALGNELAPTGITVNAVCPGYVETPMAQRVRQGYAAAYDATEEAILEKFQAKIPLGRYSTPEEVAGLVGYLASDAAASITLQALNVCGGLGNF

SEQ ID NO: 118871 - DNA, 747 bp, Serratia marcescens; identical to SEQ ID NO: 59620
  CDS (1)..(747): transl_table=11

SEQ ID NO: 118872 - protein, 248 aa, Serratia marcescens; identical to SEQ ID NO: 59621

SEQ ID NO: 118873 - DNA, 747 bp, Streptomyces bikiniensis; identical to SEQ ID NO: 59624
  CDS (1)..(747): transl_table=11

SEQ ID NO: 118874 - protein, 248 aa, Streptomyces bikiniensis; identical to SEQ ID NO: 59625

SEQ ID NO: 118875 - DNA, 789 bp, Aspergillus flavus
  CDS (1)..(789)
atgtcggacaaccaccgtttagatggtaaagtggccttagtcacaggcgccggccgcggcatcggtgctgccatcgccgtcgcccttggtgagcgcggagccaaagtcgtggtgaactacgcccattcccgtgaggccgcggagaaggtggttgaacagatcaaggccaatggtaccgacgctatcgcaatccaggccgatgtcggggatcctgaggcaactgcgaagttaatggcggagacggtgcgccattttggctacctggacatcgtgtcatcgaacgccggaattgtatcgttcggtcacctgaaagacgtgaccccagaagaatttgaccgggtcttccgggtcaacacccgtggccagttcttcgtggcgcgggaggcctatcgccatatgcgggaaggaggtcgaattatcctgaccagctctaacaccgcttgcgtgaagggggtccccaagcatgctgtatactccgggtccaagggggctattgacacctttgttcgctgcatggccatcgactgcggagacaagaagatcaccgtgaatgccgtggctcctggagccattaagactgatatgtttttggctgtgtcgcgggagtatatccccaatggtgagactttcaccgatgagcaggtcgacgagtgtgccgcttggctctctcctttgaaccgcgtgggcctccctgtggacgtcgcccgggtagtcagcttcctggcatctgatgcagctgaatgggtaagtggcaagatcattggtgtggatgggggcgcctttcgataa

SEQ ID NO: 118876 - protein, 262 aa, Aspergillus flavus
MSDNHRLDGKVALVTGAGRGIGAAIAVALGERGAKVVVNYAHSREAAEKVVEQIKANGTDAIAIQADVGDPEATAKLMAETVRHFGYLDIVSSNAGIVSFGHLKDVTPEEFDRVFRVNTRGQFFVAREAYRHMREGGRIILTSSNTACVKGVPKHAVYSGSKGAIDTFVRCMAIDCGDKKITVNAVAPGAIKTDMFLAVSREYIPNGETFTDEQVDECAAWLSPLNRVGLPVDVARVVSFLASDAAEWVSGKIIGVDGGAFR

SEQ ID NO: 118877 - DNA, 948 bp, Oryza sativa subsp
  CDS (1)..(948)
atggggaccatcaccgccgccaaagcagccgcggcggcggccgtcttccagtctccgtgctcccctgcgcctgcggccagcttccccgcccgcagcgtccggccggatcgccgccgcgccgtctcgctctcagtctcaggtgtaagaactcatgttgcagctgttgaacaagcagtggtacaagatgctattgcacagtcagaggctccagttgttgttgttacaggtgcttccaggggaattgggaaagccattgcattggcttttggaaaagccggctgcaaggtcttagtgaattatgctcggtcttcaacagatgctgaagaagtctgcaaagagattgaaggatttggtggtcaggcaattaccttccgaggagatgtttctaatgaagccgatgtggattctatgattaaagcagctgttgatacatggggtacaattgatgtacttgtaaacaatgcaggaatcacacgggatacattgttgctgagaatgaagaaatctcagtggcaagatgtagttgatcttaatcttacgggcgctgcgacaaaagtaatgatgaagaagaaaaagggaagagttatcaacatagcatcagttgttggccttactggcaatcttggccaagttaattatgctgctgccaaggctgcagttattgggttaacaaaaacaactgctagggaatttgcaagcagaaatattacagtgaatgctgttgctcctggatttatttcatcagatatgacctcccaacttggggaggagattgagaagaaaaatctgataactattcccttagggagatatggtgaaccagaggaagttgctgatctggttgagttcttagcacttagccctggtggaagctacatcactgggcaggtctcatactctcgtgtcaccatacaggtcctcactattgatggaggaatggtaatgtaa

SEQ ID NO: 118878 - protein, 315 aa, Oryza sativa subsp
MGTITAAKAAAAAAVFQSPCSPAPAASFPARSVRPDRRRAVSLSVSGVRTHVAAVEQAVVQDAIAQSEAPVVVVTGASRGIGKAIALAFGKAGCKVLVNYARSSTDAEEVCKEIEGFGGQAITFRGDVSNEADVDSMIKAAVDTWGTIDVLVNNAGITRDTLLLRMKKSQWQDVVDLNLTGAATKVMMKKKKGRVINIASVVGLTGNLGQVNYAAAKAAVIGLTKTTAREFASRNITVNAVAPGFISSDMTSQLGEEIEKKNLITIPLGRYGEPEEVADLVEFLALSPGGSYITGQVSYSRVTIQVLTIDGGMVM

SEQ ID NO: 118879 - DNA, 750 bp, Brachyspira pilosicoli
  CDS (1)..(750): transl_table=11
atggatttaaatcttaaaaataaaatagctttagtaacaggcggaagcagaggaataggaaaaaaaatagcagaggctttggctaatgaaggagctaatgttgttgttactgctacaaatattaataaagctcaagaagttgctgatgaattaaaatcaaaatacaatgtagagacacttgctttagttcatgatgtaaaatctagcgaatcttgtaaagatgttgttgctaaaactatagagaaatttggttctattgatatattagttaataatgctggtattactagagatatgctagttatacaaatggacgacagtgcttggaacgatgttatagatactaatttatctggagcattttacacttcaagagaagctgctaaaagcatgttaagagcaagaaagggtaagataattaatatatcaagcgttataggaaaaatgggtaatgctggtcaggtgaattatgctgcagctaaggctggtattataggtattactaaatctatggcgaaagagtttgctcctcgaggaatatgcgttaatgctatagcacctggatttattcaaacagatatgactggtgtacttgctgaagatgctgtaaaaaagataatggatattacacctttaaaaaagttaggtaatgctgaagatgttgctaatatagttgtatttcttgcatcagatttgagcaattatataacaggggaagttatagccgttgacggcggaatgtctatgtaa

SEQ ID NO: 118880 - protein, 249 aa, Brachyspira pilosicoli
MDLNLKNKIALVTGGSRGIGKKIAEALANEGANVVVTATNINKAQEVADELKSKYNVETLALVHDVKSSESCKDVVAKTIEKFGSIDILVNNAGITRDMLVIQMDDSAWNDVIDTNLSGAFYTSREAAKSMLRARKGKIINISSVIGKMGNAGQVNYAAAKAGIIGITKSMAKEFAPRGICVNAIAPGFIQTDMTGVLAEDAVKKIMDITPLKKLGNAEDVANIVVFLASDLSNYITGEVIAVDGGMSM

SEQ ID NO: 118881 - DNA, 804 bp, Streptomyces antibioticus
  CDS (1)..(804): transl_table=11
atgactcgtagcgtctccgcatccggcccgcttcagggcaggatcgcgctggtgacaggcggtagccgggggatcggggccgcgacggccaccaccctcgccgggctcggggccgacgtcgtgctcacataccgaagctcgctggacgaggccaaggccgtggcggccgcgtgcgaggaaaaaggtgtaaaggccacggtgctcagggccgacctggacgcggccgacggcgccgaggaactggtcaccgccgtgcgggaacgggtggaccacctcgacgtcgtcgtcagcaacgcctgcgcctcgtacccgcgcgtgccgctggccggcatggacccgaccgcgctcggcgacaaggtccgcaacgacgtcgtcctgctgcaccggctcaccaccgccttcgtgcccgcgatgcgggagcgggggtacggccggctcgtcgtcatctccagcggctcgtcctggggcccgaccgcgcccggcctcgccgcgcacggagtgacgaaggccgcgctggagggctacgtccggtacgcggccgacgagttcggcgccggtggcgtgaccgtcaacggcctcgccctgggcttcgtcctcaccgacgcctcctcggtggtcccgcagccggcgcgcgacgcgctggccaacgccacgccggccgggcggctcggcaccccgcaggacatcgccgacgccgtgtccctgctggcgcgccccgagtcggagtggatcaacggggcgaccctccccgtgaccggcggcctcaactacccgctgaacctgtcccgcgtccgcggccactga

SEQ ID NO: 118882 - protein, 267 aa, Streptomyces antibioticus
MTRSVSASGPLQGRIALVTGGSRGIGAATATTLAGLGADVVLTYRSSLDEAKAVAAACEEKGVKATVLRADLDAADGAEELVTAVRERVDHLDVVVSNACASYPRVPLAGMDPTALGDKVRNDVVLLHRLTTAFVPAMRERGYGRLVVISSGSSWGPTAPGLAAHGVTKAALEGYVRYAADEFGAGGVTVNGLALGFVLTDASSVVPQPARDALANATPAGRLGTPQDIADAVSLLARPESEWINGATLPVTGGLNYPLNLSRVRGH

SEQ ID NO: 118883 - DNA, 783 bp, Streptomyces antibioticus
  CDS (1)..(783): transl_table=11
atggcgcaggacaagcgggtcgccctggtgaccggggcgaccagcggcatcggtctggccgtggcccggctgctggccgagcaggggcaccgggtgttcctgggcgcgcgcagcgccgagaacgtggccgcgaccgtgaaggaactgcagagcgccggcctggaggcggacggcgccacgctggacgtccgctccgacgccgacgtccacgccttcgtgcgggcggccgtggaccggttcggcacggtggacgtgctggtgaacaacgccggccgcagcggtggcggagtgaccgcggacatcgccgacgagctgtggcacgacgtgatcgacacgaacctcaacagcgtgttccggctgacccgcgaggtgctgaacaccggtggcctcaggcacaagagctggggccggatcatcaacatcgcctccaccgcgggcaagcagggcgtcgtcctgggcgccccgtactcggcgtccaagcacggcgtggtcggcttcaccaaggccctcggcaacgagctggccccgaccgggatcaccgtcaacgcggtctgcccgggctacgtcgagacgccgatggcccagcgggtgcgccagggctacgccgccgcctacgacaccaccgaggacgcgatcctggagaagttccagtccaagatcccgctcggccgctactccacccccgaggaggtcgccgggctggtcggctacctggcctccgacaccgccgcctccatcaccgcccaggcgctcaacgtctgcggcggcctcggcaacttctga

SEQ ID NO: 118884 - protein, 260 aa, Streptomyces antibioticus
MAQDKRVALVTGATSGIGLAVARLLAEQGHRVFLGARSAENVAATVKELQSAGLEADGATLDVRSDADVHAFVRAAVDRFGTVDVLVNNAGRSGGGVTADIADELWHDVIDTNLNSVFRLTREVLNTGGLRHKSWGRIINIASTAGKQGVVLGAPYSASKHGVVGFTKALGNELAPTGITVNAVCPGYVETPMAQRVRQGYAAAYDTTEDAILEKFQSKIPLGRYSTPEEVAGLVGYLASDTAASITAQALNVCGGLGNF

SEQ ID NO: 118885 - DNA, 786 bp, Bacillus amyloliquefaciens; identical to SEQ ID NO: 59628
  CDS (1)..(786): transl_table=11

SEQ ID NO: 118886 - protein, 261 aa, Bacillus amyloliquefaciens; identical to SEQ ID NO: 59629

SEQ ID NO: 118887 - DNA, 969 bp, Chlamydomonas reinhardtii
  CDS (1)..(969)
atgctggccgccaagcacgctcaggctaccgtccgcggcgtccgcgcccaggcgccgatgatggccgccctgcgcgcctcgtcgagcgtgcaccccttcaccgccgccagcggcgcctcggccttcctgagccttgccgcctcctcctcggccgccccccgcgccgccgccgcccccgcccgcggccgcgctggtctggtcgtcaaggcccaggctgccgatgcctcggccgagcgccccgtgtgcctggtgaccggtgcctcgcgcggcattggcaaggccatcgccctggcgctgggcaagcagggcgctcgcgtcgccattaactacgcctcctccgccggcgccgccgaggaggtggcggccgcggtggtggcggcgggcggcgaggccatggtggtgggcgccaacgtgggcaagcgcgaggagatcgaccgcatgttcaaggaggtcatggacaagtggggccgcgtggacgtgctcgtcaacaacgccggcatcacccgcgacacgctgatgatgcgcatgaagcccgagatgtgggatgacgtcatcgccaccaacctgtctggtgtgttctactgcacccagaacgccacgaagatcatgggcaagcagaagaagggccgcatcatcaacatcaccagtgtggtgggcattgtcggcaacgccggccaggccaactactcggccgccaaggccggtgtcatcggcctgaccaagaccaccgctcgcgagtactctggccgcaccatcacctgcaacgccgtggcccccggcttcatcgcctctgacatgacggccgccatcgacaagaagtacgaggagaccatcctcaagggcatccccctgggccgctacggccagcccgaggaggtggctggcctggtgcgcttcctggccctggaccccgccgccgcctacatcaccggccaggtgtacaacgtggacggcggcatggtcatgtaa

SEQ ID NO: 118888 - protein, 322 aa, Chlamydomonas reinhardtii
MLAAKHAQATVRGVRAQAPMMAALRASSSVHPFTAASGASAFLSLAASSSAAPRAAAAPARGRAGLVVKAQAADASAERPVCLVTGASRGIGKAIALALGKQGARVAINYASSAGAAEEVAAAVVAAGGEAMVVGANVGKREEIDRMFKEVMDKWGRVDVLVNNAGITRDTLMMRMKPEMWDDVIATNLSGVFYCTQNATKIMGKQKKGRIINITSVVGIVGNAGQANYSAAKAGVIGLTKTTAREYSGRTITCNAVAPGFIASDMTAAIDKKYEETILKGIPLGRYGQPEEVAGLVRFLALDPAAAYITGQVYNVDGGMVM

SEQ ID NO: 118889 - DNA, 741 bp, Pseudomonas putida
  CDS (1)..(741): transl_table=11
atgacgaaacgcatagcgtacgtgacgggcggcatgggcggcattggcacaagcatctgccagcgtctgcataaggacggctatacggtcgtcgcgggttgcggcccgaactctccgcgccgtgtcaaatggctcgaggaacagaaggcgaacggctatgacttcatcgcgtccgagggcaacgtcggcgactgggagtccaccaagaacgccttcgacaaggtgaaggccgaagtcggcgaggtcgacatcctggtgaacaacgcgggcatcacgcgcgacgtcgtgttccgcaagatgacgcacgaggactggacggccgtcatcgacaccaacctgacgagcctcttcaacgtgaccaagcaggtggtcgacggcatggtggagcgcggtttcgggcggatcatcaacatttcgtcggtgaacggccagaaggggcagttcggccagacgaactactcgacggcgaaggccggcatccacggcttcacgatggcgctcgcgcaggaagtggcgaccaagggcgtgacggtcaacaccgtgtcgccaggctatatcggcacggacatggtcaaggcgatccgccccgaggtgctggagaagatcgtcgcgacgattccggtgcgccgtctcggccgcccggacgagatcggctcgatcgtgtcgtggctggcatcggaggaatcgggcttctcgaccggtgcggacttctcgctcaacggcgggctgcacatgggctga

SEQ ID NO: 118890 - protein, 246 aa, Pseudomonas putida
MTKRIAYVTGGMGGIGTSICQRLHKDGYTVVAGCGPNSPRRVKWLEEQKANGYDFIASEGNVGDWESTKNAFDKVKAEVGEVDILVNNAGITRDVVFRKMTHEDWTAVIDTNLTSLFNVTKQVVDGMVERGFGRIINISSVNGQKGQFGQTNYSTAKAGIHGFTMALAQEVATKGVTVNTVSPGYIGTDMVKAIRPEVLEKIVATIPVRRLGRPDEIGSIVSWLASEESGFSTGADFSLNGGLHMG

SEQ ID NO: 118891 - DNA, 723 bp, Paracoccus zeaxanthinifaciens
  CDS (1)..(723): transl_table=11
atgtccaaggtagcactggtcaccggcggatcgcgcggcatcggcgccgagatctgcaaggcgcttcaggccgcaggctataccgtcgccgcgaactatgccggcaatgacgacgcggccaaggccttcaccgaggaaaccggcatcaagacctacaagtggtcggtcgccgattacgatgcctgcaaggccggcatcgcccaggtcgaagaggatctgggcccgatcgccgtgctgatcaacaatgccgggatcacccgcgacgcgcccttccacaagatgacgcccgagaagtggaaggaggtcatcgacaccaacctgaccggcaccttcaacatgacccatccggtctggccgggcatgcgcgaacgcaagttcggacgcgtcatcaacatcagctcgatcaacgggcagaagggccagttcgggcaggcgaactatgccgcggccaaggcgggcgacctgggcttcaccaagtcgctggcgcaggaaggcgcgcgcaacaacatcaccgtcaacgcgatctgccccggctatatcgcgacggacatggtgatggccgttcccgaacaggtccgcgaggggatcatcgcgcagatccccgtcggccgcttgggcgagccgtccgagatcgcgcgctgcgtggtgttcctggcctccgacgatgcgggcttcgtcacaggctcgaccatcacggcgaatggcggccagtactacatctga

SEQ ID NO: 118892 - protein, 240 aa, Paracoccus zeaxanthinifaciens
MSKVALVTGGSRGIGAEICKALQAAGYTVAANYAGNDDAAKAFTEETGIKTYKWSVADYDACKAGIAQVEEDLGPIAVLINNAGITRDAPFHKMTPEKWKEVIDTNLTGTFNMTHPVWPGMRERKFGRVINISSINGQKGQFGQANYAAAKAGDLGFTKSLAQEGARNNITVNAICPGYIATDMVMAVPEQVREGIIAQIPVGRLGEPSEIARCVVFLASDDAGFVTGSTITANGGQYYI

SEQ ID NO: 118893 - DNA, 753 bp, Azotobacter vinelandii
  CDS (1)..(753): transl_table=11
atggatcttcaattgcagaaccgaaacgtactggtcaccggcggtacccgcggcatcggccgggccatcgtcgaaggctttttgcgcgaaggcgcgcgcgtggccttctggccccgcgacccgcagggcgtggcgcaggccgaacgggaactcggcgcgcaggccttcggccaggccgtcgacgtcaccgacggcgcggcgctggagcagtgggtgaaagacgcggcggcgcgcctgggcgggatcgacatcgtcgtgcccaatgtcagcgcgctggccggcgggcagaatctgtcggcctggcggcaggccttcgagaccgacctgctcggcaccgtcggcctggtcaacgccgccctgccctggctcgagcgatccgaggcgggagcgatcgtgatcatctccagcgtctccggccggcagatcgacctcttcgcggagccctacggcgcactcaaggcggcgctgatccactacggcaagggcctggccctgcgcctggccgggcagcgcatccgggtcaacgtggtctcgccgggcaacgtctacttcgaggacggcgtctggggccggatcgagcgcgagcagccggaactcttcgccaggtgcctggcggcgaaccccatgggccgcatggcgcggcccgaggaagtggccaacgccacgctgttcctggccagcgcggccgccagcttcaccactggcaccagcctgctggtcgacggcggcctgacccaggcggtccagtactga

SEQ ID NO: 118894 - protein, 250 aa, Azotobacter vinelandii
MDLQLQNRNVLVTGGTRGIGRAIVEGFLREGARVAFWPRDPQGVAQAERELGAQAFGQAVDVTDGAALEQWVKDAAARLGGIDIVVPNVSALAGGQNLSAWRQAFETDLLGTVGLVNAALPWLERSEAGAIVIISSVSGRQIDLFAEPYGALKAALIHYGKGLALRLAGQRIRVNVVSPGNVYFEDGVWGRIEREQPELFARCLAANPMGRMARPEEVANATLFLASAAASFTTGTSLLVDGGLTQAVQY

SEQ ID NO: 118895 - DNA, 765 bp, Aedes aegypti
  CDS (1)..(765)
atggatttcaccggcaaagtagtactcattactggagcgagcagtgggattggagctgccacggcaaagcatttgacgcatttgggggccacagttgtcatgaccggtaggaatgccgaaagtttgaagaaatgtggagccgaatgtgttggaaaacagaagcctctgattttggtggccgacgtgacaaaacaggaagacaacgtccgtgtaattgaagagaccgtcaaaaaatttggcaaactagacgtgctggtaaacaacgctggtaggggagtttttggcagtatcgaaaccactagtctggatcaactggatgacatgctgaacaccaatttgagaggagcttatcatctgacgatactagccgtaccccatctaatcaaaagcaaaggaaacatcgttaacgtatcgagcatcactggactcaaaccgtttcccaactcattggcttactgcatttcaaaagccgcgttggatcaattcacaagagtgattgctcttgaacttgcaccgaagcaggtccgggtgaattcagtcgatccagcggtcattgcaaccgacttccaaaatcgagagggtatgagtcccgcacaatatgctgcttttgtgaagcacagcgaaaaaacccatgcccttggacggatcggacaacccagggaagtggcagaagccatagcattcctggcgacggattcggccagtttcatcacaggaacgtgtcttagcgttgatggcggaaggaccatcatgggtccaatttga

SEQ ID NO: 118896 - protein, 254 aa, Aedes aegypti
MDFTGKVVLITGASSGIGAATAKHLTHLGATVVMTGRNAESLKKCGAECVGKQKPLILVADVTKQEDNVRVIEETVKKFGKLDVLVNNAGRGVFGSIETTSLDQLDDMLNTNLRGAYHLTILAVPHLIKSKGNIVNVSSITGLKPFPNSLAYCISKAALDQFTRVIALELAPKQVRVNSVDPAVIATDFQNREGMSPAQYAAFVKHSEKTHALGRIGQPREVAEAIAFLATDSASFITGTCLSVDGGRTIMGPI

SEQ ID NO: 118897 - DNA, 747 bp, Azoarcus evansii
  CDS (1)..(747): transl_table=11
atgcagttgaaggacaaggttgcagtggtgacgggcgcagggcagggcatcggcgcggccgttgcaagggcttacgcgcgagagggcgcgaaggtcgcggtgatcgatatcgatcaggcgaccgcggaccgtatggccggacagatcgtcgaggccggcggacaggcgatcggtgtggcgtgcaacgtcgcggatcgcgatcacgtcgaggcgatggcagccaaggtgaatgccgaatggggccgcatcgacatcctcgtcaataacgccggcatcacgcgcacggcgatgctcaacaagatgacgcccgagcagtggaaccaggtgctggccgtccatctcaccggtgcgttcaactgtctgcaggcagtggtcggcggcatgatcgagcgtcagtacggccgcatcatctacgtgacctccaccgccggcgtgctcggcacgatcggccagatcaactacagcgccgcgaaggccggcgtgctcggcatgaccaagagcacggcgaaggagctcgcgcgctacggcatcaccgcgaacgcgatcgcaccgggagcggcaacgccgatgaccgagacgatccgcaccgatgagcgcttcaaggaaaagtacctcgaccggattcccctcggacgctgggccgagccggaggagatcacgccggtgttcgtgttcttcgcctccgatgcgtcgagctatgtgaccggacagatcctggcggccgatggcggaatgacgatccactga

SEQ ID NO: 118898 - protein, 248 aa, Azoarcus evansii
MQLKDKVAVVTGAGQGIGAAVARAYAREGAKVAVIDIDQATADRMAGQIVEAGGQAIGVACNVADRDHVEAMAAKVNAEWGRIDILVNNAGITRTAMLNKMTPEQWNQVLAVHLTGAFNCLQAVVGGMIERQYGRIIYVTSTAGVLGTIGQINYSAAKAGVLGMTKSTAKELARYGITANAIAPGAATPMTETIRTDERFKEKYLDRIPLGRWAEPEEITPVFVFFASDASSYVTGQILAADGGMTIH

SEQ ID NO: 118899 - DNA, 786 bp, Streptomyces aureofaciens
  CDS (1)..(786): transl_table=11
atgtcggatcagggcaagcgggttgccgtcgtcacgggtgccacgagtggtatcgggctggccgtggcgcggctgctggcggtgcaggggcatcgggtcttcatcggggcccgcagcgccgagaacgtggcggagaccgtcaaggagctccagggcgagggtctggaggtcgacggagcggtggtcgacgtccgctcgaccgacggggtacgggcctggatccaggccgcggtggaccgtttcggcagcgtggacgtggtcgtgaacaacgcggggcgttcgggtggcggtgtgacggccgacatcgccgaggagctgtggcacgacgtgatcgacacgaacctcaacagtgtcttccgtgtcacgcgtgaggcgctgaccacgggcgggctgcgggcgaaggaccgcggccggatcatcaacatcgcgtccacggccgggaagcagggcgtggtgctgggcgccccgtactccgcttccaagcacggggtggtgggcttcacgaaggcgctcggcaacgagctggcccccaccggtatcaccgtgaacgccgtctgcccgggttatgtggagacgccgatggcgcagcgcgtgcggcagggttacgcggccgcctatgacgcgacggaggaggcgatcctggagaagttccaggcgaagatccccctcggccgttactcgacgccggaggaagtggccggcctggtgggttacctggcttccgacgccgccgcctccatcacctcgcaggcgctgaacgtctgcggcggcctcggcaacttctga

SEQ ID NO: 118900 - protein, 261 aa, Streptomyces aureofaciens
MSDQGKRVAVVTGATSGIGLAVARLLAVQGHRVFIGARSAENVAETVKELQGEGLEVDGAVVDVRSTDGVRAWIQAAVDRFGSVDVVVNNAGRSGGGVTADIAEELWHDVIDTNLNSVFRVTREALTTGGLRAKDRGRIINIASTAGKQGVVLGAPYSASKHGVVGFTKALGNELAPTGITVNAVCPGYVETPMAQRVRQGYAAAYDATEEAILEKFQAKIPLGRYSTPEEVAGLVGYLASDAAASITSQALNVCGGLGNF

SEQ ID NO: 118901 - DNA, 765 bp, Aedes aegypti; identical to SEQ ID NO: 40565
  CDS (1)..(765)

SEQ ID NO: 118902 - protein, 254 aa, Aedes aegypti; identical to SEQ ID NO: 40566

SEQ ID NO: 118903 - DNA, 765 bp, Aedes aegypti; identical to SEQ ID NO: 40567
  CDS (1)..(765)

SEQ ID NO: 118904 - protein, 254 aa, Aedes aegypti; identical to SEQ ID NO: 40568

SEQ ID NO: 118905 - DNA, 771 bp, Pseudomonas putida
  CDS (1)..(771): transl_table=11
atgaccctcaaaggcaagaccgcactcgtcaccggttccaccagcggcatcggcctgggcattgcccaggtgctggcccgcgcaggcgccaacatcgtgctcaacggcttcggcgaccctgccccggcgctggccgagatagcccggcacggggtaaaggcagtccatcacccggccgacctgtcggacgtggcccagatcgaagcgctgttcgccctggccgagcgcgagttcggcggcgtcgacatcctggtcaacaacgccggtatccagcacgtggcgccggtggagcagttcccgctggaaagctgggacaagatcatcgccctcaacctgtcggccgtgttccatggtacgcgcctggccctgcccggcatgcgagcgcgcaactgggggcgcatcatcaacatcgcctcggtgcacggcctggtcggctccaccggcaaggcggcctatgtggcggccaagcacggcgtggtcggcctgaccaaggtggtgggcctggaaaccgccaccagcaacgtcacctgcaatgccatctgcccaggctgggtgttgaccccgctggtgcagaaacagatcgacgatcgtgctgccaacggtggcgatccgctgcaagcgcaacacgatctgctggcagaaaaacagccatcgttggccttcgtcacccccgaacacctgggtgagctggtactattcctgtgcagcgaggccggtagccaggttcgcggtgccgcctggaacgtcgatggtggctggttggcccagtga

SEQ ID NO: 118906 - protein, 256 aa, Pseudomonas putida
MTLKGKTALVTGSTSGIGLGIAQVLARAGANIVLNGFGDPAPALAEIARHGVKAVHHPADLSDVAQIEALFALAEREFGGVDILVNNAGIQHVAPVEQFPLESWDKIIALNLSAVFHGTRLALPGMRARNWGRIINIASVHGLVGSTGKAAYVAAKHGVVGLTKVVGLETATSNVTCNAICPGWVLTPLVQKQIDDRAANGGDPLQAQHDLLAEKQPSLAFVTPEHLGELVLFLCSEAGSQVRGAAWNVDGGWLAQ

SEQ ID NO: 118907 - DNA, 741 bp, Rhodococcus erythropolis; identical to SEQ ID NO: 40573
  CDS (1)..(741): transl_table=11

SEQ ID NO: 118908 - protein, 246 aa, Rhodococcus erythropolis; identical to SEQ ID NO: 40574

SEQ ID NO: 118909 - DNA, 741 bp, Streptomyces antibioticus
  CDS (1)..(741): transl_table=11
atggttcacaatggccggggtgtcgccctggtgaccggcggatcgcgcggtattggtcgcgcagtcgtcctgcggcttgttcgcgagggattcgatgtggcgttctgctatcagcgcgaagccgtggccgcagccgatctggagaaggctgtggccgaattgggtggccgcgtcgcgcaccgacgggtggacgtttccgatgccgttcaggtcaaggaatgggtgcgtgacgtagagagcgaactcgggcctgtcgaggtcgtggtgacttccgccggaattgtgcgggacgggcccctcgtcatgatgcaggacaaggactggcaggacgtcatcgacgtcaatctcaacggcacgttcaacgtctgccgggccgctgtcttcggcatgatgaagcgcaaatccggatgcctcatcaacctttcctcggtggccggcgtgagcggtcatgccacccagtcgaactattctgcctcgaaggccgggatcatcggattcacgaagtccctctcgaaggaactcggccgatacggaatccgggccaatgtggtggcgccggggttcatcgacacagatatggtcgccgggatttccgacgggctgcggaccaaggccgtcgcaggcgttgcactcggccgtttcggccgacccgacgaggtggcggacgcggttgcctacctggcgtcggcggagtacgtcaccggcgcggtgcttcagatcgacggcggcctttcgatctga

SEQ ID NO: 118910 - protein, 246 aa, Streptomyces antibioticus
MVHNGRGVALVTGGSRGIGRAVVLRLVREGFDVAFCYQREAVAAADLEKAVAELGGRVAHRRVDVSDAVQVKEWVRDVESELGPVEVVVTSAGIVRDGPLVMMQDKDWQDVIDVNLNGTFNVCRAAVFGMMKRKSGCLINLSSVAGVSGHATQSNYSASKAGIIGFTKSLSKELGRYGIRANVVAPGFIDTDMVAGISDGLRTKAVAGVALGRFGRPDEVADAVAYLASAEYVTGAVLQIDGGLSI

SEQ ID NO: 118911 - DNA, 711 bp, Streptomyces antibioticus
  CDS (1)..(711): transl_table=11
atggctcctgtcgcgattgtggccggcgctgtccgtggtacggggtctgttgtcgcagtgcggctggcggaggccggctgggatgtcgcggtgctctgcgccgacggtgccgggaacgcggacaccgtgcacagggtgcgggcggtcggccgacgggcgctggcggtcgagaccgacgtcaccgatgcggtgtcggtccaggcggctctcgaccgggtgtgcgctgaactcggcgatccgggcgttctggtgaacagcgtcggggtgatcgcctgcggcgcgccgggggaggcctccgaggaggactggaacgcggtggtcggccgttcgctgcgagggttgttcgtcaccagccgggcggtcaccgatctgatgatcaggcagggtcgaggtcgcatcgtcaccatcgccaacctgctgggtcccgccgagggcgggccacacgatcacgcgacggttctggccggcatggcgggcttcaccaggacggtcgcactcgagctgcgcgccttcgacatcacggtgaacgccgtcgcgccggcacctcccgtcgtcggcatgcaggcgccggcggccccgaccgcagcggacccggaaggttcgcggtgcgcgacgcaggctgccgaggcagtgctgttcctggtcggtggcggggcgtcatcggtgaccggtcagaccgtccaggtgggcgacgaggaagcggccgcctga

SEQ ID NO: 118912 - protein, 236 aa, Streptomyces antibioticus
MAPVAIVAGAVRGTGSVVAVRLAEAGWDVAVLCADGAGNADTVHRVRAVGRRALAVETDVTDAVSVQAALDRVCAELGDPGVLVNSVGVIACGAPGEASEEDWNAVVGRSLRGLFVTSRAVTDLMIRQGRGRIVTIANLLGPAEGGPHDHATVLAGMAGFTRTVALELRAFDITVNAVAPAPPVVGMQAPAAPTAADPEGSRCATQAAEAVLFLVGGGASSVTGQTVQVGDEEAAA

SEQ ID NO: 118913 - DNA, 777 bp, Streptomyces rishiriensis; identical to SEQ ID NO: 59642
  CDS (1)..(777): transl_table=11

SEQ ID NO: 118914 - protein, 258 aa, Streptomyces rishiriensis; identical to SEQ ID NO: 59643

SEQ ID NO: 118915 - DNA, 786 bp, Streptomyces antibioticus
  CDS (1)..(786): transl_table=11
atgtcacaggcagtcaagccggtcgccctggtcacgggagccaccagcgggatcggtctcgagatcgcccggcgcctcgccgggctcggggcccgggtctacctgtgtgcgcgccatgaggaccaactggccgacaccatcaaggagttgacggacgcggggtacgaggtggacggcaccacgtgtgacgtgtccgaccccgagcagatcagggccttcgtccgcgcggccgtcgaccgcttcgggccggtcgacatcctcgtgaacaacgccgggcgcagcggcggcggagccaccaacgagatcccggacgacctgtggttcgacgtcatcaacacgaacctcaacagtgtcttcctgatgaccaaggaagtcctcaacaccggtggcatgctggcgaagaagtccggccgcatcatctcgatcgcctccaccggcggcaagcagggcgtcgtgcacgccgcgccctactcggcgtccaagcacggcgtggtcggcttctccaaggccctcggtctggagctggcccgtaccggcatcacggtcaacgcggtgtgccccggcttcgtcgagacgccgatggcggagcgggtgcgcgagcactacgccggcatctggggcgtgagcgagcaggagacccacgaccgcatcaccacgcgggtgccgctgggccgttacgtggagacccgtgaggtggccgccatggtcgagtacctggtgagcgacgacgcggccgcggtgaccgcgcaggccctcaacgtgtgcggcggtctgggcaactactga

SEQ ID NO: 118916 - protein, 261 aa, Streptomyces antibioticus
MSQAVKPVALVTGATSGIGLEIARRLAGLGARVYLCARHEDQLADTIKELTDAGYEVDGTTCDVSDPEQIRAFVRAAVDRFGPVDILVNNAGRSGGGATNEIPDDLWFDVINTNLNSVFLMTKEVLNTGGMLAKKSGRIISIASTGGKQGVVHAAPYSASKHGVVGFSKALGLELARTGITVNAVCPGFVETPMAERVREHYAGIWGVSEQETHDRITTRVPLGRYVETREVAAMVEYLVSDDAAAVTAQALNVCGGLGNY

SEQ ID NO: 118917 - DNA, 801 bp, Streptomyces maritimus
  CDS (1)..(801): transl_table=11
atgcccgcacacaccgagtccccaagcgtcgctctggtcacaggcggcaccagcggcattggtctgtcgatcgcccaggccctgctgcaggatgggctgaaggtcatcatcaccggccgcgaccccgggaagctggagaccgtcgtcaggtcgctgaagatggaggacgaccagttcgacgtggccggttacacctgcgacgtacgagaccgcgacgcggtgcacgacatggtggaacggtgcgccaaggagcacggcgagccgaaggtcctggtcaacaacgccggccgcagcggcggcggcgtgaccgccgcgatccccgacgagttgtggctggacgtcatcaacaccaacctcaacagcgtcttctgggtgacccgcgaggtcatccggagcagcgacgcgatcaagcagccagccggccggatcatcaacatcgcgtccaccggcggcaagcagggcgtcccgtacggggccccgtactcggcggccaaggccggtgtcatcggcttcaccaaggcactcgccaaggaattcgccgcccacggcggccccaccgtgaacgcggtatgccccggctacgtggaaacgcccatggcccaggacatccgcgccagttacgccaagctcaacaacgtcaccgaggagcaggtcctcgccgacttcgaggccaaaatccccctcggccgctactgcacccccgaggaggtggcgggcatggtgcgctacctggtcagcccggcagccgcgtcggtgaccgcccaggcactcaacgtctgcggcggactgggcagttactga

SEQ ID NO: 118918 - protein, 266 aa, Streptomyces maritimus
MPAHTESPSVALVTGGTSGIGLSIAQALLQDGLKVIITGRDPGKLETVVRSLKMEDDQFDVAGYTCDVRDRDAVHDMVERCAKEHGEPKVLVNNAGRSGGGVTAAIPDELWLDVINTNLNSVFWVTREVIRSSDAIKQPAGRIINIASTGGKQGVPYGAPYSAAKAGVIGFTKALAKEFAAHGGPTVNAVCPGYVETPMAQDIRASYAKLNNVTEEQVLADFEAKIPLGRYCTPEEVAGMVRYLVSPAAASVTAQALNVCGGLGSY

SEQ ID NO: 118919 - DNA, 738 bp, Rhizobium leguminosarum
  CDS (1)..(738): transl_table=11
atgctcgatctttccggccgcaaggctctcgtcacaggcgcatcgggcggtatcggcgaggaaatcgcccgccttcttcataggcagggcgccatcgtcggcctgcatggcacccgcgtcgagaaactggaagcgctggccgccgatctcggcgagcgcgtcaagatcttcccggcgaacctttcagaccgcgatgaggtcaaggcgctcggccagaaggccgaggccgatctcgaaggcgtcgacatcctcgtcaacaatgccggcatcacccgcgacggcctgttcgtgcgcatgagcgacgaggactgggacagcgtcatcgaagtgaacctgacggcgaccttccgcctgacgcgcgaattgacgcatccgatgatgcgtcgccgctatggccgcatcatcaatatcacctcggtcgtcggcgtcaccggcaatccgggccaggccaattactgcgcctccaaggccggcatgatcggcttcaccaagtccctggcgcaggaaattgccacccgcaacgtgacggtcaattgcgtggcgcccggtttcatcgaaagcgccatgaccggcaagctgaacgacaagcagaaggaagcgatcatgggagcgattccgatgaagcgcatgggcacaggcggcgaggtcgcttcggcggtcgcttaccttgcgtcctccgaggctgcttatatgacgggccagacgctgcacgtaaacggcggcatggcgatgatctga

SEQ ID NO: 118920 - protein, 245 aa, Rhizobium leguminosarum
MLDLSGRKALVTGASGGIGEEIARLLHRQGAIVGLHGTRVEKLEALAADLGERVKIFPANLSDRDEVKALGQKAEADLEGVDILVNNAGITRDGLFVRMSDEDWDSVIEVNLTATFRLTRELTHPMMRRRYGRIINITSVVGVTGNPGQANYCASKAGMIGFTKSLAQEIATRNVTVNCVAPGFIESAMTGKLNDKQKEAIMGAIPMKRMGTGGEVASAVAYLASSEAAYMTGQTLHVNGGMAMI

SEQ ID NO: 118921 - DNA, 774 bp, Streptomyces virginiae
  CDS (1)..(774): transl_table=11
atgactgatcgacaagggcttctgacagacaggatcgcactgataacgggagccagcagcggcatcggcgcggcgcagcgcgggttgttcgccagggagggcgcggcggtggtggtcaccgcccgccgcgaggagcggctggccgggctggtggacgagttgcgggcgcagggcgcccgagccgcatacgtggtcgccgacgtgacccggtccgaggacgcggtacgtgccgtcgagttcacggtggaacgtttcggcaggctcgatgccgcgttcaacaaacgccggcacggggccggccgcacaccgctgcacctgatggacgacccggtctacgacgacatcatggacaccaacgtgcgcggggtgttcaactgcctgcgcccggagatcgcggcgatgctcgcatccggagcaggcggttcgatcgtcaacaccagcagcaccggcggcttggtcgccactccggtcgccgcgccgtacgtggtgtccaagcacgcggtgctcggtctgaccaaagggcctgccgccgagtacggcgcccacggcattcgggtcaacgcgatagcccccggcacgacccgcagcgagatggtggcggactggttcgcgcagaacccggatgccgaggagctgctgcaccgggccacgccgcagccccgtaccgccgaaccccaggagatcgccgaggccgctgcgtggctgtgcagcgagcgggcgtccttcgtcaccgggtcgaccctggtggtcgacggcgggttcaccatcctctga

SEQ ID NO: 118922 - protein, 257 aa, Streptomyces virginiae
MTDRQGLLTDRIALITGASSGIGAAQRGLFAREGAAVVVTARREERLAGLVDELRAQGARAAYVVADVTRSEDAVRAVEFTVERFGRLDAAFNKRRHGAGRTPLHLMDDPVYDDIMDTNVRGVFNCLRPEIAAMLASGAGGSIVNTSSTGGLVATPVAAPYVVSKHAVLGLTKGPAAEYGAHGIRVNAIAPGTTRSEMVADWFAQNPDAEELLHRATPQPRTAEPQEIAEAAAWLCSERASFVTGSTLVVDGGFTIL

SEQ ID NO: 118923 - DNA, 744 bp, Streptomyces clavuligerus
  CDS (1)..(744): transl_table=11
atgccatccgcactccaggggaaagtcgcgctcatcacgggcgcgagctcgggcatcggcgaggccacggcccgcgccctggccgccgagggcgccgccgtggccatcgccgcgcgccgggtcgagaagctgcgcgccctgggtgacgagctgaccgccgccggggcgaaggtccatgtcctcgaactcgacgtcgccgaccggcagggggtggacgccgccgtcgcctccaccgtcgaggcgctgggcggcctcgacatcctcgtcaacaacgccgggatcatgctgctcggcccggtggaggacgccgacaccaccgactggacccggatgatcgacaccaatctcctgggcctgatgtacatgacccgggcggcccttccccatctgctgcgcagcaagggcaccgtggtgcagatgtcctcgatcgcgggccgggtgaacgtccgcaacgcggccgtctaccaggccacgaagttcggtgtgaacgcgttcagcgagacgctgcgccaggaggtcaccgagcgcggggtgcgggtcgtcgtcatcgagccgggcaccaccgacacggagctgcgcggccacatcacccacaccgccaccaaggagatgtacgagcagcggatcagccagatccgcaagctccaggcccaggacatcgcggaggcggtccgctacgccgtgaccgcgccgcaccacgcgaccgtccacgagatcttcatacgccccaccgaccaggtctga

SEQ ID NO: 118924 - protein, 247 aa, Streptomyces clavuligerus
MPSALQGKVALITGASSGIGEATARALAAEGAAVAIAARRVEKLRALGDELTAAGAKVHVLELDVADRQGVDAAVASTVEALGGLDILVNNAGIMLLGPVEDADTTDWTRMIDTNLLGLMYMTRAALPHLLRSKGTVVQMSSIAGRVNVRNAAVYQATKFGVNAFSETLRQEVTERGVRVVVIEPGTTDTELRGHITHTATKEMYEQRISQIRKLQAQDIAEAVRYAVTAPHHATVHEIFIRPTDQV

SEQ ID NO: 118925 - DNA, 780 bp, Solanum lycopersicum
  CDS (1)..(780)
atggcaaataagctcaggttggagggcaaagtagctataattaccggtgctgctagtggcattggagaagcaagtgctagattgttcgttgaacatggtgctcgtgtcgtcgtcgccgatattcaagatgaacttggtcaaaaagtagttgattctatcggatctgacaaagccagctaccggcactgcgacgttacagacgagaagcaagttgaggaaaccgtagcttacgcggtagagaaatacggtactcttgacattatgtttagtaatgtcgggacgctgaatttctgcagcgtcctcgacatggacgtgctggccttcgatgagaccatggccatcaacgtacgcggatccgcgttagcggttaagcacgcggctaaagttatggttgataagaaaattcggggatctattatatgtaacgcgagtttagaagggattttagctggggccgcttcgctcgcctacattgcgtcaaagcacgcagtggtaggcattataaaagcggccgcacgtgaactgggtccacatgggataagggtgaatggggtgtcgccctatggaatagcgacgccccttgtgactaaggcgtatggactggatgcggctctattggaagaagcaatttacggtaatggacacttgaaaggagttaagttgagcacgatgcatgtagcacaatcagcactttttttggcgtctgatgaatctgcttatacaagtggtcaaaatttagctgttgatggtggactaagttctattttgaagctacaataa

SEQ ID NO: 118926 - protein, 259 aa, Solanum lycopersicum
MANKLRLEGKVAIITGAASGIGEASARLFVEHGARVVVADIQDELGQKVVDSIGSDKASYRHCDVTDEKQVEETVAYAVEKYGTLDIMFSNVGTLNFCSVLDMDVLAFDETMAINVRGSALAVKHAAKVMVDKKIRGSIICNASLEGILAGAASLAYIASKHAVVGIIKAAARELGPHGIRVNGVSPYGIATPLVTKAYGLDAALLEEAIYGNGHLKGVKLSTMHVAQSALFLASDESAYTSGQNLAVDGGLSSILKLQ

SEQ ID NO: 118927 - DNA, 846 bp, Streptomyces nogalater
  CDS (1)..(846): transl_table=11
gtgcgagccatgactgactcgacaggtccccgcccggtgcccgccatgtcacccgcccccagccccacgccttcccccggccccgcccccgggagcgaacccgcgccgctcgccgtgatcgtcaccggcggcggttcgggtatcggccgggccaccgcccgcgccttcgccgctcagggtgcgaaggtgctcgtcgtcggccgtaccgaggacgcgctcgcgcagaccgccgagggctgtgcggacatgcgtgtgctcgtcgccgacgtggcctcgcccgacgggccgcaggcggtcgtcaacgccgccctgcgggagttcgggaggatcgacgtcctggtcaacaacgctgccgtggcgggcatggagaccctgcagaccgtcgaccgggacgccgtggcacggcagttcggcaccaatctgacggctcccctcttcctcgtccagtccgcactcggcgcgctggagaagtcgcgcggcatcgtcgtcaacgtggggaccgccgcgaccctgggcctgcgcgccgccccgaccggcgcgctgtacggggcgagcaaggtggccctcgactacctgacccggacctgggccgtcgaactggccccccggggcatccgtgtcgtcggcgtggcacccggggtgatcgacacgggcatcggcgtccgcatgggcatgaccccggagggctaccgggagttcctgaccggcatgggcggcagggtgcccgtgggccgggtcggccgtccggaggacgtggcctggtggatcgtccagctcgcccgcccggaggccggctacgcgacgggcatggtcgtccccgtcgacggcgggctgtcgctggtctga

SEQ ID NO: 118928 - protein, 281 aa, Streptomyces nogalater
MRAMTDSTGPRPVPAMSPAPSPTPSPGPAPGSEPAPLAVIVTGGGSGIGRATARAFAAQGAKVLVVGRTEDALAQTAEGCADMRVLVADVASPDGPQAVVNAALREFGRIDVLVNNAAVAGMETLQTVDRDAVARQFGTNLTAPLFLVQSALGALEKSRGIVVNVGTAATLGLRAAPTGALYGASKVALDYLTRTWAVELAPRGIRVVGVAPGVIDTGIGVRMGMTPEGYREFLTGMGGRVPVGRVGRPEDVAWWIVQLARPEAGYATGMVVPVDGGLSLV

SEQ ID NO: 118929 - DNA, 786 bp, Streptomyces cyanogenus
  CDS (1)..(786): transl_table=11
atgtcgcagcaggaccagcgtgtcgccctcgtcaccggagccaccagcgggatcggccagccgcccggctgctcgccacccaggggcaccgggtgttcacggcgcggcaatgcggagaacgtggcggagaccgtcaagcagctgcagctgcaggacgagggcctcgacgtcgacggcaccgctctcgacgtgcgctccgcggacggggtgcgggccttcgtgcagtcggcggtggaccggttcggcacggtcgacgtgctggtgaacaacgcgggccggtccggtggaggggtgaccgcagacatcgcggacgagctgtgggacgacgtgatcgccaccaacctcaccagcgtcttccggatgacgcgagaggtgctcaacaccggcgggatgcgcgggaagtcccgtggccgcatcatcaacatcgcctccacggcgggtaagcagggcgtggtcctcggcgccccgtactcggcgtccaagcacggcgtcgtcggcttcaccaaggcgctgggcaacgagctcgcgcccaccggcatcaccgtcaacgcggtctgccccggctacgtcgagacgccgatggcccagcgcgtccgccagggatacgcggccgcctacaacgcgaccgaggacgcgatcctggagaagttccaggcgaagatcccgctcggccgttactccacgcccgaggaggtcgccggcctggtcggctacctggcctcggacaccgccgcctccatcacctcccaggcgctcaacgtctgcggcggactcggcaacttctga

SEQ ID NO: 118930 - protein, 261 aa, Streptomyces cyanogenus
MSQQDQRVALVTGATSGIGQPPGCSPPRGTGCSRRGNAENVAETVKQLQLQDEGLDVDGTALDVRSADGVRAFVQSAVDRFGTVDVLVNNAGRSGGGVTADIADELWDDVIATNLTSVFRMTREVLNTGGMRGKSRGRIINIASTAGKQGVVLGAPYSASKHGVVGFTKALGNELAPTGITVNAVCPGYVETPMAQRVRQGYAAAYNATEDAILEKFQAKIPLGRYSTPEEVAGLVGYLASDTAASITSQALNVCGGLGNF

SEQ ID NO: 118931 - DNA, 738 bp, Azohydromonas lata
  CDS (1)..(738): transl_table=11
atggcacagaaactggcttacgtgaccggcggcatgggcggcatcggcacctcgatgtgccagcgcctgcacaaggacggcttcaaggtgatcgccggctgcggtccgagccgcgaccaccagaagtggatcgatgaacaggccgcgctgggctataccttctacgcctccgtgggcaacgtggccgactgggactccaccgtggccgccttcgagaaggtcaaggccgagcacggcaccgtggacgtgctggtgaacaacgccggcatcacgcgtgacgggcagttccgcaagatgagcaaggccgattggcaggccgtgatgtcgaccaacctcgacagcatgttcaacgtcaccaagcaggtgatcgagggcatgctggacaagggctggggccggatcatcaacatctcctcggtcaacggcgagaagggccagttcggccagaccaactactccgccgccaaggccggcatgcacggcttctcgatggcgctggcgcaggaagtggcggccaagggcgtgacggtgaacaccgtgagcccgggctacatcgccacggacatggtcaaggccatccgccaggacgtgctggacaagatcatcgccaccattcccatccgtcgcctgggtacgccggaggagatcgcctccatcgtcgcctggctggccggcgaggagtcgggcttcaccaccggtgccgacttcagctgcaacggcggcctgcacatgggctga

SEQ ID NO: 118932 - protein, 245 aa, Azohydromonas lata
MAQKLAYVTGGMGGIGTSMCQRLHKDGFKVIAGCGPSRDHQKWIDEQAALGYTFYASVGNVADWDSTVAAFEKVKAEHGTVDVLVNNAGITRDGQFRKMSKADWQAVMSTNLDSMFNVTKQVIEGMLDKGWGRIINISSVNGEKGQFGQTNYSAAKAGMHGFSMALAQEVAAKGVTVNTVSPGYIATDMVKAIRQDVLDKIIATIPIRRLGTPEEIASIVAWLAGEESGFTTGADFSCNGGLHMG

SEQ ID NO: 118933 - DNA, 777 bp, Corynebacterium glutamicum
  CDS (1)..(777): transl_table=11
atgagcaaagttgcaatggttaccggtggtgcacaaggcatcggtcgtggaatttcagagaagctggcagcagatggtttcgatattgccgtagccgacctgccacaacaggaagaacaagctgcagagaccatcaagttgattgaagctgcagatcaaaaggctgtattcgttggattagatgtcaccgataaggctaatttcgacagtgcaattgatgaggcagcagagaaacttggcggcttcgatgtgctagtaaacaacgccggcatcgcacaaattaagccacttctggaagtcaccgaagaagacctaaagcagatctactccgtgaacgtttttagcgtattttttggtattcaagcagcatcccgaaagttcgatgagcttggcgtaaaaggcaagatcatcaacgctgcatcaatcgctgctatccaaggtttcccaatcttgagcgcctactccaccaccaaattcgcggtgcgtggcctcacccaggctgctgctcaagaacttgctccgaagggccacaccgtcaacgcatacgcacctggcatcgtgggcaccggaatgtgggagcagatcgatgctgaactttccaagatcaacggcaaaccaattggtgagaacttcaaggagtactcctcctcaatcgcattgggccgaccatcagtacctgaggatgtagccggactggtttctttcttggcgtctgaaaactccaactatgtcaccgggcaggtcatgcttgtcgacggcggcatgctctacaactaa

SEQ ID NO: 118934 - protein, 258 aa, Corynebacterium glutamicum
MSKVAMVTGGAQGIGRGISEKLAADGFDIAVADLPQQEEQAAETIKLIEAADQKAVFVGLDVTDKANFDSAIDEAAEKLGGFDVLVNNAGIAQIKPLLEVTEEDLKQIYSVNVFSVFFGIQAASRKFDELGVKGKIINAASIAAIQGFPILSAYSTTKFAVRGLTQAAAQELAPKGHTVNAYAPGIVGTGMWEQIDAELSKINGKPIGENFKEYSSSIALGRPSVPEDVAGLVSFLASENSNYVTGQVMLVDGGMLYN

SEQ ID NO: 118935 - DNA, 762 bp, Bacillus subtilis; identical to SEQ ID NO: 59654
  CDS (1)..(762): transl_table=11

SEQ ID NO: 118936 - protein, 253 aa, Bacillus subtilis; identical to SEQ ID NO: 59655

SEQ ID NO: 118937 - DNA, 777 bp, Bacillus subtilis
  CDS (1)..(777): transl_table=11
atgtacaaagatttaaccggaaaaacagcgattgtgacagggtcttcaaaaggaatcgggaaagccattgcggaacggttcggaaaggagaaaatgaatgttgttgtaaattaccacagcgacccgtctggagcagatgaaactctggaaatcattaagcagaacggagggaaagccgtctcagttgaggcggacgtgtcaaaagaagaggggattcaggcgctcttggacacagctttagagcatttcggcacgctcgatgtgatggtaaacaactccggttttaacggcgttgaggcgatgccgcatgagatgagtcttgaagattggcagagagtgattgatgtcaatgttaccggaacctttctgggagcgaaagcagcacttaaccacatgatgaaaaacaatatcaagggcaatgtgctgaatatctcaagtgttcatcagcagattccgcgccctgtaaacgttcagtattccacatccaaaggcggcatcaagatgatgacggaaacgctggcgctcaattatgcggataagggaatccgcgtcaatgcgatagcgcccggcaccattgccacagaatcaaatgttgatacgaaaaaggaagagagcaggcaaaaacaattgaaaaaaatcccgatgaaagccttcggaaagcctgaagaagtggcggcagcagcagcttggctcgtatctgaggaagcaagctatgtgaccggcgcaacacttttcgtcgacggcggaatgacactttatccatctcagcttgaatag

SEQ ID NO: 118938 - protein, 258 aa, Bacillus subtilis
MYKDLTGKTAIVTGSSKGIGKAIAERFGKEKMNVVVNYHSDPSGADETLEIIKQNGGKAVSVEADVSKEEGIQALLDTALEHFGTLDVMVNNSGFNGVEAMPHEMSLEDWQRVIDVNVTGTFLGAKAALNHMMKNNIKGNVLNISSVHQQIPRPVNVQYSTSKGGIKMMTETLALNYADKGIRVNAIAPGTIATESNVDTKKEESRQKQLKKIPMKAFGKPEEVAAAAAWLVSEEASYVTGATLFVDGGMTLYPSQLE

SEQ ID NO: 118939 - DNA, 819 bp, Streptomyces violaceoruber
  CDS (1)..(819): transl_table=11
atgacgacggcgacagcgacggccacggccacccccggcacggcggcgaagccggtggcgctggtgaccggtgccaccagcggcatcgggcttgcgatcgcccgccggctggccgcgctcggcgcgcgcaccttcctgtgcgcccgggacgaggagcggctggcgcagacggtgaaggagctgcgcggcgaggggttcgacgtcgacggcacggtgtgcgacgtggcggatccggcccagatccgcgcctacgtggcggcggccgtccagcggtacggcacggtcgacatcctggtgaacaacgccggccgcagcggcggcggcgccaccgccgaaatcgccgacgagctctggctcgacgtcatcaccaccaacctgaccagcgtcttcctcatgacgaaggaagtgctcaacgcgggcgggatgctcgccaagaagcgtgggcggatcatcaacatcgcctccaccggcggcaagcagggcgtcgtgcacgcggtgccgtactcggcgtccaagcacggcgtcgtcgggctgaccaaggccctcggcctggagctggcccgtaccggcatcaccgtgaacgcggtgtgcccgggcttcgtggagaccccgatggccgagcgggtgcgcgagcactacgcgggcatctggcaggtctccgaggaggagacgttcgaccgcatcaccaaccgggtgccgctgggccggtacgtggagacccgcgaggtggccgcgatggtcgagtacctggtggcggacgacgcggcggcggtcaccgcgcaggcgctgaacgtctgcggcgggctgggcaactactga

SEQ ID NO: 118940 - protein, 272 aa, Streptomyces violaceoruber
MTTATATATATPGTAAKPVALVTGATSGIGLAIARRLAALGARTFLCARDEERLAQTVKELRGEGFDVDGTVCDVADPAQIRAYVAAAVQRYGTVDILVNNAGRSGGGATAEIADELWLDVITTNLTSVFLMTKEVLNAGGMLAKKRGRIINIASTGGKQGVVHAVPYSASKHGVVGLTKALGLELARTGITVNAVCPGFVETPMAERVREHYAGIWQVSEEETFDRITNRVPLGRYVETREVAAMVEYLVADDAAAVTAQALNVCGGLGNY

SEQ ID NO: 118941 - DNA, 750 bp, Streptomyces violaceoruber
  CDS (1)..(750): transl_table=11
atggccaccgacgcgcccgaggcgcctgtcgccctggtcaccggttcctcctccggcatcgggcagaccgtcgcccagcggctggccgccgaggggtaccgggtggtcgtcaactcggcccgctccgtggaggacggcgagaagacggccgccgcactgcccgacgcgctctacgtccgggcggacgtctccgaggaggcggacgcccgccgtctggtggacaccgccgtggagcactacggccgactggacgtcctcgtcaacaacgccggccggacccgcgccatcccgcacgccgacctggcggccgccacccccgaggtgtggcgggagatcctcggtctgaacgtcatcggcacctggcagaccaccgtcgccgcgatgcctcacctcgcccgctcggggaacggctccgtcgtcaacgtgtcgtcgatcgcggggagccgcccggccggcagctcgatcccttacgcggtgagcaatggcggccatcgagcacagactcggctcctcgccaacacggtgggtccggctgtgcgcgtcaacgcggtcgcgccggggctgatcgagacgccgtggacgcagaacagcgacttcttcgcaccgatcgccgagcacgtgcggcagacgacgccactgcgccggacaggcaggccggaagacgtcgcggaagccgtcctcgggctggtccgcgccacgtacaccaccgggcaggtcctgctcgtggacggcggcgcccacctcctctga

SEQ ID NO: 118942 - protein, 249 aa, Streptomyces violaceoruber
MATDAPEAPVALVTGSSSGIGQTVAQRLAAEGYRVVVNSARSVEDGEKTAAALPDALYVRADVSEEADARRLVDTAVEHYGRLDVLVNNAGRTRAIPHADLAAATPEVWREILGLNVIGTWQTTVAAMPHLARSGNGSVVNVSSIAGSRPAGSSIPYAVSNGGHRAQTRLLANTVGPAVRVNAVAPGLIETPWTQNSDFFAPIAEHVRQTTPLRRTGRPEDVAEAVLGLVRATYTTGQVLLVDGGAHLL

SEQ ID NO: 118943 - DNA, 963 bp, Brassica napus
  CDS (1)..(963)
atggcaaccacagtcgcagcaacgaagctcacctccttgaaagccgtcaagaagctcgggttccgtgagatccgccaggtccgtcaatggtctccgcttcagtccgccatgcctcatttcggaatgctccgatgcggatcgcggcagtcattcgcaacctccactgttgtgaaagctcaggcgacagctgttgagcaatcgacaggggaagctgttccgaaagtggagtctccggtggttgttgtcactggtgcttcgagagggattggtaaagctattgctctttccttgggcaaagctggctgcaaggtgttggtgaactatgcaaggtcagcaaaggaggctgaggaagtttctaaacagattgaagcatatggaggccaggctattacttttgggggtgatgtctccaaagaggctgatgtggaagccatgatgaaaaccgctattgatgcatggggaaccattgatgtcgtcgtcaacaatgcaggaatcactcgggataccttgttgattcgcatgaagaagtcccaatgggatgaagtgattgatttgaatctcactggagtgtttctctgcacacaggcagcaacaaagatcatgatgaagaagagaaagggaagaatcatcaacatagcgtcagttgttggtctcattggtaatattggccaagcaaactacgctgctgctaaagctggagttattgggttttccaagactgccgccagagagggtgcgagcaggaatataaatgtcaatgtggtttgccctgggttcattgcgtctgacatgactgccaagcttggagaagacatggaaaagaaaatcttgggaacaatcccattaggacgatatggacaacctgaagatgtggctggcttggtagaattcttggctctcagccctgcagccagttacatcaccggacaggcattcaccattgatggaggtattgccatctag

SEQ ID NO: 118944 - protein, 320 aa, Brassica napus
MATTVAATKLTSLKAVKKLGFREIRQVRQWSPLQSAMPHFGMLRCGSRQSFATSTVVKAQATAVEQSTGEAVPKVESPVVVVTGASRGIGKAIALSLGKAGCKVLVNYARSAKEAEEVSKQIEAYGGQAITFGGDVSKEADVEAMMKTAIDAWGTIDVVVNNAGITRDTLLIRMKKSQWDEVIDLNLTGVFLCTQAATKIMMKKRKGRIINIASVVGLIGNIGQANYAAAKAGVIGFSKTAAREGASRNINVNVVCPGFIASDMTAKLGEDMEKKILGTIPLGRYGQPEDVAGLVEFLALSPAASYITGQAFTIDGGIAI

SEQ ID NO: 118945 - DNA, 987 bp, Brassica napus
  CDS (1)..(987)
atggccaccacctccatcgcaggacccagactcacttccttgaaaaccgccgccgggaagctcggctaccgtgagatctgtcatgtccggcaatgggctccggttcattctccgatgcctcatttcggaatgctgcgatgtggatcgcgacgcccgtttgcaacctcctcctccactgttgttcaagctcaagctcaagccactgctgctgagcaatcaacaggtgaagaagaagctgttccgaaagtggagtctccagttgtcgttgtcactggtgcctctcgaggcattggtaaagccattgctctttccctgggcaaagctggctgcaaggtcttggtgaattatgctaggtcagctaaggaggctgaacaagtttctaaacagattgaggcatacggtggccaggctattacttttgggggtgatgtctccaaagaggctgatgtggatgccatgatgaaaaccgctgttgatgcatggggaaccattgatgtcgtcgttaacaatgcaggaattactcgggataccttgttgatacgaatgaagaagtcccaatgggatgaagtgattgatttgaatctcactggagtattcctctgtacccaggcagcgacaaagataatgatgaagaagagaaagggaagaatcatcaacatagcgtcagttgttggtctcattggtaatattggccaagcaaactacgctgctgctaaagctggagttatcgggttctccaagactgctgccagagagggtgcgagcaggaatattaacgtcaatgtggtttgccccgggttcattgcatctgacatgactgctaaacttggagaagacatggaaaagaaaatcttgggaacaatcccattaggacgatatggacaaccggaagatgtggctggcttggtagaattcttggctctcagtcctgcagccagttacatcactggacaggcattcaccatcgatgggggtattgccatctag

SEQ ID NO: 118946 - protein, 328 aa, Brassica napus
MATTSIAGPRLTSLKTAAGKLGYREICHVRQWAPVHSPMPHFGMLRCGSRRPFATSSSTVVQAQAQATAAEQSTGEEEAVPKVESPVVVVTGASRGIGKAIALSLGKAGCKVLVNYARSAKEAEQVSKQIEAYGGQAITFGGDVSKEADVDAMMKTAVDAWGTIDVVVNNAGITRDTLLIRMKKSQWDEVIDLNLTGVFLCTQAATKIMMKKRKGRIINIASVVGLIGNIGQANYAAAKAGVIGFSKTAAREGASRNINVNVVCPGFIASDMTAKLGEDMEKKILGTIPLGRYGQPEDVAGLVEFLALSPAASYITGQAFTIDGGIAI

SEQ ID NO: 118947 - DNA, 1185 bp, Brassica napus
  CDS (70)..(1017)
ggcacgagcttccttggcctctctctctctctctccctctccacccgtctccacctcctcctccgttcgatggcaaccaccgtcgcagcaacaaagctcacctccttgaaagccgtcaagaagctcggtttccgtgagatccgtcaggtccgtcaatggactccgcttcagtcttcgatgcctcatttcggatcgcggcagtcattcgcaacctccactgttgtgaaagctcaagcgacagctgttgagcaatcgacaggagaagctgttccgaaagtggagtctccggtggtcgttgtgactggtgcttcgagagggattggtaaagctattgctctttccttgggcaaagctggctgcaaggtcttggtgaactatgctaggtcagcaaaggaggctgaggaagtttctaaacagattgaagcatatggaggccaggctattacttttgggggtgatgtctccaaagaggctgatgtggaagccatgatgaaaaccgctattgatgcatggggaaccattgatgtcgtcgtcaacaatgcaggaatcactcgggataccttgttgatacgaatgaagaagtcccaatgggatgaagtgattgatttgaatctcactggagtctttctctgtacccaggcagcaacaaagatcatgatgaagaagagaaagggaagaatcatcaacattgcgtcagttgttggtctcattggtaatattggccaagcaaactacgctgctgctaaagctggtgttattgggttctccaagactgccgccagagagggtgcgagcaggaatataaatgtcaatgtggtttgccctgggttcattgcatctgacatgactgccaagcttggagaagacatggaaaagaaaatcttgggaacaatcccattaggacgatatggacaacctgaagatgtggctggcttggtagaattcttggctctcagtcctgcagctagttacatcacaggacaggcattcaccattgatggaggtattgccatctaggcatttgttaagagttgctttgtgtttaggcaaaaccgatttggtaaaacagacaaagttgagtttattccggcacttggtcggatttctgttctgtggattctgttcggagagaaatctaaaacgcattgcttaaactaagttacgtaaaaaaaaaaaaaaaaaaaa

SEQ ID NO: 118948 - protein, 315 aa, Brassica napus
MATTVAATKLTSLKAVKKLGFREIRQVRQWTPLQSSMPHFGSRQSFATSTVVKAQATAVEQSTGEAVPKVESPVVVVTGASRGIGKAIALSLGKAGCKVLVNYARSAKEAEEVSKQIEAYGGQAITFGGDVSKEADVEAMMKTAIDAWGTIDVVVNNAGITRDTLLIRMKKSQWDEVIDLNLTGVFLCTQAATKIMMKKRKGRIINIASVVGLIGNIGQANYAAAKAGVIGFSKTAAREGASRNINVNVVCPGFIASDMTAKLGEDMEKKILGTIPLGRYGQPEDVAGLVEFLALSPAASYITGQAFTIDGGIAI

SEQ ID NO: 118949 - DNA, 747 bp, Aquifex aeolicus
  CDS (1)..(747): transl_table=11
atggaaataaaactccagggcaaggtttccctcgtaacgggttccacaagaggaataggaagggcgatagcggaaaaactcgcatccgcggggagcaccgtcataataacgggtacttctggagaaagggcaaaggctgttgcggaggaaatcgcaaacaaatacggagtgaaggctcacggtgttgagatgaaccttttatcagaagaaagcattaacaaggcctttgaagaaatttacaaccttgtagacggtatagatatactcgtcaacaacgcgggaataacgagggacaagctctttttaaggatgagtcttctggactgggaagaagttctgaaggtaaacttaacgggaacttttttagtcacacagaactcgctgagaaagatgataaagcagagatggggaaggatagttaatatttcttccgttgtaggttttacgggtaacgttggacaggtaaattactccaccacaaaagctgggctgataggttttaccaaatcccttgcaaaggaactcgctccgaggaacgttcttgtgaacgcggtagctccgggatttatagaaacggacatgactgcggttttatccgaggaaattaagcagaagtataaggaacaaatccccctcgggcggttcggaagtcccgaggaggttgcaaacgtggttttattcctttgttctgagcttgcaagttatataacgggtgaagtaattcacgtaaacggaggaatgttttaa

SEQ ID NO: 118950 - protein, 248 aa, Aquifex aeolicus
MEIKLQGKVSLVTGSTRGIGRAIAEKLASAGSTVIITGTSGERAKAVAEEIANKYGVKAHGVEMNLLSEESINKAFEEIYNLVDGIDILVNNAGITRDKLFLRMSLLDWEEVLKVNLTGTFLVTQNSLRKMIKQRWGRIVNISSVVGFTGNVGQVNYSTTKAGLIGFTKSLAKELAPRNVLVNAVAPGFIETDMTAVLSEEIKQKYKEQIPLGRFGSPEEVANVVLFLCSELASYITGEVIHVNGGMF

SEQ ID NO: 118951 - DNA, 741 bp, Bacillus subtilis
  CDS (1)..(741): transl_table=11
atgcttaatgataaaacggctattgtcactggcgcatcccgcggaatcggccgctcaatcgcccttgatctggcaaaaagcggagcaaatgttgtcgtgaactactccggcaatgaagcgaaagcaaatgaagtggtagatgaaatcaaatcaatgggcagaaaagcaattgctgtaaaagcggatgtatcaaatcccgaagatgtacaaaacatgataaaagaaacattgtctgttttttctacgattgacattctggttaataatgcgggaattacaagagacaatctcatcatgagaatgaaagaagacgaatgggatgacgtcattaacattaacctgaagggtgttttcaactgcacaaaagctgttacaagacaaatgatgaaacagcgttcaggccgcattattaacgtatcgtctatcgtcggcgtcagcggaaaccctggacaagccaactacgtggctgcaaaagccggcgtcatcggtttaaccaaatcttctgctaaagagctcgccagccgaaatattacggtaaacgcaatagcgccaggatttatctcaactgatatgacagataaacttgcaaaagacgttcaagacgaaatgctgaaacaaattccgctcgcgcgctttggtgaacctagcgatgtcagcagtgttgtcacgttcctagcttcagagggagctcgttatatgacaggccaaacgcttcatattgacggcggaatggtgatgtaa

SEQ ID NO: 118952 - protein, 246 aa, Bacillus subtilis
MLNDKTAIVTGASRGIGRSIALDLAKSGANVVVNYSGNEAKANEVVDEIKSMGRKAIAVKADVSNPEDVQNMIKETLSVFSTIDILVNNAGITRDNLIMRMKEDEWDDVININLKGVFNCTKAVTRQMMKQRSGRIINVSSIVGVSGNPGQANYVAAKAGVIGLTKSSAKELASRNITVNAIAPGFISTDMTDKLAKDVQDEMLKQIPLARFGEPSDVSSVVTFLASEGARYMTGQTLHIDGGMVM

SEQ ID NO: 118953 - DNA, 1276 bp, Cuphea lanceolata
  CDS (35)..(997)
ggcatcccgatctctttccctcctccgcctcgccatggccaccgccaccgccgccggttgttccggcgctgtcgctctcaagtcgctcggcggccgcaggctgtgtattcctcagcagctctctcctgttctcgccggattcggatcgcacgccgccaaatccttccccatcctttcgacgaggtcgattgctacttccggtataagagcgcaggttgccactgctgagaaagtgagtgccggagcaggtcagtcggtggaatccccagtggttattgtcacgggagcatcccggggaattgggaaggcaattgcattgtcattgggaaaagcagggtgcaaggttttagtcaattatgcaagatcgtcgaaggaggccgaggaagtctctaaagagatagaagcatttggaggtcaggctcttacatttgggggagatgtgtccaaggaagaagatgtggaagcaatgattaagactgcggttgatgcgtggggaactgttgacatattggttaacaacgcaggaattactcgggatggattgttaatgaggatgaagaaatctcagtggcaggaagtgattgatttgaatctcaccggcgttttcctatgcacccaggcggcagctaaaatcatgatgaagaagaaaaagggaagaatcatcaacattgcgtcagtcgttggtttagttggtaacgctgggcaggccaactacagtgctgcgaaggctggggtcattggcttcacaaagactgtcgccagagaatatgccagtagaaatatcaatgttaacgctgttgcccccggattcatttcatctgacatgacttctaaacttggggatgatatcaacaagaaaatcctggagacaatcccattaggaaggtatggtcagcctgaagaagtagcgggtctcgtggagtttctggccatcaatcctgcatcaagttacgtcaccggacaggttttcacaattgatggaggcatgaccatgtaagaacccctcatctcctgcatctcggtatcaagcttcatattgagaaaagagttcaggaattgcaagttgggcctcctttttcccctattgaactgtagtttgtagctttggagtctcagaataataagcaaagaaggcaggcggtagtatgtttattgctacaatattgcttaagaaattgtcatgtgagcagacgtttgtgttttattggttggccaactagaaaaagaaataaatataaaacaggtttttttttaaaaaaaaaaaaaaaaaaaaaaa

SEQ ID NO: 118954 - protein, 320 aa, Cuphea lanceolata
MATATAAGCSGAVALKSLGGRRLCIPQQLSPVLAGFGSHAAKSFPILSTRSIATSGIRAQVATAEKVSAGAGQSVESPVVIVTGASRGIGKAIALSLGKAGCKVLVNYARSSKEAEEVSKEIEAFGGQALTFGGDVSKEEDVEAMIKTAVDAWGTVDILVNNAGITRDGLLMRMKKSQWQEVIDLNLTGVFLCTQAAAKIMMKKKKGRIINIASVVGLVGNAGQANYSAAKAGVIGFTKTVAREYASRNINVNAVAPGFISSDMTSKLGDDINKKILETIPLGRYGQPEEVAGLVEFLAINPASSYVTGQVFTIDGGMTM

SEQ ID NO: 118955 - DNA, 741 bp, Thermotoga maritima; identical to SEQ ID NO: 59664
  CDS (1)..(741): transl_table=11

SEQ ID NO: 118956 - protein, 246 aa, Thermotoga maritima; identical to SEQ ID NO: 59665

SEQ ID NO: 118957 - DNA, 747 bp, Vibrio cholerae
  CDS (13)..(747): transl_table=11
atgagtcaattcatgaatctagagggcaaagttgctcttgtgactggcgcaagccgcggcattggtaaagcgattgctgaactcttagctgaacgtggtgccaaagtgattggtacggcaaccagcgaaagcggtgcgcaggcgatcagcgattacttgggtgacaacggcaaaggtatggcattgaatgtgaccaatcctgagtcgattgaagcggttctgaaagccattaccgacgagttcggcggcgtcgacattctggtgaacaatgctggtatcactcgcgataatctgctgatgcgcatgaaagaagaagagtggtcagacattatggagaccaatctgacgtcgattttccgtctgtctaaagccgttttgcgtggcatgatgaaaaaacgtcaaggtcgtatcatcaatgttggctctgttgttggcactatgggtaacgcaggtcaagccaactacgcggcagcaaaagcgggcgtaattggctttactaagtcaatggcgcgtgaagttgcatcgcgcggtgtgaccgtcaacacagttgcaccaggttttatcgaaactgatatgacaaaagcgctgaatgacgagcaacgtactgctacactagcgcaggttccagcaggtcgactgggggatcctcgtgaaattgcgtctgcggttgctttccttgcatcaccagaagcggcatacatcaccggcgagacactgcatgtcaacggcggtatgtacatgatctaa

SEQ ID NO: 118958 - protein, 244 aa, Vibrio cholerae
MNLEGKVALVTGASRGIGKAIAELLAERGAKVIGTATSESGAQAISDYLGDNGKGMALNVTNPESIEAVLKAITDEFGGVDILVNNAGITRDNLLMRMKEEEWSDIMETNLTSIFRLSKAVLRGMMKKRQGRIINVGSVVGTMGNAGQANYAAAKAGVIGFTKSMAREVASRGVTVNTVAPGFIETDMTKALNDEQRTATLAQVPAGRLGDPREIASAVAFLASPEAAYITGETLHVNGGMYMI

SEQ ID NO: 118959 - DNA, 768 bp, Drosophila melanogaster
  CDS (1)..(768)
atgatcaagaacgccgtttccctggtgaccggaggagcctctggactgggccgcgccaccgccgagcgcctggccaagcagggcgccagcgtgatcctggccgatctgccctcctccaagggcaacgaggtggccaaggagctgggcgacaaggtggtcttcgtgcccgtggacgtgacctccgagaaggatgtgagcgccgctctgcagacggccaaggataagttcggtcgtctggatctgactgtgaactgtgcgggcacagccaccgcggtaaagacgttcaacttcaacaagaacgtggcgcaccgcctggaagacttccagcgggtgatcaacatcaataccgtgggcacgttcaatgtgatccgtctgtccgccggactgatgggcgccaatgagcccaatcaggatggacagcgcggcgtgatcgtgaacaccgcctcggtggctgcctttgatggccagatcggccaggcggcctactccgcctccaaggcagccgtggtgggcatgaccctgcccattgcccgtgacttgagcacccagggcatacgtatctgcaccattgcaccgggtttgttcaacacgcctatgctggccgccctgccggagaaggtgcgcaccttcctggccaagtccataccgttcccgcagcgcctgggcgagcccagtgagtacgcccacctggtgcaggccatctacgagaatccgctgctcaacggcgaggtcatccgtatcgacggtgctctgcgcatgatgccctag

SEQ ID NO: 118960 - protein, 255 aa, Drosophila melanogaster
MIKNAVSLVTGGASGLGRATAERLAKQGASVILADLPSSKGNEVAKELGDKVVFVPVDVTSEKDVSAALQTAKDKFGRLDLTVNCAGTATAVKTFNFNKNVAHRLEDFQRVININTVGTFNVIRLSAGLMGANEPNQDGQRGVIVNTASVAAFDGQIGQAAYSASKAAVVGMTLPIARDLSTQGIRICTIAPGLFNTPMLAALPEKVRTFLAKSIPFPQRLGEPSEYAHLVQAIYENPLLNGEVIRIDGALRMMP

SEQ ID NO: 118961 - DNA, 765 bp, Bacillus subtilis
  CDS (1)..(765): transl_table=11
atgggttatctacatgacgccttttcattaaaaggaaaaacagcgctggtgacaggcccgggaacagggatcggtcaaggaatagccaaagccctagccggggctggcgctgatattatcggcacatcacatacaagcagtctgtctgaaacacagcagcttgtggaacaggaaggccggatatttacatcttttacattggacatgagcaagccggaagcgataaaggattctgcagctgagctgtttgaaaacaggcagatcgacatccttgtcaataatgccggcattattcatcgggaaaaagcggaagattttccagaagagaactggcagcacgtactgaatgtcaatctaaacagcctgtttattctgacacagcttgctggcaggcacatgctgaaaagaggtcatggaaagattattaatattgcctctctcctgtcttttcaaggcggcatcctcgttccggcttacaccgcgagcaaacacgctgttgccggtttgacaaaatcatttgcaaatgagtgggcagcgtcaggtattcaggtcaacgcaatcgccccaggctatatttctactgcgaatacaaagcctattcgggatgacgaaaagcgaaatgaggacattttaaagagaattcctgccggccgctggggccaagcggatgatatcggggggactgcagtctttttggcatcacgtgcttcagattatgtaaatggacatattttagcagttgatggcggctggctatcccgctga

SEQ ID NO: 118962 - protein, 254 aa, Bacillus subtilis
MGYLHDAFSLKGKTALVTGPGTGIGQGIAKALAGAGADIIGTSHTSSLSETQQLVEQEGRIFTSFTLDMSKPEAIKDSAAELFENRQIDILVNNAGIIHREKAEDFPEENWQHVLNVNLNSLFILTQLAGRHMLKRGHGKIINIASLLSFQGGILVPAYTASKHAVAGLTKSFANEWAASGIQVNAIAPGYISTANTKPIRDDEKRNEDILKRIPAGRWGQADDIGGTAVFLASRASDYVNGHILAVDGGWLSR

SEQ ID NO: 118963 - DNA, 741 bp, Azospirillum brasilense
  CDS (1)..(741): transl_table=11
atgtctcagaagatcgcgctcgtcaccggtgccatgggcggtctcggcaccgccatctgccaggccctggccaaggacggttgcatcgtggcggcgaactgcctgccgaacttcgagccggccgccgcctggctgggccagcaggaagccctcggcttcaagttctacgtggcggaaggcgacgtttccgacttcgaaagctgcaaggcgatggtcgccaagatcgaggccgacctgggtccggtggacatcctggtgaacaacgccggcatcacccgcgacaagttcttcgcgaagatggacaaggcccagtgggatgcggtcatcgccaccaatctgagcagcctgttcaacgtcacccagcaggtgtcgccgaagatggccgagcgcggctggggccgcatcatcaacatctcgtcggtgaacggcgtgaagggccaggccggccagaccaactactcggccgccaaggccggcgtgatcggcttcaccaaggcgctggccgccgagctggcgaccaagggcgtcaccgtcaacgccatcgccccgggctacatcggcaccgacatggtcatggccatccgtgaggacatccgccaggcgatcaccgacagcgtcccgatgaagcgcctgggccgtccggacgagatcggcggcgcggtgtcctacctcgcgtcggagatcgccggctacgtcaccggctcgaccctgaacatcaacggcggcctgaactaccagtaa

SEQ ID NO: 118964 - protein, 246 aa, Azospirillum brasilense
MSQKIALVTGAMGGLGTAICQALAKDGCIVAANCLPNFEPAAAWLGQQEALGFKFYVAEGDVSDFESCKAMVAKIEADLGPVDILVNNAGITRDKFFAKMDKAQWDAVIATNLSSLFNVTQQVSPKMAERGWGRIINISSVNGVKGQAGQTNYSAAKAGVIGFTKALAAELATKGVTVNAIAPGYIGTDMVMAIREDIRQAITDSVPMKRLGRPDEIGGAVSYLASEIAGYVTGSTLNINGGLNYQ

SEQ ID NO: 118965 - DNA, 738 bp, Rhizobium meliloti
  CDS (1)..(738): transl_table=11
atgttcgaattgaccgggcgcaaggcgctcgtcacgggcgcatcaggagccataggaggggctatcgcccgcgtgctgcatgctcagggcgctatcgtcggactgcacggcacccaaattgaaaaactggagacactggcaactgagcttggagaccgggtcaagctgttcccggctaatctggccaatcgagacgaagtcaaggcgcttggtcagagagcggaagccgatcttgaaggcgtcgacatcctggtcaacaatgctggcatcaccaaggatggattgttcttgcacatggcagaccccgactgggacattgtgctggaggtcaacctcaccgccatgttccgactgacccgcgagatcacccagcagatgatacgccgtcgaaatggccgcatcatcaatgtcacttcggtcgccggcgccatcggcaatccaggccagaccaattactgcgcctccaaggccggtatgatcggcttttccaagtcgctggcgcaggagatcgctacgcgaaacatcactgtcaactgcgtcgccccgggcttcatcgaatcggcaatgaccgataagctcaatcacaaacagaaggagaaaatcatggtggcgatcccgatccaccgcatgggcaccggtaccgaagtcgcgtccgccgttgcgtatctcgcttccgatcacgccgcctatgtcaccggacagaccattcacgtgaacggcggtatggcaatgatttga

SEQ ID NO: 118966 - protein, 245 aa, Rhizobium meliloti
MFELTGRKALVTGASGAIGGAIARVLHAQGAIVGLHGTQIEKLETLATELGDRVKLFPANLANRDEVKALGQRAEADLEGVDILVNNAGITKDGLFLHMADPDWDIVLEVNLTAMFRLTREITQQMIRRRNGRIINVTSVAGAIGNPGQTNYCASKAGMIGFSKSLAQEIATRNITVNCVAPGFIESAMTDKLNHKQKEKIMVAIPIHRMGTGTEVASAVAYLASDHAAYVTGQTIHVNGGMAMI

SEQ ID NO: 118967 - DNA, 735 bp, Rhizobium meliloti
  CDS (1)..(735): transl_table=11
atgttcgaattgaccgggcgcaaggcgctcgtcacgggcgcatcaggagccataggaggggctatcgcccgcgtgctgcatgctcagggcgctatcgtcggactgcacggcacccaaatgaaaaactggagacactggcaactgagcttggagaccgggtcaagctgttcccggctaatctggccaatcgagacgaagtcaaggcgcttggtcagagagcggaagccgatcttgaaggcgtcgacatcctggtcaacaaatgctggcatcaccaaggatggattgttcttgcacatggcagaccccgactgggacattgtcctggaggtcaacctcaccgccatgttccgactgacccgcgagatcacccagcagatgatacgccgtcgaaatggccgcatcatcaatgtcacttcggtcgccggcgccatcggcaatccaggccagaccaattactgcgcctccaaggccggtatgatcggcttttccaagtcctggcgcaggagatcgacgcgaaacatcactgtcaactgcgtcgccccgggcttcatcgaatcggcaatgaccgataagctcaatcacaaacagaaggagaaaatcatggtggcgatcccgatccaccgcatgggcaccggtaccgaagtcgcgtccgccgttgcgtatctcgcttccgatcacgccgcctatgtcaccggacagaccattcacgtgaacggcggtatggcaatgatttga

SEQ ID NO: 118968 - protein, 244 aa, Rhizobium meliloti
MFELTGRKALVTGASGAIGGAIARVLHAQGAIVGLHGTQMKNWRHWQLSLETGSSCSRLIWPIETKSRRLVRERKPILKASTSWSTNAGITKDGLFLHMADPDWDIVLEVNLTAMFRLTREITQQMIRRRNGRIINVTSVAGAIGNPGQTNYCASKAGMIGFSKSWRRRSTRNITVNCVAPGFIESAMTDKLNHKQKEKIMVAIPIHRMGTGTEVASAVAYLASDHAAYVTGQTIHVNGGMAMI

SEQ ID NO: 118969 - DNA, 729 bp, Paracoccus denitrificans
  CDS (1)..(729): transl_table=11
atggcaaaagtggcccttgtgaccggcgggtcgcgcggcatcggcgcggcaatctcgaaggcgctgaaggaggccggctatacggtcgccgcgaattacgccggcaatgacgatgccgcccgcgcctttaccgaggaaaccggcatcaagacctacaaatggtcggtggcggattacgacgcctgcgcggcgggcatcaagcaggtggaggaggagcttggccccatcgccgtgctggtcaacaatgccggcatcacccgcgacgcgatgttccacaagatgaccccccagcagtggaaagaggtcatcgacaccaacctgacgggcctgttcaacatgacccatccggtctggtcgggcatgcgcgaccgcaaatacggccgtatcgtcaacatcagctcgatcaacggccagaagggccaggccggccaggcgaactattcggcggccaaggcaggcgacctgggctttaccaaggcgctggcccaggaaggcgcccgtgccggcatcaccgtgaacgcgatctgccccggctatatcggcaccgagatggtccgcgccatcgacgagaaggtgctgaacgagggcatcatcccccagatcccggtcgccgcctgggcggagcccgaggaaatcgcgcgctgcgtggtcttcctggcttccgaggatgccggtttcatcaccggctcgacccatcaagcgccaaatggcggccagttcttcgtctga

SEQ ID NO: 118970 - protein, 242 aa, Paracoccus denitrificans
MAKVALVTGGSRGIGAAISKALKEAGYTVAANYAGNDDAARAFTEETGIKTYKWSVADYDACAAGIKQVEEELGPIAVLVNNAGITRDAMFHKMTPQQWKEVIDTNLTGLFNMTHPVWSGMRDRKYGRIVNISSINGQKGQAGQANYSAAKAGDLGFTKALAQEGARAGITVNAICPGYIGTEMVRAIDEKVLNEGIIPQIPVAAWAEPEEIARCVVFLASEDAGFITGSTHQAPNGGQFFV

SEQ ID NO: 118971 - DNA, 726 bp, Rhizobium meliloti
  CDS (1)..(726): transl_table=11
atgagcagggtagcactggtaacgggcggatcccgcggcattggcgctgcgatttgcgtggcgctgaaggctgcgggctacaaggtggccgcaaactatgccggaaatgacgagagggccaaggccttcgagcaggaaagcggcattcccgtctacaaatgggacgtatcgagctatcaggcctgcgtcgatggcatcgccagggtcgaggccgacctcggaccggtcgacatcctcgtcaacaatgccggcatcacccgtgacgccatgttccacaagatgacgccggaacagtggggcgaagtgatcggcaccaatctcaccggcgtcttcaacatgacgcatccgctgtggtcgggcatgcgcgaccgcggcttcggccgtatcgtcaacatctcgtcgatcaacggccagaaggggcagatgggccaggtgaactattccgccgccaaggccggcgatctcggcttgaccaaggcgctggcccaggaaggggcggcgaaagggatcaccgtcaacgcgatttgccccggctatatcggcaccgagatggtgcgcgccgttccggaaaaggtgctcaacgagcggatcattccccagatacccgtcggacgcctcggcgagccggaggaagtggcacgctgcgtcgtgtttctcgcttccgacgacgcgggcttcatcaccggctcgacgatttcggccaatggcggccagtacttcgcctga

SEQ ID NO: 118972 - protein, 241 aa, Rhizobium meliloti
MSRVALVTGGSRGIGAAICVALKAAGYKVAANYAGNDERAKAFEQESGIPVYKWDVSSYQACVDGIARVEADLGPVDILVNNAGITRDAMFHKMTPEQWGEVIGTNLTGVFNMTHPLWSGMRDRGFGRIVNISSINGQKGQMGQVNYSAAKAGDLGLTKALAQEGAAKGITVNAICPGYIGTEMVRAVPEKVLNERIIPQIPVGRLGEPEEVARCVVFLASDDAGFITGSTISANGGQYFA

SEQ ID NO: 118973 - DNA, 726 bp, Zoogloea ramigera
  CDS (1)..(726): transl_table=11
atgagcagggtagcattggtaacggggggatcgcggggcatcggcgcagccatttcgattgcgctgaaggcggcgggatacaaggtggctgccagctatgccggcaatgacgatgcggccaagcccttcaaggcggaaacgggcatcgccgtctacaagtgggacgtgtcgagctacgaggcctgcgtcgaggggatcgccaaggtggaggccgatctcggcccgattgacgttctcgtcaacaatgcgggcatcaccaaggacgcgatgttccacaagatgacgcccgaccagtggaatgcggtcatcaacaccaacctcacgggtctcttcaacatgacccatccggtctggtccggcatgcgcgaccgcagcttcggccgcatcgtcaacatctcctcgatcaacggccagaagggccagatgggtcaggcgaactattccgccgccaaggccggcgacctcggcttcaccaaggcgctggcgcaggaaggcgcggccaagggcatcacggtcaacgccatctgccccggctatatcggtacggaaatggtgcgcgccattccggaaaaggtgctgaacgagcggatcatcccgcagatcccggtcggccgcctcggcgagccggacgagatcgcccgcatcgtcgtcttcctcgcctcggacgaggccggcttcatcaccggctcgaccatctcggcgaacggcggccagttcttcgtctga

SEQ ID NO: 118974 - protein, 241 aa, Zoogloea ramigera
MSRVALVTGGSRGIGAAISIALKAAGYKVAASYAGNDDAAKPFKAETGIAVYKWDVSSYEACVEGIAKVEADLGPIDVLVNNAGITKDAMFHKMTPDQWNAVINTNLTGLFNMTHPVWSGMRDRSFGRIVNISSINGQKGQMGQANYSAAKAGDLGFTKALAQEGAAKGITVNAICPGYIGTEMVRAIPEKVLNERIIPQIPVGRLGEPDEIARIVVFLASDEAGFITGSTISANGGQFFV

SEQ ID NO: 118975 - DNA, 816 bp, Picea abies
  CDS (1)..(816)
atggcgactgctgatgagcaggaggaggagatgaggatgaggctgcctttgcctttgggaggacgagtggccattgtaacaggtgcgtccagggggattggcagggaaatcgccctcaatatggcggagaagggagccaaagtggtcatccattactcctccaatcaacacgctgcagaggaagttgcttccataatcaataataaatccccttcttctggtgatggtgttcgggcgattgtgtgcaaagccgatgtcgccgagccctcccaggtcgcccagctattcgacacggccgagcacgcgtttgggcccctccacatcgtggtaaacaacgcaggtgtgacggactcgaagtatcccaccctcgcacagacctccgatgaagagtgggacaggatattccaagtgaactgcaaaggagcgtttctgtgtagcagagaagccgccaagagggtcgtccgcgggggcgggggtcgcatcatcaacataagcagctccttggtggcaatgccgataccgaggtatggcgcctacacggccagcaaggcggcggtggagatgatgacgagaatcctggcgcaggagttgagaggcactcagattactgcaaattgtgtggccccaggccctgttgccaccgatatgttcttcgctggcaagagcgaggccgcagtggaagccggggtcaaatcgaatccctttgagcggttggggaaggtggaagatgtagctccgctcgttgcgttcttggcgagtgacgaaggagagtgggttaatgctcaggttgttcgggtcaatggaggccaggtttga

SEQ ID NO: 118976 - protein, 271 aa, Picea abies
MATADEQEEEMRMRLPLPLGGRVAIVTGASRGIGREIALNMAEKGAKVVIHYSSNQHAAEEVASIINNKSPSSGDGVRAIVCKADVAEPSQVAQLFDTAEHAFGPLHIVVNNAGVTDSKYPTLAQTSDEEWDRIFQVNCKGAFLCSREAAKRVVRGGGGRIINISSSLVAMPIPRYGAYTASKAAVEMMTRILAQELRGTQITANCVAPGPVATDMFFAGKSEAAVEAGVKSNPFERLGKVEDVAPLVAFLASDEGEWVNAQVVRVNGGQV

SEQ ID NO: 118977 - DNA, 768 bp, Schizosaccharomyces pombe
  CDS (1)..(768)
atgacttctatgttttctcttaaaggtaaaaccactctcatcaccggtggttcaggcggtatcggattttcgattgctaaagcattcgctgccgctggatctaatgttggtcttttgtacggtcgtaacaaaaaggctcttgagtatgctgctgaattacgcgacaaacatggtgttcaagccaaggcttattcttgccccattgagaaccgtagtgctgtaattgaaaccaccaaccaggcagttgaggaattgggtggtcgtttggatgtaatgattgctaatgctggtattgcgattccccacttatccttggaagataagaatgaagacatctggaccaaggtcgtgggcataaacctgaacggtgcttattatactgcacaggctgctggccatcattttaagaagcaaggaaagggcagtttgatcttcacggctagtatgagtggtcacattgccaattggcctcaacaatgggcttcttatcatgctaccaaggctgctgtcaaacatctggctcgcgctcttgccgttgagtgggcccctttcgctcgtgtcaactccgtgtctcctggctacattgacacagatttgactctgtacgctgatgaaaacttgcgtaagaaatggaaggagtatactcctcaagcccgtattggtctacctgatgagcttcccggtgcttacttataccttgcttccgatgctagttcctactgcacaggtagtgacattattgttgacggtggttactgttctcgttaa

SEQ ID NO: 118978 - protein, 255 aa, Schizosaccharomyces pombe
MTSMFSLKGKTTLITGGSGGIGFSIAKAFAAAGSNVGLLYGRNKKALEYAAELRDKHGVQAKAYSCPIENRSAVIETTNQAVEELGGRLDVMIANAGIAIPHLSLEDKNEDIWTKVVGINLNGAYYTAQAAGHHFKKQGKGSLIFTASMSGHIANWPQQWASYHATKAAVKHLARALAVEWAPFARVNSVSPGYIDTDLTLYADENLRKKWKEYTPQARIGLPDELPGAYLYLASDASSYCTGSDIIVDGGYCSR

SEQ ID NO: 118979 - DNA, 792 bp, Escherichia coli; identical to SEQ ID NO: 59672
  CDS (1)..(792): transl_table=11

SEQ ID NO: 118980 - protein, 263 aa, Escherichia coli; identical to SEQ ID NO: 59673

SEQ ID NO: 118981 - DNA, 816 bp, Oryza sativa
  CDS (1)..(816)
atggccgcggctgcggagacctcggcgaaggtgggggcgccgagaagatggtctcttcaagggaagacggcgctcgtcaccggcggcacccgcggaatcgggcgtgcggtggtggaggagctggcggcgctgggggccaccgtgcacacatgctcccggaaggaggaggagctgagcgagcgcctcaaggagtgggaggcccggggattccgcgtcaccacctccgtctgcgatctctcggttcgggaccagcgtgagcgcctcctccgccaagtcgctgacctcttcggcggcaagctcgatatcctcgtaaacaatgtggggacaaacataaggaagccaaccactgaattttctgccgaggaatactcttttatgatggcgactaatcttgaatctgcgtatcatctgtgccaactttcgcatcctcttctgaaagcatctgggtcagggagcattgttttcatatcatcagtctgtggattggtagctgtatttagtggttctctctatgctatgacaaaaggtgcaatcaaccaattaaccaagaacctagcatgcgaatgggcgagagacaacatacgatccaactctattgccccgtggtatatcaggacttcacttaccgaaggacttttggcaaataaggactttgaaggtgctgtggtgagccgaactccacttaggcgtgttggagaacctgaagaagtatcatcgctggttgcttttctttgcatgcctggttccagttacattactggccagacgatctcggttgatggaggtatgaccattaatggactctatccaagttaa

SEQ ID NO: 118982 - protein, 271 aa, Oryza sativa
MAAAAETSAKVGAPRRWSLQGKTALVTGGTRGIGRAVVEELAALGATVHTCSRKEEELSERLKEWEARGFRVTTSVCDLSVRDQRERLLRQVADLFGGKLDILVNNVGTNIRKPTTEFSAEEYSFMMATNLESAYHLCQLSHPLLKASGSGSIVFISSVCGLVAVFSGSLYAMTKGAINQLTKNLACEWARDNIRSNSIAPWYIRTSLTEGLLANKDFEGAVVSRTPLRRVGEPEEVSSLVAFLCMPGSSYITGQTISVDGGMTINGLYPS

SEQ ID NO: 118983 - DNA, 831 bp, Oryza sativa; identical to SEQ ID NO: 59688
  CDS (1)..(831)

SEQ ID NO: 118984 - protein, 276 aa, Oryza sativa; identical to SEQ ID NO: 59689

SEQ ID NO: 118985 - DNA, 846 bp, Oryza sativa; identical to SEQ ID NO: 59690
  CDS (1)..(846)

SEQ ID NO: 118986 - protein, 281 aa, Oryza sativa; identical to SEQ ID NO: 59691

SEQ ID NO: 118987 - DNA, 786 bp, Oryza sativa; identical to SEQ ID NO: 59698
  CDS (1)..(786)

SEQ ID NO: 118988 - protein, 261 aa, Oryza sativa; identical to SEQ ID NO: 59699

SEQ ID NO: 118989 - DNA, 798 bp, Oryza sativa; identical to SEQ ID NO: 59700
  CDS (1)..(798)

SEQ ID NO: 118990 - protein, 265 aa, Oryza sativa; identical to SEQ ID NO: 59701

SEQ ID NO: 118991 - DNA, 798 bp, Oryza sativa; identical to SEQ ID NO: 59702
  CDS (1)..(798)

SEQ ID NO: 118992 - protein, 265 aa, Oryza sativa; identical to SEQ ID NO: 59703

SEQ ID NO: 118993 - DNA, 762 bp, Oryza sativa
  CDS (1)..(762)
atggaggtgaagtgccgtcggctggaggggaaggtagccgtcgtgacggcctccacgcagggcatcggtctcgccatcgccgagcgcctcggcctcgagggcgccgccgtcgtcatctcctcccgcaagaagaagaacgtcgacgaggcggtcgtgggcctcagggcgaaggggatcaccgtcgtcggggtggtctgccatgtctccatcccggagcagcgcaagaacctcatcgacacggcggtcaagaattttgggcatatcgacatagttgtctccaatgctgctgccaatccttccgtagataacatattagaaatgaaagagcctatccttgacaaactatgggatattaatgttaaggcatctattcttcttcttcaggatgctgctgcatatttgcggaagggatcatccgtgatattgatttcttcaattactggctataatccagaaccagcattgtcgatgtatgctgttacaaaaactgccctgcttggtctcacaaaggctcttgctgctgagatggggccaaatactcgtgttaactgtatagcccctggttttgttcctacaaattttgctcgtttcctcacaactaatgacaccattaaaaatgagcttattgacaggagcacacttaagagattgggtactgtggaagacatggctgcagccgcagctttcttggcatcagacgatgcatcattcattacagctgaaactattgttgttgctggaggaactcgatctaggctgtag

SEQ ID NO: 118994 - protein, 253 aa, Oryza sativa
MEVKCRRLEGKVAVVTASTQGIGLAIAERLGLEGAAVVISSRKKKNVDEAVVGLRAKGITVVGVVCHVSIPEQRKNLIDTAVKNFGHIDIVVSNAAANPSVDNILEMKEPILDKLWDINVKASILLLQDAAAYLRKGSSVILISSITGYNPEPALSMYAVTKTALLGLTKALAAEMGPNTRVNCIAPGFVPTNFARFLTTNDTIKNELIDRSTLKRLGTVEDMAAAAAFLASDDASFITAETIVVAGGTRSRL

SEQ ID NO: 118995 - DNA, 795 bp, Oryza sativa; identical to SEQ ID NO: 59398
  CDS (1)..(795)

SEQ ID NO: 118996 - protein, 264 aa, Oryza sativa; identical to SEQ ID NO: 59399

SEQ ID NO: 118997 - DNA, 783 bp, Oryza sativa; identical to SEQ ID NO: 59716
  CDS (1)..(783)

SEQ ID NO: 118998 - protein, 260 aa, Oryza sativa; identical to SEQ ID NO: 59717

SEQ ID NO: 118999 - DNA, 807 bp, Oryza sativa; identical to SEQ ID NO: 59402
  CDS (1)..(807)

SEQ ID NO: 119000 - protein, 268 aa, Oryza sativa; identical to SEQ ID NO: 59403

SEQ ID NO: 119001 - DNA, 855 bp, Brassica napus; identical to SEQ ID NO: 59722
  CDS (1)..(855)

SEQ ID NO: 119002 - protein, 284 aa, Brassica napus; identical to SEQ ID NO: 59723

SEQ ID NO: 119003 - DNA, 801 bp, Brassica napus
  CDS (1)..(801)
atggctggagaagagcaaagacgtagatggagccttcaaggcaagaccgcacttgtcaccggtggaaccaaaggcattgggcatgctatagtagaggaacttgcaggatttggggtgataatacatacatgtgctcgagacgaagcacatctcaacgagtgtttaagcaagtggaagaataaagggtttcaagtcactggttcagtctgtgacgtatcgtcctggaccgaaagagagaagctaatgcaaactgtgtactctttgtttgatgccaagctcagtatccttatcaacaatgctggcgcaatccggtcaaagccaacaatagagcatacggctgaggatttctcgttccacatttcgaccaacttggaatctgcgtatcattttagccagcttgcacatcctctgctcaaagcttcaggatgtggtaacatcgtgttcatatcctccatttctggggtcgtctcacttagcatcagctccatctacagtgccacaaaaggggcaatgaatcagctagcaaggaatttggcatgcgagtgggcgagcgacagcataagagctaattctgtagctcctacattcattgccactccactggttgataatgcgtttgatgatgaatttaaaaaagtggtagaatcaacaaatcccttggggcgcataggaaaaccagaggaggtagcatcggtggtggcatttctttgtatgcctgcagcttcttacataacgggtcagaccatttgcgttgatggaggtctttcggtcaatggcttctcgtatcagccacacgcttaa

SEQ ID NO: 119004 - protein, 266 aa, Brassica napus
MAGEEQRRRWSLQGKTALVTGGTKGIGHAIVEELAGFGVIIHTCARDEAHLNECLSKWKNKGFQVTGSVCDVSSWTEREKLMQTVYSLFDAKLSILINNAGAIRSKPTIEHTAEDFSFHISTNLESAYHFSQLAHPLLKASGCGNIVFISSISGVVSLSISSIYSATKGAMNQLARNLACEWASDSIRANSVAPTFIATPLVDNAFDDEFKKVVESTNPLGRIGKPEEVASVVAFLCMPAASYITGQTICVDGGLSVNGFSYQPHA

SEQ ID NO: 119005 - DNA, 789 bp, Brassica napus
  CDS (1)..(789)
atggatagccggtggagtcttcgaggtatgacaggtcttgtaaccggtggaaccaagggaattgggtatgcgatagtggaggaacttgctggttttggtgcaagagttcacacgtgtgccagagaccaaactctgcttgatgaatgcttaaatgaatggaaagccaaagggtatcaagtcactggctcagtctgtgatgtttcctctcgacctcagagagatgagttgatgaagactgtctcttctctattcagtggcaaactcaacatccttatcaacaatgttggtacccttacgtcaaagccggctacagagtttacagcacaagatttctcaagtcaaatagctaccaatttggagtctgcttatcatttatctcaattggcccatcctttacttaaggcatctggatttggtagcattgtgttcatgtcttcagtatgtggggttgtatcagccggtaccgtatccatatacagcttaacaaaaggaggcatgaatcaattggcaagaaacttggcatgtgaatgggcaagtgatggcataagggctaactctgtagctccttgggtgactagaactcctcttgcccaagatcgtcttgatgacaagaaatatgctgaagctatctgctcaagaaccccattaggccgtacgtgtgagccgagtgaggttgcctcgctggttacgtttctttgtctccctgcagcttcttatataacaggacaaaccatttttattgatggtggtctcactgttaatggcttctcctacaagccagaagtttaa

SEQ ID NO: 119006 - protein, 262 aa, Brassica napus
MDSRWSLRGMTGLVTGGTKGIGYAIVEELAGFGARVHTCARDQTLLDECLNEWKAKGYQVTGSVCDVSSRPQRDELMKTVSSLFSGKLNILINNVGTLTSKPATEFTAQDFSSQIATNLESAYHLSQLAHPLLKASGFGSIVFMSSVCGVVSAGTVSIYSLTKGGMNQLARNLACEWASDGIRANSVAPWVTRTPLAQDRLDDKKYAEAICSRTPLGRTCEPSEVASLVTFLCLPAASYITGQTIFIDGGLTVNGFSYKPEV

SEQ ID NO: 119007 - DNA, 786 bp, Brassica napus; identical to SEQ ID NO: 59724
  CDS (1)..(786)

SEQ ID NO: 119008 - protein, 261 aa, Brassica napus; identical to SEQ ID NO: 59725

SEQ ID NO: 119009 - DNA, 777 bp, Brassica napus; identical to SEQ ID NO: 59726
  CDS (1)..(777)

SEQ ID NO: 119010 - protein, 258 aa, Brassica napus; identical to SEQ ID NO: 59727

SEQ ID NO: 119011 - DNA, 816 bp, Glycine max; identical to SEQ ID NO: 59728
  CDS (1)..(816)

SEQ ID NO: 119012 - protein, 271 aa, Glycine max; identical to SEQ ID NO: 59729

SEQ ID NO: 119013 - DNA, 795 bp, Glycine max; identical to SEQ ID NO: 59730
  CDS (1)..(795)

SEQ ID NO: 119014 - protein, 264 aa, Glycine max; identical to SEQ ID NO: 59731

SEQ ID NO: 119015 - DNA, 852 bp, Glycine max; identical to SEQ ID NO: 59732
  CDS (1)..(852)

SEQ ID NO: 119016 - protein, 283 aa, Glycine max; identical to SEQ ID NO: 59733

SEQ ID NO: 119017 - DNA, 810 bp, Glycine max; identical to SEQ ID NO: 59734
  CDS (1)..(810)

SEQ ID NO: 119018 - protein, 269 aa, Glycine max; identical to SEQ ID NO: 59735

SEQ ID NO: 119019 - DNA, 810 bp, Glycine max; identical to SEQ ID NO: 59736
  CDS (1)..(810)

SEQ ID NO: 119020 - protein, 269 aa, Glycine max; identical to SEQ ID NO: 59737

SEQ ID NO: 119021 - DNA, 729 bp, Brassica napus
  CDS (1)..(729)
atgacgatagcgacgcctttcagcggggctgcgaactcggttacgtcggcgaaagtcgtgctgataacgggagtgagcaaaggtctgggaagagccttatctctcgagatggcgaagagaggccacactgtgattggatgcgcccgcactcaggagaagctcaccgctcttcaatcggagctctcctccccggaaaatcatctcctcctcaccgccgatgtgaaatcagatagcagcgtcaaagagatggcacacacaattatggagaagaaaggtgtcccagacatcatagttaacaatgccggtactatcaataagaacaacaagatttgggaagtctctgcagaagattttgacagtgtcatggatacaaacgttaaaggagtagtaaatgtactgcgacatttcatccctttgatgctcccacggaagcaagggattattgttaacatgtcttctggatggggaagatctggtgctgccctggttgcaccttactgtgcatcgaaatgggcgattgagggtttaagccgatcagtggcaaaggaggtagccgaaggaatggcagtggttgcattaaatccaggagtgatcaacacagaaatgctcacttcctgctttggcaacacagcttccttgtatcaagctcctgatgcttgggctgtgaaggctgcaacgatgattctgaaccttacagcgggtgataatggcggatctcttacggtctaa

SEQ ID NO: 119022 - protein, 242 aa, Brassica napus
MTIATPFSGAANSVTSAKVVLITGVSKGLGRALSLEMAKRGHTVIGCARTQEKLTALQSELSSPENHLLLTADVKSDSSVKEMAHTIMEKKGVPDIIVNNAGTINKNNKIWEVSAEDFDSVMDTNVKGVVNVLRHFIPLMLPRKQGIIVNMSSGWGRSGAALVAPYCASKWAIEGLSRSVAKEVAEGMAVVALNPGVINTEMLTSCFGNTASLYQAPDAWAVKAATMILNLTAGDNGGSLTV

SEQ ID NO: 119023 - DNA, 885 bp, Glycine max; identical to SEQ ID NO: 59738
  CDS (1)..(885)

SEQ ID NO: 119024 - protein, 294 aa, Glycine max; identical to SEQ ID NO: 59739

SEQ ID NO: 119025 - DNA, 915 bp, Triticum aestivum; identical to SEQ ID NO: 59740
  CDS (1)..(915)

SEQ ID NO: 119026 - protein, 304 aa, Triticum aestivum; identical to SEQ ID NO: 59741

SEQ ID NO: 119027 - DNA, 762 bp, Zea mays; identical to SEQ ID NO: 59742
  CDS (1)..(762)

SEQ ID NO: 119028 - protein, 253 aa, Zea mays; identical to SEQ ID NO: 59743

SEQ ID NO: 119029 - DNA, 804 bp, Glycine max; identical to SEQ ID NO: 59746
  CDS (1)..(804)

SEQ ID NO: 119030 - protein, 267 aa, Glycine max; identical to SEQ ID NO: 59747

SEQ ID NO: 119031 - DNA, 951 bp, Zea mays; identical to SEQ ID NO: 59748
  CDS (1)..(951)

SEQ ID NO: 119032 - protein, 316 aa, Zea mays; identical to SEQ ID NO: 59749

SEQ ID NO: 119033 - DNA, 969 bp, Linum usitatissimum; identical to SEQ ID NO: 59750
  CDS (1)..(969)

SEQ ID NO: 119034 - protein, 322 aa, Linum usitatissimum; identical to SEQ ID NO: 59751

SEQ ID NO: 119035 - DNA, 834 bp, Linum usitatissimum; identical to SEQ ID NO: 59752
  CDS (1)..(834)

SEQ ID NO: 119036 - protein, 277 aa, Linum usitatissimum; identical to SEQ ID NO: 59753

SEQ ID NO: 119037 - DNA, 870 bp, Linum usitatissimum; identical to SEQ ID NO: 59754
  CDS (1)..(870)

SEQ ID NO: 119038 - protein, 289 aa, Linum usitatissimum; identical to SEQ ID NO: 59755

SEQ ID NO: 119039 - DNA, 843 bp, Linum usitatissimum; identical to SEQ ID NO: 59756
  CDS (1)..(843)

SEQ ID NO: 119040 - protein, 280 aa, Linum usitatissimum; identical to SEQ ID NO: 59757

SEQ ID NO: 119041 - DNA, 819 bp, Hordeum vulgare; identical to SEQ ID NO: 59758
  CDS (1)..(819)

SEQ ID NO: 119042 - protein, 272 aa, Hordeum vulgare; identical to SEQ ID NO: 59759

SEQ ID NO: 119043 - DNA, 984 bp, Hordeum vulgare
  CDS (1)..(984)
atgctcctcctcctcgctttcctcgccgccgccgccgccgccgccttcttcctcttcaagttcgtcaccgccgatggggatttcaccctcttgtcgtgcggccggccgcggcgggacaaagtggacggcaaggttgtgtggataacgggagcgagccgtgggattggggaggttctttcgatgcagtttgcgagtttaggagcaaagctcatactatctgcacgtaacaaggaggagcttgagagagtgaaacataacatcatgagcaagcatccagatagcaaagttgaagtgttacccatggatttatcatctgatgaaaaatctctgaaagaagttgtacattcagcggaatctctcttttccagtgctggcattgactatatgatgcacaatgcagcctttgagcgtccaaaaaggggagccctggaagaaaccgaggaaggtcttaaggctacttttaaggtcaatgtctttggaacaattactttgactcgccttcttgcacccttcatgttggatagagggatgggtcattttgttgtgatgagtagtgcagctggaaaggtgcccacacctggtcaggctctttactctgcttccaaacatgctctcaatgggtactttgcttctctgcgttctgagttatgtacgaaaggcattaaggtcactgttgtctgtcctggacctattgaaacaccagaatcttctggtgcaacttcttcatcacaaaggcattcgtccgagaaacgtgtttcagtggaaagatgtgctgaactgacaatagttgccgcaactcatggactaaaagaagcatggatatcatatcagcctgtgctggctgttatgtacgtggtgcaatacatgccaacaattggatgctggcttatggataaggttggtgcgaagcgagttgatgccgctgcaaagaaaggcaacgcctacagctggaatctcctcttcggtggcaaaaagtcggcttga

SEQ ID NO: 119044 - protein, 327 aa, Hordeum vulgare
MLLLLAFLAAAAAAAFFLFKFVTADGDFTLLSCGRPRRDKVDGKVVWITGASRGIGEVLSMQFASLGAKLILSARNKEELERVKHNIMSKHPDSKVEVLPMDLSSDEKSLKEVVHSAESLFSSAGIDYMMHNAAFERPKRGALEETEEGLKATFKVNVFGTITLTRLLAPFMLDRGMGHFVVMSSAAGKVPTPGQALYSASKHALNGYFASLRSELCTKGIKVTVVCPGPIETPESSGATSSSQRHSSEKRVSVERCAELTIVAATHGLKEAWISYQPVLAVMYVVQYMPTIGCWLMDKVGAKRVDAAAKKGNAYSWNLLFGGKKSA

SEQ ID NO: 119045 - DNA, 789 bp, Hordeum vulgare; identical to SEQ ID NO: 40605
  CDS (1)..(789)

SEQ ID NO: 119046 - protein, 262 aa, Hordeum vulgare; identical to SEQ ID NO: 40606

SEQ ID NO: 119047 - DNA, 762 bp, Zea mays; identical to SEQ ID NO: 59762
  CDS (1)..(762)

SEQ ID NO: 119048 - protein, 253 aa, Zea mays; identical to SEQ ID NO: 59763

SEQ ID NO: 119049 - DNA, 792 bp, Brassica napus; identical to SEQ ID NO: 59766
  CDS (1)..(792)

SEQ ID NO: 119050 - protein, 263 aa, Brassica napus; identical to SEQ ID NO: 59767

SEQ ID NO: 119051 - DNA, 849 bp, Brassica napus; identical to SEQ ID NO: 59768
  CDS (1)..(849)

SEQ ID NO: 119052 - protein, 282 aa, Brassica napus; identical to SEQ ID NO: 59769

SEQ ID NO: 119053 - DNA, 849 bp, Brassica napus; identical to SEQ ID NO: 59770
  CDS (1)..(849)

SEQ ID NO: 119054 - protein, 282 aa, Brassica napus; identical to SEQ ID NO: 59771

SEQ ID NO: 119055 - DNA, 960 bp, Brassica napus; identical to SEQ ID NO: 59772
  CDS (1)..(960)

SEQ ID NO: 119056 - protein, 319 aa, Brassica napus; identical to SEQ ID NO: 59773

SEQ ID NO: 119057 - DNA, 849 bp, Brassica napus; identical to SEQ ID NO: 59774
  CDS (1)..(849)

SEQ ID NO: 119058 - protein, 282 aa, Brassica napus; identical to SEQ ID NO: 59775

SEQ ID NO: 119059 - DNA, 789 bp, Brassica napus
  CDS (1)..(789)
atggataaaagatggagccttcaagggatgaccgcccttgtaaacggtggagccagcggaatcgggtatgccatagtagaagagttagctagttttggagctagaatccacgtatgcgacatctctgaaacatttctcaatcaaagcttaagcgaatgggaaaagaaagggtttcaagtgagtggctcaatctgtgatgtaacctctcgtccccagagagaaacattaatacaaaaagtctccgcgctattcgatggcaaactcaacattcttgtgaacaatgtgggagtacttcgtggaaagccaacaacagaatatgcgaaagaggatttcaatttccacatctcaacaaacttagaacctgctttcaatttttcccagctttcacatcctctactaaaggcttcaggctatggaagcatcatcttcatttcctctgttgcaggaattgtatcatttgactgtggatccatttatagtctagcaaaaggagctctgaatcagctagcaagaaatttggcatgtgaatgggcaaaagacggcataagagccaacgctgttgcccctaatgctatcaggactcctctgtctcaacaatatcttgatgacgtcagtttcaaggaggaattgttcagtagaactccacttggtcgcgctggagagccaaatgaagttgcatcactagtggcattcttgtgtctacctgcggcttcttatataactggtcaaaccatttgtgttgatggaggcctcactgttaacggtttctcctatcaaccacatgcttga

SEQ ID NO: 119060 - protein, 262 aa, Brassica napus
MDKRWSLQGMTALVNGGASGIGYAIVEELASFGARIHVCDISETFLNQSLSEWEKKGFQVSGSICDVTSRPQRETLIQKVSALFDGKLNILVNNVGVLRGKPTTEYAKEDFNFHISTNLEPAFNFSQLSHPLLKASGYGSIIFISSVAGIVSFDCGSIYSLAKGALNQLARNLACEWAKDGIRANAVAPNAIRTPLSQQYLDDVSFKEELFSRTPLGRAGEPNEVASLVAFLCLPAASYITGQTICVDGGLTVNGFSYQPHA

SEQ ID NO: 119061 - DNA, 903 bp, Brassica napus; identical to SEQ ID NO: 59776
  CDS (1)..(903)

SEQ ID NO: 119062 - protein, 300 aa, Brassica napus; identical to SEQ ID NO: 59777

SEQ ID NO: 119063 - DNA, 858 bp, Brassica napus; identical to SEQ ID NO: 59778
  CDS (1)..(858)

SEQ ID NO: 119064 - protein, 285 aa, Brassica napus; identical to SEQ ID NO: 59779

SEQ ID NO: 119065 - DNA, 858 bp, Brassica napus
  CDS (1)..(858)
atgagcagcaatcatcagactgtgatgaagcaactagagccatggtgcgagctcaaagacaaagtggttctcctaacaggagcttcatccggcatcggaagagagatctgcctcgatctagccaaatccggctgcaagatcatcgcagcagctcgtcgtctcgaccgtctccaatccctctgctccgagatcaacgccttattctccccaacaaaaaccaaacaagccgcacctctcgagctagacgtctcctcagactcatccaccatccgaaacgcagtcaaacaagcttgggacatcttcggaaacatcgacgtcttgatcaacaacgcaggcatcagaggcaacgtcaagtcgagtctggacctatccgaagaagaatgggaaagagtcttcagaacaaacctaaccggaccttggctagtatcaaaacacgtctgcgttctgatgcgcgacgccaaacgccgcggcggaggatcggtgataaacgtttcctccatcgcggggcttcagcgcgggaagctacccggcgcgttggcgtacgcgtgttcgaaaggaggtcttgatattatgacgaagatgatggcggttgagctgggtgagtatggtataagagtgaactcgatagctccggggctgtttaagtcggagatcacggaaggtctggtgaggaaagagtggatgaagaatgtgaggaagaggattgttccgttgaaggtgcagcagactgtggacccggggcttacctcgctggttaggtatctgattccccactcttccaggtatgtctctcgcaatgtttacattgttgacgcgggtgctacattgtctggtctaacgattttttcttcactttga

SEQ ID NO: 119066 - protein, 285 aa, Brassica napus
MSSNHQTVMKQLEPWCELKDKVVLLTGASSGIGREICLDLAKSGCKIIAAARRLDRLQSLCSEINALFSPTKTKQAAPLELDVSSDSSTIRNAVKQAWDIFGNIDVLINNAGIRGNVKSSLDLSEEEWERVFRTNLTGPWLVSKHVCVLMRDAKRRGGGSVINVSSIAGLQRGKLPGALAYACSKGGLDIMTKMMAVELGEYGIRVNSIAPGLFKSEITEGLVRKEWMKNVRKRIVPLKVQQTVDPGLTSLVRYLIPHSSRYVSRNVYIVDAGATLSGLTIFSSL

SEQ ID NO: 119067 - DNA, 798 bp, Glycine max; identical to SEQ ID NO: 59780
  CDS (1)..(798)

SEQ ID NO: 119068 - protein, 265 aa, Glycine max; identical to SEQ ID NO: 59781

SEQ ID NO: 119069 - DNA, 882 bp, Glycine max; identical to SEQ ID NO: 40611
  CDS (1)..(882)

SEQ ID NO: 119070 - protein, 293 aa, Glycine max; identical to SEQ ID NO: 40612

SEQ ID NO: 119071 - DNA, 849 bp, Glycine max; identical to SEQ ID NO: 59784
  CDS (1)..(849)

SEQ ID NO: 119072 - protein, 282 aa, Glycine max; identical to SEQ ID NO: 59785

SEQ ID NO: 119073 - DNA, 759 bp, Glycine max; identical to SEQ ID NO: 59788
  CDS (1)..(759)

SEQ ID NO: 119074 - protein, 252 aa, Glycine max; identical to SEQ ID NO: 59789

SEQ ID NO: 119075 - DNA, 810 bp, Glycine max; identical to SEQ ID NO: 59790
  CDS (1)..(810)

SEQ ID NO: 119076 - protein, 269 aa, Glycine max; identical to SEQ ID NO: 59791

SEQ ID NO: 119077 - DNA, 768 bp, Glycine max; identical to SEQ ID NO: 59792
  CDS (1)..(768)

SEQ ID NO: 119078 - protein, 255 aa, Glycine max; identical to SEQ ID NO: 59793

SEQ ID NO: 119079 - DNA, 804 bp, Glycine max; identical to SEQ ID NO: 40615
  CDS (1)..(804)

SEQ ID NO: 119080 - protein, 267 aa, Glycine max; identical to SEQ ID NO: 40616

SEQ ID NO: 119081 - DNA, 804 bp, Glycine max; identical to SEQ ID NO: 59796
  CDS (1)..(804)

SEQ ID NO: 119082 - protein, 267 aa, Glycine max; identical to SEQ ID NO: 59797

SEQ ID NO: 119083 - DNA, 843 bp, Glycine max; identical to SEQ ID NO: 59798
  CDS (1)..(843)

SEQ ID NO: 119084 - protein, 280 aa, Glycine max; identical to SEQ ID NO: 59799

SEQ ID NO: 119085 - DNA, 882 bp, Glycine max; identical to SEQ ID NO: 40617
  CDS (1)..(882)

SEQ ID NO: 119086 - protein, 293 aa, Glycine max; identical to SEQ ID NO: 40618

SEQ ID NO: 119087 - DNA, 795 bp, Glycine max; identical to SEQ ID NO: 59802
  CDS (1)..(795)

SEQ ID NO: 119088 - protein, 264 aa, Glycine max; identical to SEQ ID NO: 59803

SEQ ID NO: 119089 - DNA, 822 bp, Glycine max; identical to SEQ ID NO: 59804
  CDS (1)..(822)

SEQ ID NO: 119090 - protein, 273 aa, Glycine max; identical to SEQ ID NO: 59805

SEQ ID NO: 119091 - DNA, 963 bp, Glycine max; identical to SEQ ID NO: 40619
  CDS (1)..(963)

SEQ ID NO: 119092 - protein, 320 aa, Glycine max; identical to SEQ ID NO: 40620

SEQ ID NO: 119093 - DNA, 828 bp, Glycine max; identical to SEQ ID NO: 59808
  CDS (1)..(828)

SEQ ID NO: 119094 - protein, 275 aa, Glycine max; identical to SEQ ID NO: 59809

SEQ ID NO: 119095 - DNA, 963 bp, Glycine max; identical to SEQ ID NO: 40621
  CDS (1)..(963)

SEQ ID NO: 119096 - protein, 320 aa, Glycine max; identical to SEQ ID NO: 40622

SEQ ID NO: 119097 - DNA, 819 bp, Glycine max; identical to SEQ ID NO: 59812
  CDS (1)..(819)

SEQ ID NO: 119098 - protein, 272 aa, Glycine max; identical to SEQ ID NO: 59813

SEQ ID NO: 119099 - DNA, 816 bp, Glycine max; identical to SEQ ID NO: 59814
  CDS (1)..(816)

SEQ ID NO: 119100 - protein, 271 aa, Glycine max; identical to SEQ ID NO: 59815

SEQ ID NO: 119101 - DNA, 864 bp, Glycine max; identical to SEQ ID NO: 59816
  CDS (1)..(864)

SEQ ID NO: 119102 - protein, 287 aa, Glycine max; identical to SEQ ID NO: 59817

SEQ ID NO: 119103 - DNA, 849 bp, Glycine max; identical to SEQ ID NO: 59818
  CDS (1)..(849)

SEQ ID NO: 119104 - protein, 282 aa, Glycine max; identical to SEQ ID NO: 59819

SEQ ID NO: 119105 - DNA, 843 bp, Zea mays; identical to SEQ ID NO: 59822
  CDS (1)..(843)

SEQ ID NO: 119106 - protein, 280 aa, Zea mays; identical to SEQ ID NO: 59823

SEQ ID NO: 119107 - DNA, 762 bp, Zea mays; identical to SEQ ID NO: 59824
  CDS (1)..(762)

SEQ ID NO: 119108 - protein, 253 aa, Zea mays; identical to SEQ ID NO: 59825

SEQ ID NO: 119109 - DNA, 939 bp, Zea mays; identical to SEQ ID NO: 59826
  CDS (1)..(939)

SEQ ID NO: 119110 - protein, 312 aa, Zea mays; identical to SEQ ID NO: 59827

SEQ ID NO: 119111 - DNA, 957 bp, Zea mays; identical to SEQ ID NO: 59830
  CDS (1)..(957)

SEQ ID NO: 119112 - protein, 318 aa, Zea mays; identical to SEQ ID NO: 59831

SEQ ID NO: 119113 - DNA, 939 bp, Zea mays; identical to SEQ ID NO: 59832
  CDS (1)..(939)

SEQ ID NO: 119114 - protein, 312 aa, Zea mays; identical to SEQ ID NO: 59833

SEQ ID NO: 119115 - DNA, 915 bp, Zea mays; identical to SEQ ID NO: 40627
  CDS (1)..(915)

SEQ ID NO: 119116 - protein, 304 aa, Zea mays; identical to SEQ ID NO: 40628

SEQ ID NO: 119117 - DNA, 843 bp, Zea mays; identical to SEQ ID NO: 59836
  CDS (1)..(843)

SEQ ID NO: 119118 - protein, 280 aa, Zea mays; identical to SEQ ID NO: 59837

SEQ ID NO: 119119 - DNA, 813 bp, Zea mays
  CDS (1)..(813)
atgactgcagaaactctctcacttgaaggcaagactgccttgatcactggctcgggcagagaaaatggcattggcgctgccatcgccagagcttttgcccggaacggtgcagctgttgcaatccactatgtctcggagagctccaaggtgcgggctgagaaggttgcagcagacattagtcgggagtttggaaccaaaactaccgttgtacaaggggcggtggagaaagctagcaatgcgacgaagatagtcaaagaaaccttggaaggacttggcgcttcccacattgacattctcgtgaataacgctggatatggaaatcctaaaagtctcttggaggcaacgccagaattgctcgaagccgaattcgggatcaatgtctttggctcagtttacctaacacaagctgtcattggaatagggaaaatgcctagaggcgggcgtataatcaatgtcggctctatttcctcaaaacttggtcctgaagtcagtgcagtctacggcgcatcaaaggctgcgcaagatagtctcacggcatcctgggctggccagcttggccgtagccgcggaattaccgttaacacccttgccccggggccaatcctaaccgacatggcgaaaccgttcttggaggcaaaggaaggagcttcagctgatttgttgaaagcggtagaggcgcagacgcgagctgaggcacgaattgggacagttgaggacatggccgacgctgcgttgctcctagtttcggagaagagccgctggcttaccgcccaatggatctcggtcagcggtggggtcacaggaactatgtaa

SEQ ID NO: 119120 - protein, 270 aa, Zea mays
MTAETLSLEGKTALITGSGRENGIGAAIARAFARNGAAVAIHYVSESSKVRAEKVAADISREFGTKTTVVQGAVEKASNATKIVKETLEGLGASHIDILVNNAGYGNPKSLLEATPELLEAEFGINVFGSVYLTQAVIGIGKMPRGGRIINVGSISSKLGPEVSAVYGASKAAQDSLTASWAGQLGRSRGITVNTLAPGPILTDMAKPFLEAKEGASADLLKAVEAQTRAEARIGTVEDMADAALLLVSEKSRWLTAQWISVSGGVTGTM

SEQ ID NO: 119121 - DNA, 855 bp, Zea mays
  CDS (1)..(855)
atggcagcatcccgcagcgaggaacgtgatcagaatcagccagtggtgcttgtgacggggtgctcggagggcggcatcggccacgcgatggcgcgcgccttcgctgcggccgggtgcgccgtcgtggccacggcgcggtcacgcggttccatgcgcggtctcgacggcgacccgcggttcctgctgctggagctcgacgtgcgctccgacgagagcgcgcgcgccgccgtggcgggtgcgctgcgggagcacggccgcatcgacgtgctcgtcaacaacgctggggttcacctcgtcgcaccactcgccgaggtgcccatggagtccttccaccaggttttcgacaccaatgtctatggtgcaatgaggttgattcaagctgttattcctcacatgatggaaagaaggaaaggaacaattgtgaatgttggaagtattaccgctctggcacctggaccatgggctggtgtgtattcagcatccaaagctgctcttcatgcattgagtgactcgttaagggttgaactaagaagcttcggcataaacgtgatgactgtcgccccaggagggacgaggtcgaatcttgggaattcttctgcagccaagtatgatcagatgcacgagtggaagtactacaagaaatacgaggaagggctccgagccaggactggcatttcccagggccccaggtccactccagcagaagagcttgcaaaggcggtggttgcatcggttctaaggaagaaccctccagcttggttcgcttacggccagtactctgccattctgtcgattttgtattatgcaccgctatggtttagagattacctctataagtttgtcatgaaatgttag

SEQ ID NO: 119122 - protein, 284 aa, Zea mays
MAASRSEERDQNQPVVLVTGCSEGGIGHAMARAFAAAGCAVVATARSRGSMRGLDGDPRFLLLELDVRSDESARAAVAGALREHGRIDVLVNNAGVHLVAPLAEVPMESFHQVFDTNVYGAMRLIQAVIPHMMERRKGTIVNVGSITALAPGPWAGVYSASKAALHALSDSLRVELRSFGINVMTVAPGGTRSNLGNSSAAKYDQMHEWKYYKKYEEGLRARTGISQGPRSTPAEELAKAVVASVLRKNPPAWFAYGQYSAILSILYYAPLWFRDYLYKFVMKC

SEQ ID NO: 119123 - DNA, 762 bp, Zea mays; identical to SEQ ID NO: 59838
  CDS (1)..(762)

SEQ ID NO: 119124 - protein, 253 aa, Zea mays; identical to SEQ ID NO: 59839

SEQ ID NO: 119125 - DNA, 822 bp, Zea mays; identical to SEQ ID NO: 59840
  CDS (1)..(822)

SEQ ID NO: 119126 - protein, 273 aa, Zea mays; identical to SEQ ID NO: 59841

SEQ ID NO: 119127 - DNA, 792 bp, Zea mays; identical to SEQ ID NO: 40631
  CDS (1)..(792)

SEQ ID NO: 119128 - protein, 263 aa, Zea mays; identical to SEQ ID NO: 40632

SEQ ID NO: 119129 - DNA, 957 bp, Zea mays; identical to SEQ ID NO: 59844
  CDS (1)..(957)

SEQ ID NO: 119130 - protein, 318 aa, Zea mays; identical to SEQ ID NO: 59845

SEQ ID NO: 119131 - DNA, 25 bp, Artificial sequence
  primer
atgaattttgaaggaaaaatcgcac

SEQ ID NO: 119132 - DNA, 24 bp, Artificial sequence
  primer
ttagaccatgtacatcccgccgtt

SEQ ID NO: 119133 - protein, 305 aa, Artificial sequence
  consensus sequence
  Variant (4)..(6): Xaa in position 4 to 6 is any amino acid
  Variant (7)..(8): Xaa in position 7 to 8 is any or no amino acid
  Variant (12)..(19): Xaa in position 12 to 19 is any amino acid
  Variant (20)..(21): Xaa in position 20 to 21 is any or no amino acid
  Variant (23)..(69): Xaa in position 23 to 69 is any amino acid
  Variant (70)..(95): Xaa in position 70 to 95 is any or no amino acid
  Variant (100)..(115): Xaa in position 100 to 115 is any amino acid
  Variant (116)..(126): Xaa in position 116 to 126 is any or no amino acid
  Variant (128)..(143): Xaa in position 128 to 143 is any amino acid
  Variant (144)..(159): Xaa in position 144 to 159 is any or no amino acid
  Variant (161)..(162): Xaa in position 161 to 162 is any amino acid
  Variant (163)..(164): Xaa in position 163 to 164 is any or no amino acid
  Variant (166)..(176): Xaa in position 166 to 176 is any amino acid
  Variant (177)..(179): Xaa in position 177 to 179 is any or no amino acid
  Variant (181)..(183): Xaa in position 181 to 183 is any amino acid
  Variant (185)..(194): Xaa in position 185 to 194 is any amino acid
  Variant (196)..(196): Xaa in position 196 is any amino acid
  Variant (198)..(204): Xaa in position 198 to 204 is any amino acid
  Variant (205)..(207): Xaa in position 205 to 207 is any or no amino acid
  Variant (209)..(211): Xaa in position 209 to 211 is any amino acid
  Variant (214)..(214): Xaa in position 214 is any amino acid
  Variant (215)..(216): Xaa in position 215 to 216 is any or no amino acid
  Variant (218)..(231): Xaa in position 218 to 231 is any amino acid
  Variant (232)..(254): Xaa in position 232 to 254 is any or no amino acid
  Variant (256)..(259): Xaa in position 256 to 259 is any amino acid
  Variant (260)..(269): Xaa in position 260 to 269 is any or no amino acid
  Variant (271)..(273): Xaa in position 271 to 273 is any amino acid
  Variant (274)..(275): Xaa in position 274 to 275 is any or no amino acid
  Variant (277)..(283): Xaa in position 277 to 283 is any amino acid
  Variant (284)..(286): Xaa in position 284 to 286 is any or no amino acid
  Variant (288)..(290): Xaa in position 288 to 290 is any amino acid
  Variant (291)..(303): Xaa in position 291 to 303 is any or no amino acid
VTGXXXXXGIGXXXXXXXXXXGXXXXXXXXXXXXXXXXXXXXXXXXXXXXXXXXXXXXXXXXXXXXXXXXXXXXXXXXXXXXXXXXXXXXXXXXXNNAGXXXXXXXXXXXXXXXXXXXXXXXXXXXNXXXXXXXXXXXXXXXXXXXXXXXXXXXXXXXXIXXXXSXXXXXXXXXXXXXXYXXXKXXXXXXXXXXAXEXXXXXXXXXXNXXXPGXXXTXXXXXXXXXXXXXXXXXXXXXXXXXXXXXXXXXXXXXRXXXXXXXXXXXXXXAXXXXXLXXXXXXXXXXGXXXXXXXXXXXXXXXXGG

SEQ ID NO: 119134 - protein, 23 aa, Artificial sequence
  protein pattern
  Variant (2)..(4): Xaa in position 2 to 4 is any or no amino acid
  Variant (7)..(7): Xaa in position 7 is Ala, Gly or Ser
  Variant (8)..(8): Xaa in position 8 is Ala, Asp, Gly, Asn, Ser or Thr
  Variant (9)..(9): Xaa in position 9 is any amino acid
  Variant (11)..(11): Xaa in position 11 is Ile, Leu or Val
  Variant (13)..(22): Xaa in position 13 to 22 is any amino acid
VXXXTGXXXGXGXXXXXXXXXXG

SEQ ID NO: 119135 - DNA, 408 bp, Escherichia coli
  CDS (1)..(408): transl_table=11
atgtcgccgagcgactgttttacttcttcagtccgttgctgtaaaacgtcgccaacagaggttaaacaggtagtaactatggatatggatctaaacaatcgcctgactgaagatgaaacgcttgaacaggcctacgatatttttctcgaactggctgccgacaatctcgatccagctgatgttctgctgttcaatcttcagtttgaagagcgcggcggcgcggagttattcgatccggcggaagactggcaggaacatgttgatttcgatttgaacccggacttttttgccgaagtggtgattggtctggcggacagtgaagatggtgaaatcaacgatgtttttgcccgcattctgttatgccgcgaaaaagatcacaaactttgccatatcatctggcgggaataa

SEQ ID NO: 119136 - protein, 135 aa, Escherichia coli
MSPSDCFTSSVRCCKTSPTEVKQVVTMDMDLNNRLTEDETLEQAYDIFLELAADNLDPADVLLFNLQFEERGGAELFDPAEDWQEHVDFDLNPDFFAEVVIGLADSEDGEINDVFARILLCREKDHKLCHIIWRE

SEQ ID NO: 119137 - DNA, 336 bp, Escherichia coli O157:H7 EDL933
  CDS (1)..(336): transl_table=11
gtgactatggatatggatctaaacaatcgcctgactgaagatgaaacgcttgagcaggcctacgatatttttctcgaactggctgccgacaatctcgatccagctgatgttctgctgttcaatcttcagtttgaagagcgcggcggcgcggagttattcgatccggcggaagactggcaggaacatgttgatttcgatttgaacccagacttttttgccgaagttgtgattggtctggcggacagtgaagatggtgaaatcaacgatgttttcgcccgcattctgttatgccgcgaaaaagatcacaaactttgccatatcatctggcgggaataa

SEQ ID NO: 119138 - protein, 111 aa, Escherichia coli O157:H7 EDL933
MTMDMDLNNRLTEDETLEQAYDIFLELAADNLDPADVLLFNLQFEERGGAELFDPAEDWQEHVDFDLNPDFFAEVVIGLADSEDGEINDVFARILLCREKDHKLCHIIWRE

SEQ ID NO: 119139 - DNA, 375 bp, Yersinia pestis KIM
  CDS (1)..(375): transl_table=11
atgataaatgggaatctgcacatggaccagaacacacaagagccaagctcgatggatctcaataatcgcctcactgaagatgaaacactggaacaggcatacgatatttttctggaactcgcgggggataacctcgatccagccgatattctattgtttaatcttcagtttgaagagcgcggtggtgctgagttgtttgatccggcggaagattggcaggagcatgtcgattttgacataaatcctgactttttcgctgaagttgttatcggtttagccgacagtgatggtgaggaaattaacgatatttttgcccgagtactgctgtgccgagagaaagatcacaagctttgccacatattatggaaagaataa

SEQ ID NO: 119140 - protein, 124 aa, Yersinia pestis KIM
MINGNLHMDQNTQEPSSMDLNNRLTEDETLEQAYDIFLELAGDNLDPADILLFNLQFEERGGAELFDPAEDWQEHVDFDINPDFFAEVVIGLADSDGEEINDIFARVLLCREKDHKLCHILWKE

SEQ ID NO: 119141 - DNA, 408 bp, Shigella flexneri 2a str. 301
  CDS (1)..(408): transl_table=11
gtgtcgccgagcgactgttttacttcttcagcccgttgctgtaaaacgtcgccaacagaggttaaacaggtagtgactatggatatggatctaaacaatcgcctgactgaagatgaaacgcttgagcaggcctacgatatttttctcgaactggctgccgacaatctcgatccagctgatgttctgctgttcaatcttcagtttgaagagcgcggcggcgcggagttattcgatccggcggaagactggcaggaacatgttgatttcgatttgaacccggacttttttgccgaagtggtgattggtctgacggacagtgaagatggtgaaatcagcgatgttttcgcccgcattctgttatgccgcgaaaaagatcacaaactttgccatatcatctggcgggaataa

SEQ ID NO: 119142 - protein, 135 aa, Shigella flexneri 2a str. 301
MSPSDCFTSSARCCKTSPTEVKQVVTMDMDLNNRLTEDETLEQAYDIFLELAADNLDPADVLLFNLQFEERGGAELFDPAEDWQEHVDFDLNPDFFAEVVIGLTDSEDGEISDVFARILLCREKDHKLCHIIWRE

SEQ ID NO: 119143 - DNA, 408 bp, Shigella flexneri 2a str. 2457T
  CDS (1)..(408): transl_table=11
gtgtcgccgagcgactgttttacttcttcagcccgttgctgtaaaacgtcgccaacagaggttaaacaggtagtgactatggatatggatctaaacaatcgcctgactgaagatgaaacgcttgagcaggcctacgatatttttctcgaactggctgccgacaatctcgatccagctgatgttctgctgttcaatcttcagtttgaagagcgcggcggcgcggagttattcgatccggcggaagactggcaggaacatgttgatttcgatttgaacccggacttttttgccgaagtggtgattggtctggcggacagtgaagatggtgaaatcagcgatgttttcgcccgcattctgttatgccgcgaaaaagatcacaaactttgccatatcatctggcgggaataa

SEQ ID NO: 119144 - protein, 135 aa, Shigella flexneri 2a str. 2457T
MSPSDCFTSSARCCKTSPTEVKQVVTMDMDLNNRLTEDETLEQAYDIFLELAADNLDPADVLLFNLQFEERGGAELFDPAEDWQEHVDFDLNPDFFAEVVIGLADSEDGEISDVFARILLCREKDHKLCHIIWRE

SEQ ID NO: 119145 - DNA, 324 bp, Erwinia carotovora subsp. atroseptica SCRI1043
  CDS (1)..(324): transl_table=11
atggatttgaataatcgcctgaccgaagacgaagcattggaacaggcctacgacattttcttggaacttgctgctgacaacctcgatccagcagatattctgctgttcaacctgcaattcgaagaacgcggcggtgctgagttattcgaccccgcggaagattgggctgagcacgttgatttcgacctgaacccagatttcttcgctgaagtcgtgattgggctggccgaacaggaaggtgaagaaattaccgatatttttgcccgcgtactgatttgccgagaaaaagaccacaaactttgccacattctgtggaaagaataa

SEQ ID NO: 119146 - protein, 107 aa, Erwinia carotovora subsp. atroseptica SCRI1043
MDLNNRLTEDEALEQAYDIFLELAADNLDPADILLFNLQFEERGGAELFDPAEDWAEHVDFDLNPDFFAEVVIGLAEQEGEEITDIFARVLICREKDHKLCHILWKE

SEQ ID NO: 119147 - DNA, 324 bp, Mannheimia succiniciproducens MBEL55E
  CDS (1)..(324): transl_table=11
atgacagtacaaattaacaaattagatcctgatgcggcgattgatatcgcctatgatattttcctcgaaatggcaccggagaatttagatccggcggacattatgctatttaatctgcaatttgaagaacgcggcgcggtcgaatttgtggaaacagccgataattgggatgaagaaatcggcgtattaattgatcctgacgaatatgccgaagtatgggttggcttagttaatgaaaatgatgaaatggacgatatttttgctaaatttttaatttctcaccgtgaagacgacagagaattccatgtggtctggaaagaataa

SEQ ID NO: 119148 - protein, 107 aa, Mannheimia succiniciproducens MBEL55E
MTVQINKLDPDAAIDIAYDIFLEMAPENLDPADIMLFNLQFEERGAVEFVETADNWDEEIGVLIDPDEYAEVWVGLVNENDEMDDIFAKFLISHREDDREFHVVWKE

SEQ ID NO: 119149 - DNA, 324 bp, Haemophilus somnus 129PT
  CDS (1)..(324): transl_table=11
atgacagaaaaatttaaaaaattagatcctgatacagcaattgatattgcttatgatatttttctcgaaatggcgggagaaaatcttgatcctaccgatattcttttatttaacttacaatttgaagatcatggcggagttgaatttgttgaaactgccgatgactgggaacaagagattggcgttctcatcgatcctgatgaatacgctgaagtttgggttggcttggtcaatgaacaagacgaaatggatgatatttttgctaagtttttaatttcccacaaagaggaagaccgagaatatcacgttgtatggaaaaaataa

SEQ ID NO: 119150 - protein, 107 aa, Haemophilus somnus 129PT
MTEKFKKLDPDTAIDIAYDIFLEMAGENLDPTDILLFNLQFEDHGGVEFVETADDWEQEIGVLIDPDEYAEVWVGLVNEQDEMDDIFAKFLISHKEEDREYHVVWKK

SEQ ID NO: 119151 - DNA, 324 bp, Haemophilus somnus 2336
  CDS (1)..(324): transl_table=11
atgacagaccaaattaataaattagatcctgatacagcaattgatattgcttatgatatttttctcgaaatggcgggagaaaatcttgatcctgccgatattattttatttaacttacaatttgaagatcatggcggagttgaatttgttgaaacagccgatgactgggaacaagagattggcgttctcatcgatcctgatgaatacgctgaagtttgggttggcttggtcaatgaacaagacgaaatggatgatatttttgctaagtttttaatttcccacaaagaggaagaccgagaatatcacgttgtgtggaaaaaataa

SEQ ID NO: 119152 - protein, 107 aa, Haemophilus somnus 2336
MTDQINKLDPDTAIDIAYDIFLEMAGENLDPADIILFNLQFEDHGGVEFVETADDWEQEIGVLIDPDEYAEVWVGLVNEQDEMDDIFAKFLISHKEEDREYHVVWKK

SEQ ID NO: 119153 - DNA, 312 bp, Actinobacillus pleuropneumoniae serovar 1 str. 4074
  CDS (1)..(312): transl_table=11
atgaacaaattaactccggatgaagcgattgatctcgcttatgatattttccttgaaatggcaggtgagaacttggatcctgcggatattttattattcaatttacaatttgaagagcgcggcgcggtagaaatggtcgaaacctcggagaattgggatcaagaaatcggtacgttaatcgatcccgacgcttttgccgaagtatgggtcggtttagtaaacgataaagatgaaatggatgacgtattcgctcgtttcttgatttctcacgatgcggataaccgagaatatcacgtgatctggaaggaataa

SEQ ID NO: 119154 - protein, 103 aa, Actinobacillus pleuropneumoniae serovar 1 str. 4074
MNKLTPDEAIDLAYDIFLEMAGENLDPADILLFNLQFEERGAVEMVETSENWDQEIGTLIDPDAFAEVWVGLVNDKDEMDDVFARFLISHDADNREYHVIWKE

SEQ ID NO: 119155 - DNA, 324 bp, Haemophilus influenzae R2846
  CDS (1)..(324): transl_table=11
atgacaacagaaattaaaaaacttgatccagatacagccattgatattgcttacgatattttcttagaaatggctggagaaaatttagatcctgctgatattcttttattcaacctacaatttgaagaacgcggtggtgtggaattcgttgaaaccgccgataattgggaagaagaaattggtgtactgattgacccagaagaatacgctgaagtgtgggtgggcttagtcaatgaacaagatgaaatggatgatgtatttgctaaattcttaatttctcaccgagaagaagattgcgaatttcatgttatttggaaaaagtaa

SEQ ID NO: 119156 - protein, 107 aa, Haemophilus influenzae R2846
MTTEIKKLDPDTAIDIAYDIFLEMAGENLDPADILLFNLQFEERGGVEFVETADNWEEEIGVLIDPEEYAEVWVGLVNEQDEMDDVFAKFLISHREEDCEFHVIWKK

SEQ ID NO: 119157 - DNA, 318 bp, Pseudoalteromonas tunicata D2
  CDS (1)..(318): transl_table=11
atgaccgagtcagcccatttatggacagttgaagaagccaccgataatgcctatgaggtatttttagagctagctccagataatttatctgagcaagacattatttattttaatatgcatcgcgaagcagctggatttgctgaagataatgtacccgatgattcttggtctgaatttgttgagtttgaaattgaacctgagctgtatttacaagtcattattggcttagaatttgatgaccaagatattgagtacgcccgtatgttgatcagcttagaaaaagatgcgccgttttgtcatattatttggaaagcttaa

SEQ ID NO: 119158 - protein, 105 aa, Pseudoalteromonas tunicata D2
MTESAHLWTVEEATDNAYEVFLELAPDNLSEQDIIYFNMHREAAGFAEDNVPDDSWSEFVEFEIEPELYLQVIIGLEFDDQDIEYARMLISLEKDAPFCHIIWKA

SEQ ID NO: 119159 - DNA, 321 bp, Alteromonadales bacterium TW-7
  CDS (1)..(321): transl_table=11
atgtcgggtccacgtttatttacaatcgaagaagcaacacatcaagcttatgatatttttttagagttagcaccgagtaacttaagtgatgacgacgttgaaaactttaatgaatatcgagaagaccttggctttattgaagaagatgaacctgacgaccagtggcaagattttgtagcgcttgaaattgagccagaacactttattcaagtgttagtgggtttagagtttgataatgaagatgtgctatttgcaaaaattttaattagccgtgataaagacgctccgttttgccatattttatggaaagaaagtgaataa

SEQ ID NO: 119160 - protein, 106 aa, Alteromonadales bacterium TW-7
MSGPRLFTIEEATHQAYDIFLELAPSNLSDDDVENFNEYREDLGFIEEDEPDDQWQDFVALEIEPEHFIQVLVGLEFDNEDVLFAKILISRDKDAPFCHILWKESE

SEQ ID NO: 119161 - DNA, 321 bp, Vibrio cholerae
  CDS (1)..(321): transl_table=11
atggctgagcttatttctatcgacgacaccattgataccgcatacgacattttcttggaaatggcgccagataacctcgaacctgctgacgtgattctgttcacggcgcagtttgatgatcgcggcgcggctgagctggtcgatgtgggtgatgactgggatgaccaagtgggtttcgaagtcgataaagaaatctatgccgaagtacgcattggtctggtgaacgaagaaaatgatgtgctggacgatgtgttcgcccgtatgttgatcagtcgtgacccagatcagaagttttgccatatgctgtggaagcgtgactaa

SEQ ID NO: 119162 - protein, 106 aa, Vibrio cholerae
MAELISIDDTIDTAYDIFLEMAPDNLEPADVILFTAQFDDRGAAELVDVGDDWDDQVGFEVDKEIYAEVRIGLVNEENDVLDDVFARMLISRDPDQKFCHMLWKRD

SEQ ID NO: 119163 - DNA, 345 bp, Haemophilus influenzae
  CDS (22)..(345): transl_table=11
taacctttacgacaaaacactatgacaacagaaattaaaaaacttgatcccgatacagccattgatattgcttacgatattttcttagaaatggctggagaaaatttagatcctgctgatattcttttattcaacctacaatttgaagaacgcggcggcgtggaatttgttgaaaccgccgatgattgggaagaagaaattggtgtactaattgatccagaagaatacgctgaagtatgggtgggcttagtcaatgagcaagatgaaatggatgatgtctttgctaaattcttaatttctcaccgagaagaagatcgcgaatttcacgttatttggaaaaagtaa

SEQ ID NO: 119164 - protein, 107 aa, Haemophilus influenzae
MTTEIKKLDPDTAIDIAYDIFLEMAGENLDPADILLFNLQFEERGGVEFVETADDWEEEIGVLIDPEEYAEVWVGLVNEQDEMDDVFAKFLISHREEDREFHVIWKK

SEQ ID NO: 119165 - DNA, 321 bp, Vibrio parahaemolyticus
  CDS (1)..(321): transl_table=11
atgtctgatttgatttcttacgacgacgttatcgacgcagcgtacgacatcttccttgaaatggctccagacaatctagagccagctgatgtcattctgtttactgctcaatttgaagatcgcggtgccgcagaacttgttgaaactggtgaagactgggttgaacatgtgggctttgaggtcgacaaagaagtgtatgcagaagttagaatcggcctagtaaacgaagaaaatgacgtacttgatgacgtattcgctcgtatgctaatcagccgagacccagaacataagttctgccatatgctttggaagcgcgactaa

SEQ ID NO: 119166 - protein, 106 aa, Vibrio parahaemolyticus
MSDLISYDDVIDAAYDIFLEMAPDNLEPADVILFTAQFEDRGAAELVETGEDWVEHVGFEVDKEVYAEVRIGLVNEENDVLDDVFARMLISRDPEHKFCHMLWKRD

SEQ ID NO: 119167 - DNA, 324 bp, Yersinia pestis
  CDS (1)..(324): transl_table=11
atggatctcaataatcgcctcactgaagatgaaacactggaacaggcatacgatatttttctggaactcgcgggggataacctcgatccagccgatattctattgtttaatcttcagtttgaagagcgcggtggtgctgagttgtttgatccggcggaagattggcaggagcatgtcgattttgacataaatcctgactttttcgctgaagttgttatcggtttagccgacagtgatggtgaggaaattaacgatatttttgcccgagtactgctgtgccgagagaaagatcacaagctttgccacatattatggaaagaataa

SEQ ID NO: 119168 - protein, 107 aa, Yersinia pestis
MDLNNRLTEDETLEQAYDIFLELAGDNLDPADILLFNLQFEERGGAELFDPAEDWQEHVDFDINPDFFAEVVIGLADSDGEEINDIFARVLLCREKDHKLCHILWKE

SEQ ID NO: 119169 - DNA, 321 bp, Pasteurella multocida
  CDS (1)..(321): transl_table=11
atgacagagataacaaaattagatcccgatgttgccattgaccttgcttatgatatcttccttgaaatggcgccagaacacctcgatcctgctgatattttgctgtttaatctccagtttgaagagcgcggaggtgtcgagtttgtcgaaaccgcggatgattgggagatggaaattggggttttaattgatccggaagaatacgcagaagtctggattggcttagtgaatgaacaagatgaaatggacgatatttttgctaaattcttaatttctcatcgtgaagaagatcgtgaattccacgtcgtttggaaaaaataa

SEQ ID NO: 119170 - protein, 106 aa, Pasteurella multocida
MTEITKLDPDVAIDLAYDIFLEMAPEHLDPADILLFNLQFEERGGVEFVETADDWEMEIGVLIDPEEYAEVWIGLVNEQDEMDDIFAKFLISHREEDREFHVVWKK

SEQ ID NO: 119171 - DNA, 330 bp, Salmonella typhimurium
  CDS (1)..(330): transl_table=11
atggaaatggatctgaacaatcgcctgactgaagacgaaacgcttgagcaggcttacgatatttttcttgagctggcggcggataatcttgatccggctgatatcattctgttcaatttgcaattcgaggagcgcggcggcgcggagttgtttgatcccgctgaagactggcaagagcacatcgattttgacctgaatccagacttttttgccgaggtggtaattggcctggcggataccgaagacggcgaaattaacgacatttttgcccgcgttctgctgtgccgggaaaaggaccacaagctgtgccatattctctggcgcgaataa

SEQ ID NO: 119172 - protein, 109 aa, Salmonella typhimurium
MEMDLNNRLTEDETLEQAYDIFLELAADNLDPADIILFNLQFEERGGAELFDPAEDWQEHIDFDLNPDFFAEVVIGLADTEDGEINDIFARVLLCREKDHKLCHILWRE

SEQ ID NO: 119173 - DNA, 330 bp, Shigella flexneri
  CDS (1)..(330): transl_table=11
atggatatggatctaaacaatcgcctgactgaagatgaaacgcttgagcaggcctacgatatttttctcgaactggctgccgacaatctcgatccagctgatgttctgctgttcaatcttcagtttgaagagcgcggcggcgcggagttattcgatccggcggaagactggcaggaacatgttgatttcgatttgaacccggacttttttgccgaagtggtgattggtctgacggacagtgaagatggtgaaatcagcgatgttttcgcccgcattctgttatgccgcgaaaaagatcacaaactttgccatatcatctggcgggaataa

SEQ ID NO: 119174 - protein, 109 aa, Shigella flexneri
MDMDLNNRLTEDETLEQAYDIFLELAADNLDPADVLLFNLQFEERGGAELFDPAEDWQEHVDFDLNPDFFAEVVIGLTDSEDGEISDVFARILLCREKDHKLCHIIWRE

SEQ ID NO: 119175 - DNA, 23 bp, Artificial sequence
  primer
atgtcgccgagcgactgttttac

SEQ ID NO: 119176 - DNA, 23 bp, Artificial sequence
  primer
ttattcccgccagatgatatggc

SEQ ID NO: 119177 - protein, 99 aa, Artificial sequence
  consensus sequence
  Variant (2)..(3): Xaa in position 2 to 3 is any amino acid
  Variant (5)..(9): Xaa in position 5 to 9 is any amino acid
  Variant (17)..(17): Xaa in position 17 is any amino acid
  Variant (19)..(20): Xaa in position 19 to 20 is any amino acid
  Variant (27)..(28): Xaa in position 27 to 28 is any amino acid
  Variant (36)..(36): Xaa in position 36 is any amino acid
  Variant (39)..(40): Xaa in position 39 to 40 is any amino acid
  Variant (42)..(48): Xaa in position 42 to 48 is any amino acid
  Variant (50)..(58): Xaa in position 50 to 58 is any amino acid
  Variant (60)..(62): Xaa in position 60 to 62 is any amino acid
  Variant (66)..(67): Xaa in position 66 to 67 is any amino acid
  Variant (70)..(74): Xaa in position 70 to 74 is any amino acid
  Variant (75)..(75): Xaa in position 75 is any or no amino acid
  Variant (77)..(77): Xaa in position 77 is any amino acid
  Variant (78)..(78): Xaa in position 78 is any or no amino acid
  Variant (80)..(80): Xaa in position 80 is any amino acid
  Variant (83)..(84): Xaa in position 83 to 84 is any amino acid
  Variant (86)..(95): Xaa in position 86 to 95 is any amino acid
  Variant (97)..(98): Xaa in position 97 to 98 is any amino acid
LXXDXXXXXAYDIFLEXAXXNLDPADXXLFNLQFEXRGXXEXXXXXXXWXXXXXXXXXPXXXAEVXXGLXXXXXXEXXDXFAXXLXXXXXXXXXXHXXW

SEQ ID NO: 119178 - protein, 60 aa, Artificial sequence
  protein pattern
  Variant (8)..(8): Xaa in position 8 is Leu or Met
  Variant (10)..(10): Xaa in position 10 is Ala, Gly or Pro
  Variant (11)..(11): Xaa in position 11 is Asp or Glu
  Variant (14)..(14): Xaa in position 14 is Asp or Glu
  Variant (18)..(18): Xaa in position 18 is Ile or Val
  Variant (19)..(19): Xaa in position 19 is Ile, Leu or Met
  Variant (22)..(22): Xaa in position 22 is Asn or Thr
  Variant (23)..(23): Xaa in position 23 is Ala or Leu
  Variant (26)..(27): Xaa in position 26 to 27 is Asp or Glu
  Variant (28)..(28): Xaa in position 28 is His or Arg
  Variant (30)..(30): Xaa in position 30 is Ala or Gly
  Variant (31)..(31): Xaa in position 31 is Ala or Val
  Variant (33)..(33): Xaa in position 33 is Phe, Leu or Met
  Variant (34)..(34): Xaa in position 34 is Phe or Val
  Variant (35)..(35): Xaa in position 35 is Asp or Glu
  Variant (36)..(36): Xaa in position 36 is Pro, Thr or Val
  Variant (37)..(37): Xaa in position 37 is Ala, Gly or Ser
  Variant (38)..(38): Xaa in position 38 is Asp or Glu
  Variant (39)..(39): Xaa in position 39 is Asp or Asn
  Variant (41)..(41): Xaa in position 41 is any amino acid
  Variant (42)..(42): Xaa in position 42 is Asp, Glu or Gln
  Variant (43)..(43): Xaa in position 43 is any amino acid
  Variant (44)..(44): Xaa in position 44 is Ile or Val
  Variant (45)..(45): Xaa in position 45 is Asp or Gly
  Variant (46)..(47): Xaa in position 46 to 47 is any amino acid
  Variant (48)..(48): Xaa in position 48 is Ile, Leu or Val
  Variant (49)..(49): Xaa in position 49 is Asp or Asn
  Variant (50)..(50): Xaa in position 50 is any amino acid
  Variant (51)..(51): Xaa in position 51 is Asp or Glu
  Variant (52)..(52): Xaa in position 52 is any amino acid
  Variant (53)..(53): Xaa in position 53 is Phe or Tyr
  Variant (57)..(57): Xaa in position 57 is any amino acid
  Variant (58)..(58): Xaa in position 58 is Ile or Val
AYDIFLEXAXXNLXPADXXLFXXQFXXXGXXEXXXXXXXWXXXXXXXXXXXXXAEVXXGL

SEQ ID NO: 119179 - protein, 12 aa, Artificial sequence
  protein pattern
  Variant (2)..(2): Xaa in position 2 is Asp, Glu or Lys
  Variant (4)..(7): Xaa in position 4 to 7 is any or no amino acid
  Variant (9)..(9): Xaa in position 9 is Ile or Val
  Variant (10)..(10): Xaa in position 10 is Ile, Leu or Val
  Variant (12)..(12): Xaa in position 12 is Lys or Arg
EXDXXXXHXXWX

SEQ ID NO: 119180 - protein, 10 aa, Artificial sequence
  protein pattern
  Variant (2)..(2): Xaa in position 2 is Ile or Met
  Variant (3)..(3): Xaa in position 3 is Asp, Asn, Ser or Thr
  Variant (5)..(5): Xaa in position 5 is Ile or Val
  Variant (8)..(8): Xaa in position 8 is Lys or Arg
  Variant (9)..(9): Xaa in position 9 is Phe, Ile or Val
EXXDXFAXXL

SEQ ID NO: 119181 - DNA, 729 bp, Escherichia coli
  CDS (1)..(729): transl_table=11
atgcggggaggcgtggggacaacaaccatcaccgccgcattagcctggtcattacaaatgttgggagaaaatgtcctggtggtcgatgcctgcccggacaacttgttgcgcctgtcatttaatgttgattttacccaccgtcagggctgggccagagcgatgctggatggccaggactggcgtgacgctgggttgcgctacacctcgcagctcgatttgctgccttttggtcagttatccattgaagaacaagaaaatccacagcactggcaaacccggctgagcgatatttgctccggcttacagcaactaaaagccagcgggcgttaccagtggattttaatcgacttaccgcgtgatgcctcgcagataacccaccagctgctgagtttgtgcgatcactcgctggcaatcgtcaatgtggatgccaactgccatatccgactgcatcagcaagcgctgccggatggcgcacatattttgattaatgacttccgtattggcagtcaggttcaggacgatatttaccagctttggttgcaaagccagcgccgattactgccgatgctcattcatcgtgatgaagcgatggctgaatgcctggcggctaagcaaccagtaggtgaatatcgcagtgatgcgctggcggctgaagagatactgacgctggcgaactggtgcctgttgaactactccgggctgaaaacgccagtcgggagtgcatcataa

SEQ ID NO: 119182 - protein, 242 aa, Escherichia coli
MRGGVGTTTITAALAWSLQMLGENVLVVDACPDNLLRLSFNVDFTHRQGWARAMLDGQDWRDAGLRYTSQLDLLPFGQLSIEEQENPQHWQTRLSDICSGLQQLKASGRYQWILIDLPRDASQITHQLLSLCDHSLAIVNVDANCHIRLHQQALPDGAHILINDFRIGSQVQDDIYQLWLQSQRRLLPMLIHRDEAMAECLAAKQPVGEYRSDALAAEEILTLANWCLLNYSGLKTPVGSAS

SEQ ID NO: 119183 - DNA, 753 bp, Shigella flexneri 2a str. 301
  CDS (1)..(753): transl_table=11
atggccgtactgggattgcagggggtgcggggaggcgtggggacaacaaccatcaccgccgcattagcctggtcattacaaatgttgggagaaaatgtcctggtggtcgatgcctgcccggacaacttgttgcgcctgtcatttaatgttgattttacccaccgtcagggctgggccagagcgatgctggatggccaggactggcgtgacgctgggttgcgctacacctcgcagctcgatttgctgccttttggtcagttatccattgaagaacaagaaaatccacagcactggcaaacccggctgagcgatatttgctccggcttacagcaactaaaagccagcgggcgttaccagtggattttaatcgacttaccgcgtgatgcctcgcagataacccaccagctgctgagtttgtgcgagcactcgctggcaatcgtcaatgtggatgccaactgccatatccgactgcatcagcaagcgctgccggatggcgcacatattttgattaatgacttccgtattggcagtcaggttcaggacgatatttaccagctttggttgcaaagccagcgccgattactgccgatgctcattcatcgtgatgaagcgatggctgaatgcctggcggctaagcaaccagtaggtgaatatcgcagtgatgcgctggcggctgaagagatactgacgctggcgaactggtgcctgttgaactactccgggctgaaaacgccagtcgggagtgcatcatga

SEQ ID NO: 119184 - protein, 250 aa, Shigella flexneri 2a str. 301
MAVLGLQGVRGGVGTTTITAALAWSLQMLGENVLVVDACPDNLLRLSFNVDFTHRQGWARAMLDGQDWRDAGLRYTSQLDLLPFGQLSIEEQENPQHWQTRLSDICSGLQQLKASGRYQWILIDLPRDASQITHQLLSLCEHSLAIVNVDANCHIRLHQQALPDGAHILINDFRIGSQVQDDIYQLWLQSQRRLLPMLIHRDEAMAECLAAKQPVGEYRSDALAAEEILTLANWCLLNYSGLKTPVGSAS

SEQ ID NO: 119185 - DNA, 708 bp, Pseudomonas putida KT2440
  CDS (1)..(708): transl_table=11
atgaccagcctggctttgcatggggtacgcggaggcctggggcgcagcgccttgctggctgcattgggctacgcgctgcagggcgtgggcgaacgggtgctgctgattgacctgtgccccagcaacttgctcgggctgcacttcaacctgccgctggatacgtccgagggctgggcgctggccgagcgggaagggcggccgttcagcgatgccgtgtacgaggtgctcgatggcctgtgcctgctgccgtacggcaacctgcctggcggtgcgcagcaccgtgtgcccgatgcgcagtcatggcccgctcgccaggtcgagctggccgagcatttcgactggctgttgtacgacctgccgcaattgccgggcgataccaccggcaatggcatcgagactgatgtacgggtactggtggcagaagccgaaatggccagccacctgctgctcgggcgacgtccgctcgagcacttcgacatgctgctggtcaaccgctatgacccggccagccgcttgcagagcgacctgttgatggtgtggcgtgacttgtttcgtgatcgcttgccgatccaggtggtccatcgcgacgaagccttcctcgaagcgctggcgtacaaggctcccctgggtctttacgcaccgcagagcctggcctgccgggatgtgcaaagcctggcggtgcgctgtctgacgaggcgccagccgtga

SEQ ID NO: 119186 - protein, 235 aa, Pseudomonas putida KT2440
MTSLALHGVRGGLGRSALLAALGYALQGVGERVLLIDLCPSNLLGLHFNLPLDTSEGWALAEREGRPFSDAVYEVLDGLCLLPYGNLPGGAQHRVPDAQSWPARQVELAEHFDWLLYDLPQLPGDTTGNGIETDVRVLVAEAEMASHLLLGRRPLEHFDMLLVNRYDPASRLQSDLLMVWRDLFRDRLPIQVVHRDEAFLEALAYKAPLGLYAPQSLACRDVQSLAVRCLTRRQP

SEQ ID NO: 119187 - DNA, 759 bp, Chromobacterium violaceum ATCC 12472
  CDS (1)..(759): transl_table=11
atggctattttgtccatttgcggagtccgaggggggagcggcgcgacagcgctagccgccgccattgcctggtatcgtgaagagcaggcccagccgacgctggcaatcgacctgtgcccgcagaacttgctacgtctgcacttcggcgtgccgtggagcgagcagggaggctggcgcgccagcctgcatgcgggctgcgactggacggagtccgcctggcggataggaagcggccacctggcgctggttccgcatgggacctgcgcagccagggggccggaaccggacgcgggctggctgagcgcggaactgggcaagctggagaggccggcgggcgatctggtgctgctggacacgccgtcatgggccggtcgctgccgcgaccaggcatggaccgccgccagccatgtgctggcggtgttgacggcggattccgtcaactgcgttctggccgtccgtctggaagcggagctgatggcgcgcggtgtgccccgcgacggcatattgttcgcgatcagccagttcgacccggcgcgcaagctggaccgggacgtcgagcgcgtgctgcgcagaacgctgggaagccggctggctccgcggccggtgacgcgtgacgaagcggtgcgcgaggccctcgccgcgggcctgccggtatcggtgttcgcgccggaaagccaggcggtcgacgatctgcggcaactggcggtgtggctggcggtgaagctgaggcgcgccgagccggagggccgggctccatga

SEQ ID NO: 119188 - protein, 252 aa, Chromobacterium violaceum ATCC 12472
MAILSICGVRGGSGATALAAAIAWYREEQAQPTLAIDLCPQNLLRLHFGVPWSEQGGWRASLHAGCDWTESAWRIGSGHLALVPHGTCAARGPEPDAGWLSAELGKLERPAGDLVLLDTPSWAGRCRDQAWTAASHVLAVLTADSVNCVLAVRLEAELMARGVPRDGILFAISQFDPARKLDRDVERVLRRTLGSRLAPRPVTRDEAVREALAAGLPVSVFAPESQAVDDLRQLAVWLAVKLRRAEPEGRAP

SEQ ID NO: 119189 - DNA, 738 bp, Erwinia carotovora subsp. atroseptica SCRI1043
  CDS (1)..(738): transl_table=11
atgcccgttattgccttgcagggaatccgtggaggcgtgggaacaacctcgatagccgcagcattgggatgggcctttcaacgactgggcgaatccgcgctggtgattgatttctcgccggacaatttgctacgcattaactttaatatgccgtttgagcaacgccgcggttgggcacgggcggaagccgacggcgcaccgtggcaaaccggtgccatgcaatatatccccggattggattttctgccgtttggtcgcctgaacacgcaggaagtcgcaacactgcaacagcattaccaacagcaccccgcgatatggcaaaacaatctgacaaaactcagcgctgcgggccggcatcgctgggtattgatcgatgtaccggcgggcaatagcccactgacacgacaagcgttggccaccgcaaataccgtttttcaggtggtggtggcggatgccaactgccattcacgtctacatcaacaggcgttaccgcgtcagtgccattttctggtcaatcaattttctaccctcagtacgcttcagcaggatttacaccagctctggctgcacacgctgtcacacttactgccgctagtggtacatcgtgacgaagcattgtcagaatcactgatgctgaaacagccgctgggcgaatgccgcccagacagcgtggcagcggaagagatcatgacgctggcaaactggtgcctgattcacgtcaaggaaagcggcgtatga

SEQ ID NO: 119190 - protein, 245 aa, Erwinia carotovora subsp. atroseptica SCRI1043
MPVIALQGIRGGVGTTSIAAALGWAFQRLGESALVIDFSPDNLLRINFNMPFEQRRGWARAEADGAPWQTGAMQYIPGLDFLPFGRLNTQEVATLQQHYQQHPAIWQNNLTKLSAAGRHRWVLIDVPAGNSPLTRQALATANTVFQVVVADANCHSRLHQQALPRQCHFLVNQFSTLSTLQQDLHQLWLHTLSHLLPLVVHRDEALSESLMLKQPLGECRPDSVAAEEIMTLANWCLIHVKESGV

SEQ ID NO: 119191 - DNA, 1650 bp, Burkholderia vietnamiensis G4
  CDS (1)..(1650): transl_table=11
atggcgcgggttcctggaggcgcttgccggcgaattcagcgatcagctcgatcaggacgaactccgccaactgatggcgcgcgtcggcatgcgcttcgcggccgcgcatccgctcggcccgtgcgagtcgaccgacgatctcacgaacgccttgaatgcgcgctggcgcgaaatggagtggggctacgccgagctgtccgacgagcaggcatttctgcgcatcgttcattacgcggcgccgttgcgcgcgctcggcgccggccatctcggctggtcggcggcgttcctgcagggcgcgtatcagggctggttcgacagcgtcggcgcggccggcctgcgtgtgacgcaggacgtcgtgccgcaggacgacgcacggatcgagttgcgcatcgctcgcgcgccgcactgaacggttcgcgcgaccggactctccgtcatgacaacagggcagcttatgtcgagctcacgggatatcgaatcgttgttcaagcgtttcggcggcgatgccggacgctatcacgaggtgcgcgcggaagcggatgccgatgccgcgcgcgcgcgctggccgctgctcgctggtgtcgaattgcaagcggacgacgcgcctcgcacgcccgcgccgatcgctgccgagcacacgcagcccgaggtcgacgccgtgacggccgacacgcgcgtagcgtccgcaaccgacgccgccgcacgcgatcgcagcgccggcgcgctgaagaaactggtcggcaagtcgccggccgcggaccgcacgcgcgcacccggctcgtccgagccgctgcagacgctgttcgagcggctgcgcggttacgcgccggccgacgcgccgaagccgccgccggtatggacgggccgttcatgaagatcgtcgtgatcgcgtcggcaaagggcggcgtcggcaagacgacgctggcggcgaacctcgcggccgtgctcgcggcgtcgcgccggcatcgcgtgtgcgtggtggatctggatccgcagaatgcgctgaagctgcatttcggcgtaccgatcgagatgagcgacgggctggccggcgcggcgctgagcgagcggcagtggccgctcgcggtggtcgacggcatcgcggtgatgccgttcggcgtggtcggcgaaacggatcagcgccgcttcgagcgcatgctcgatcgcgatccggcgtggctcgcacgcgggctcgccgcgctcgcgctcggcgacgacgacatcgtgatcgtcgatacgccgcccggctcgtcggtctacatgcgcgccgcactgacggctgcgcatttcgtgctgaccgtgttgctcgccgacgcggcgtcgtatgcgtcgatcccgcagatgcggcgcatgctcgacgcctattcggcgacgcgcaccgacttcatcggcgacggctacgtggtcaatcaggtcgatcagtcgcgcgagctgggccgcgacgtgctgcgcgcgttgcgcgacagcgtcggcgcggcgcgcttcgccggcgtgattcacgcggaccagggcgtcgctgaatcgctcgcgtgccgcacgaccgtgaatcgctacgacccacgttcgcaggccgcggccgatctgagcgcgtgcgccgagtggctcgagcgcgcgctcgggcggcgcgcgaatgcacggagcgtggcatga

SEQ ID NO: 119192 - protein, 549 aa, Burkholderia vietnamiensis G4
MARVPGGACRRIQRSARSGRTPPTDGARRHALRGRASARPVRVDRRSHERLECALARNGVGLRRAVRRAGISAHRSLRGAVARARRRPSRLVGGVPAGRVSGLVRQRRRGRPACDAGRRAAGRRTDRVAHRSRAALNGSRDRTLRHDNRAAYVELTGYRIVVQAFRRRCRTLSRGARGSGCRCRARALAAARWCRIASGRRASHARADRCRAHAARGRRRDGRHARSVRNRRRRTRSQRRRAEETGRQVAGRGPHARTRLVRAAADAVRAAARLRAGRRAEAAAGMDGPFMKIVVIASAKGGVGKTTLAANLAAVLAASRRHRVCVVDLDPQNALKLHFGVPIEMSDGLAGAALSERQWPLAVVDGIAVMPFGVVGETDQRRFERMLDRDPAWLARGLAALALGDDDIVIVDTPPGSSVYMRAALTAAHFVLTVLLADAASYASIPQMRRMLDAYSATRTDFIGDGYVVNQVDQSRELGRDVLRALRDSVGAARFAGVIHADQGVAESLACRTTVNRYDPRSQAAADLSACAEWLERALGRRANARSVA

SEQ ID NO: 119193 - DNA, 753 bp, Escherichia coli B
  CDS (1)..(753): transl_table=11
atggccgtactgggattgcagggggtgcggggaggcgtggggacaacaaccatcaccgccgcattagcctggtcattacaaatgttgggagaaaatgtcctggtggtcgatgcctgcccggacaacttgttgcgcctgtcatttaacgttgattttacccaccgtcagggctgggccagagcgatgctggatggccaggactggcgtgacgccgggttgcgctacacctcgcagctcgatttgctgccttttggtcagttatccattgaagaacaagaaaatccacagcactggcaaacccggctgagcgatatttgctccggcttacagcaactaaaagccagcgggcgttaccagtggattttaatcgacttaccgcgtgatgcctcgcagataacccaccagctgctgagtttgtgcgatcactcgctggcaatcgtcaatgtggatgccaactgccatatccgactgcatcagcaagcgctgccggatggcgcacatattttgattaataacttccgtattggcagtcaggttcaggacgatatttaccagctttggttgcaaagccagcgccgattactgccgatgctcattcatcgtgatgaagcgatggctgaatgcctggcggctaagcaaccagtaggtgaatatcgcagtgatgcgctggcggctgaagagatactgacgctggcgaactggtgcctgttgaactattccgggctgaaaacgccagtcgggagtaaatcatga

SEQ ID NO: 119194 - protein, 250 aa, Escherichia coli B
MAVLGLQGVRGGVGTTTITAALAWSLQMLGENVLVVDACPDNLLRLSFNVDFTHRQGWARAMLDGQDWRDAGLRYTSQLDLLPFGQLSIEEQENPQHWQTRLSDICSGLQQLKASGRYQWILIDLPRDASQITHQLLSLCDHSLAIVNVDANCHIRLHQQALPDGAHILINNFRIGSQVQDDIYQLWLQSQRRLLPMLIHRDEAMAECLAAKQPVGEYRSDALAAEEILTLANWCLLNYSGLKTPVGSKS

SEQ ID NO: 119195 - DNA, 708 bp, Pseudomonas putida GB-1
  CDS (1)..(708): transl_table=11
atgaccagcctggccctgcacggggtgcgcggaggcctggggcgcagcgccttgttggctgcgctgggctatgcgctgcagggtatgggcgagcgggtgctgctgattgacctgtgcccaagcaatttgctcggcctgcacttcaacctgccgctggatacgtccgagggctgggcgctggccgagcgggaagggcggccggccagcgatgctgtgtatgaggtgctcgatggcctgtgcctgctgccgttcggcaacctgcctggcagttcgcggtaccttgtgcctgacgcgctggcatggcgtgctcgccaggccgagctgactgagcagttcgactgggtgttgttcgacctgccgcaaccgttggccgacagcgctggcaacggcatcgagaccgatgtgcgggtactggtggctgaggccgaaatggccagccacctgctgctcgggcgccgaccggttgagcactacgacatgctgctggtcaatcgctacgacccggccagccgtttgcagagcgacctgttgatggtgtggcgcgacctgttcggtgagcgcttgccgatccaggtggtccaccgcgacgaagccttcctcgaagccctggcgtgcaaggcgccgcttggccattacgccccgcagagcctggcctgccgggacgtacaaagcctggcggtacgctgcctgacgaggcgcgggccgtga

SEQ ID NO: 119196 - protein, 235 aa, Pseudomonas putida GB-1
MTSLALHGVRGGLGRSALLAALGYALQGMGERVLLIDLCPSNLLGLHFNLPLDTSEGWALAEREGRPASDAVYEVLDGLCLLPFGNLPGSSRYLVPDALAWRARQAELTEQFDWVLFDLPQPLADSAGNGIETDVRVLVAEAEMASHLLLGRRPVEHYDMLLVNRYDPASRLQSDLLMVWRDLFGERLPIQVVHRDEAFLEALACKAPLGHYAPQSLACRDVQSLAVRCLTRRGP

SEQ ID NO: 119197 - DNA, 753 bp, Escherichia coli
  CDS (1)..(753): transl_table=11
atggccgtactgggattgcagggggtgcggggaggcgtggggacaacaaccatcaccgccgcattagcctggtcattacaaatgttgggagaaaatgttctggtggtcgatgcctgcccggacaacttgttgcgcctgtcatttaatgttgattttacccaccgtcagggctgggccagagcgatgctggatggccaggactggcgtgacgctgggttgcgctacacctcgcagctcgatttgctgccttttggtcagttatccattgaagaacaagaaaatccacagcactggcaaacccggctgagcgatatttgctccggcttacagcaactaaaagccagcgggcgttaccagtggattttaatcgacttaccgcgtgatgcctcgcagataacccaccagctgctgagtttgtgcgatcactcgctggcaatcgtcaatgtggatgccaactgccatatccgactgcatcagcaagcgctgccggatggcgcacatattttgattaatgacttccgtattggcagtcaggttcaggacgatatttaccagctttggttgcaaagccagcgccgattactgccgatgctcattcatcgtgatgaagcgatggctgaatgcctggcggctaagcaaccagtaggtgaatatcgcagtgatgcgctggcggctgaagagatactgacgctggcgaactggtgcctgttgaactattccgggctgaaaacgccagtcgggagtgcatcatga

SEQ ID NO: 119198 - protein, 250 aa, Escherichia coli
MAVLGLQGVRGGVGTTTITAALAWSLQMLGENVLVVDACPDNLLRLSFNVDFTHRQGWARAMLDGQDWRDAGLRYTSQLDLLPFGQLSIEEQENPQHWQTRLSDICSGLQQLKASGRYQWILIDLPRDASQITHQLLSLCDHSLAIVNVDANCHIRLHQQALPDGAHILINDFRIGSQVQDDIYQLWLQSQRRLLPMLIHRDEAMAECLAAKQPVGEYRSDALAAEEILTLANWCLLNYSGLKTPVGSAS

SEQ ID NO: 119199 - DNA, 957 bp, Salmonella typhimurium
  CDS (205)..(957): transl_table=11
atgtataacaatgaacctggcgctcagtccgatccaacgttgggctacacttttcaaaatgattttctggcattaagccaggcgttttcactacccgaaatagattataccgatatttcccaacgcgaacagttggcggcggcgattaaaagatggccgctcctggctgaatttgcgcaaccacattcattaaggaagccatgaatggcgattctgggactgcagggcgtgcgcggcggggtgggaaccacatctctcaccgcagcactcgcctgggcgttacaaatcttaggggaaaatgtcctggtgattgacgccagccccgataacctgctgcgcatgtcgtttaacgtcgacttcgtccatcagggcggttgggcgcgatcgttgctggacggccaggactggcgcgatgccggattacgttatacctcacagcttgatctactgccgtttggacagctcaccgcgcaagagcgggaaaatccgcagtcctggcaggagacgctgggagagatcggatcggctatccaggcgctgaaagcgagcgggcgttatagctggattttactggacttgccctacggcgcgtcaccgctgacacggcaactggtgagcctctgcgaccatacgctggcgatagcccgggttgacgctaactgccatattcgccttcatcagcaggcgttgcctgccggagcgcatattctgatcaatgacttacgcattggcagtcagttacaggacgatctgtaccaggtctggctgcaaagccagcgccggttgctgcccattgtgatccatcgcgatgaggcgatggcggagtgcatggcgtcgaaacagccgttaggcgaatatcgcagcgattcgttagccgccgaagaggtgttaacgctggcgaactggtgcctgctgcatgatgcgggcgacaaaacgtccgccgggagcctgcgatga

SEQ ID NO: 119200 - protein, 250 aa, Salmonella typhimurium
MAILGLQGVRGGVGTTSLTAALAWALQILGENVLVIDASPDNLLRMSFNVDFVHQGGWARSLLDGQDWRDAGLRYTSQLDLLPFGQLTAQERENPQSWQETLGEIGSAIQALKASGRYSWILLDLPYGASPLTRQLVSLCDHTLAIARVDANCHIRLHQQALPAGAHILINDLRIGSQLQDDLYQVWLQSQRRLLPIVIHRDEAMAECMASKQPLGEYRSDSLAAEEVLTLANWCLLHDAGDKTSAGSLR

SEQ ID NO: 119201 - DNA, 20 bp, Artificial sequence
  primer
atgcggggaggcgtggggac

SEQ ID NO: 119202 - DNA, 23 bp, Artificial sequence
  primer
ttatgatgcactcccgactggcg

SEQ ID NO: 119203 - protein, 250 aa, Artificial sequence
  consensus sequence
  Variant (2)..(7): Xaa in position 2 to 7 is any amino acid
  Variant (9)..(9): Xaa in position 9 is any amino acid
  Variant (13)..(13): Xaa in position 13 is any amino acid
  Variant (15)..(15): Xaa in position 15 is any amino acid
  Variant (17)..(19): Xaa in position 17 to 19 is any amino acid
  Variant (23)..(25): Xaa in position 23 to 25 is any amino acid
  Variant (28)..(29): Xaa in position 28 to 29 is any amino acid
  Variant (30)..(30): Xaa in position 30 is any or no amino acid
  Variant (33)..(33): Xaa in position 33 is any amino acid
  Variant (36)..(37): Xaa in position 36 to 37 is any amino acid
  Variant (39)..(40): Xaa in position 39 to 40 is any amino acid
  Variant (42)..(42): Xaa in position 42 is any amino acid
  Variant (46)..(46): Xaa in position 46 is any amino acid
  Variant (48)..(48): Xaa in position 48 is any amino acid
  Variant (51)..(57): Xaa in position 51 to 57 is any amino acid
  Variant (61)..(61): Xaa in position 61 is any amino acid
  Variant (63)..(65): Xaa in position 63 to 65 is any amino acid
  Variant (67)..(68): Xaa in position 67 to 68 is any amino acid
  Variant (70)..(71): Xaa in position 70 to 71 is any amino acid
  Variant (73)..(78): Xaa in position 73 to 78 is any amino acid
  Variant (79)..(79): Xaa in position 79 is any or no amino acid
  Variant (81)..(81): Xaa in position 81 is any amino acid
  Variant (85)..(85): Xaa in position 85 is any amino acid
  Variant (87)..(87): Xaa in position 87 is any amino acid
  Variant (89)..(114): Xaa in position 89 to 114 is any amino acid
  Variant (115)..(121): Xaa in position 115 to 121 is any or no amino acid
  Variant (123)..(123): Xaa in position 123 is any amino acid
  Variant (125)..(125): Xaa in position 125 is any amino acid
  Variant (127)..(127): Xaa in position 127 is any amino acid
  Variant (129)..(150): Xaa in position 129 to 150 is any amino acid
  Variant (151)..(151): Xaa in position 151 is any or no amino acid
  Variant (153)..(155): Xaa in position 153 to 155 is any amino acid
  Variant (157)..(158): Xaa in position 157 to 158 is any amino acid
  Variant (160)..(170): Xaa in position 160 to 170 is any amino acid
  Variant (171)..(181): Xaa in position 171 to 181 is any or no amino acid
  Variant (183)..(183): Xaa in position 183 is any amino acid
  Variant (185)..(189): Xaa in position 185 to 189 is any amino acid
  Variant (191)..(192): Xaa in position 191 to 192 is any amino acid
  Variant (194)..(194): Xaa in position 194 is any amino acid
  Variant (196)..(199): Xaa in position 196 to 199 is any amino acid
  Variant (201)..(205): Xaa in position 201 to 205 is any amino acid
  Variant (206)..(206): Xaa in position 206 is any or no amino acid
  Variant (209)..(213): Xaa in position 209 to 213 is any amino acid
  Variant (219)..(220): Xaa in position 219 to 220 is any amino acid
  Variant (222)..(222): Xaa in position 222 is any amino acid
  Variant (225)..(225): Xaa in position 225 is any amino acid
  Variant (227)..(227): Xaa in position 227 is any amino acid
  Variant (229)..(229): Xaa in position 229 is any amino acid
  Variant (231)..(231): Xaa in position 231 is any amino acid
  Variant (233)..(237): Xaa in position 233 to 237 is any amino acid
  Variant (239)..(244): Xaa in position 239 to 244 is any amino acid
  Variant (247)..(247): Xaa in position 247 is any amino acid
MXXXXXXGXRGGXGXTXXXAALXXXLQXXXGEXVLXXDXXPXNLLXLXFNXXXXXXXGWAXAXXXGXXWXXAXXXXXXXLXLLPXGXLXXXXXXXXXXXXXXXXXXXXXXXXXXXXXXXXXWXLXDXPXXXXXXXXXXXXXXXXXXXXXXXDXXXHXXLXXXXXXXXXXXXXXXXXXXXXXLXNXXXXXSXXQXDXXXXWXXXXXXRLXXXXXHRDEAXXEXLAXKXPXGXYXXXXXAXXXXXXLAXWCL

SEQ ID NO: 119204 - protein, 41 aa, Artificial sequence
  protein pattern
  Variant (2)..(4): Xaa in position 2 to 4 is any or no amino acid
  Variant (6)..(6): Xaa in position 6 is any amino acid
  Variant (8)..(8): Xaa in position 8 is Glu or Gln
  Variant (9)..(9): Xaa in position 9 is Ala or Gly
  Variant (10)..(10): Xaa in position 10 is Phe, Met or Val
  Variant (11)..(11): Xaa in position 11 is Ala or Leu
  Variant (13)..(13): Xaa in position 13 is Ala, Cys or Ser
  Variant (14)..(14): Xaa in position 14 is Leu or Met
  Variant (16)..(16): Xaa in position 16 is any amino acid
  Variant (17)..(17): Xaa in position 17 is Lys or Arg
  Variant (18)..(18): Xaa in position 18 is Ala, Gln or Thr
  Variant (19)..(19): Xaa in position 19 is Pro or Thr
  Variant (20)..(20): Xaa in position 20 is Leu or Val
  Variant (21)..(21): Xaa in position 21 is Gly or Asn
  Variant (22)..(22): Xaa in position 22 is any amino acid
  Variant (24)..(24): Xaa in position 24 is any amino acid
  Variant (25)..(25): Xaa in position 25 is Pro or Ser
  Variant (26)..(26): Xaa in position 26 is Asp, Gln or Arg
  Variant (27)..(27): Xaa in position 27 is Ala or Ser
  Variant (28)..(28): Xaa in position 28 is any amino acid
  Variant (30)..(30): Xaa in position 30 is Ala or Cys
  Variant (31)..(31): Xaa in position 31 is any amino acid
  Variant (32)..(32): Xaa in position 32 is Asp or Glu
  Variant (33)..(33): Xaa in position 33 is Ile, Leu or Val
  Variant (34)..(34): Xaa in position 34 is any amino acid
  Variant (35)..(35): Xaa in position 35 is Ala, Ser or Thr
  Variant (36)..(36): Xaa in position 36 is any amino acid
  Variant (38)..(39): Xaa in position 38 to 39 is any amino acid
  Variant (40)..(40): Xaa in position 40 is any or no amino acid
IXXXHXDXXXXEXXAXXXXXXXYXXXXXAXXXXXXXAXXXL

SEQ ID NO: 119205 - protein, 41 aa, Artificial sequence
  protein pattern
  Variant (3)..(3): Xaa in position 3 is Asn, Arg or Ser
  Variant (4)..(4): Xaa in position 4 is Ala or Val
  Variant (6)..(6): Xaa in position 6 is Leu or Val
  Variant (7)..(7): Xaa in position 7 is Ile or Val
  Variant (9)..(9): Xaa in position 9 is any amino acid
  Variant (10)..(10): Xaa in position 10 is Cys or Ser
  Variant (12)..(12): Xaa in position 12 is Asp or Ser
  Variant (16)..(16): Xaa in position 16 is any amino acid
  Variant (17)..(17): Xaa in position 17 is Ile, Leu or Met
  Variant (18)..(18): Xaa in position 18 is any amino acid
  Variant (21)..(21): Xaa in position 21 is Leu, Met or Val
  Variant (22)..(22): Xaa in position 22 is Asp or Pro
  Variant (23)..(23): Xaa in position 23 is Phe or Leu
  Variant (24)..(25): Xaa in position 24 to 25 is any amino acid
  Variant (26)..(26): Xaa in position 26 is Gln, Arg or Ser
  Variant (27)..(27): Xaa in position 27 is any amino acid
  Variant (31)..(31): Xaa in position 31 is any amino acid
  Variant (32)..(32): Xaa in position 32 is Ala or Ser
  Variant (33)..(34): Xaa in position 33 to 34 is any amino acid
  Variant (35)..(35): Xaa in position 35 is Asp or Glu
  Variant (37)..(37): Xaa in position 37 is any amino acid
  Variant (38)..(38): Xaa in position 38 is Asp or Pro
  Variant (39)..(39): Xaa in position 39 is any amino acid
  Variant (40)..(40): Xaa in position 40 is Gln, Arg or Ser
  Variant (41)..(41): Xaa in position 41 is Asp or Thr
GEXXLXXDXXPXNLLXXXFNXXXXXXXGWAXXXXXGXXXXX

SEQ ID NO: 119206 - protein, 15 aa, Artificial sequence
  protein pattern
  Variant (4)..(4): Xaa in position 4 is Leu or Val
  Variant (6)..(6): Xaa in position 6 is any amino acid
  Variant (7)..(7): Xaa in position 7 is Ser or Thr
  Variant (8)..(8): Xaa in position 8 is Ala, Ser or Thr
  Variant (9)..(9): Xaa in position 9 is Ile or Leu
  Variant (10)..(10): Xaa in position 10 is any amino acid
  Variant (14)..(14): Xaa in position 14 is Ala or Gly
  Variant (15)..(15): Xaa in position 15 is Trp or Tyr
RGGXGXXXXXAALXX

SEQ ID NO: 119207 - protein, 19 aa, Artificial sequence
  protein pattern
  Variant (2)..(2): Xaa in position 2 is Ile or Val
  Variant (4)..(4): Xaa in position 4 is Asp, Asn, Gln or Arg
  Variant (5)..(5): Xaa in position 5 is any amino acid
  Variant (6)..(6): Xaa in position 6 is Asp, Arg or Ser
  Variant (7)..(7): Xaa in position 7 is any amino acid
  Variant (8)..(8): Xaa in position 8 is Ala, Gly or Leu
  Variant (10)..(11): Xaa in position 10 to 11 is any or no amino acid
  Variant (13)..(13): Xaa in position 13 is any amino acid
  Variant (15)..(17): Xaa in position 15 to 17 is any amino acid
  Variant (18)..(18): Xaa in position 18 is Leu or Val
LXNXXXXXSXXQXDXXXXW

SEQ ID NO: 119208 - protein, 17 aa, Artificial sequence
  protein pattern
  Variant (2)..(2): Xaa in position 2 is Cys or Asp
  Variant (3)..(3): Xaa in position 3 is Phe or Leu
  Variant (6)..(6): Xaa in position 6 is Phe or Tyr
  Variant (8)..(8): Xaa in position 8 is Asn, Gln or Arg
  Variant (10)..(10): Xaa in position 10 is Asn, Pro, Ser or Thr
  Variant (11)..(11): Xaa in position 11 is any amino acid
  Variant (12)..(12): Xaa in position 12 is Glu, Gly, Gln or Ser
  Variant (13)..(13): Xaa in position 13 is Ala, Glu or Ser
  Variant (14)..(16): Xaa in position 14 to 16 is any amino acid
  Variant (17)..(17): Xaa in position 17 is Leu, Pro or Val
LXXLPXGXLXXXXXXXX

SEQ ID NO: 119209 - DNA, 273 bp, Escherichia coli
  CDS (1)..(273): transl_table=11
atggcactcccccgtattacccaaaaagagatgactgaacgcgagcagcgtgaacttaaaacactgctggatcgggcgcggattgcgcatggtcgcgtattgaccaactccgaaaccaacagcattaagaaagattacatcgataaattaatggttgagcgtgaggctgaagcgaaaaaagcccgccagttgaagaaaaagcaggcttataaaccggatcctgaagcgtcatttagctggtcagcaaatacgtcgacgcgcggcaggcgctaa

SEQ ID NO: 119210 - protein, 90 aa, Escherichia coli
MALPRITQKEMTEREQRELKTLLDRARIAHGRVLTNSETNSIKKDYIDKLMVEREAEAKKARQLKKKQAYKPDPEASFSWSANTSTRGRR

SEQ ID NO: 119211 - DNA, 345 bp, Klebsiella pneumoniae
  CDS (1)..(345): transl_table=11
ttgccatacagggtatcagtaaaatattcattgccgtacactgggtgctctggtctgactgagggcaccaccatggcactcccccgtattacacaaaaagagatgaccgagcgcgaacagcgcgaattgaaaacgctgcttgaccgcgcgcgtattgcgcatggccgcccgctgagcaatgcggaaacgaacagcgtgaaaaaggaatatatcgataagctgatggcgcagcgtgaagcggaagcgaagaaagcccgccaggtgagaaaacagcaggcttataaaacggataaggaagcgaccttttcctggtcggcgaatacgccgacccgcggcaggcgttaa

SEQ ID NO: 119212 - protein, 114 aa, Klebsiella pneumoniae
LPYRVSVKYSLPYTGCSGLTEGTTMALPRITQKEMTEREQRELKTLLDRARIAHGRPLSNAETNSVKKEYIDKLMAQREAEAKKARQVRKQQAYKTDKEATFSWSANTPTRGRR

SEQ ID NO: 119213 - DNA, 267 bp, Erwinia carotovora subsp. atroseptica SCRI1043
  CDS (1)..(267): transl_table=11
atgcccagactgactcagaaagacatgacagaaagtgaacaacgtcaactcaagacgttactcgatcaagcgagaaaaaaacaggatcgtccgctgaccaactctgagagtaatcatattaaagatgattacatcgataaactgatgaaggaacgtgaagccgtggcaaagcaagcgcgggccgagaagaagaaaaataaattcaaacctgattcctctacaacctatgagtggtctgctaatacgaatttacgaggccgccgctag

SEQ ID NO: 119214 - protein, 88 aa, Erwinia carotovora subsp. atroseptica SCRI1043
MPRLTQKDMTESEQRQLKTLLDQARKKQDRPLTNSESNHIKDDYIDKLMKEREAVAKQARAEKKKNKFKPDSSTTYEWSANTNLRGRR

SEQ ID NO: 119215 - DNA, 264 bp, Yersinia pseudotuberculosis IP 32953
  CDS (1)..(264): transl_table=11
atgaaaaagctaacattaaaagagatgaccgaaagtgagcaacgcgacgtcaaaacgcaactagacagagccagaattaacttagggcgcgcgttaacgaactcagaacaaaataaagttaaagatgaagctatcgaaaaaatcatgcacgctcgggaacaaatcgccaagttaacccgcgtagagagaaaaacaaaaaaaacagcaccaagcactaccacttttagctggtcagcatccatcagcacgcgtccaccacggtaa

SEQ ID NO: 119216 - protein, 87 aa, Yersinia pseudotuberculosis IP 32953
MKKLTLKEMTESEQRDVKTQLDRARINLGRALTNSEQNKVKDEAIEKIMHAREQIAKLTRVERKTKKTAPSTTTFSWSASISTRPPR

SEQ ID NO: 119217 - DNA, 21 bp, Artificial sequence
  primer
atggcactcccccgtattacc

SEQ ID NO: 119218 - DNA, 20 bp, Artificial sequence
  primer
ttagcgcctgccgcgcgtcg

SEQ ID NO: 119219 - protein, 84 aa, Artificial sequence
  consensus sequence
  Variant (2)..(2): Xaa in position 2 is any amino acid
  Variant (4)..(4): Xaa in position 4 is any amino acid
  Variant (8)..(8): Xaa in position 8 is any amino acid
  Variant (12)..(13): Xaa in position 12 to 13 is any amino acid
  Variant (16)..(16): Xaa in position 16 is any amino acid
  Variant (19)..(19): Xaa in position 19 is any amino acid
  Variant (22)..(25): Xaa in position 22 to 25 is any amino acid
  Variant (27)..(27): Xaa in position 27 is any amino acid
  Variant (29)..(29): Xaa in position 29 is any amino acid
  Variant (31)..(31): Xaa in position 31 is any amino acid
  Variant (33)..(33): Xaa in position 33 is any amino acid
  Variant (35)..(36): Xaa in position 35 to 36 is any amino acid
  Variant (38)..(40): Xaa in position 38 to 40 is any amino acid
  Variant (42)..(42): Xaa in position 42 is any amino acid
  Variant (44)..(44): Xaa in position 44 is any amino acid
  Variant (46)..(47): Xaa in position 46 to 47 is any amino acid
  Variant (50)..(51): Xaa in position 50 to 51 is any amino acid
  Variant (54)..(55): Xaa in position 54 to 55 is any amino acid
  Variant (57)..(59): Xaa in position 57 to 59 is any amino acid
  Variant (61)..(72): Xaa in position 61 to 72 is any amino acid
  Variant (73)..(73): Xaa in position 73 is any or no amino acid
  Variant (77)..(80): Xaa in position 77 to 80 is any amino acid
  Variant (82)..(83): Xaa in position 82 to 83 is any amino acid
TXKXMTEXEQRXXKTXLDXARXXXXRXLXNXEXNXXKXXXIXKXMXXREXXAKXXRXXXKXXXXXXXXXXXXXWSAXXXXRXXR

SEQ ID NO: 119220 - protein, 56 aa, Artificial sequence
  protein pattern
  Variant (2)..(2): Xaa in position 2 is any amino acid
  Variant (4)..(4): Xaa in position 4 is Asp or Glu
  Variant (8)..(8): Xaa in position 8 is Arg or Ser
  Variant (12)..(12): Xaa in position 12 is Asp, Glu or Gln
  Variant (13)..(13): Xaa in position 13 is Leu or Val
  Variant (16)..(16): Xaa in position 16 is any or no amino acid
  Variant (19)..(19): Xaa in position 19 is Gln or Arg
  Variant (22)..(24): Xaa in position 22 to 24 is any amino acid
  Variant (25)..(25): Xaa in position 25 is Asp or Gly
  Variant (27)..(27): Xaa in position 27 is Ala, Pro or Val
  Variant (29)..(29): Xaa in position 29 is Ser or Thr
  Variant (31)..(31): Xaa in position 31 is Ala or Ser
  Variant (33)..(33): Xaa in position 33 is Gln, Ser or Thr
  Variant (35)..(35): Xaa in position 35 is any amino acid
  Variant (36)..(36): Xaa in position 36 is Ile or Val
  Variant (38)..(38): Xaa in position 38 is Asp or Lys
  Variant (39)..(39): Xaa in position 39 is Asp or Glu
  Variant (40)..(40): Xaa in position 40 is any amino acid
  Variant (42)..(42): Xaa in position 42 is Asp or Glu
  Variant (44)..(44): Xaa in position 44 is Ile or Leu
  Variant (46)..(46): Xaa in position 46 is any amino acid
  Variant (47)..(47): Xaa in position 47 is Ala, Glu or Gln
  Variant (50)..(50): Xaa in position 50 is Ala or Gln
  Variant (51)..(51): Xaa in position 51 is any amino acid
  Variant (54)..(54): Xaa in position 54 is any amino acid
  Variant (55)..(55): Xaa in position 55 is Ala or Thr
TXKXMTEXEQRXXKTXLDXARXXXXRXLXNXEXNXXKXXXIXKXMXXREXXAKXXR

SEQ ID NO: 119221 - protein, 21 aa, Artificial sequence
  protein pattern
  Variant (2)..(2): Xaa in position 2 is any amino acid
  Variant (3)..(10): Xaa in position 3 to 10 is any or no amino acid
  Variant (14)..(14): Xaa in position 14 is Asn or Ser
  Variant (15)..(15): Xaa in position 15 is any amino acid
  Variant (16)..(16): Xaa in position 16 is Asn, Pro or Ser
  Variant (17)..(17): Xaa in position 17 is any amino acid
  Variant (19)..(19): Xaa in position 19 is Gly or Pro
  Variant (20)..(20): Xaa in position 20 is any amino acid
FXXXXXXXXXWSAXXXXRXXR

SEQ ID NO: 119222 - DNA, 861 bp, Synechocystis sp.; identical to SEQ ID NO: 61140
  CDS (1)..(861): transl_table=11

SEQ ID NO: 119223 - protein, 286 aa, Synechocystis sp.; identical to SEQ ID NO: 61141

SEQ ID NO: 119224 - DNA, 909 bp, Mesorhizobium loti MAFF303099
  CDS (1)..(909): transl_table=11
atgagcctgcaatttgtcgtcgatggattgctgacgggttcgatgatcggccttggcgccattggcgtgacgctgacctattcgatcctgcgcttctcgaattttgcccatggcgacttcatggcctggggcacctatgcgacgctcgccgtcgtcagcgccattggtgccaccttcggcaaggtagcacccatcgcgccgctgtccttcggctggccgctcctggttgcgctggtcgtcggcatggccttcaccgccttgctggccctgctgctcgacagagtgctgttctcgcggctgcgctcccagggccaggcgattatcgtggtgatggcgagcttcggtgcctcgatggcgttgaggagcctgctcgaattcaccttcagctcgcggccgacctatttcagccgggcgatccagattgccatgccggtcggcttcggcatccgcgtcacccccgaccagatcgcgcttctgctgctgaccacggtgctggtgctcggcgtgcatctgttgatgacgcgcacgcagaccggccgcgccatgcaggcgctcagccagaacgcggcgctggcccgcatcgtcggcatcgacgtcgccagcgtcgtgcgcgtcacctggatcatcggcggcgcgctcgcctgcgtcgccggcgtgatgatcggcatcctggtgcagatccgtccgttcatgggcttcgacatgctgctgccgatgttcgccgccgccatcctcggcggcatcggcagcattccgggtgcggtgctcggcgggctgatcatcgggctcgccgaggccggcgcggtgcagctgatcggcgccgaatggcgcgccgccgtctccttcatcatcctgatggcggtgctgttcgtgcggccgatcggccttttcggagttcgggaaagatga

SEQ ID NO: 119225 - protein, 302 aa, Mesorhizobium loti MAFF303099
MSLQFVVDGLLTGSMIGLGAIGVTLTYSILRFSNFAHGDFMAWGTYATLAVVSAIGATFGKVAPIAPLSFGWPLLVALVVGMAFTALLALLLDRVLFSRLRSQGQAIIVVMASFGASMALRSLLEFTFSSRPTYFSRAIQIAMPVGFGIRVTPDQIALLLLTTVLVLGVHLLMTRTQTGRAMQALSQNAALARIVGIDVASVVRVTWIIGGALACVAGVMIGILVQIRPFMGFDMLLPMFAAAILGGIGSIPGAVLGGLIIGLAEAGAVQLIGAEWRAAVSFIILMAVLFVRPIGLFGVRER

SEQ ID NO: 119226 - DNA, 870 bp, Aeropyrum pernix K1; identical to SEQ ID NO: 61104
  CDS (1)..(870): transl_table=11

SEQ ID NO: 119227 - protein, 289 aa, Aeropyrum pernix K1; identical to SEQ ID NO: 61105

SEQ ID NO: 119228 - DNA, 1047 bp, Deinococcus radiodurans R1; identical to SEQ ID NO: 61118
  CDS (1)..(1047): transl_table=11

SEQ ID NO: 119229 - protein, 348 aa, Deinococcus radiodurans R1; identical to SEQ ID NO: 61119

SEQ ID NO: 119230 - DNA, 1035 bp, Agrobacterium tumefaciens str. C58
  CDS (1)..(1035): transl_table=11
ttggacgcgacaattgccactttcctgatccaggacggcgtcaccaacggcgcgatttatgcgctgctgggccttgccatcgttctggttttctcggtcacgcgggtgatcttcattccgcagggtgagttcgtcgcccatggcgctttgaccctggcgctgctggatgccggccgtgtgccgggcacgctgaacctgctgctgtgcatgggcgtcgtcgctcttgtgctggatctgtgggcaatgcggcgggacatgcgccttccgcgactgttgcaggcgcttgccgtcaaccttgccctgcccggcgcgatttacgggctcgtcgcaattctggcgcccatgcagctcccctcgttcctgcgtgccatgattaccatcgcgatcatcgcgcccatgggatattacgtctatcgcatcgcctaccggccgctttccgatgcttccgttctcgttctgctgattgcctccgtcggtgtgcatctggcgttgatgggcctcgggctcgctttcttcggtccggaaggcctgcgcgcggcggcgctcagtgatggtggtttcacgctggggccaatgctcgttactgcccagagcattttcatctatctcgcgaccatcctcgtcatgatcggtctttacctgtttttcgaaaagacactgctcggcaaggcgctgaaagcaacggcgatcaaccggctcggcgcccgtctcgtcggtgttcgaacggaactcaccggcgtcaccgcctttgtgctggccgcagccatagccgcgatttcgggcgtattgatcgggccaatcacgaccatcttctacgatacgggcttcctcattggtctcaagggttttgtcgctgccattctcggcggcatggcgagctttcccgtcacggcggttgcggcggtgggcgttggactcatcgaggctttcgcctccttttttgctagcgacttcaaggagatcatcgtgttcggcctcatcgtgcccgttttgatctggctttccttcggcgcaagccatcatgaggaagagtga

SEQ ID NO: 119231 - protein, 344 aa, Agrobacterium tumefaciens str. C58
MDATIATFLIQDGVTNGAIYALLGLAIVLVFSVTRVIFIPQGEFVAHGALTLALLDAGRVPGTLNLLLCMGVVALVLDLWAMRRDMRLPRLLQALAVNLALPGAIYGLVAILAPMQLPSFLRAMITIAIIAPMGYYVYRIAYRPLSDASVLVLLIASVGVHLALMGLGLAFFGPEGLRAAALSDGGFTLGPMLVTAQSIFIYLATILVMIGLYLFFEKTLLGKALKATAINRLGARLVGVRTELTGVTAFVLAAAIAAISGVLIGPITTIFYDTGFLIGLKGFVAAILGGMASFPVTAVAAVGVGLIEAFASFFASDFKEIIVFGLIVPVLIWLSFGASHHEEE

SEQ ID NO: 119232 - DNA, 903 bp, Agrobacterium tumefaciens str. C58; identical to SEQ ID NO: 61152
  CDS (1)..(903): transl_table=11

SEQ ID NO: 119233 - protein, 300 aa, Agrobacterium tumefaciens str. C58; identical to SEQ ID NO: 61153

SEQ ID NO: 119234 - DNA, 888 bp, Agrobacterium tumefaciens str. C58; identical to SEQ ID NO: 61124
  CDS (1)..(888): transl_table=11

SEQ ID NO: 119235 - protein, 295 aa, Agrobacterium tumefaciens str. C58; identical to SEQ ID NO: 61125

SEQ ID NO: 119236 - DNA, 867 bp, Nostoc sp. PCC 7120; identical to SEQ ID NO: 61142
  CDS (1)..(867): transl_table=11

SEQ ID NO: 119237 - protein, 288 aa, Nostoc sp. PCC 7120; identical to SEQ ID NO: 61143

SEQ ID NO: 119238 - DNA, 942 bp, Agrobacterium tumefaciens str. C58; identical to SEQ ID NO: 61150
  CDS (1)..(942): transl_table=11

SEQ ID NO: 119239 - protein, 313 aa, Agrobacterium tumefaciens str. C58; identical to SEQ ID NO: 61151

SEQ ID NO: 119240 - DNA, 894 bp, Agrobacterium tumefaciens str. C58; identical to SEQ ID NO: 61156
  CDS (1)..(894): transl_table=11

SEQ ID NO: 119241 - protein, 297 aa, Agrobacterium tumefaciens str. C58; identical to SEQ ID NO: 61157

SEQ ID NO: 119242 - DNA, 885 bp, Corynebacterium glutamicum ATCC 13032; identical to SEQ ID NO: 61166
  CDS (1)..(885): transl_table=11

SEQ ID NO: 119243 - protein, 294 aa, Corynebacterium glutamicum ATCC 13032; identical to SEQ ID NO: 61167

SEQ ID NO: 119244 - DNA, 933 bp, Streptomyces coelicolor A3(2); identical to SEQ ID NO: 61170
  CDS (1)..(933): transl_table=11

SEQ ID NO: 119245 - protein, 310 aa, Streptomyces coelicolor A3(2); identical to SEQ ID NO: 61171

SEQ ID NO: 119246 - DNA, 873 bp, Streptomyces coelicolor A3(2); identical to SEQ ID NO: 61172
  CDS (1)..(873): transl_table=11

SEQ ID NO: 119247 - protein, 290 aa, Streptomyces coelicolor A3(2); identical to SEQ ID NO: 61173

SEQ ID NO: 119248 - DNA, 927 bp, Yersinia pestis KIM
  CDS (1)..(927): transl_table=11
atgtcagagcagtttttatattttctgcagcagatgttcaacggtattacgttgggcagcacttatgcgctgatcgccattggttataccatggtgtacggcattatcggcatgatcaactttgctcacggcgaagtatatatgatcagcagttacgtctcatttatcgtgatcgccgcattaatgatggtggggatcgatgccagttggctgttgattggttgcgctttcctagtgtcgattgtgatcgccagtacttacggctggagcattgaacgggtagcctataagccagttcgtcgctctaagcgcctgatcgcgctgatttcggcgatcggcatgtctattttcctacagaactatgtcagcttgacgcaaggttcacgggatttggcattacccagtctggtcaccgggcagtggaccttaggtgagagtaatggctttgctgcgacgatcagcaccatgcagctgacgatttggattgtcaccttcttggccatgttggcgctgactctgtttatccgttattcacgaatgggccgtgcttgccgcgcctgtgccgaagatttgaaaatggccagtttactgggcattaacactgaccgggttatctcgctgacttttgtgattggcgcactgatggccgctgtcgcgggtgtgttactcggccagttctacggggtgatcaatccctatattggctttatggcagggatgaaagcattcactgccgcagtattaggcggtattggcagtattccgggcgcaatgattggtggtttggttctcggtgtggctgaagcactgacctccgcttatctcagcactgaatacaaagatgcggtttcattcgcgctgctgattgtggtgttgttagtgatgcctaccgggattttaggccgtccggaggttgaaaaagtatga

SEQ ID NO: 119249 - protein, 308 aa, Yersinia pestis KIM
MSEQFLYFLQQMFNGITLGSTYALIAIGYTMVYGIIGMINFAHGEVYMISSYVSFIVIAALMMVGIDASWLLIGCAFLVSIVIASTYGWSIERVAYKPVRRSKRLIALISAIGMSIFLQNYVSLTQGSRDLALPSLVTGQWTLGESNGFAATISTMQLTIWIVTFLAMLALTLFIRYSRMGRACRACAEDLKMASLLGINTDRVISLTFVIGALMAAVAGVLLGQFYGVINPYIGFMAGMKAFTAAVLGGIGSIPGAMIGGLVLGVAEALTSAYLSTEYKDAVSFALLIVVLLVMPTGILGRPEVEKV

SEQ ID NO: 119250 - DNA, 870 bp, Thermosynechococcus elongatus BP-1; identical to SEQ ID NO: 61174
  CDS (1)..(870): transl_table=11

SEQ ID NO: 119251 - protein, 289 aa, Thermosynechococcus elongatus BP-1; identical to SEQ ID NO: 61175

SEQ ID NO: 119252 - DNA, 864 bp, Oceanobacillus iheyensis HTE831; identical to SEQ ID NO: 61178
  CDS (1)..(864): transl_table=11

SEQ ID NO: 119253 - protein, 287 aa, Oceanobacillus iheyensis HTE831; identical to SEQ ID NO: 61179

SEQ ID NO: 119254 - DNA, 927 bp, Bifidobacterium longum NCC2705; identical to SEQ ID NO: 61180
  CDS (1)..(927): transl_table=11

SEQ ID NO: 119255 - protein, 308 aa, Bifidobacterium longum NCC2705; identical to SEQ ID NO: 61181

SEQ ID NO: 119256 - DNA, 870 bp, Streptococcus mutans UA159
  CDS (1)..(870): transl_table=11
atgctccaacaacttattaatggtcttatcctagggagtgtctatgctctgttagcccttggttataccatggtttatggaattattaagttaattaactttgcccatggagatatttatatgatgggagcctttattggttattttcttattacaaaatatcatatgaatttctttgtggctcttgtgctgacgatggtcttaacagctatcttaggggttgtgattgaatttctggcttatcgtcctttgcggaattcgacacgtatcgctgctttgattactgccattggtgtttctttttttctcgaatacagtatggttcgtttagttggtgccaataaacatgcttttccccaaacccttgctacagtgaaatataatttaggtcctgttagtgtaaccaatgtacaactcatcattttaggagtctctatcttcttgatgttggctttgcagtttattgtccaaaaaactaaaatgggtaaagccatgcgtgccgtttcagttgacagtgatgctgcgcagttaatgggaatcaatgttaatagtactattagttttacctttgctttaggttctgcacttgctggtgctggtggtgtcttgattggactttattataattctgttgatccactgatgggaatggttcccggtattaaagcctttgtcgccgctgttttaggcggtattggtattattccaggtgcagctgtcgggggctttatgattggtcttttagagacgttttctgtttctatcggtcttgcaagttacaaggatgcagttgtctatgcagtgcttatcattatccttttagtaagaccagctggtattttaggaaaaaatgtgaaagagaaggtgtaa

SEQ ID NO: 119257 - protein, 289 aa, Streptococcus mutans UA159
MLQQLINGLILGSVYALLALGYTMVYGIIKLINFAHGDIYMMGAFIGYFLITKYHMNFFVALVLTMVLTAILGVVIEFLAYRPLRNSTRIAALITAIGVSFFLEYSMVRLVGANKHAFPQTLATVKYNLGPVSVTNVQLIILGVSIFLMLALQFIVQKTKMGKAMRAVSVDSDAAQLMGINVNSTISFTFALGSALAGAGGVLIGLYYNSVDPLMGMVPGIKAFVAAVLGGIGIIPGAAVGGFMIGLLETFSVSIGLASYKDAVVYAVLIIILLVRPAGILGKNVKEKV

SEQ ID NO: 119258 - DNA, 861 bp, Pseudomonas putida KT2440; identical to SEQ ID NO: 61188
  CDS (1)..(861): transl_table=11

SEQ ID NO: 119259 - protein, 286 aa, Pseudomonas putida KT2440; identical to SEQ ID NO: 61189

SEQ ID NO: 119260 - DNA, 924 bp, Pseudomonas putida KT2440; identical to SEQ ID NO: 61190
  CDS (1)..(924): transl_table=11

SEQ ID NO: 119261 - protein, 307 aa, Pseudomonas putida KT2440; identical to SEQ ID NO: 61191

SEQ ID NO: 119262 - DNA, 1041 bp, Pseudomonas putida KT2440; identical to SEQ ID NO: 60901
  CDS (1)..(1041): transl_table=11

SEQ ID NO: 119263 - protein, 346 aa, Pseudomonas putida KT2440; identical to SEQ ID NO: 60902

SEQ ID NO: 119264 - DNA, 1080 bp, Pseudomonas putida KT2440; identical to SEQ ID NO: 60903
  CDS (1)..(1080): transl_table=11

SEQ ID NO: 119265 - protein, 359 aa, Pseudomonas putida KT2440; identical to SEQ ID NO: 60904

SEQ ID NO: 119266 - DNA, 915 bp, Pseudomonas putida KT2440; identical to SEQ ID NO: 61198
  CDS (1)..(915): transl_table=11

SEQ ID NO: 119267 - protein, 304 aa, Pseudomonas putida KT2440; identical to SEQ ID NO: 61199

SEQ ID NO: 119268 - DNA, 879 bp, Lactobacillus plantarum WCFS1
  CDS (1)..(879): transl_table=11
atgcagacatttggacaacaattgatcaacggactatcgctaggaagtatctacgcgttattggcgctaggctacacgatggtttatggcattatcaaattaattaattttgcacatggcgatatttatatgttgggggccttttggggctattacagtttgaagtcactacactttaactttgttgcggcgctcctgtccgcaatggtgatctgcgcagttagtggtgtgattattgaatatttcgcgtaccgcccattacgccattcaccgcgaattaccgcgctaatcacggcaatcggtgtttcattcttgcttgagaatggaatgtcatactttgttggtgcgagtgcccgttcatttccccaagcaatcaaagtggtgacttatcactggggcggattgcgggtatcgaatgtgcagctactgatcttaggaacggcgtgcctattaatgattctattggaattaattatcaaacgtaccaaaatgggtaaagcaatgcgggccgtttctgttgatcccgaagctgcacagttggtgggcatcaatcttaaccatacgatttcgttcacgttcgcattagggtctgcaatggccggcgctgccggagtcttgattggcctatactataattcgattgatccgttgatgggcatgacgcccggtatcaaggcctttgtcgcagccgtgattggtgggattggttctgtgcctggggcttcattggggggctttattatcggcatcctggagactggtgttcaggcgattggcctatccgcatacaaggacgcggtggtttactttgtcttaattgttattttgctcgtgttgccggctggaatattcggtaaacgaaccaaggaaaaagtctga

SEQ ID NO: 119269 - protein, 292 aa, Lactobacillus plantarum WCFS1
MQTFGQQLINGLSLGSIYALLALGYTMVYGIIKLINFAHGDIYMLGAFWGYYSLKSLHFNFVAALLSAMVICAVSGVIIEYFAYRPLRHSPRITALITAIGVSFLLENGMSYFVGASARSFPQAIKVVTYHWGGLRVSNVQLLILGTACLLMILLELIIKRTKMGKAMRAVSVDPEAAQLVGINLNHTISFTFALGSAMAGAAGVLIGLYYNSIDPLMGMTPGIKAFVAAVIGGIGSVPGASLGGFIIGILETGVQAIGLSAYKDAVVYFVLIVILLVLPAGIFGKRTKEKV

SEQ ID NO: 119270 - DNA, 876 bp, Bordetella parapertussis 12822
  CDS (1)..(876): transl_table=11
atggatacagtgctgttcgccaatgccatcatcaatggcgtcattgtcgggttgctgctggcgttaccggccttggccattacgttggtattcggcatagcccggtttcccaacgccgccgccggcgactacatgaccttcggcgcctacgcgaccgtggccgcgcaggcgttcatgggcgcgtcgctggtcggcagcgcgatcgtggcgacgctggccaccgggctgctttccctgttcttctatttctgggtcttcaggaaactggcgcagcgctcgctggtggcgcgcctgatcgcctcgatcggcatcgccttcgccgtcagggccgccattaccttcttcgccgggcacgggcaatacaccatccaggcgccgctgcagcgggcctggaacttcggcgggatacgcatcctgccgctggatgtgtacatcctcctggccgcgctgcttgccctggccttcatgttcggcctgctttacctgtcgccgacgggccggcgcatgcgggccgtatcggacaacccgcaactggcggccgtcggcggcatcggcgtgcgcaaggtaatggtgatcctctgggggatcgtcggggtgttctcggggctgggcggcgtattgctgggcatcaaggcgacggtgctgccggaactgggctgggaactgctgctgcccatgttcgccgcggtgatcctgggcggggtcggcagtccggtcggcgccgtgctggggatgatcgtgttcggcatcgcccaggaggtcgcgacgctctatatcgggtccgcctacaagattgtgatcgctttcctggtgttgctggttgtcctgctgttcaggccccagggcatcatggaccgcgtccaggcagtgaggtaa

SEQ ID NO: 119271 - protein, 291 aa, Bordetella parapertussis 12822
MDTVLFANAIINGVIVGLLLALPALAITLVFGIARFPNAAAGDYMTFGAYATVAAQAFMGASLVGSAIVATLATGLLSLFFYFWVFRKLAQRSLVARLIASIGIAFAVRAAITFFAGHGQYTIQAPLQRAWNFGGIRILPLDVYILLAALLALAFMFGLLYLSPTGRRMRAVSDNPQLAAVGGIGVRKVMVILWGIVGVFSGLGGVLLGIKATVLPELGWELLLPMFAAVILGGVGSPVGAVLGMIVFGIAQEVATLYIGSAYKIVIAFLVLLVVLLFRPQGIMDRVQAVR

SEQ ID NO: 119272 - DNA, 876 bp, Bordetella bronchiseptica RB50
  CDS (1)..(876): transl_table=11
atggatacagtgctgttcgccaatgccatcatcaatggcgtcattgtcgggttgctgctggcgttaccggccttggccattacgttggtattcggcatagcccggtttcccaacgccgccgccggcgactacatgaccttcggcgcctacgcgaccgtggccgcgcaggcgttcatgggcgcgtcgctggtcggcagcgcgatcgtggcgacgctggccaccgggctgctttccctgttcttctatttctgggtcttcaggaaactggcgcagcgctcgctggtggcgcgcctgatcgcctcgatcggcatcgccttcgccgtcagggccgccattaccttcttcgccgggcacgggcaatacaccatccaggcgccgctgcagcgggcctggaacttcggcgggatacgcatcctgccgctggatgtgtacatcctcctggccgcgctgcttgccctggccttcatgttcggcctgctttacctgtcgccgacgggccggcgcatgcgggccgtatcggacaacccgcaactggcggccgtcggcggcatcggcgtgcgcaaggtaatggtgatcctctgggggatcgtcggggtgttctcggggctgggcggcgtattgctgggcatcaaggcgacggtgctgccggaactgggctgggaactgctgctgcccatgttcgccgcggtgatcctgggcggggtcggcagtccggtcggcgccgtgctggggatgatcgtgttcggcatcgcccaggaggccgcgacgctctatatcgggtccgcctacaagattgtgatcgctttcctggtgttgctggttgtcctgctgttcaggccccagggcatcatgggccgcgtccaggcagtgaggtaa

SEQ ID NO: 119273 - protein, 291 aa, Bordetella bronchiseptica RB50
MDTVLFANAIINGVIVGLLLALPALAITLVFGIARFPNAAAGDYMTFGAYATVAAQAFMGASLVGSAIVATLATGLLSLFFYFWVFRKLAQRSLVARLIASIGIAFAVRAAITFFAGHGQYTIQAPLQRAWNFGGIRILPLDVYILLAALLALAFMFGLLYLSPTGRRMRAVSDNPQLAAVGGIGVRKVMVILWGIVGVFSGLGGVLLGIKATVLPELGWELLLPMFAAVILGGVGSPVGAVLGMIVFGIAQEAATLYIGSAYKIVIAFLVLLVVLLFRPQGIMGRVQAVR

SEQ ID NO: 119274 - DNA, 969 bp, Thermus thermophilus HB27; identical to SEQ ID NO: 61280
  CDS (1)..(969): transl_table=11

SEQ ID NO: 119275 - protein, 322 aa, Thermus thermophilus HB27; identical to SEQ ID NO: 61281

SEQ ID NO: 119276 - DNA, 906 bp, Desulfovibrio vulgaris subsp. vulgaris str. Hildenborough; identical to SEQ ID NO: 61282
  CDS (1)..(906): transl_table=11

SEQ ID NO: 119277 - protein, 301 aa, Desulfovibrio vulgaris subsp. vulgaris str. Hildenborough; identical to SEQ ID NO: 61283

SEQ ID NO: 119278 - DNA, 891 bp, Symbiobacterium thermophilum IAM 14863; identical to SEQ ID NO: 61296
  CDS (1)..(891): transl_table=11

SEQ ID NO: 119279 - protein, 296 aa, Symbiobacterium thermophilum IAM 14863; identical to SEQ ID NO: 61297

SEQ ID NO: 119280 - DNA, 1011 bp, Silicibacter pomeroyi DSS-3
  CDS (1)..(1011): transl_table=11
atggaaatcctcaacgcccttgtggcgctttcgaactttgtcctgatccccgcgatcgcctatggcagccagctggcgctgggcgcgctgggcgtcacgctgatctatggcatcctgcggttctcgaactttgcgcatggtgacaccatggcctttggcgccatgatcaccgtgctggtgacctggtggatgcagtcgcatggcatcagcctcgggccactgcccaccgcgcttttggccctgcccttcggcatcctgggctgtatggcgctggtgctggtcaccgaccgcgcggtctatcgcttttaccgcgagcaaaaggcgaaaccggtgatcctggtcatcgtctcgatgggggtgatgttcatcatgaacgggctggtgcgtttcgtcatcggccccaatgaccagaacttcgccgatggcacccggttcctgatctcggcccgcgacttcaagaagatgaccgggctggacgaggggttggcgatcaagaccacccaggcgctgaccgtggttgtcgcggtgatctgcgtggcgctgctgttctggttcctgaaccggacccgcaccggcaaatccatgcgcgcctattccgataacgaggatctggcgctgctctcgggaatcaaccccgaaagggtggtgatgtacacctggctgatcgtcgcggcgctggccaccacggcaggggtgctttacgggctcgacaagagcttcaagcccttcgtctatttccagctgctgctgccgatcttcgcctcggccatcgtcggcggtctgggcagcccgctgggcgccatcgccggtggcttcgtcatcgccttttccgaggtgacggtgacctatgcctggaaaaaggtgctgggttatctcgctcccgaaggaatgtcgcctgacgggttggtgcagcttctgagcaccgactacaaattcgcggtcagcttcgtcatcctgctgatcgtgctgctgttcaagcctacgggcctcttcaaggggaaagcggtatga

SEQ ID NO: 119281 - protein, 336 aa, Silicibacter pomeroyi DSS-3
MEILNALVALSNFVLIPAIAYGSQLALGALGVTLIYGILRFSNFAHGDTMAFGAMITVLVTWWMQSHGISLGPLPTALLALPFGILGCMALVLVTDRAVYRFYREQKAKPVILVIVSMGVMFIMNGLVRFVIGPNDQNFADGTRFLISARDFKKMTGLDEGLAIKTTQALTVVVAVICVALLFWFLNRTRTGKSMRAYSDNEDLALLSGINPERVVMYTWLIVAALATTAGVLYGLDKSFKPFVYFQLLLPIFASAIVGGLGSPLGAIAGGFVIAFSEVTVTYAWKKVLGYLAPEGMSPDGLVQLLSTDYKFAVSFVILLIVLLFKPTGLFKGKAV

SEQ ID NO: 119282 - DNA, 954 bp, Synechococcus elongatus PCC 6301; identical to SEQ ID NO: 61314
  CDS (1)..(954): transl_table=11

SEQ ID NO: 119283 - protein, 317 aa, Synechococcus elongatus PCC 6301; identical to SEQ ID NO: 61315

SEQ ID NO: 119284 - DNA, 960 bp, Dechloromonas aromatica RCB; identical to SEQ ID NO: 61324
  CDS (1)..(960): transl_table=11

SEQ ID NO: 119285 - protein, 319 aa, Dechloromonas aromatica RCB; identical to SEQ ID NO: 61325

SEQ ID NO: 119286 - DNA, 1446 bp, Thermobifida fusca YX
  CDS (1)..(1446): transl_table=11
gtgcgcagacgcctcgtgactgtcctcctcgccgtagtcaccgccatcctggtgacaccggctgtggcggtggcagacactcagggcggtgagacgctcaacggtcaaatccgcaaacccgagaccgtggcagggatcgacatcacggtcttccagggggacgaggagatcgggacagcgaccaccgactctgaggggagatgggaagtagcgttgcccggaccgggcaactaccgtgtcgtattggacgaggagtccgttcccgatgagttcgtcgttgcagaccaacccggagccgaacacgccgacgtcaacgtccggccgggacagcaacgcacggtgatcttcgtcctcgcctacgccgacgaagcgagcaccgaaccgtccccgagccagagcagcgacgacgctgacgacggggcaggggccgcagccagcgatacggaggatggccttgccgcaccgggtgtctcctccaatgcttctttcggcaccaaggccatccagctcactgttgccggactgctctacgggctcatcatcgctatctcagcggtcggcctctccctcatcttcgggacgaccaagctgacgaacttcgcccacggcgacatggtgaccttcggcgccctcatggccctcctggtcagcgggatgacgctgttcgccggactccacaccgcggtcacgaacctgctggccgacgtgtggctcctcggaccggtgctgggcttcgtcacccgtcccatggtgctgggcacggtggtggcggtcctcttgggcgcggccctcggcgcattcctcgagcggttcatctggcggccgctgcgcaaacgcaatgtggcgctcatccagatgttcatcgtctccatcggcctggcaatggtgctgcggcacgtcctgatggtggcgttcggcagcaaccgcatgtcctacccggacttccagctccaggcgatgctgcggctagggccgatcgcgatcacccctcgagacctggtcctcatgatcctctccgtgctggtgctcgtcggggtcgccgccctgctgcagttcacccgagtggggaaagcgatgcgggcggtctccgacaaccgggacctcgccgaatcctccggcatcaacgtggaccgggtgacgctgtatgtgtggaccctgggcggagccctgaccgcgctcggcggcgtcttctacggcctcaaccagatcgtccactggcagatgggcttccacctgctgctcttgatgttcgccgcggtcatcctgggcggtttgggcaccgcctacggagcgatggtcggcggactcatcatcggcctggtggcgcagttgtccacgctctggttcccctcgcagctcatgaacgcgtgggcgctgggactcatgatcatcatgctgctggttcggccgcagggcatcctgggccggcgtgagcgagtcggctag

SEQ ID NO: 119287 - protein, 481 aa, Thermobifida fusca YX
MRRRLVTVLLAVVTAILVTPAVAVADTQGGETLNGQIRKPETVAGIDITVFQGDEEIGTATTDSEGRWEVALPGPGNYRVVLDEESVPDEFVVADQPGAEHADVNVRPGQQRTVIFVLAYADEASTEPSPSQSSDDADDGAGAAASDTEDGLAAPGVSSNASFGTKAIQLTVAGLLYGLIIAISAVGLSLIFGTTKLTNFAHGDMVTFGALMALLVSGMTLFAGLHTAVTNLLADVWLLGPVLGFVTRPMVLGTVVAVLLGAALGAFLERFIWRPLRKRNVALIQMFIVSIGLAMVLRHVLMVAFGSNRMSYPDFQLQAMLRLGPIAITPRDLVLMILSVLVLVGVAALLQFTRVGKAMRAVSDNRDLAESSGINVDRVTLYVWTLGGALTALGGVFYGLNQIVHWQMGFHLLLLMFAAVILGGLGTAYGAMVGGLIIGLVAQLSTLWFPSQLMNAWALGLMIIMLLVRPQGILGRRERVG

SEQ ID NO: 119288 - DNA, 864 bp, Ralstonia eutropha JMP134; identical to SEQ ID NO: 61332
  CDS (1)..(864): transl_table=11

SEQ ID NO: 119289 - protein, 287 aa, Ralstonia eutropha JMP134; identical to SEQ ID NO: 61333

SEQ ID NO: 119290 - DNA, 867 bp, Anabaena variabilis ATCC 29413; identical to SEQ ID NO: 61338
  CDS (1)..(867): transl_table=11

SEQ ID NO: 119291 - protein, 288 aa, Anabaena variabilis ATCC 29413; identical to SEQ ID NO: 61339

SEQ ID NO: 119292 - DNA, 1011 bp, Rhodobacter sphaeroides 2.4.1
  CDS (1)..(1011): transl_table=11
atggatatcctgaacgccctcgtggcattcctcaatttcgtcttcgtgccgggtctggcctacggggcgcagctggcgctcggggcgctcggcgtcacgctgatctacgggatcctgcgcttctcgaacttcgcccacggcgacacaatggccttcggcacaatggtgacgatcctcggcacctgggggctgcaggcggcgggggtgacggcgggaccgctgcccaccgcccttctcgccctgcccctgggcatcgcggtgacggcggcgctggtgctggcgaccgaccgcgcggtctaccgcttctaccggcggcagaaggcggcgccgaccatcctcgtcatcgtctcgctgggcgtcatgttcgtgatgaacgggatcgtccgcttcatcattggcgtggaggagatcggcttcgccgacggcgagcggttcctgatcactgccggcgatttccgcaagatgacggggctttcggagggactcgccatcaagaccacgcaggcgatcacggtggtgacggcgctgatcgtggtggcggcgctgttctggttcctgaaccgcacccgcaccggcaagtcgatgcgcgccttctcggacaatgaggatctggcgctgctctcgggcatcaaccccgagcgggtggtggccgtgacctggatcctggccgcggcgctcgccaccacggcgggcgtgctctacgggctcgacaagagcttcaaggccttcacctacttccagctcctgctgccgatcttcgccgcggccatcgtgggcgggctcggcagcccgctcggcgccattgcgggcggcttcgtcatcgccttctcggaagtgacggtgacctatgcctggaagaaggttgcgacctacctcctgcccgacgcgctggcccccgacgggctcgtgcagctcatgtccaccgactacaagttcgcggtgagcttcacgatcctcatcatcgtcctgctgttcatgcccaccgggctcttcaaggggaaatcggtatga

SEQ ID NO: 119293 - protein, 336 aa, Rhodobacter sphaeroides 2.4.1
MDILNALVAFLNFVFVPGLAYGAQLALGALGVTLIYGILRFSNFAHGDTMAFGTMVTILGTWGLQAAGVTAGPLPTALLALPLGIAVTAALVLATDRAVYRFYRRQKAAPTILVIVSLGVMFVMNGIVRFIIGVEEIGFADGERFLITAGDFRKMTGLSEGLAIKTTQAITVVTALIVVAALFWFLNRTRTGKSMRAFSDNEDLALLSGINPERVVAVTWILAAALATTAGVLYGLDKSFKAFTYFQLLLPIFAAAIVGGLGSPLGAIAGGFVIAFSEVTVTYAWKKVATYLLPDALAPDGLVQLMSTDYKFAVSFTILIIVLLFMPTGLFKGKSV

SEQ ID NO: 119294 - DNA, 885 bp, Carboxydothermus hydrogenoformans Z-2901
  CDS (1)..(885): transl_table=11
atgacggaatttatccagcagttgataaacggaatatctgtaggaagcatttatgctttaattgccctgggatataccatggtttacggtattataaaactcataaactttgcccacggcgatgtttatatgcttggtgcttttgttgggctttatgcgaccgcggttttaaaaatgtcgtttgttccggcgttgattgtttccatgattgcttgtgcaattttggggattattatcgaaaggttagcttaccggccgttaagaaattctcccaagatagtaattttaatcacggcgataggtgtttcgctccttttggagtataccaccatgtttttcctgggcccccagcctcgagcttttccggaggtttttaaacaagtttcttatccgttgttggggggaaaagttaccatctccaatcgggaaattttgattattgttgttaccattattttaatgcttctattgcaatacattgttcataataccaaaattggtaaagcgatgcgggcggtttcttatgatatgcaggccgcacgcttaatggggataaatgtagatacgacaatatccatcacctttgcgattggttctgccctggcagcagcagcaggggtgctggttggggtatattacaataaggtctttcctttaatgggcataatgtttggtttgaaagcttttgtttctgcggttttagggggaataggaattattccgggagcaatgaccgggggcttaattttggggattaccgaatctttggtaagcggctatggaagttcgttataccgggatccggtggcttttgtcattttaattatcatcttgttagtcaaaccatccggcatattcggtaaaaacgtccgggagaaagtgtag

SEQ ID NO: 119295 - protein, 294 aa, Carboxydothermus hydrogenoformans Z-2901
MTEFIQQLINGISVGSIYALIALGYTMVYGIIKLINFAHGDVYMLGAFVGLYATAVLKMSFVPALIVSMIACAILGIIIERLAYRPLRNSPKIVILITAIGVSLLLEYTTMFFLGPQPRAFPEVFKQVSYPLLGGKVTISNREILIIVVTIILMLLLQYIVHNTKIGKAMRAVSYDMQAARLMGINVDTTISITFAIGSALAAAAGVLVGVYYNKVFPLMGIMFGLKAFVSAVLGGIGIIPGAMTGGLILGITESLVSGYGSSLYRDPVAFVILIIILLVKPSGIFGKNVREKV

SEQ ID NO: 119296 - DNA, 906 bp, Desulfovibrio desulfuricans G20; identical to SEQ ID NO: 61346
  CDS (1)..(906): transl_table=11

SEQ ID NO: 119297 - protein, 301 aa, Desulfovibrio desulfuricans G20; identical to SEQ ID NO: 61347

SEQ ID NO: 119298 - DNA, 891 bp, Synechococcus elongatus PCC 7942; identical to SEQ ID NO: 61350
  CDS (1)..(891): transl_table=11

SEQ ID NO: 119299 - protein, 296 aa, Synechococcus elongatus PCC 7942; identical to SEQ ID NO: 61351

SEQ ID NO: 119300 - DNA, 942 bp, Synechococcus elongatus PCC 7942; identical to SEQ ID NO: 61352
  CDS (1)..(942): transl_table=11

SEQ ID NO: 119301 - protein, 313 aa, Synechococcus elongatus PCC 7942; identical to SEQ ID NO: 61353

SEQ ID NO: 119302 - DNA, 873 bp, Rhodospirillum rubrum ATCC 11170
  CDS (1)..(873): transl_table=11
gtggattccgcctatctccttaatctggccttcaacggcgcggtcatcgggctgatcaccgccctggccgccctgtcgatcaccctggtcttcggcatcgcccgctttcccaacgccgccaccggcgatgtcgccaccgccggcgccttcgccggtctgcttggcccggtgctgggcagcggagctttgccgatcatcctggttggcatggcgacttcagcggctgtgtcgctgctgttctatgtcgtgctgtttcgcgccctggccaaacgctcgccggtggcctcgctgatcgcctcgatcggcatggcctttttcctgcgcgccgttctcacctatttcatcggccatgatcagcgggtctatccgctgccgctggtccgcgccgtgccctttggtcccttgcgggttcaggccgccgatatccaggtgatcgtctgggccggcgccgccctggccgtgacctttgccctgatccatctgacgccgatcggcaaacgcatgcgcgccgtcgccgataaccccgatctggcgcgcagcagcggcatcaacgccaataaggtgatggtggtgatgtgggtggtcgccggcttgctcgccgggctggccggaaccctgctgggcgtcaagaccgtggtctcgccggaaatgggctgggatctgctgatgccggccttcgccgccaccatccttggcaccatcggcaatcccttgggcgcggtgctgggcggcctgctgatcggtctcgcccaagagctttccacgccgctggtcggcttcacctacaagatcggcgtcggttttctggtgttgctgctgaccttgctgatccgaccccagggcctgttcgccaagaacagcctcgtccgctga

SEQ ID NO: 119303 - protein, 290 aa, Rhodospirillum rubrum ATCC 11170
MDSAYLLNLAFNGAVIGLITALAALSITLVFGIARFPNAATGDVATAGAFAGLLGPVLGSGALPIILVGMATSAAVSLLFYVVLFRALAKRSPVASLIASIGMAFFLRAVLTYFIGHDQRVYPLPLVRAVPFGPLRVQAADIQVIVWAGAALAVTFALIHLTPIGKRMRAVADNPDLARSSGINANKVMVVMWVVAGLLAGLAGTLLGVKTVVSPEMGWDLLMPAFAATILGTIGNPLGAVLGGLLIGLAQELSTPLVGFTYKIGVGFLVLLLTLLIRPQGLFAKNSLVR

SEQ ID NO: 119304 - DNA, 909 bp, Moorella thermoacetica ATCC 39073
  CDS (1)..(909): transl_table=11
atgggagttggcagcatggccgtacttctccagcaaataatcaacggcctgtctctgggcagtatctacgcccttattgccctgggctataccatggtttatggcattatccagctaattaattttgcccacggcgacattatgatggcaggggcctatattgccttttttgtggtagtttacctcaaacttaatatctggtgggcctttctcatctccatgatcggatccgccctcctgggggttctcatcgagcgggtcgcctataaacctttacgcaacgctacccgcctggcacccctgattacagctattggcatgtccttatttctggaaaacgggggcctgatggtcctcggtaccgatattcgttcctaccctgggggtctaatcaccaatgcacagctgcccttagtaatttttgggatgagactcacggctactaccctgcagcttttgatactggccattaccatcgtaatgatgatcatattgcagtatattgtccattataccagggcgggtaaagccatgcgtgccgtatcctacgatgcagatgcggccaggctcatgggtattaatgttgataacactatttcccttacctttgccctgggttcggcctttgcggccgtggctggcatcctgctggggctatattacaacaccatccagcctttaatgggcattatgcccggcctaaaggccttcgtggcggcagttattggaggtatcggcctgattcccggcgccatggttgggggcttcgccctgggcatctttgaaaccatggtcagcggttattggagcagtaatttacgggatcccattgttttcctcctgctaatcttaattttgctggtcaagccggccggcctgctgggaaaaaacaataccgagaaggtgtag

SEQ ID NO: 119305 - protein, 302 aa, Moorella thermoacetica ATCC 39073
MGVGSMAVLLQQIINGLSLGSIYALIALGYTMVYGIIQLINFAHGDIMMAGAYIAFFVVVYLKLNIWWAFLISMIGSALLGVLIERVAYKPLRNATRLAPLITAIGMSLFLENGGLMVLGTDIRSYPGGLITNAQLPLVIFGMRLTATTLQLLILAITIVMMIILQYIVHYTRAGKAMRAVSYDADAARLMGINVDNTISLTFALGSAFAAVAGILLGLYYNTIQPLMGIMPGLKAFVAAVIGGIGLIPGAMVGGFALGIFETMVSGYWSSNLRDPIVFLLLILILLVKPAGLLGKNNTEKV

SEQ ID NO: 119306 - DNA, 927 bp, Burkholderia thailandensis E264; identical to SEQ ID NO: 61354
  CDS (1)..(927): transl_table=11

SEQ ID NO: 119307 - protein, 308 aa, Burkholderia thailandensis E264; identical to SEQ ID NO: 61355

SEQ ID NO: 119308 - DNA, 1011 bp, Silicibacter sp. TM1040
  CDS (1)..(1011): transl_table=11
atggatttcctcaatgccttcgtggcgctttcaaactttgttctgatccccggcatcgcctatggcagccaactggcgcttggcgcacttggggtgacgctgatctacgggatcttgcgcttttcgaactttgcccatggggacaccatggcctttgggaccatggtcgtgatcctgtttacttggctgttccagtcctggggcatctccgcaggcccgctgccaaccgcgcttctggcgttgccaatcgggatcgtgatgaccatggggttggttctgatcaccgacaaggccgtgttcaaattctaccgcgagcaaaaagcaaagcccgtggtctttgtgatggtctcgcttggcgtgatgttcatgatgaacgggcttgtgcgctttatcatcggtcccggcgatcagcggtttggtgatggcgagcggttcatcatcaaggcccgcaccttcaagcagatgaccggtcttgatgagggtctagcaatcaagacctcgcagggcatcaccgtggtcacagccattgttgtggtggcgctgttgttctggttcctcaacaagacccgaacgggcaaatccatgcgcgcctattccgacaacgaggatctggcgctgttgtctggcatcaatcccgaacgcgtggtcatgatcacatggatcatcgtcgcagcactggcgaccattgccggcacgctatacgggcttgataagtcattcaaacctttcacttatttccagcttctcctgccgatctttgcggcggccatcgtgggcggtctcggcagccctctgggcgcaatcgctggtgggtttgtcatcgccatgagcgaggtgatgatcacctacgcttggaaaaaagtgggcggttacctgctgcctgaaagcctggaaccagaggggctcgcacagcttctgagcacggattacaaatttgcggtttcctttgcgatcctcgtcgttgtgctgctgttcaaacccaccggtatcttcaaaggaaaagcggtatga

SEQ ID NO: 119309 - protein, 336 aa, Silicibacter sp. TM1040
MDFLNAFVALSNFVLIPGIAYGSQLALGALGVTLIYGILRFSNFAHGDTMAFGTMVVILFTWLFQSWGISAGPLPTALLALPIGIVMTMGLVLITDKAVFKFYREQKAKPVVFVMVSLGVMFMMNGLVRFIIGPGDQRFGDGERFIIKARTFKQMTGLDEGLAIKTSQGITVVTAIVVVALLFWFLNKTRTGKSMRAYSDNEDLALLSGINPERVVMITWIIVAALATIAGTLYGLDKSFKPFTYFQLLLPIFAAAIVGGLGSPLGAIAGGFVIAMSEVMITYAWKKVGGYLLPESLEPEGLAQLLSTDYKFAVSFAILVVVLLFKPTGIFKGKAV

SEQ ID NO: 119310 - DNA, 966 bp, Rubrobacter xylanophilus DSM 9941
  CDS (1)..(966): transl_table=11
gtgcaggcggcgcgcgacccggcgcagttcctctcgcagctgctcatcgggatcaccaacggctccatcatcgcgctcatcgccctcggctacacgctggtctacgggatcatcgagttgatcaacttcgcccacggggacaacttcatgatcggctccttcgtggggctcacggtgctctccgggactttcttcgggatagggctcttcgcccccataaccgacgagtcggggctgctgctcaaggctctcggggtggggatggcgatgctggccgcgatggcggtctgcggcttgctcggcgtggggatagagcgggtggcctacaagccgctgcgcaactcgccccgcctggcggtgctcatcaccgccatagggatgtcctttatcctccagaacgtcggcctgctttggaaggggccggcccaggtgcccttcccggacctcatctctggggccaacctcctggacagcggcgagatagtcttccgctacaaggacctcttcgtgatcgcggtgacggtcccgctcctgctcgccctctcctacttcgtgcagaacaccaagcagggcaaggctatgcgggccgtggcccaggacaaggaggccgcggcgatggtcggcatagacgtggaccggaccatctcggtgaccttcctgctcggggggatgctcgccggggcctccggggtgatgtacgggctgttcaacgggataaccgtcttcaacgtgggcttcacccaggggctcttcgcgttcaccgcggcggtgctcgggggcatcggcaacctcaccggggcggtggtcggggggatcctcatcggtgtgatagcggcgatgagcgaccagtacatcggggtgcggtggacggagatcatgatcttcgccgtcctcatcctggtgatcgtcttccgcccccgcgggcttctgggggaccgttccgcggtgcagggagggggcgagtag

SEQ ID NO: 119311 - protein, 321 aa, Rubrobacter xylanophilus DSM 9941
MQAARDPAQFLSQLLIGITNGSIIALIALGYTLVYGIIELINFAHGDNFMIGSFVGLTVLSGTFFGIGLFAPITDESGLLLKALGVGMAMLAAMAVCGLLGVGIERVAYKPLRNSPRLAVLITAIGMSFILQNVGLLWKGPAQVPFPDLISGANLLDSGEIVFRYKDLFVIAVTVPLLLALSYFVQNTKQGKAMRAVAQDKEAAAMVGIDVDRTISVTFLLGGMLAGASGVMYGLFNGITVFNVGFTQGLFAFTAAVLGGIGNLTGAVVGGILIGVIAAMSDQYIGVRWTEIMIFAVLILVIVFRPRGLLGDRSAVQGGGE

SEQ ID NO: 119312 - DNA, 927 bp, Acidovorax sp. JS42; identical to SEQ ID NO: 61430
  CDS (1)..(927): transl_table=11

SEQ ID NO: 119313 - protein, 308 aa, Acidovorax sp. JS42; identical to SEQ ID NO: 61431

SEQ ID NO: 119314 - DNA, 867 bp, Nostoc punctiforme PCC 73102
  CDS (1)..(867): transl_table=11
atggatacacaattcgcgcaactaatcatcaatgggattgcagtaggaagcattattgctttagccgcagtcggactgactcttacttatggaattttacggttatctaactttgctcatggtgactttttaactttaggagcctatcttacttggctgatcaatagtattggagtaaatatttggctgtcaatgatcttggcggcggtggggacagtagcagcaatgctgttatcggaaaagttattgtggtcaaagatgcgctcgatccgtgctacttccactacgttgattattatttctatcgggcttgccttatttcttcgcaatgggattatttttatctggggtggcaagaaccaaaattataatttacctgttaccacagctttagatatttttggtttaaaagtaccgcaaaatcaattattggtattggggttagcgatactagcaattttcgcgctgcattacctgctgcaaaataccaaaattggtaaagcgatgcgagcagttgctgacgatctggacttagccagggtttcaggtattaatgttgaccgagtaattttctggacttggctaattgctggcactcttacgtcattgggaggcagtatgtatgggttgattacagccgtgcgtcctaatatggggtggttcttaattttaccgttatttgcctcagtgattcttggggggattggcaacccttatggtgcgatcgcagcagcttttatcattggcattgtccaagaaattagcaccccttggctgggttcacagtataaacaaggtgtagcactgttgatcatgattttggtgctgctcattcgtcccaaaggtttattcaaaggaacgatttga

SEQ ID NO: 119315 - protein, 288 aa, Nostoc punctiforme PCC 73102
MDTQFAQLIINGIAVGSIIALAAVGLTLTYGILRLSNFAHGDFLTLGAYLTWLINSIGVNIWLSMILAAVGTVAAMLLSEKLLWSKMRSIRATSTTLIIISIGLALFLRNGIIFIWGGKNQNYNLPVTTALDIFGLKVPQNQLLVLGLAILAIFALHYLLQNTKIGKAMRAVADDLDLARVSGINVDRVIFWTWLIAGTLTSLGGSMYGLITAVRPNMGWFLILPLFASVILGGIGNPYGAIAAAFIIGIVQEISTPWLGSQYKQGVALLIMILVLLIRPKGLFKGTI

SEQ ID NO: 119316 - DNA, 885 bp, Crocosphaera watsonii WH 8501; identical to SEQ ID NO: 61442
  CDS (1)..(885): transl_table=11

SEQ ID NO: 119317 - protein, 294 aa, Crocosphaera watsonii WH 8501; identical to SEQ ID NO: 61443

SEQ ID NO: 119318 - DNA, 1011 bp, Sulfitobacter sp. EE-36
  CDS (1)..(1011): transl_table=11
atggatttactcaacgctttcatcgccttggccaactatgtgctggttccgggcatcgcctacgggtcgcagctggcgcttggtgcgcttggggtgacgctggtctatggcatcttgcggttctcgaactttgcccatggcgacacgatggcgcttggcgcgatgtccgccgtgctgatcacctggggtttccagtcgctggggctgagcctgggggtcttaccgaccgcactgctggcgctgccattcgcgatcatcatcaccatcgggctgctgcttggcacggataagctggtctatagtttctaccgcgaaaagaaggcaaaaccggtgatctttgtcatcgtctcgctgggggtgacattcgtctataacggcatcacccgctttatcatcggcgcagaggatcaacggtttctggatggcgaacgcttcatcatctcggcccgcgacttcaaagagatgacggggctggaggaaggtctggcgatcaagacaacccaagggctgaccgtggtgacggctgtcatcgtggttgccgcgctgttctggttcctgaacaagacacgctcgggcaaatccatgcgcgcctactctgataacgaggatctggcgctgctgtcgggcattaaccctgaacgcgtggtcatgatcacctggatcattgtggcctgtctggcgaccaccgccggcgtgctgtatggcttggacaagtcctttaaacccttcacctatttccaactgctgctaccgatctttgccgccgcgatcgtgggcggtcttggcagcccgatcggtgccatcgcggggggctttgttatcgcattctccgaggtgacgatcacctatgcgtggaaaaaggtctttggctacctcgcacccgaggggatggcccccgacggtttggtgcagcttttgtccaccgactataaattcgccgtcagcttcgtgatcttgttgatcgtgctgctgttcaaacccacaggtctgttcaaggggcaatcggtatga

SEQ ID NO: 119319 - protein, 336 aa, Sulfitobacter sp. EE-36
MDLLNAFIALANYVLVPGIAYGSQLALGALGVTLVYGILRFSNFAHGDTMALGAMSAVLITWGFQSLGLSLGVLPTALLALPFAIIITIGLLLGTDKLVYSFYREKKAKPVIFVIVSLGVTFVYNGITRFIIGAEDQRFLDGERFIISARDFKEMTGLEEGLAIKTTQGLTVVTAVIVVAALFWFLNKTRSGKSMRAYSDNEDLALLSGINPERVVMITWIIVACLATTAGVLYGLDKSFKPFTYFQLLLPIFAAAIVGGLGSPIGAIAGGFVIAFSEVTITYAWKKVFGYLAPEGMAPDGLVQLLSTDYKFAVSFVILLIVLLFKPTGLFKGQSV

SEQ ID NO: 119320 - DNA, 1014 bp, Oceanicola batsensis HTCC2597
  CDS (1)..(1014): transl_table=11
atgatggacatgctcaacgcgctcgtcgccctggcgaacttcgtgatcgtgccggcgctggcctatggctcgcagctggcgctcggcgcgctcggcgtgacgatgatctacggcatcctgcgcttctcgaacttcgcccatggcgacacgatggccttcggcacgatggccgtcatcctgttcacctggctcttccagtcctgggggatcagcttcggccccctgccgaccgccctgctcgccctgcccttcggcatcgtgatctgcatggcgctggtgctgctgaccgaccgctacgtctatgccttctaccgcgcgcagaaggtcaagccggtggtgctggtgatcgtctcgatgggcgtgatgttcgtcaccaacgggcttgtaaggctgatcatcgggccggatgaccagcggttctcggacggagagcgcttcctgatctcggcgcgggatttcaaggagatgacgggactggacgaagggctagcgatcaagaccgggcaagccttgaccctcgtggtcgcgatcatcgcggtggcgctgctgttctggtttctcaaccgcacccgcacgggcaagtcgatgcgcgcctattccgacaacgaggatctggcgctcttgtcggggatcaatcccgaaaaggtcgtgatggtcacctggctgatcgtggcgacgctggcgaccctggcgggaacgctctacgggctcgacaagtcgttcaagccgttcacctatttccagcttctcctgccgttcttcgccgccgccatcgtcggcgggctgggacatccgctgggcgcgatcgtcggcgggttcgtcatcgccttttccgaggtcacgatcacctatgcctggaagaaggtgctgacttacagtgtacccgaaagctgggcgcccgacgggctcgtccagctgctgtcgaccgactacaagttcgcggtgtccttcgtgatcctgctcgtcgtcctgctgttccgcccgaccggcctgttcaaggggaaatcggtatga

SEQ ID NO: 119321 - protein, 337 aa, Oceanicola batsensis HTCC2597
MMDMLNALVALANFVIVPALAYGSQLALGALGVTMIYGILRFSNFAHGDTMAFGTMAVILFTWLFQSWGISFGPLPTALLALPFGIVICMALVLLTDRYVYAFYRAQKVKPVVLVIVSMGVMFVTNGLVRLIIGPDDQRFSDGERFLISARDFKEMTGLDEGLAIKTGQALTLVVAIIAVALLFWFLNRTRTGKSMRAYSDNEDLALLSGINPEKVVMVTWLIVATLATLAGTLYGLDKSFKPFTYFQLLLPFFAAAIVGGLGHPLGAIVGGFVIAFSEVTITYAWKKVLTYSVPESWAPDGLVQLLSTDYKFAVSFVILLVVLLFRPTGLFKGKSV

SEQ ID NO: 119322 - DNA, 927 bp, Oceanospirillum sp. MED92; identical to SEQ ID NO: 61464
  CDS (1)..(927): transl_table=11

SEQ ID NO: 119323 - protein, 308 aa, Oceanospirillum sp. MED92; identical to SEQ ID NO: 61465

SEQ ID NO: 119324 - DNA, 894 bp, Alteromonadales bacterium TW-7; identical to SEQ ID NO: 61470
  CDS (1)..(894): transl_table=11

SEQ ID NO: 119325 - protein, 297 aa, Alteromonadales bacterium TW-7; identical to SEQ ID NO: 61471

SEQ ID NO: 119326 - DNA, 1080 bp, Pseudomonas putida GB-1; identical to SEQ ID NO: 61039
  CDS (1)..(1080): transl_table=11

SEQ ID NO: 119327 - protein, 359 aa, Pseudomonas putida GB-1; identical to SEQ ID NO: 61040

SEQ ID NO: 119328 - DNA, 915 bp, Pseudomonas putida GB-1; identical to SEQ ID NO: 61474
  CDS (1)..(915): transl_table=11

SEQ ID NO: 119329 - protein, 304 aa, Pseudomonas putida GB-1; identical to SEQ ID NO: 61475

SEQ ID NO: 119330 - DNA, 861 bp, Pseudomonas putida GB-1; identical to SEQ ID NO: 61476
  CDS (1)..(861): transl_table=11

SEQ ID NO: 119331 - protein, 286 aa, Pseudomonas putida GB-1; identical to SEQ ID NO: 61477

SEQ ID NO: 119332 - DNA, 942 bp, Rhizobium leguminosarum bv; identical to SEQ ID NO: 61506
  CDS (1)..(942): transl_table=11

SEQ ID NO: 119333 - protein, 313 aa, Rhizobium leguminosarum bv; identical to SEQ ID NO: 61507

SEQ ID NO: 119334 - DNA, 873 bp, Rhizobium leguminosarum bv; identical to SEQ ID NO: 61510
  CDS (1)..(873): transl_table=11

SEQ ID NO: 119335 - protein, 290 aa, Rhizobium leguminosarum bv; identical to SEQ ID NO: 61511

SEQ ID NO: 119336 - DNA, 885 bp, Burkholderia cepacia; identical to SEQ ID NO: 61512
  CDS (1)..(885): transl_table=11

SEQ ID NO: 119337 - protein, 294 aa, Burkholderia cepacia; identical to SEQ ID NO: 61513

SEQ ID NO: 119338 - DNA, 867 bp, Agrobacterium tumefaciens; identical to SEQ ID NO: 61516
  CDS (1)..(867): transl_table=11

SEQ ID NO: 119339 - protein, 288 aa, Agrobacterium tumefaciens; identical to SEQ ID NO: 61517

SEQ ID NO: 119340 - DNA, 903 bp, Rhizobium leguminosarum bv; identical to SEQ ID NO: 61518
  CDS (1)..(903): transl_table=11

SEQ ID NO: 119341 - protein, 300 aa, Rhizobium leguminosarum bv; identical to SEQ ID NO: 61519

SEQ ID NO: 119342 - DNA, 21 bp, Artificial sequence
  primer
atggatctatcacagttaatc

SEQ ID NO: 119343 - DNA, 23 bp, Artificial sequence
  primer
ttattgagtgcctttaaacaaac

SEQ ID NO: 119344 - protein, 368 aa, Artificial sequence
  consensus sequence
  Variant (2)..(4): Xaa in position 2 to 4 is any amino acid
  Variant (6)..(9): Xaa in position 6 to 9 is any amino acid
  Variant (10)..(12): Xaa in position 10 to 12 is any or no amino acid
  Variant (14)..(14): Xaa in position 14 is any amino acid
  Variant (16)..(16): Xaa in position 16 is any amino acid
  Variant (18)..(22): Xaa in position 18 to 22 is any amino acid
  Variant (24)..(28): Xaa in position 24 to 28 is any amino acid
  Variant (34)..(38): Xaa in position 34 to 38 is any amino acid
  Variant (40)..(92): Xaa in position 40 to 92 is any amino acid
  Variant (93)..(149): Xaa in position 93 to 149 is any or no amino acid
  Variant (151)..(161): Xaa in position 151 to 161 is any amino acid
  Variant (162)..(165): Xaa in position 162 to 165 is any or no amino acid
  Variant (167)..(210): Xaa in position 167 to 210 is any amino acid
  Variant (211)..(225): Xaa in position 211 to 225 is any or no amino acid
  Variant (227)..(228): Xaa in position 227 to 228 is any amino acid
  Variant (230)..(232): Xaa in position 230 to 232 is any amino acid
  Variant (235)..(241): Xaa in position 235 to 241 is any amino acid
  Variant (243)..(245): Xaa in position 243 to 245 is any amino acid
  Variant (247)..(267): Xaa in position 247 to 267 is any amino acid
  Variant (269)..(281): Xaa in position 269 to 281 is any amino acid
  Variant (282)..(283): Xaa in position 282 to 283 is any or no amino acid
  Variant (285)..(291): Xaa in position 285 to 291 is any amino acid
  Variant (293)..(297): Xaa in position 293 to 297 is any amino acid
  Variant (300)..(300): Xaa in position 300 is any amino acid
  Variant (302)..(304): Xaa in position 302 to 304 is any amino acid
  Variant (307)..(308): Xaa in position 307 to 308 is any amino acid
  Variant (310)..(313): Xaa in position 310 to 313 is any amino acid
  Variant (315)..(339): Xaa in position 315 to 339 is any amino acid
  Variant (340)..(361): Xaa in position 340 to 361 is any or no amino acid
  Variant (363)..(365): Xaa in position 363 to 365 is any amino acid
  Variant (367)..(367): Xaa in position 367 is any amino acid
GXXXGXXXXXXXLXAXGXXXXXGXXXXXNFAHGXXXXXGXXXXXXXXXXXXXXXXXXXXXXXXXXXXXXXXXXXXXXXXXXXXXXXXXXXXXXXXXXXXXXXXXXXXXXXXXXXXXXXXXXXXXXXXXXXXXXXXXXXXXXXXXXXXXXGXXXXXXXXXXXXXXXGXXXXXXXXXXXXXXXXXXXXXXXXXXXXXXXXXXXXXXXXXXXXXXXXXXXXXXXXXXXTXXGXXXRAXXXXXXXAXXXGXXXXXXXXXXXXXXXXXXXXXGXXXXXXXXXXXXXXXGXXXXXXXFXXXXXGGXGXXXGAXXGXXXXGXXXXXXXXXXXXXXXXXXXXXXXXXXXXXXXXXXXXXXXXXXXXXXXLXXXPXG

SEQ ID NO: 119345 - protein, 18 aa, Artificial sequence
  protein pattern
  Variant (2)..(2): Xaa in position 2 is any amino acid
  Variant (3)..(3): Xaa in position 3 is Ala, Ser or Thr
  Variant (4)..(4): Xaa in position 4 is Ile, Leu, Met or Val
  Variant (5)..(6): Xaa in position 5 to 6 is any amino acid
  Variant (7)..(7): Xaa in position 7 is Gly or Ser
  Variant (8)..(12): Xaa in position 8 to 12 is any amino acid
  Variant (14)..(14): Xaa in position 14 is Phe, Leu or Met
  Variant (17)..(17): Xaa in position 17 is Gly or Ser
  Variant (18)..(18): Xaa in position 18 is Ala, Asp or Glu
GXXXXXXXXXXXNXAHXX

SEQ ID NO: 119346 - protein, 34 aa, Artificial sequence
  protein pattern
  Variant (2)..(8): Xaa in position 2 to 8 is any amino acid
  Variant (10)..(11): Xaa in position 10 to 11 is any amino acid
  Variant (12)..(13): Xaa in position 12 to 13 is Ala, Ile or Val
  Variant (14)..(14): Xaa in position 14 is any amino acid
  Variant (17)..(17): Xaa in position 17 is any amino acid
  Variant (18)..(18): Xaa in position 18 is Ala, Gly or Val
  Variant (19)..(21): Xaa in position 19 to 21 is any amino acid
  Variant (22)..(22): Xaa in position 22 is Gly or Val
  Variant (23)..(23): Xaa in position 23 is Ala, Ser or Thr
  Variant (24)..(29): Xaa in position 24 to 29 is any amino acid
  Variant (30)..(30): Xaa in position 30 is Phe, Ile, Leu, Met or Val
  Variant (32)..(33): Xaa in position 32 to 33 is any amino acid
  Variant (34)..(34): Xaa in position 34 is Ala, Glu, Asn or Gln
GXXXXXXXFXXXXXGGXXXXXXXXXXXXXXGXXX

SEQ ID NO: 119347 - DNA, 1404 bp, Saccharomyces cerevisiae
  CDS (1)..(1404)
atgtttaagtctgttgtttattcggttctagccgctgctttagttaatgcaggtacaattcccctcggagagttagccgatgttgccaaaattggcactcaggaagacatattcccattcctgggtggtgccgggccatacttctctttccctggcgactatggtatttctcgtgacttgcctgaaggttgtgaaatgaaacaattgcaaatgcttgccagacatggtgaaagatacccaacttacagtaaaggtgctaccatcatgaaaacatggtataagttgagcaattacacacgtcaattcaacggctcattgtcattcttgaacgatgattacgagtttttcatccgtgatgacgatgatttggaaatggaaaccacttttgccaactcagacaatgttttgaatccatacactggtgagatggatgctaagagacatgctcgtgagtttttagcgcaatatggctacatgttcgaaaatcaaaccagtttcccaattttcgccgctagttctgaaagggttcatgacactgctcaatatttcattgatggtttaggtgaccaattcaacatctccttgcagactgtcagtgaagccatgtccgccggcgcaaacactttgagtgctggtaatgcgtgcccaggatgggatgaagatgctaacgatgacattttggacaaatacgataccacatacttggatgacattgccaagagattaaacaaagaaaacaagggtttgaatttgacctcaaaggacgccaacactttgtttgcatggtgtgcatacgaattgaacgctagaggctacagtgatgtttgtgatatcttcaccgaagatgaattggtacgttactcatacggccaggacctggtatcgttttaccaggatggaccaggttatgatatgatcagatccgtcggtgccaacttgtttaacgctactttgaagttgttaaagcaaagtgaaactcaagacttaaaagtctggttgagttttacccacgataccgatatcctaaactatttgaccaccgctggtataattgacgacaaaaacaacttaactgccgaatacgttccattcatgggcaacaccttccataagtcctggtacgttcctcaaggtgctcgtgtctacaccgaaaaattccaatgttctaacgacacctacgtcagatacgtcattaacgatgctgtcgttccaattgaaacctgttccaccggcccagggttctcttgtgaaatcaatgatttctacgactatgctgaaaagagagtagctggtactgacttcctaaaggtctgtaacgtcagcagtgtcagtaacgtcaccgaattgaccttctactgggactggaatactactcactacaacgataccctattaaaacaataa

SEQ ID NO: 119348 - protein, 467 aa, Saccharomyces cerevisiae
MFKSVVYSVLAAALVNAGTIPLGELADVAKIGTQEDIFPFLGGAGPYFSFPGDYGISRDLPEGCEMKQLQMLARHGERYPTYSKGATIMKTWYKLSNYTRQFNGSLSFLNDDYEFFIRDDDDLEMETTFANSDNVLNPYTGEMDAKRHAREFLAQYGYMFENQTSFPIFAASSERVHDTAQYFIDGLGDQFNISLQTVSEAMSAGANTLSAGNACPGWDEDANDDILDKYDTTYLDDIAKRLNKENKGLNLTSKDANTLFAWCAYELNARGYSDVCDIFTEDELVRYSYGQDLVSFYQDGPGYDMIRSVGANLFNATLKLLKQSETQDLKVWLSFTHDTDILNYLTTAGIIDDKNNLTAEYVPFMGNTFHKSWYVPQGARVYTEKFQCSNDTYVRYVINDAVVPIETCSTGPGFSCEINDFYDYAEKRVAGTDFLKVCNVSSVSNVTELTFYWDWNTTHYNDTLLKQ

SEQ ID NO: 119349 - DNA, 1410 bp, Kluyveromyces lactis NRRL Y-1140
  CDS (1)..(1410)
atgctttccattctggtgactttcttatcactatcatcgatccatgcggctcctatttcaaaggataacggtacagtctgctatgcactcaaaagcagtacagcagatgcatccatctttccgtttttgaatggtcagggtcctcactacgattacccacaatcctttggaattccggtagaagttccggaccagtgtaccgttgaacatgtccaaatgttggcaagacatggagagagatatccaaccgcgtcaaaaggtaaactgatgatcgcactatgggacaaattaaaggtgttccagggtcaattcgacggtcctttggaaattttcaatgattatgagttttttgtgtcagataccaaatattttgatcaattaaccaattcttccgatgttgacccttccaatccttatatgggatcaaaaaccgctgaaattttgggaaaatacattgctttcaactacggggaacttttcggtaactatacaccagtttttacatctagttctgggagagtctatcaaactgctaaatacgcagtttctgcgttggaagaagagcttaatgttcaacttgatcttcaaattattcaagaaaatgaaacagccggcgcaaactctcttacccctggtgattcttgtgtttcctacaatggcgaccttggtgacgagtacttcgaaaatgttacactatcttacttaactgatatcaaaaacagatggatgaaaaagaactccaacttgaatctaactttggagcaagatgacatagaactgttggtagactggtgtgcatttgtaacaaatattaagggtagttctaccgtttgtgatctctttgagcgcaatgatttgattgcctactcgtactattctgatgttacaaatttctatggcagaggtttaggcaaccctctggttaaaccaattggttcagtgttactcaacgcttcttacaatcttttcacacaagctgatgatttggataataaggtctggctttctttttctcatgataccgatattcaacaattcgtttcggcacttggccttttcgacaatggtgtcactgaatactctctggaacaggttgagttccaggatatccagaagctaagctgggtgacgcctatgggaggtcgtatcttcactgaaaaattaaaatgtagaaattcctcttatgttcgttacattgttaacgatgttgttattccagttccaggttgcacctcaggtccagggttctcctgtcctatcgaggactttgacgattacatcgcagacagattgaatggaattgactatgtttccagttgcgaaatccaacaggtgtctaacatcaccgaacttactttctactgggactacaatgaagtggagtacaatggtcctgttagtaacaaataa

SEQ ID NO: 119350 - protein, 469 aa, Kluyveromyces lactis NRRL Y-1140
MLSILVTFLSLSSIHAAPISKDNGTVCYALKSSTADASIFPFLNGQGPHYDYPQSFGIPVEVPDQCTVEHVQMLARHGERYPTASKGKLMIALWDKLKVFQGQFDGPLEIFNDYEFFVSDTKYFDQLTNSSDVDPSNPYMGSKTAEILGKYIAFNYGELFGNYTPVFTSSSGRVYQTAKYAVSALEEELNVQLDLQIIQENETAGANSLTPGDSCVSYNGDLGDEYFENVTLSYLTDIKNRWMKKNSNLNLTLEQDDIELLVDWCAFVTNIKGSSTVCDLFERNDLIAYSYYSDVTNFYGRGLGNPLVKPIGSVLLNASYNLFTQADDLDNKVWLSFSHDTDIQQFVSALGLFDNGVTEYSLEQVEFQDIQKLSWVTPMGGRIFTEKLKCRNSSYVRYIVNDVVIPVPGCTSGPGFSCPIEDFDDYIADRLNGIDYVSSCEIQQVSNITELTFYWDYNEVEYNGPVSNK

SEQ ID NO: 119351 - DNA, 1410 bp, Kluyveromyces lactis NRRL Y-1140
  CDS (1)..(1410)
atgaatttattattactcacgattattgcaatagcagagggtgctagcatctataactatggattttctgaaaattctaaaaaaattggaacccaggagcatcttttccaatatttggctggaaatgcaccatatttcaaatatccgctagactatggtattaacttgcctatcccggaacactgtgaactgaagcaagttcaattacttgccagacatggtgaaagatacccaagcaagagtaaaggcgcaaaattgtcaaatgtttatcagaagctgcaaaactacacaggagctctcaatggcagcctttcatttttaaatgacgataattatcacatattctgggaagacacttcgcagctagagcttgaagtcacatcaaagaactcactagacccattgaatccttacaccggagaacaaagtgctcggacccatgcccgccagtttatttccttgtatggagatctattagaggaaaattcaactcttgaattatttacgaccaattcaaaacgtgtgcatgacacagcagctttctttgcagaagagcttgataacgctgtaaaatccacacatatgaacataattagtgaagactcaagctctggtgcgaataacttatcccctggttattcatgtttaccgtgggatgaagatgagaatgaagaatatctttccaagtactcttcggagtatttagaagacattgctgacagattaaacaatgagaataagaatttgcctttgaatttgactgctaccgatgccagctctttgttcgtgtggtgtgggtttgaaatcagcgttaaaggctacagtgacgcatgtaatatattcactgacgccgaactgctacacttttcatatgaggatgatctatatgactactaccaagatggtcctggtcactctttagcaaagccgatagggtctttactgttcaatgcctcagtggaattactaaaacaaagcgatgagttggaccaaaaagtttggttaagtttcacacatgatactgacattattaactatctcgctactgtaggcctattcgataatggtaaaaaattaaacgcatcttcagtgcctttccttgaccatatttaccggaaggcatggatgactccgatggctgctaggctctacacagagaagttccaatgttccaatgaaacctttgtcagatataccctaaacgacgccgtgattccaattgaatcatgttcatctggaccgggtttctcttgtccagaaaaggaattctactcttatgctgagaaaaaattggatgggatggattttgttaaagcgtgtgatataaagtcatcgagcaactacacttctttgagtttctattgggattatgagagtgttaattacaatgcatcacttctaatacaataa

SEQ ID NO: 119352 - protein, 469 aa, Kluyveromyces lactis NRRL Y-1140
MNLLLLTIIAIAEGASIYNYGFSENSKKIGTQEHLFQYLAGNAPYFKYPLDYGINLPIPEHCELKQVQLLARHGERYPSKSKGAKLSNVYQKLQNYTGALNGSLSFLNDDNYHIFWEDTSQLELEVTSKNSLDPLNPYTGEQSARTHARQFISLYGDLLEENSTLELFTTNSKRVHDTAAFFAEELDNAVKSTHMNIISEDSSSGANNLSPGYSCLPWDEDENEEYLSKYSSEYLEDIADRLNNENKNLPLNLTATDASSLFVWCGFEISVKGYSDACNIFTDAELLHFSYEDDLYDYYQDGPGHSLAKPIGSLLFNASVELLKQSDELDQKVWLSFTHDTDIINYLATVGLFDNGKKLNASSVPFLDHIYRKAWMTPMAARLYTEKFQCSNETFVRYTLNDAVIPIESCSSGPGFSCPEKEFYSYAEKKLDGMDFVKACDIKSSSNYTSLSFYWDYESVNYNASLLIQ

SEQ ID NO: 119353 - DNA, 1455 bp, Kluyveromyces lactis NRRL Y-1140
  CDS (1)..(1455)
atggtaggatttctagcgtttttgtctgtcattttgtcaattgttcatgcgatacctgttataactgcagatgtagtagcaaaaaatctttttaccaggaaagaaatgtcacaagaagcgatatttcccatgttgaacggtgaggcgccctattttccgtatcctgagaccaacggaatttcactcgaaattcctgagcagtgcattattgaacaggtacagatgatagctcggcatgccgaacgttttccaaaagctgcaaagggagaaaagctagaaattatgtggaacaaatttaaagagatgaagggtgaattcaagggtccgttggcaatattcaacgagtatgaatatctcgtcgaggacaatatctatcttgatcagatgactaattcttcaaatgtcgatggctccaatccatacatgggctccaaaaccgcacaacaattggggaactatattgctgtccattacggtgagctaattggtgattcattgcctattttctcttccagcgctgggagggtttatgaaacggctaaaaatgtaatcattggtctgcaggaagaacttggcttcaacgttgacgtccaattacaaataatatcggaagatcaggcttctggagcaaattccttaactcctcgtaattcatgtaaaaattataattccgagtttgccaaacaagttttaggaagtgtcaatgactcgcagttaaagaagatcagggaaagactgatgaagaagaactctcagttgcccttgaaactaaaaaacaaagatataaaacaactaatttcgtggtgcgcatatgaaataaatattaaaggctactctcccgtgtgcgatctttttggagatgaggatttagtctcatactcttatttctccgacatggaaaacttttataacagtggtcttggaaatcctctagcaaagtcattgggatctgtattacttaacgcttcgtatcaacttttaaaggagagtgaacacttggagaataaagtctggttgtcatttactcacgatactgatattcaacactttgtgtcagctattggattatttgatgatggagcagagcgtttccaaggcgaacaagtctcgttccaaaatatctttaaaagaggtagttggatcactcctatgggtgctagactcttcactgagaagttgcgttgcagaaacagctcttttgttcggtatatacttaatgatgcggtcattcctatcccaggatgtagttcagggccaggactatcatgtcccttctccgaactcagcagctatattaaaaaccaaactagcaaaacaaactatgtttctcactgtgaaattactgaagtctcgaataagacggagttgacgtttttctgggattataatgatgtggattattcacgtactcccatcaattacaaagttagtgctattttggataagactgaatag

SEQ ID NO: 119354 - protein, 484 aa, Kluyveromyces lactis NRRL Y-1140
MVGFLAFLSVILSIVHAIPVITADVVAKNLFTRKEMSQEAIFPMLNGEAPYFPYPETNGISLEIPEQCIIEQVQMIARHAERFPKAAKGEKLEIMWNKFKEMKGEFKGPLAIFNEYEYLVEDNIYLDQMTNSSNVDGSNPYMGSKTAQQLGNYIAVHYGELIGDSLPIFSSSAGRVYETAKNVIIGLQEELGFNVDVQLQIISEDQASGANSLTPRNSCKNYNSEFAKQVLGSVNDSQLKKIRERLMKKNSQLPLKLKNKDIKQLISWCAYEINIKGYSPVCDLFGDEDLVSYSYFSDMENFYNSGLGNPLAKSLGSVLLNASYQLLKESEHLENKVWLSFTHDTDIQHFVSAIGLFDDGAERFQGEQVSFQNIFKRGSWITPMGARLFTEKLRCRNSSFVRYILNDAVIPIPGCSSGPGLSCPFSELSSYIKNQTSKTNYVSHCEITEVSNKTELTFFWDYNDVDYSRTPINYKVSAILDKTE

SEQ ID NO: 119355 - DNA, 1395 bp, Debaryomyces hansenii CBS767
  CDS (1)..(1395)
atggtttctatatctacactcctacatggaggattcttattggttggccaaagtgcatatcaagatgttgcaaatcctcaacaggcatcagtcgaacagtataatatagtccgatttctaggtggtgctggaccctacattcaaaacccaggccacggtatttcaacagatataccagatcaatgcacaattgaacaagtgcaattgattctgaggcatggcgagcggtttcccagctctaacgcaggaaagcaatatgagcacattatgcagaaattcgaagattacaatggcacattcaaaggacagttatcattcttgaacgactatacttatttcgtatcaaatctggatatgtatgatctcgaagtcagtccttcgaattcacgtagtccctacgctggaaccacaaatgccttgaagcatggtgcggcttttagagctagatacaactctttatacaacgactcaaatactattcctgttttcaccacgagtaatactagagtatacgatacgtcccaaagttttattagaggctttatgggccaagagtatgacgggagaaaagttgacactgtcattttatctgaaggtagtgaaatgggtgcaaatagcttgactcctgcaagtgcgtgcagtgcgtgggattcagaggagaataaaagtattttgagccagtattccaatgagtatcttcataatgcattaaaaaggcttttaaaacttaacccagggttgaatttgactactgatgatgtttataacatgtttggttggtgtgcatatgaaatcaacgtgaaaggtgaatcaccgttctgcgatttatttactaacgaagaattcattaaatatgaatactcagtcgatctctcagattattattcagatggtccaggtaattcggtcataaaaccaatcggatcggtactcctaaatgcatccttacaattgttaaaagacgaaactctgccaaacaaaatttttatgtcgtttactcacgatactgatataaccaattatatatgcggtggattgggcttattcgagccagatcatcctttgtctgctgatcatataccattcgttaatccatacgttcgttctcatattgtcccacaaggagcacgggtttatacagaaaaacttaaatgctcgaaccgaagttatgtcaggtatattgttaatgattcagttattccaatcaataattgtacttctggcccaggattctcatgcggcatgaccgaattcgaagaaatagtgaaaaacaggttggatggggttgattacgccaaactgtgtaaaattggtaatgcaaccagtgatttaacattttactgggattatactaaagttaaatacgatgcacctcttaagaaggcgtcttattag

SEQ ID NO: 119356 - protein, 464 aa, Debaryomyces hansenii CBS767
MVSISTLLHGGFLLVGQSAYQDVANPQQASVEQYNIVRFLGGAGPYIQNPGHGISTDIPDQCTIEQVQLILRHGERFPSSNAGKQYEHIMQKFEDYNGTFKGQLSFLNDYTYFVSNLDMYDLEVSPSNSRSPYAGTTNALKHGAAFRARYNSLYNDSNTIPVFTTSNTRVYDTSQSFIRGFMGQEYDGRKVDTVILSEGSEMGANSLTPASACSAWDSEENKSILSQYSNEYLHNALKRLLKLNPGLNLTTDDVYNMFGWCAYEINVKGESPFCDLFTNEEFIKYEYSVDLSDYYSDGPGNSVIKPIGSVLLNASLQLLKDETLPNKIFMSFTHDTDITNYICGGLGLFEPDHPLSADHIPFVNPYVRSHIVPQGARVYTEKLKCSNRSYVRYIVNDSVIPINNCTSGPGFSCGMTEFEEIVKNRLDGVDYAKLCKIGNATSDLTFYWDYTKVKYDAPLKKASY

SEQ ID NO: 119357 - DNA, 1386 bp, Debaryomyces hansenii CBS767
  CDS (1)..(1386)
atggtttcaatttcaaaaattgtttcctcaagcttaatatttgctgcaaatgaccaatttagagatgttggttctgttgacttggctgctaagacacaatacaacatcgttaaatatatgtatggtaatggaccatatatgcaaaatccagggtatgggatttctacagatgtacctgaccaatgtactcttgaacatgtacaggtttacatgagacatggagagagatatcctggtatttcagatggagaaaagcagaaagcattggttgataagttgcaatcgtataattcatctctctctggaccattgtcattcttgaatgactacgaatattatgtcaaagacgattcgttgtacgagttagaaacgacaccttctaatgcgaaaggtccttttactggatacgaaacttgtaataaggccggcctggcatttagagctaaatacaatgacttgtataacgaaaatgaaacattgcctgttttcattgctgcatctaaaagagtttatgatctggctgatttcttcgttaatgggtttctcggagaggattacgatgaggacaaaatcaagagagtggttatttctgaggaaaaatcatccggtttcaactccttgacaccacgttgggcttgtccactgtactataacccaaatactacggcaccaaaatttaagtctgactatctcgaagatattgctgatagattgaaaacagataacgatggcttaaaccttactagctcggatattccatatttattccaattatgttccttcgaactcaattctaaaggctattctcagttttgtgatatttttacacaagatgaattggttactaatgattacgcccaaggatataattcttaccattcagctggtgcaggtagcgaaactagtaagtacgctgggtccgtccaattaaacgcaagtttagctttattgaaggaagatgacccaaaaaataagattgtgttatctttcacgcatgatactgatattcaagtattttacgctagtttagggctttttgatgtctcgggtgaaatgccatccgacaaagttgatgtgagaaacgctttccgtcgtactgaggtggttccaatgggtggaagattaatcactgaaaagtacaaatgcgacgggaaatcctatgttaggtttatcgccaatgatgccgtcattccacttcagaactgttctgatggtccaggcttctcatgtagcttgactgaatttgaagatatcgttagcaaaaaacagtctctcaacttattagataaatgtaacacgcctgacgatattcctcatgaattaacatcttattgggattatgatgaaaagaatcataatgccacagctcctagagttactgcatga

SEQ ID NO: 119358 - protein, 461 aa, Debaryomyces hansenii CBS767
MVSISKIVSSSLIFAANDQFRDVGSVDLAAKTQYNIVKYMYGNGPYMQNPGYGISTDVPDQCTLEHVQVYMRHGERYPGISDGEKQKALVDKLQSYNSSLSGPLSFLNDYEYYVKDDSLYELETTPSNAKGPFTGYETCNKAGLAFRAKYNDLYNENETLPVFIAASKRVYDLADFFVNGFLGEDYDEDKIKRVVISEEKSSGFNSLTPRWACPLYYNPNTTAPKFKSDYLEDIADRLKTDNDGLNLTSSDIPYLFQLCSFELNSKGYSQFCDIFTQDELVTNDYAQGYNSYHSAGAGSETSKYAGSVQLNASLALLKEDDPKNKIVLSFTHDTDIQVFYASLGLFDVSGEMPSDKVDVRNAFRRTEVVPMGGRLITEKYKCDGKSYVRFIANDAVIPLQNCSDGPGFSCSLTEFEDIVSKKQSLNLLDKCNTPDDIPHELTSYWDYDEKNHNATAPRVTA

SEQ ID NO: 119359 - DNA, 1392 bp, Debaryomyces hansenii CBS767
  CDS (1)..(1392)
atggtatcgatttccaaactacttaacaatggcttaattttagccggtcaatctatttatcaaagtgttgcgactccccaacaggcttcggttgaacaatacgatattctccggtacctaggcggaaaggccccatatattcaacacccagggttcggtattccaactgatgtcccagatcaatgtacaatagaacaggttcaacttttgtcaagacatggagagcgttatccatccaaaaatgtcggtaaagctttagaaaaaatcaacgaaaagttcaaaggttacaatggtacttttaaaggtgaattatcgtttttgaacgattacacttattttgtggaggataaagataattatgaaaaagagacgacgccctcaaattcagagggaccattcagcggtgctgataatgcattgagacatggaaccacgtttagaagtaaatacaacgagatatataatcctgataaaccattaccagttttcgctgctaattacgatagagttgctttgactgcacaatattttgcaagaggtttcttagggcaagactatgatgaaagcaatgttgaatatgtgttaatagatgaggatggtgaattgggtgctaattcgttaacccctagatatggatgcaaaaaatttgaatctgatccccacactgattatgttgatggattttctgatcaatacttgaaagatgcattaactagatttcaaaaatcgaatcctaatttagacttggatacggatgatgtaaacagcttatttgactggtgtgcatatgaacttaatgtcaagggctattctccattttgcaatttgttctccaatactgaatttattaagaattcttattcattagacctcgagaattattattcaaatgggccaggaaataacatgaccagaacaattggtgcaccccttattcgtgcttccttagctctcttaaaggacaatgaaacagagcataaaatttttcttagcttcagtcatgacactgatttagaaatcaccttagaggccctaggtcttcttggaattgcagatggagaacaattacctaatgatcacataccttttccccatacttatgttcattccactattgttccacaaggtgctcgtatttatactgaaaaaataaaatgtgatggtgaaatttatgtgagatatgttctcaatgatgctgtttacccactccctacctgttctgatggaccaggtttttcttgtaagttaactgactttgaaaattacgtaaatgatagattagataaccttgattatgctacacagtgtggagctgaagacattcctaataatgttactttttattgggactataccgaaaagaattatacaaatatttccggtgacaattag

SEQ ID NO: 119360 - protein, 463 aa, Debaryomyces hansenii CBS767
MVSISKLLNNGLILAGQSIYQSVATPQQASVEQYDILRYLGGKAPYIQHPGFGIPTDVPDQCTIEQVQLLSRHGERYPSKNVGKALEKINEKFKGYNGTFKGELSFLNDYTYFVEDKDNYEKETTPSNSEGPFSGADNALRHGTTFRSKYNEIYNPDKPLPVFAANYDRVALTAQYFARGFLGQDYDESNVEYVLIDEDGELGANSLTPRYGCKKFESDPHTDYVDGFSDQYLKDALTRFQKSNPNLDLDTDDVNSLFDWCAYELNVKGYSPFCNLFSNTEFIKNSYSLDLENYYSNGPGNNMTRTIGAPLIRASLALLKDNETEHKIFLSFSHDTDLEITLEALGLLGIADGEQLPNDHIPFPHTYVHSTIVPQGARIYTEKIKCDGEIYVRYVLNDAVYPLPTCSDGPGFSCKLTDFENYVNDRLDNLDYATQCGAEDIPNNVTFYWDYTEKNYTNISGDN

SEQ ID NO: 119361 - DNA, 1386 bp, Candida albicans SC5314
  CDS (1)..(1386): transl_table=12
atggtttctgtttctaaattaatcaataacgggttgttattaactagtcaaagtgttttccaagatgttgctactccacaacaagcttctgtgcaacaatacaatatactcaattttcttggcggtagtgccccttatattcaaagaaacggatatgggatttctactgatatccctgctggttgtgaaattgctcaaattcaattgtattcaagacatggtgaaagatacccaagtaaaagtaatggtaaaagtttagaagcaatttatgctaaatttgaaaactacaaaggtacttttaaaggtgatttgtcattcttaaatgattacacttattttgtcaaagaccagagtaactatgctaaggaaactagcccaaaaaattctgaaggaacctatgccggtacaaccaatgccttgcgtcatggtgctgcgtttagagccaaatatggatccttatacaaggaaaactcaactttaccaatcttcacatccaattctaacagagtacatgaaacttcaaagtatttcgctagagggtttttaggtgatgattatgaagaaggtaaaactgtcaagtttaacatcatctctgaagatgctgatcttggtgccaatagtttgactcctagaagtgcatgttccaagaacaaagaactgagcagtagtactgccaaaaaatataacacaacatatttaaatgctattgctgaaagattagttaaaccaaacccaggtttgaatttgactacaagtgatgtcaacaatttattcagttggtgtgcttatgaaatcaacgtcagaggaagttcaccattctgtgatttattcaccaatgaagaattcattaagaattcttatggtaacgatctttccaaatattattctaatggtgctggtaataattacaccagaatcattggttcagtgattttgaattcatccttggaacttttgaaggacactaagaactctaatcaagtatggttatcatttgctcatgatactgatttggaaattttccattctgctttaggattattggaaccagctgaagatttaccaacatcttacatcccattccctaacccatacgtccattcttctattgttccacaaggtgccagaatatacacagaaaaacttcaatgtggaaacgatgcttatgttagatacattatcaacgatgctgtcgtgccaattccaaaatgtgctactggtccagggttctcttgtaaacttgatgattttgaaaatttcgttaaagaaagaattggagatgttgactttgttaaacaatgtggtgtcaatagtacctacccatctgagcttactttctactgggattataaaaatgtcacttacagtgctcctttagaattgtaa

SEQ ID NO: 119362 - protein, 461 aa, Candida albicans SC5314
MVSVSKLINNGLLLTSQSVFQDVATPQQASVQQYNILNFLGGSAPYIQRNGYGISTDIPAGCEIAQIQLYSRHGERYPSKSNGKSLEAIYAKFENYKGTFKGDLSFLNDYTYFVKDQSNYAKETSPKNSEGTYAGTTNALRHGAAFRAKYGSLYKENSTLPIFTSNSNRVHETSKYFARGFLGDDYEEGKTVKFNIISEDADLGANSLTPRSACSKNKESSSSTAKKYNTTYLNAIAERLVKPNPGLNLTTSDVNNLFSWCAYEINVRGSSPFCDLFTNEEFIKNSYGNDLSKYYSNGAGNNYTRIIGSVILNSSLELLKDTKNSNQVWLSFAHDTDLEIFHSALGLLEPAEDLPTSYIPFPNPYVHSSIVPQGARIYTEKLQCGNDAYVRYIINDAVVPIPKCATGPGFSCKLDDFENFVKERIGDVDFVKQCGVNSTYPSELTFYWDYKNVTYSAPLEL

SEQ ID NO: 119363 - DNA, 1389 bp, Candida albicans SC5314
  CDS (1)..(1389): transl_table=12
atggtttctgtttctaaattattgaacaatggattgttattaactggtcaaagtgtcttccaagatgttgctactccacaacaagcttctgtgcaacaatataacatcgtcaattttcttggcggtagtgccccttatattcaaagaaacggatatgggatttctactgatatccctgctggttgtgaaattgctcaaattcaattgtattcaagacatggtgaaagatacccaagtaaaagtaatggtaaaagtttagaagcaatttatgctaaatttgaaaactacaaaggtacttttaaaggtgatttggctttcttaaatgattatacttattttgttactgataaaaacaattacgaaaaggaaactagcccaaaaaattctgaaggaacctatgccggtacaaccaatgccttgcgtcatggtgctgcgtttagagccaaatatggatccttatacaaggaaaattcaacattaccagttttctcttccaattcaggtagatgttaccaaacttcaagatattttgctagaggatttttaggtgatgactttgaagaaggtaaaactgtcaagtttaacatcatttctgaagatgctgatgttggtgccaatagtttgactccaagaagtgcatgttccaagaacaaagaactgagcagtagtactgccaaaaaatataacacaacatatttaaatgctatcgctgaaagattagttaaaccaaacccaggtttgaatttgactacaagtgatgttagcaatttgtttggttggtgtgcttatgaaattaatgtcagaggaagctcaccattctgtgatttattcaccaatgaagagtttatcaaatattcttatggtaatgacctttccaactattattctaatggtgctggtaacaattacaccagaatcattggttcagtgattttaaattcttctttagaacttttaaaagacactaaaaactccaatcaagtatggttatcatttgctcatgatactgatttggaaatttttcattctgctttaggattattggaaccagctgaagatttaccaacatcttacatcccattccctaacccatacgtccattcttctattgttccacaaggtgccagaatatacacagaaaaacttcaatgtggaaacgatgcttatgttagatacattatcaacgatgctgtcgtgccaattccaaaatgtgctactggtccagggttctcttgtaaacttgatgattttgaaaatttcgttaaagaaagaattggagatgttgactttgttaaacaatgtggtgtcaatagtacctacccatctgagcttactttctactgggattataaaaatgtcacttacaatgctcctttaggtgatttttaa

SEQ ID NO: 119364 - protein, 462 aa, Candida albicans SC5314
MVSVSKLLNNGLLLTGQSVFQDVATPQQASVQQYNIVNFLGGSAPYIQRNGYGISTDIPAGCEIAQIQLYSRHGERYPSKSNGKSLEAIYAKFENYKGTFKGDLAFLNDYTYFVTDKNNYEKETSPKNSEGTYAGTTNALRHGAAFRAKYGSLYKENSTLPVFSSNSGRCYQTSRYFARGFLGDDFEEGKTVKFNIISEDADVGANSLTPRSACSKNKESSSSTAKKYNTTYLNAIAERLVKPNPGLNLTTSDVSNLFGWCAYEINVRGSSPFCDLFTNEEFIKYSYGNDLSNYYSNGAGNNYTRIIGSVILNSSLELLKDTKNSNQVWLSFAHDTDLEIFHSALGLLEPAEDLPTSYIPFPNPYVHSSIVPQGARIYTEKLQCGNDAYVRYIINDAVVPIPKCATGPGFSCKLDDFENFVKERIGDVDFVKQCGVNSTYPSELTFYWDYKNVTYNAPLGDF

SEQ ID NO: 119365 - DNA, 1386 bp, Candida albicans SC5314
  CDS (1)..(1386): transl_table=12
atggtttctgtttctaaattaatcaataacgggttgttattaactagtcaaagtgttttccaagatgttgctactccgcaacaagcttctgtgcaacaatacaatatactcaattttcttggcggtagtgccccttatattcaaagaaacggatatgggatttctactgatatccctgctggttgtgaaattgctcaaattcaattgtactcaagacatggtgaaagattcccaacagcaagtagtgggaaagattatgagaaaatttatgctaaatttaaaaactacaatggtacattcaaaggtgatttgtcattcttaaatgattacacttattttgtcaaagaccagagtaactatgctaaggaaactagcccaaaaaattctgaaggaacctatgccggtacaaccaatgccttgcgtcatggtgctgcgtttagagccaaatatggatccttatacaaggaaaactcaactttaccaatcttcacatccaattctaacagagtacatgaaacttcaaagtatttcgctagagggtttttaggtgatgattatgaagaaggtaaaactgtcaagtttaacatcatctctgaagatgctgatcttggtgccaatagtttgactcctagaagtgcatgttccaagaacaaagaactgagcagtagtactgccaaaaaatataacacaacatatttaaatgctattgctgaaagattagttaaaccaaacccaggtttgaatttgactacaagtgatgtcaacaatttattcagttggtgtgcttatgaaatcaacgtcagaggaagttcaccattctgtgatttattcaccaatgaagaattcattaagaactcttatggtaatgatctttccaaatattattctaatggtgctggtaataattacaccagaatcattggttcagtgattttgaattcatccttggaacttttaaaagacaccgagaactctaatcaagtatggttatcatttgctcatgatactgatttagaaattttccattctgctttaggattattggaaccagctgaagatttaccaacatcttacatcccattccctaacccatacgtccattcttctattgttccacaaggtgccagaatatacacagaaaaacttcaatgtggaaacgatgcttatgttagatacattatcaacgatgctgtcgtgccaattccaaaatgtgctactggtccagggttctcttgtaaacttgatgattttgaaaatttcgttaaagaaagaattggagatgttgactttattaaacaatgtggtgtcaatagtacctacccatctgagcttactttctactgggattataaaaatgtcacttacaatgctcctttagaattgtaa

SEQ ID NO: 119366 - protein, 461 aa, Candida albicans SC5314
MVSVSKLINNGLLLTSQSVFQDVATPQQASVQQYNILNFLGGSAPYIQRNGYGISTDIPAGCEIAQIQLYSRHGERFPTASSGKDYEKIYAKFKNYNGTFKGDLSFLNDYTYFVKDQSNYAKETSPKNSEGTYAGTTNALRHGAAFRAKYGSLYKENSTLPIFTSNSNRVHETSKYFARGFLGDDYEEGKTVKFNIISEDADLGANSLTPRSACSKNKESSSSTAKKYNTTYLNAIAERLVKPNPGLNLTTSDVNNLFSWCAYEINVRGSSPFCDLFTNEEFIKNSYGNDLSKYYSNGAGNNYTRIIGSVILNSSLELLKDTENSNQVWLSFAHDTDLEIFHSALGLLEPAEDLPTSYIPFPNPYVHSSIVPQGARIYTEKLQCGNDAYVRYIINDAVVPIPKCATGPGFSCKLDDFENFVKERIGDVDFIKQCGVNSTYPSELTFYWDYKNVTYNAPLEL

SEQ ID NO: 119367 - DNA, 1389 bp, Candida albicans SC5314
  CDS (1)..(1389): transl_table=12
atggtttctgtttctaaattattgaacaatggattgttattagctggtcaaagtgtcttccaagatgttgctactccacagcaagcttctgtgcaacaatataacatcgtcaattctcttggcggtagtgccccttatattcaaagaaacggatatgggatttctactgatatccctgctggttgtgaaattgctcaaattcaattgtattcaagacatggtgaaagatacccaagtaaaagtaatggtaaaagtttagaagcaatttatgctaaatttgaaaactacaaaggtacttttaaaggtgatttggctttcttaaatgattatacttattttgttactgataaaaacaattacgaaaaggaaactagcccaaaaaattctgaaggaacctatgccggtacaaccaatgccttgcgtcacggtgctgcgtttagagccaaatatggatccttatacaaggaaaattcaacattaccagttttctcttccaattcaggtagatgttaccaaacttcaagatattttgctagaggatttttaggtgatgactttaaagaaggtaaaactgtcaagtttaacatcatttctgaagatgctgatgttggtgccaatagtttgactccaagaagtgcatgttccaagaacaaagaacggagcagtagtactgccaaaaaatataacacaacatatttaaatgctatcactgaaagattagttaaaccaaacccaggtttgaatttgactacaagtgatgtcaacaatttattcagttggtgtgcttatgaaatcaacgtcagaggaagttcaccattctgtgatttattcaccaatgaagagtttatcaaatattcttatggtaatgacctttccaactattattctaatggtgctggtaacaattacaccagaatcattggttcagtgattttaaattcttctttagaacttttaaaagacactaaaaactctaatcaagtatggttatcatttgctcatgatactgatttagaaattttccattctgctttaggattattggaaccagctgaagatttaccaacatcttacatcccattccctaacccatacgtccattcttctattgttccacaaggtgccagaatatacacagaaaaacttcaatgtggaaatgatgcttatgttagatacattatcaatgatgctgttgtgccaattccaaaatgtgctactggtccagggttctcttgtaaacttgatgattttgaaaatttcgttaaagaaagaattggagatgttgactttgttaaacaatgtggtgtcaatagcacttatccatctgaacttactttctactgggattataaaaatgtcacttacaacgctcctttaggtgatttttaa

SEQ ID NO: 119368 - protein, 462 aa, Candida albicans SC5314
MVSVSKLLNNGLLLAGQSVFQDVATPQQASVQQYNIVNSLGGSAPYIQRNGYGISTDIPAGCEIAQIQLYSRHGERYPSKSNGKSLEAIYAKFENYKGTFKGDLAFLNDYTYFVTDKNNYEKETSPKNSEGTYAGTTNALRHGAAFRAKYGSLYKENSTLPVFSSNSGRCYQTSRYFARGFLGDDFKEGKTVKFNIISEDADVGANSLTPRSACSKNKERSSSTAKKYNTTYLNAITERLVKPNPGLNLTTSDVNNLFSWCAYEINVRGSSPFCDLFTNEEFIKYSYGNDLSNYYSNGAGNNYTRIIGSVILNSSLELLKDTKNSNQVWLSFAHDTDLEIFHSALGLLEPAEDLPTSYIPFPNPYVHSSIVPQGARIYTEKLQCGNDAYVRYIINDAVVPIPKCATGPGFSCKLDDFENFVKERIGDVDFVKQCGVNSTYPSELTFYWDYKNVTYNAPLGDF

SEQ ID NO: 119369 - DNA, 1371 bp, Candida albicans SC5314
  CDS (1)..(1371): transl_table=12
atggttggtttatcacgagtacttaatgctgggtttattctaagtggacaatctgttttccaggatgttgctgccccacatcaagcatcaattgaacaatataatattgtcaagtaccttggtggcagcggtccatatattcaaaattcagggtatgggatttctactgatataccagaaaaatgcactattgaacaagttcaaatgattagtagacatggtgagcgatttcctagtaaaggagatgggaaatactttaattcagtgatggaagttttcaagagatatggtgaatttcatggagatttatcttttttaaatgactatgagtatttcgttactaatccagattattatgaaaaggagactactcctaaaaactcaaaaggtccatattttggaactacaaatttattacgacatggagcttattttagaaaaagatatcaatcactatttgaccaaaaggagaagcttgttgtgtttactagtaattctggaaggtgttatcaaagtggtgtctatttcgctcgaggatttttaggagatgattactcagaagatacagttgaatttgttgttgttgatgaagacaaaaaaatgggtggtaattcattgacaccaagatacgcttgtaaaactttgaatcaagatttacacaaagatttggtgaatcagtacgataagacttatttggacgatattttatctagatggctagtagacaatcctggattagatttaagtgcagatcaggtctcgtcattatttctttggtgtgcctttgagattaacgttagggggtattctccattctgcaatctatttacaaaagatgaatttatcagaagtgggtaccgaaacgatgttggtaattactatcaaactggtccaggtaataatatgacaaaggtaattggctcacctatggtggaagcgtcgttgaaaatgcttcaagaagattcaaaaatttggttgacatttacccatgatactgatattgagatgtatttgacatctttgggattgattgttccaccaggggatttgcccgttgatcgagtaccatttcccaatccatataatgcagcagaatttttccctcaaggtgctagaacttacactgaaaaattgaaatgtggtgaaaagcaatatgttagatttattgtgaatgatgcagtttatccatatccggattgtagtggaggtcctgggtttacttgtgaattgaatgattttatcaaattagttaaaagtcgtttacatgatgttgactataagcttcaatgtgaagtggacggaccagcggaattgacattttattgggattataaagacagaaagtataatgcgccgttaatagatcagtaa

SEQ ID NO: 119370 - protein, 456 aa, Candida albicans SC5314
MVGLSRVLNAGFILSGQSVFQDVAAPHQASIEQYNIVKYLGGSGPYIQNSGYGISTDIPEKCTIEQVQMISRHGERFPSKGDGKYFNSVMEVFKRYGEFHGDLSFLNDYEYFVTNPDYYEKETTPKNSKGPYFGTTNLLRHGAYFRKRYQSLFDQKEKLVVFTSNSGRCYQSGVYFARGFLGDDYSEDTVEFVVVDEDKKMGGNSLTPRYACKTLNQDLHKDLVNQYDKTYLDDILSRWLVDNPGLDLSADQVSSLFLWCAFEINVRGYSPFCNLFTKDEFIRSGYRNDVGNYYQTGPGNNMTKVIGSPMVEASLKMLQEDSKIWLTFTHDTDIEMYLTSLGLIVPPGDLPVDRVPFPNPYNAAEFFPQGARTYTEKLKCGEKQYVRFIVNDAVYPYPDCSGGPGFTCELNDFIKLVKSRLHDVDYKLQCEVDGPAELTFYWDYKDRKYNAPLIDQ

SEQ ID NO: 119371 - DNA, 1401 bp, Aspergillus niger
  CDS (1)..(1401)
atggtacagctctgggcaggaatcgtctgtctagggtccatcccagcagccactgcgctgaccggctcgtccgttttttcacactcactcatctcccagcaagtctttgacggcgataacttcctcgaatatgacggcgttcgtggtccctacgtggaccgcatatcatacgggattagtcgggaccctccagcacaatgctccgttgaccaagttatcatgataaaaagacatggtgaacgatatcccacaacaggagaagggacttccatcgaacagaccctgaagaaaatcaacgactcccttgcaggcaactacagcagcggcgatctagcattcctgggtaactggacctacttcgtcccatccgactgctacgaggcggagacctcgacagggccctatgcaggactaaatgacgcatacaatcatggcaaggcgtaccgccaacgctacggaaacctctataacgagtcatccattctcccattattcactgcggactttcaacgagtcatcagcacagcgcagaagttcggacaaggattcctcggaaacgagacctacgcgaccaaggcagcgctcaatatcatctccgaatccactgatcagggcgcagatagtctgacaccaacatgtcataaacaggacgatgatgcacaaagcatctgtggcgatatgccgtactatctgcctcagttcgatgtcgctgcggacagactgaacgcccagtatcagggtctcaacctaaactggacagatgtatactcacttatactaatgaccgcttacgagctcaacactcgctcctcatcaccctggatcgacgtcttcaccacagacgaatggatcagtttcgcccacctgtggaacgtcaacttctactactgttcaggccctggcaacaaatacaccagcgccctcggcgccctctacctaaacgcaaccctcaccctcctccaacaaggcccctcatcatccggccctctcttcttcaacttcaacatttcccctataataaccgccctcggcatcgccacgcccgccactcctctcaataaaacccgcatcccctttcccccatccgcctggaccgtccaaaacatagtcccgatgggcggccgtctcataatagagcgaatgaactgcactgattccgctctcgcgccgggtggggtcttcgtccggttggtcctcaatgaggctgtggtgccgttggaggagtgtcagagtgggccggggttttcgtgcccgttgcaggagtattcgagtttcgtgggacagttgccgagttatgtgagtgagtgcgaagttcctgaggatgagagccagtatttggggttttggtgggggtggaatacttccacggcggagaattttaggaaaggggcaagggtatga

SEQ ID NO: 119372 - protein, 466 aa, Aspergillus niger
MVQLWAGIVCLGSIPAATALTGSSVFSHSLISQQVFDGDNFLEYDGVRGPYVDRISYGISRDPPAQCSVDQVIMIKRHGERYPTTGEGTSIEQTLKKINDSLAGNYSSGDLAFLGNWTYFVPSDCYEAETSTGPYAGLNDAYNHGKAYRQRYGNLYNESSILPLFTADFQRVISTAQKFGQGFLGNETYATKAALNIISESTDQGADSLTPTCHKQDDDAQSICGDMPYYLPQFDVAADRLNAQYQGLNLNWTDVYSLILMTAYELNTRSSSPWIDVFTTDEWISFAHLWNVNFYYCSGPGNKYTSALGALYLNATLTLLQQGPSSSGPLFFNFNISPIITALGIATPATPLNKTRIPFPPSAWTVQNIVPMGGRLIIERMNCTDSALAPGGVFVRLVLNEAVVPLEECQSGPGFSCPLQEYSSFVGQLPSYVSECEVPEDESQYLGFWWGWNTSTAENFRKGARV

SEQ ID NO: 119373 - DNA, 1440 bp, Aspergillus niger
  CDS (1)..(1440)
atgcctcgcacttctctcctcaccctggcctgtgccctggccacgggcgcatccgctttctcctacggcgctgccattccccagtccacccaggaaaagcagttctctcaggagttccgcgatggctacagcatcctgaagcactacggtggtaacggaccctactctgagcgggtgtcgtatggaatcgcccgcgatcccccgaccggctgcgaggtcgatcaagtcatcatgatcaagcgtcacggcgagcgctacccttccccttccgccggcaagagcattgaggaggctctagccaaggtctacagcatcaacaccaccgaatacaagggtgacctggccttccttaacgactggacctactacgtccccaacgagtgctattacaatgccgagaccaccagcggtccctacgccggtctgctggatgcttacaaccatggcaacgagtacaaggcccgctacggccacctttgggacggcgagacagtcgtgcccttcttctccagtggctacggacgggtcatcaacacggcccgcaagttcggcgagggtttctttggctacaactactccaccaacgcggccctcaacatcatctccgagtccgaggtcatgggtgccgacagcctgactcccacctgtgacaccgacaacgaccagaccacctgcgacaacctgaccaaccagctgccccagttcaagattgctgctgcccgtctcaactcgcaaaaccctggcatgaacctcactgcatccgatgtctacaacctgatggtaatggcctcctttgagcttaatgctcgtcccttctccaactggatcaacgccttcacccaagacgaatgggtcagcttcggctacgttgaggatctaaactactactactgcgcaggtcccggtgacaagaacatggccgctgtgggcgctgtctatgccaatgccagtctcactctcctgaatcaaggacccaaggaagccggctccttgttcttcaacttcgcccacgacaccaacatcacccccatcctcgccgccctgggcgtcctcatccccaccgaagacctgcccctggaccgcgtcgccttcggcaacccctactcgaccggcaacatcgtgccccagggtggccacctgaccatcgagcgcctcagctgccaggccaccgctctatcggacgagggcacctacgtgcgtctggtactgaacgaggccgtgctccccttcaacgactgcacctccggaccaggctactcctgccctctggccaactacactgccatcctgaacaaggacctgcccgactacacgaccacctgcaacgtgtctgcatcctacccgcagcacctgagcttctggtggaattacaacaccactacagagctgaactaccgctctagcccgattgcttgccaggagggtgctgctatggactaa

SEQ ID NO: 119374 - protein, 479 aa, Aspergillus niger
MPRTSLLTLACALATGASAFSYGAAIPQSTQEKQFSQEFRDGYSILKHYGGNGPYSERVSYGIARDPPTGCEVDQVIMIKRHGERYPSPSAGKSIEEALAKVYSINTTEYKGDLAFLNDWTYYVPNECYYNAETTSGPYAGLLDAYNHGNEYKARYGHLWDGETVVPFFSSGYGRVINTARKFGEGFFGYNYSTNAALNIISESEVMGADSLTPTCDTDNDQTTCDNLTNQLPQFKIAAARLNSQNPGMNLTASDVYNLMVMASFELNARPFSNWINAFTQDEWVSFGYVEDLNYYYCAGPGDKNMAAVGAVYANASLTLLNQGPKEAGSLFFNFAHDTNITPILAALGVLIPTEDLPLDRVAFGNPYSTGNIVPQGGHLTIERLSCQATALSDEGTYVRLVLNEAVLPFNDCTSGPGYSCPLANYTAILNKDLPDYTTTCNVSASYPQHLSFWWNYNTTTELNYRSSPIACQEGAAMD

SEQ ID NO: 119375 - DNA, 1506 bp, Aspergillus niger
  CDS (1)..(1506)
atgtcgggttccctgggacagacaatctttgcctcgttgcttctggcggggattagtggtgtcaacgcccaggtactggctcccaccaacgatatcctatcgccgtctacttcgataaaccaaaaccctctgcaatatgccggggggaatagtccttacttcgccggtcccaatgtctttggaatcgataacagcgtacctgaaaagtgctcggtccagcaagccgcttatgtcgtgagacacggcagccgcttcccagattctggctcctatgaatcatgggtgggtatcaaggagaagatccaagctgccgtcaatagcaccggatttcaggcccgtggatccttggccttcataccagaatggactcccgttctgaccaatccaaccttgcaaatgtcccaagagtcaatgacagggtggaaggaggcgaccgatctcggctaccagctgcgggcccggtatccccatttctatgaagatggaagcccattctatgcgtgggcgaatgcttaccagtatccgctaaacgagtcgagagtcgttcaaactgcccgtgcctttgtcaatggatacctctacgagtatgctgacacctacggcactgtggtcagcgtgaactcgaccggctccgccagtgccatcggcaactccctgggaccctccgatatgtgtccggcattttcttctatttcaagtggaggaaataatgttactgatttcgacgctacctggactcccagagcgctcgaacgcatcaactccctcgtcagtggcaatctcacattcgacgagagcgatatcctcttcttcccctatctgtgcgggtatgaaagccaaattacaggacgcctgagctcctggtgtggagtgttcaccgaggatgagctacgcaactacgcttactcgcaggacttgagctactactacaaggtcggccctggttccgttggtccggccaaggtgctattcctacctttcctgaacagtctgatggaccttttaagcaaggggccgggtcagattggcaccaatgtggacgggggaaacttcaccattcccaacctggtcatggccttcttgaatgataatcagatcgcggagatgaccgctgccatgggcatcttcgatgacgagccctccctacctatcgaccagctgcccgcccaccatctatataatgttgcgaattggatcaccatgcgggggacggttgcctttgaggttttgaactgcgagatcgagtctcgacgccaaacatccaacaaaacctatgtccgcgtactttttaacgacgccgtctaccccatcgctcactgccaagatggacctggccggagctgtttgttgtctgattatatctcccttcttgagaagaaaagcaaagttgcgggtagcttcgacgaatattgcaatgtgacggtggcagatgcccccagcccggtcgcgggcgccagcttcttcactgacctgagcctcgactttttgacgtttgttaaaccatga

SEQ ID NO: 119376 - protein, 501 aa, Aspergillus niger
MSGSLGQTIFASLLLAGISGVNAQVLAPTNDILSPSTSINQNPLQYAGGNSPYFAGPNVFGIDNSVPEKCSVQQAAYVVRHGSRFPDSGSYESWVGIKEKIQAAVNSTGFQARGSLAFIPEWTPVLTNPTLQMSQESMTGWKEATDLGYQLRARYPHFYEDGSPFYAWANAYQYPLNESRVVQTARAFVNGYLYEYADTYGTVVSVNSTGSASAIGNSLGPSDMCPAFSSISSGGNNVTDFDATWTPRALERINSLVSGNLTFDESDILFFPYLCGYESQITGRLSSWCGVFTEDELRNYAYSQDLSYYYKVGPGSVGPAKVLFLPFLNSLMDLLSKGPGQIGTNVDGGNFTIPNLVMAFLNDNQIAEMTAAMGIFDDEPSLPIDQLPAHHLYNVANWITMRGTVAFEVLNCEIESRRQTSNKTYVRVLFNDAVYPIAHCQDGPGRSCLLSDYISLLEKKSKVAGSFDEYCNVTVADAPSPVAGASFFTDLSLDFLTFVKP

SEQ ID NO: 119377 - DNA, 1386 bp, Debaryomyces castellii
  CDS (1)..(1386)
atggtctcagtctcaaagttaattaacaatggtttattgttggtaggtcaaggtgcctaccaagatttggcttccccacaacaagcgtccgtcgagcaatataacatcatcagattcttaggaggagctgctccatatatccaaaacaaagggttcggtatctctactgatatcccagatcaatgtactcttgagcaagtccaattgttcagcagacatggtgaaagatacccatccactggctccggaaagaaatataaggctgtatatgaaaagttgatgtcatacaacggtactttcaagggagaattggctttcctcaatgacgattatgaatattttgttcctgactcagtgtatcttgaaaaggaaacatcaccaaagaattctgacagtatctacgctggtaccactgatgccatgaagcatggtatcgcctttagaaccaagtacggtgaattgttcgatactaatgacactcttccagttttcacttccaattctggtagagtatatcaaacctctcaatactttgcaagaggttttatgggagatgatttcagtaacgataccgtcaaaaccaatattatctctgaagacgctgatatgggtgccaactcattaacaccaagagatggttgtttcaactacaatgaaaatgctaacactgctattgttgatgaatacactactgaatatttaactaaagctcttaacagatttaaagcttctaatcctggtttgaacattactgaagatgatgtttctaatctttttggatactgtgcttatgaattaaatgttaaaggagcttctccaatgtgtgatatctttactaatgaagagttcattcaatactcttacagtgttgatcttgatgactattactccaacagtgcaggtaataatatgactagagtcatcggttcaacattattaaacgcatccttggaattattaaaccatgacaaaaatgagaataagatttggttatctttcactcacgatactgatattgaaatttttcattctgctattggtattcttatccctgatgaagatttaccagttgattacactccattcccatctccttattctcacgttggaattactcctcaaggtgctagaactattattgaaaagtacgcgtgtggtaatgaatcttatgttagatatgttatcaatgatgctgttattccaattaagaagtgtagctctggtcctggtttctcatgtaatcttaatgattataatgattatgttgctgaaagagttgcaggtaccaactatgttgaacaatgtggtaataacaatgcttcagctgttacattctactgggattacgaaactactaactacaccgcttcccttatcaacagttaa

SEQ ID NO: 119378 - protein, 461 aa, Debaryomyces castellii
MVSVSKLINNGLLLVGQGAYQDLASPQQASVEQYNIIRFLGGAAPYIQNKGFGISTDIPDQCTLEQVQLFSRHGERYPSTGSGKKYKAVYEKLMSYNGTFKGELAFLNDDYEYFVPDSVYLEKETSPKNSDSIYAGTTDAMKHGIAFRTKYGELFDTNDTLPVFTSNSGRVYQTSQYFARGFMGDDFSNDTVKTNIISEDADMGANSLTPRDGCFNYNENANTAIVDEYTTEYLTKALNRFKASNPGLNITEDDVSNLFGYCAYELNVKGASPMCDIFTNEEFIQYSYSVDLDDYYSNSAGNNMTRVIGSTLLNASLELLNHDKNENKIWLSFTHDTDIEIFHSAIGILIPDEDLPVDYTPFPSPYSHVGITPQGARTIIEKYACGNESYVRYVINDAVIPIKKCSSGPGFSCNLNDYNDYVAERVAGTNYVEQCGNNNASAVTFYWDYETTNYTASLINS

SEQ ID NO: 119379 - DNA, 1878 bp, Pichia angusta
  CDS (273)..(1601)
agcaatacccagactcgagcgagcgttcgtttacggctgtaatatgcaagctgctggaacgactagcactttcgatgcagtatagagacagaaggggatctttgtagggcagttttgggccggaatacgcctaattcatcacacgtgctaaaaattattgtggtgtacaatactgcatgcaatatattcacccggaatagtaatgctaaaataaaaaataacctttgatactccactataaatatggtcaatctacctcactcttgacctcaatgttttcctttgcaacgacacttctagttggcgccattgtggccaatgggctcatcttgcaccctggctacgaccaggttgccacagaccagtataacttactcaagttcatgatcggcgctggtccctttgtcgagcatagtgggtttggcattccacttgacactcctcctcattgtgaaattgaacaggcccaattgttcatgcggcatggagaaaggttccctactaaaagctctggaaaacaatataagaaattttatgacaaactcaagaaggccaatattaccgactacaaaggacctctggcctttatcgaggatttggaatactttgttccagacagcgataattatgaacttgaaactacaaggggcctgtattctggcctactcaatgctttcaagttcggtacctatcttagggaaagatatgactcgctagtggatacaagcagtgttctgcccatatttgcagcaagcgaggacagggttgtcgacaccgcaagatcttttggccgtgggttttttgggccggactatgcgacgagttgctctatccaagtcgtcaacgaaacagataccagcaaaggagcaaacgccctgaccaccaaggacaattgtccaacatacaactcttcattttacgattattcgtttggtgatgagatcttccaaagggaagcagacaggttaaatgagctgtctcccggcttcaacatcaccgccgacgacattatcacaatggggacgtattgtgcttatgaaacgaatgtcaaagggcattcaagcttctgtgatgctctttcgagagaggcatttattgctctccagtacaataacgacgttaccaagttctatcagtttggtcctggctataacatgagcgcagtggctggtggtgtctatgccaatgctaccgccaagttgctacaagaagacggcaaactgtggttctccttttcccacgacaacgacttattgaactatatcactgctcttggactcatcaccgataccgagttgggaacagaagacgtggatttccaccgaagtttcaaaacctctgagctcgttcctcaaggagccagactgattattgagaaacttaactgttctgacacgtcgtttgtgagaaccattctgaacgacaaggtgtaccctgttccaggatgttcttcaggaccgggttactcttgtccactggaggactacctggacattataactccagaggttgactatgcctccgcctgtgagcttccagacgatgcccctaaggaaattagcttttactgggactggaagccgacctttgagaacaactaaataccaatgcagagcgagctggttctgcgagttatattcagtagcactttagatgctacggaaacgaagttcttgaacaataaaaatcgtctgatattcaagagtaagttctaatttattgacctatagcttagattctctctggttgtagctagcgacacactccagttcgactttcacttgcttgttagggaatcccacaacgcaagatctagaaggcatatgggggaagtagtccttgtacacagagttgacagtggcagcatccttaggatcc

SEQ ID NO: 119380 - protein, 442 aa, Pichia angusta
MFSFATTLLVGAIVANGLILHPGYDQVATDQYNLLKFMIGAGPFVEHSGFGIPLDTPPHCEIEQAQLFMRHGERFPTKSSGKQYKKFYDKLKKANITDYKGPLAFIEDLEYFVPDSDNYELETTRGLYSGLLNAFKFGTYLRERYDSLVDTSSVLPIFAASEDRVVDTARSFGRGFFGPDYATSCSIQVVNETDTSKGANALTTKDNCPTYNSSFYDYSFGDEIFQREADRLNELSPGFNITADDIITMGTYCAYETNVKGHSSFCDALSREAFIALQYNNDVTKFYQFGPGYNMSAVAGGVYANATAKLLQEDGKLWFSFSHDNDLLNYITALGLITDTELGTEDVDFHRSFKTSELVPQGARLIIEKLNCSDTSFVRTILNDKVYPVPGCSSGPGYSCPLEDYLDIITPEVDYASACELPDDAPKEISFYWDWKPTFENN

SEQ ID NO: 119381 - DNA, 1852 bp, Arxula adeninivorans
  CDS (354)..(1805)
ggaccaatttacgccattggaattctaatattggccatgcatcatagggacttttcctgtttattcccgttttttactgtggtgatgcctcggttcaggtcatatcagtgcctgcatggcccactttcagatcggctatctccacagaacggcacgcttgaatagcgttgaccaccccccaatactcgcggttaaatgtcaacctgcagtagtttattgcagaagactggcatattgtgaaccatgatcgtactgcgagtggagataaaaatgccgtttcgcgtgacattgagcaagttgccgggcgactatttgaacgggctcatttcccaggattttgcaccagaaaagagatgctgaacgcaatttctgtattggcattagcggctctagttaacggacagctctacggaggaggtcccgagaagcaattcagtcagaagattgatgacggatacaaccttctcaaacattttgggcacttaggtccgcataccgaccgccaatcctatggtatttccagagatactcctgcccaatgcgaagtagatcaggtcataatggttcatcgccacggtgagaggtacccagacgcttcagacacctatcctcaattggtggaagcactggaaaagctgtacaactacagtgaccaatttacgagtgggtctcttgagtttctcaatacctgggagtcatttctcaatgacgaggcaatgcttgagcaggagacctattcaggaccatacaatggcctaaaaaccgccttcgaccgaggggttgactaccgggctcgatatggtcatttatgggacggtgagggtgttcctatcttcacttctggtagccagcgtgttctggataccgcgagaaggttcggggaaggtttctttggttacaattactcgtccaaggcgtatatgaacattattcctgagactgaagaccaaggagccaattcgttgactccaccttgttttgtccctagcaatgttccattctccatcttttttgcacctcctgtacttgcttcattctttgatgctgctgataggttgaaccgagagtatcctggactgaatctgacagctactgacgttaagacacttatgaacttagctccttatgaacttaatactcgtccctacaccccgtgggctgacgtgttcactcgagatgaatggattgcttatcggtacacatttgatctggcattttattatttcgctggccctggttccaacacctcagcggcagttggctccgtttattcgaatgccaccttggctctgctcaatcagggccccgaaaaggcaggtaagctgcacttttcgtttgcacatgatacaaatatcacgcctatcttgtatgctcttggattgctggtgccagaaagacctttgccaaaggactatattgactggacttctccttataagatttcagatataatgcccatgggaggacaccttgtgcttgaacgcctggcttgtaacgctactgccaagtaccccaagggatcatatgcccgagcggtcctcaatgaagcggttgtgccttttaatgaatgccaaaacggtcctggattctcttgtcctctctccaactatactgagctggtagggggccgtgctcaagctcttgactatgtatcgacttgcgacgttcctactgactacccgcaacatcttttattcttctggaactataacaagactacagattttaactatcaaaaggaccccattggctatcaggccaacctcatcacctgggatggaaaaccctttaagaagtccaaataaactggtgatgctcggtcccgttatgtatagttatttgttattgtttt

SEQ ID NO: 119382 - protein, 483 aa, Arxula adeninivorans
MLNAISVLALAALVNGQLYGGGPEKQFSQKIDDGYNLLKHFGHLGPHTDRQSYGISRDTPAQCEVDQVIMVHRHGERYPDASDTYPQLVEALEKLYNYSDQFTSGSLEFLNTWESFLNDEAMLEQETYSGPYNGLKTAFDRGVDYRARYGHLWDGEGVPIFTSGSQRVLDTARRFGEGFFGYNYSSKAYMNIIPETEDQGANSLTPPCFVPSNVPFSIFFAPPVLASFFDAADRLNREYPGLNLTATDVKTLMNLAPYELNTRPYTPWADVFTRDEWIAYRYTFDLAFYYFAGPGSNTSAAVGSVYSNATLALLNQGPEKAGKLHFSFAHDTNITPILYALGLLVPERPLPKDYIDWTSPYKISDIMPMGGHLVLERLACNATAKYPKGSYARAVLNEAVVPFNECQNGPGFSCPLSNYTELVGGRAQALDYVSTCDVPTDYPQHLLFFWNYNKTTDFNYQKDPIGYQANLITWDGKPFKKSK

SEQ ID NO: 119383 - DNA, 1494 bp, Aspergillus oryzae
  CDS (1)..(1494)
atgctgaatgtgacatcaccatgggcattaattctttcccttttgactgcgattgttagtatttcctattataataacaacccatctgctcccgagattaggtcgcctcattgcgcaagctggaacgcctggtacaacccactccgatcaggccaggtcggatatcaagccaacgattggaacatcctctaccacctgggtggcaatggaccatggatagagaagattgacgagcttgaaacgccgggccttgaacccccaaagggttgcgtcattgatcaagtacatatgatctctcgtcatggggaacgatatccgaccaaatctgctgggagtcgtcacctcgcacttctaaatcgaataaaggaagcaaatgtagttcttaatggctcactatcattcttgaacaattggacatattttaccgatgaaccacagaaagatttcgaccagctaaccaagactagtccgtatgctggcacactgcaggctttctcaacgggcgtccgcttcttaacgcgatacggacacttattaccactccatgggacgacaagattatgggcaagcgagtgtaaccgcgtgatagaaacagcccagcatttcgcgtctggattcttcggcctggattgggaaaagactgaaaaggctgcgttggagatcatccccgagaccctcgagcgaggtgccgatacactgactccgggcgatacatgcccaaaatacatcgaagatcctgcgaaaggccatgacaatggtgtcaatatgcttgctctgtttcaagatgtgtacattccagctattgcagagcgactaatcaatgatgagaacaactcggcacttggatatttaaccaatctagaggtctacggtatgcaggaaatgtgcggattcgagaccctatctcgcgggtcaagtccttggtgcgatatatttactcatgatgattgggagaattttgagtatgcccgtgatttgattcactactaccgtgctggtccaggcaacccgtatgctggtgctatgggttggctctggctcaatgctacgactggacttttacggtctgggccggaagctggtactatgttcttcagtttcgttcatgatggggatatcgctcccttggtcacagcaatggatatattgaaagatccgaagtatgatccattcctgccgaccacacatagggtggaagaccgcgtctggcgtacctcgtccgtcatgccaatgggcggaaggatcgtttttgagagattgacttgtccgacttcatcggcgaaggaccccagtggtgaagaggcctttcttcgggttaatataaacgataagattgtgccactgccatactgcaaatctgggcctgggctgtcgtgtccgttgaaggaattcgttgatcatgtagaaagacgaagatcggaagtgggagactttggagaagtgtgcggactagaaaaggacgttggatatataacattcttacgacagggctag

SEQ ID NO: 119384 - protein, 497 aa, Aspergillus oryzae
MLNVTSPWALILSLLTAIVSISYYNNNPSAPEIRSPHCASWNAWYNPLRSGQVGYQANDWNILYHLGGNGPWIEKIDELETPGLEPPKGCVIDQVHMISRHGERYPTKSAGSRHLALLNRIKEANVVLNGSLSFLNNWTYFTDEPQKDFDQLTKTSPYAGTLQAFSTGVRFLTRYGHLLPLHGTTRLWASECNRVIETAQHFASGFFGLDWEKTEKAALEIIPETLERGADTLTPGDTCPKYIEDPAKGHDNGVNMLALFQDVYIPAIAERLINDENNSALGYLTNLEVYGMQEMCGFETLSRGSSPWCDIFTHDDWENFEYARDLIHYYRAGPGNPYAGAMGWLWLNATTGLLRSGPEAGTMFFSFVHDGDIAPLVTAMDILKDPKYDPFLPTTHRVEDRVWRTSSVMPMGGRIVFERLTCPTSSAKDPSGEEAFLRVNINDKIVPLPYCKSGPGLSCPLKEFVDHVERRRSEVGDFGEVCGLEKDVGYITFLRQG

SEQ ID NO: 119385 - DNA, 1449 bp, Monascus anka
  CDS (1)..(1449)
atgcctctcttctcttttctctccgcgacaccaacagtcatgcagcttatcttcacggttgcagccatcgcgagtgtggcagccgggtttcagtcggtgattagcgaaaagcaattttctcaggaatttctcgacaactacagcatcctgaagcactatggcggtaatggcccttactccagccgccggtcctacgggatctcgcgcgaacctcccgactcgtgctccgtcgaccaggtcatcatgatcatgcgtcatggcgagcgatatccgtctccagacctcggagcgagcatcgaagcagctctcgccaagatcaagtcctcgaacgtatccacataccagggcgacctggatttcctaaattcctggacctactatgtccccaatcactgtgcctacaatgccgagacctccaccggaccgtatgctggtctcctcgagggattcaagcgaggtagcgactaccgcgctcgttacggtcatttgtgggacggggagtcgattgtcccaatcttcgctgctggttaccagcgtatcattgctacttctcgaaaattcggcgagggtttcttcggcgccaactactccaccaatgcggccatcaatattatctcagaggcaaaggagatgggtgcaaatagcctcacacccacttgcgaccacgacaatgacaccagcacttgcaactccctgacaacggtgtggccacagttcaaagtcgctgcagcccgtttgaattctcagaaccccggtttggatctgaatgccactgacatctactatctgatgtccatggcttcctttgaattgaacgctcggccgtactccgactggatcaatgtttttacccttgatgagtgggtgacgtttggttacgttcaggacctgaattattattactgcgccggcccaggagacaagaacatggccgctgtgggggccgtatatgtaaatgcatctctgactctcctcaaccaaggcccgtcagctggcacattatggtttaactttgcccatgatacaaacatcacccccattcttgcggccctcggcgtcctcaccccggagcgtgatcttcccaccgaccgtgttgtcttcgatagcaagtggtcctccggggacatcgtcccccaggccggccacctgacaatcgagcgactgaactgcacgagcactgccgcatcacctgccggcgtctatgtccgcttggtccaaaatgaggccgtcatcccggttgaagcgtgccaatcaggtcctgggtactcttgctccctggccgacttcaccgaaattatgtccaagcagcttcccgatttcgtgtcgacttgcagtattcgctcgtcgtaccctcagtacctagacttctggtggaactacaatacgaccaccgatctgaactatccgaagggcccggttccctgtgccgagggagtggcgacaagctag

SEQ ID NO: 119386 - protein, 482 aa, Monascus anka
MPLFSFLSATPTVMQLIFTVAAIASVAAGFQSVISEKQFSQEFLDNYSILKHYGGNGPYSSRRSYGISREPPDSCSVDQVIMIMRHGERYPSPDLGASIEAALAKIKSSNVSTYQGDLDFLNSWTYYVPNHCAYNAETSTGPYAGLLEGFKRGSDYRARYGHLWDGESIVPIFAAGYQRIIATSRKFGEGFFGANYSTNAAINIISEAKEMGANSLTPTCDHDNDTSTCNSLTTVWPQFKVAAARLNSQNPGLDLNATDIYYLMSMASFELNARPYSDWINVFTLDEWVTFGYVQDLNYYYCAGPGDKNMAAVGAVYVNASLTLLNQGPSAGTLWFNFAHDTNITPILAALGVLTPERDLPTDRVVFDSKWSSGDIVPQAGHLTIERLNCTSTAASPAGVYVRLVQNEAVIPVEACQSGPGYSCSLADFTEIMSKQLPDFVSTCSIRSSYPQYLDFWWNYNTTTDLNYPKGPVPCAEGVATS

SEQ ID NO: 119387 - DNA, 2485 bp, Kluyveromyces lactis
  CDS (769)..(2178)
ggcaaccatcatcatatcaaagcccaaaacggaaaagctcaacggttcatagcatccacgtctttccttttccgctacctgggtgtggtttatgttcttgcacaccctaatattgaaccttacacgctgcatataaaaactcttgattgttaattccttagtttccgcacagacaaagcactggaaatgtgaaacacgctgttttgtttttatgctaacacatcggcagtaagggttcagatgcgaattgaacgcttttccctcggaaggggtctcaggacatggactgccgttgagtgccaaagtgcttcgtctaagtggtttgaatcctacttgacacacgtgcatacggcattcgagtattttcagggtcgttgcattttgaaaaaggaacactgaatttgcagatcagaaaagctctgttaaggttggaaaagtggctttctgtgatactttctaagaaatgcggctgtaaaataaagccgactgctcgaaccctttagactatattctcgaatatcgattagatggatgaattggggaaccggccaataatgttaaatgataattcgcaagggtagtgggttcattggagatgagttcaggatgtatggaacagacagaaattgggcatataggaaccgcatcacaacaagtgatgagacaaggtttactgatgatctttcattacaacaatggaaggtattattcaattgcataaaaaagaagcagatcaaaaacgcaggttcaaacccgctcaggttaataatgctatctattctgttgagtttattatcattatcagggacccatgcggctcctatttcaaaggacaacggcacagtctgttatgccctcaacagcagtaccacagatgaatccatctttccccttttgaacggtcaaggtccccactacgattacccacaatcgtttgggatccccgtggaagtcccagaccagtgcacagttgaacatgtccaaatgttggcaagacatggagagagatatccaacggcatcaaagggtaaattatggattgcattatgggataaattgaaggaattccaggggcaatataacggtcctatggaagttttcaacgattatgagttttttgtgtcaaacacaaagtatttcgaccaattgactaattctaccgatgtggacccttccaatccttacgcaggtgcaaagaccgctcaacatttggggaaatacattgcttacaactacggggatctgtttagtgactccaacccagtctttacctccagctcagggagagtccatcaaactgccaaatacgtagtttcatctttggaagaagaacttgacattcaacttgatcttcaaattattcaagaaaatgagacctcaggtgcaaactcccttacccctgcagattcgtgtatgacatacaatggtgaccttggtgacgagtacttcgaaaatgccacactaccatatttaactgatatcaaaaacagatggatgaaaaagaactctaacttgaatctaactttggagcatgatgacatcgaactgttggtggactggtgtgcctttgaaaccaatgttaaaggtagttcagccgtttgcgatctctttgagcgcaatgacttggttgcttattcctattacgcaaatgtgaataacttctacaggagaggggctggtaatcctatgtcgaatccaattggttcagtgttggtcaacgcctcttacaatcttttgacacaagctgatgaattggacaacaaggtctggctttcattctctcatgacaccgatatccaacaattcatttcagcgcttggtttgatcgacaacggcgtcactgagtattctctcgatcaagttgatttccaaaacatccagcaactaagttgggtgacgcctatgggaggtcgtatcttcactgaaaaattgaagtgtggaaatgcctcttatgttcgttatattatcaacgatgtgattattccagttccaggttgcacctcaggtccagggttttcctgtcctatcgaggactttgacgattacatcacaaacagattgaatggcattgactatgtttccagttgcgaagttcaacaggtgtctaacaccaccgaacttactttctactgggactacaatgaagtggagtacaacggtcccgttagtaacaagtaagtctcataccgactctattaacagtgattgatttcaaagaagtttgggcttttttttcccccgacgcctgctaagcatttctaatacccccatctgaaagatccttttttggtatacatggaagttgaatatccaaaaaaatcccattatttcgttcttgagcactcgccgagtaggcagttacatgtattgtggccatagtctcttggttcgtacttcatttagttaaagagctttttaaagtttatacgaagaggtctgatatcgttaatatccaaggaatttacagcattgcttctttctccgg

SEQ ID NO: 119388 - protein, 469 aa, Kluyveromyces lactis
MLSILLSLLSLSGTHAAPISKDNGTVCYALNSSTTDESIFPLLNGQGPHYDYPQSFGIPVEVPDQCTVEHVQMLARHGERYPTASKGKLWIALWDKLKEFQGQYNGPMEVFNDYEFFVSNTKYFDQLTNSTDVDPSNPYAGAKTAQHLGKYIAYNYGDLFSDSNPVFTSSSGRVHQTAKYVVSSLEEELDIQLDLQIIQENETSGANSLTPADSCMTYNGDLGDEYFENATLPYLTDIKNRWMKKNSNLNLTLEHDDIELLVDWCAFETNVKGSSAVCDLFERNDLVAYSYYANVNNFYRRGAGNPMSNPIGSVLVNASYNLLTQADELDNKVWLSFSHDTDIQQFISALGLIDNGVTEYSLDQVDFQNIQQLSWVTPMGGRIFTEKLKCGNASYVRYIINDVIIPVPGCTSGPGFSCPIEDFDDYITNRLNGIDYVSSCEVQQVSNTTELTFYWDYNEVEYNGPVSNK

SEQ ID NO: 119389 - DNA, 1650 bp, Pichia pastoris
  CDS (102)..(1508)
cgtgggctccgataagctaaacttcaacgagaatataaaagctgaaaagattcttgtcaagaacttgtacaacgaccaataagtctttcaaggcatcagacatgttttctcctattctaagtctggaaattattctcgctttggctactctccaatcagtctttgcggttgagttgcagcacgttcttggagtcaacgacagaccctatcctcagaggacagatgatcagtacaacattctgagacatctgggaggcttgggcccctacatcggttacaatggatggggaattgctgctgagtctgaaattgaatcctgtacgattgatcaggctcatctgttgatgagacatggagaaagatacccaagtaccaatgtggggaaacaactagaagctttgtaccagaaactactagatgctgatgtggaagtccctacaggaccattgtctttctttcaagactatgattacttcgtctctgacgccgcttggtacgagcaagaaacaactaagggtttctactcggggttaaacaccgctttcgattttggtaccactttgagagaacgatatgaccatttgataaacactagcgaagaaggaaagaaactttctgtttgggctggctctcaagaaagagttgttgacaccgcaaagtactttgctcaaggatttatgaaatctaactacaccgatatggttgaagtcgttgctctagaagaggagaaatcccagggactcaactctctaacggctcgaatttcatgtccaaactataacagccatatctacaaagatggcgacttccccaatgacattgctgaaagagaagctgacagattgaacactctttctccaggatttaacattactgcagatgatattccaacaattgccctatactgtggctttgaactaaatgtaagaggtgagtcatccttctgtgacgtcttgtcaagagaggctctactgtacactgcttatcttagagatttgggatggtattacaatgttggaaacgggaacccacttggaaagacaatcggctacgtctatgccaacgccacaagacagctgttggaaaacacagaagctgatcctagagattatcctttgtacttttcctttagtcatgataccgatctgcttcaagtattcacttcactcggtcttttcaacgtgacagatctgccattagaccagattcaattccagacctctttcaaatctaccgaaatagttcccatgggagcaagattgcttaccgagagattattgtgtactgttgaaggtgaagaaaaatactacgttagaactatcctcaacgatgcagtcttcccactgagtgactgttcctctggccctggattctcttgtccgttgaacgattatgtttctagacttgaggcattgaacgaggacagtgactttgcggaaaactgtggagttcctaaaaatgcttcctacccacttgaactatcattcttctgggatgacttgtcataaaaatggtaaggaatgttttgcatcagatacgagttcaaaacgattaagaagagaatgctcttttttttgtttctatccaattggactattttcgtttattttaaatagcgtacaactttaactagatgatatcttcttcttc

SEQ ID NO: 119390 - protein, 468 aa, Pichia pastoris
MFSPILSLEIILALATLQSVFAVELQHVLGVNDRPYPQRTDDQYNILRHLGGLGPYIGYNGWGIAAESEIESCTIDQAHLLMRHGERYPSTNVGKQLEALYQKLLDADVEVPTGPLSFFQDYDYFVSDAAWYEQETTKGFYSGLNTAFDFGTTLRERYDHLINTSEEGKKLSVWAGSQERVVDTAKYFAQGFMKSNYTDMVEVVALEEEKSQGLNSLTARISCPNYNSHIYKDGDFPNDIAEREADRLNTLSPGFNITADDIPTIALYCGFELNVRGESSFCDVLSREALLYTAYLRDLGWYYNVGNGNPLGKTIGYVYANATRQLLENTEADPRDYPLYFSFSHDTDLLQVFTSLGLFNVTDLPLDQIQFQTSFKSTEIVPMGARLLTERLLCTVEGEEKYYVRTILNDAVFPLSDCSSGPGFSCPLNDYVSRLEALNEDSDFAENCGVPKNASYPLELSFFWDDLS

SEQ ID NO: 119391 - DNA, 1410 bp, Kluyveromyces lactis
  CDS (1)..(1410)
atgctatctattctgttgagtttattatcattatcagggacccatgcggctcctatttcaaaggacaacggcacagtctgttatgccctcaacagcagtaccacagatgaatccatctttccccttttgaacggtcaaggtccccactacgattacccacaatcgtttgggatcccagtggaagtcccagaccagtgcacagttgaacatgtccaaatgttggcaagacatggagagagatatccaactgcatcaaagggtaaacttatgattgcattatgggataaattgaaggaattccagggtcaatataacggtcctatggaagttttcaacgattatgagttttttgtgtcaaacacaaagtacttcgaccaattgactaattctaccgatgtagacccttccaatccttacgcaggtgcaaagaccgctcaacatttggggaaatacattgcttacaactacggggatctgtttagtgactccaacccagtctttacctccagctcagggagagtccatcaaactgccaaatacgtagtttcatctttggaagaagaacttgacattcaacttgatcttcaaattattcaagaaaatgagacctcaggtgcaaactcccttacccctgcagattcgtgtatgacatacaatggtgaccttggtgacgagtacttcgaaaatgccacactaccatatttaactgatatcaaaaacagatggatgaaaaagaactctaacttgaatctaactttggagcatgatgacatcgaactgttggtggactggtgtgcctttgaaaccaatgttaaaggtagttcagccgtttgcgatctctttgagcgcaatgacttggttgcttattcctattacgcaaatgtgaataacttctacaggagaggggctggtaatcctatgtcgaatccaattggttcagtgttggtcaacgcctcttacaatcttttgacacaagctgatgaattggacaacaaggtctggctttcattctctcatgacaccgatatccaacaattcatttcagcgcttggtttgatcgacaacggcgtcactgagtattctctcgatcaagttgatttccaaaacatccagcaactaagttgggtgacgcctatgggaggtcgtatcttcactgaaaaattgaagtgtggaaatgcctcttatgttcgttatattatcaacgatgtgattattccagttccaggttgcacctcaggtccagggttttcctgtcctatcgaggactttgacgattacatcacaaacagattgaatggcattgactatgtttccagttgcgaagttcaacaggtgtctaacaccaccgaacttactttctactgggactacaatgaagtggagtacaacggtcccgttagtaacaagtaa

SEQ ID NO: 119392 - protein, 469 aa, Kluyveromyces lactis
MLSILLSLLSLSGTHAAPISKDNGTVCYALNSSTTDESIFPLLNGQGPHYDYPQSFGIPVEVPDQCTVEHVQMLARHGERYPTASKGKLMIALWDKLKEFQGQYNGPMEVFNDYEFFVSNTKYFDQLTNSTDVDPSNPYAGAKTAQHLGKYIAYNYGDLFSDSNPVFTSSSGRVHQTAKYVVSSLEEELDIQLDLQIIQENETSGANSLTPADSCMTYNGDLGDEYFENATLPYLTDIKNRWMKKNSNLNLTLEHDDIELLVDWCAFETNVKGSSAVCDLFERNDLVAYSYYANVNNFYRRGAGNPMSNPIGSVLVNASYNLLTQADELDNKVWLSFSHDTDIQQFISALGLIDNGVTEYSLDQVDFQNIQQLSWVTPMGGRIFTEKLKCGNASYVRYIINDVIIPVPGCTSGPGFSCPIEDFDDYITNRLNGIDYVSSCEVQQVSNTTELTFYWDYNEVEYNGPVSNK

SEQ ID NO: 119393 - DNA, 1404 bp, Saccharomyces cerevisiae
  CDS (1)..(1404)
atgtttaaatctgttgtttattcaattttagccgcttctttggccaatgcaggtaccattcccttaggcaaactagccgatgtcgacaagattggtacccaaaaagatatcttcccatttttgggtggtgccggaccatactactctttccctggcgactatggtatttctcgtgatttgcctgaaggttgtgaaatgaagcaactgcaaatggttggtagacatggtgaaagataccctactgtcagtctggctaagactatcaagagtacatggtataagttgagcaattacactcgtcaattcaacggctcattgtcattcttgaacgatgattacgagtttttcatccgtgatgacgatgatttggaaatggaaaccacttttgccaactcggacgatgttttgaacccatacactggtgaaatgaacgccaagagacatgctcgtgacttcttggctcaatacggttacatggtcgaaaaccaaaccagtttcgccgtttttacctctaattctaagagatgtcatgacactgctcaatatttcattgatggtttaggtgaccaattcaacatcaccttgcagactgtcagtgaagctgaatccgctggtgccaacactttgagtgcttgtaactcatgtcctgcttgggactacgatgccaatgatgacattgtaaatgaatacgacacaacctacttggatgacattgccaagagattgaacaaggaaaacaagggtttgaacttgacctcaactgacgctagtactttattctcgtggtgtgcatttgaagtgaacgctaaaggttacagtgatgtctgtgatattttcaccaaggatgaattagtccattactcctactaccaagacttgcacacttattaccatgagggtccaggttacgacattatcaagtctgtcggttccaacttgttcaatgcctcagtcaaattattaaagcaaagtgagattcaagaccaaaaggtttggttgagttttacccacgataccgatatcctaaactttttgaccaccgctggtataattgacgacaaaaacaacttaactgccgaatacgttccattcatgggcaacactttccacagatcctggtacgttcctcaaggtgctcgtgtctacaccgaaaaattccaatgttctaacgacacctacgtcagatacgtcattaacgatgctgttgttccaattgaaacctgttccactggtccagggttctcttgtgaaatcaatgacttctacgactatgctgaaaagagagtagccggtactgacttcctaaaggtctgtaacgtcagcagcgtcagtaactctactgaattgaccttctactgggactggaacactactcattacaacgccagtctattgagacaatag

SEQ ID NO: 119394 - protein, 467 aa, Saccharomyces cerevisiae
MFKSVVYSILAASLANAGTIPLGKLADVDKIGTQKDIFPFLGGAGPYYSFPGDYGISRDLPEGCEMKQLQMVGRHGERYPTVSLAKTIKSTWYKLSNYTRQFNGSLSFLNDDYEFFIRDDDDLEMETTFANSDDVLNPYTGEMNAKRHARDFLAQYGYMVENQTSFAVFTSNSKRCHDTAQYFIDGLGDQFNITLQTVSEAESAGANTLSACNSCPAWDYDANDDIVNEYDTTYLDDIAKRLNKENKGLNLTSTDASTLFSWCAFEVNAKGYSDVCDIFTKDELVHYSYYQDLHTYYHEGPGYDIIKSVGSNLFNASVKLLKQSEIQDQKVWLSFTHDTDILNFLTTAGIIDDKNNLTAEYVPFMGNTFHRSWYVPQGARVYTEKFQCSNDTYVRYVINDAVVPIETCSTGPGFSCEINDFYDYAEKRVAGTDFLKVCNVSSVSNSTELTFYWDWNTTHYNASLLRQ

SEQ ID NO: 119395 - DNA, 1404 bp, Saccharomyces cerevisiae
  CDS (1)..(1404)
atgttgaagtcagccgtttattcaattttagccgcttctttggttaatgcaggtaccatacccctcggaaagttatctgacattgacaaaatcggaactcaaacggaaattttcccatttttgggtggttctgggccatactactctttccctggtgattatggtatttctcgtgatttgccggaaagttgtgaaatgaagcaagtgcaaatggttggtagacacggtgaaagataccccactgtcagcaaagccaaaagtatcatgacaacatggtacaaattgagtaactataccggtcaattcagcggagcattgtctttcttgaacgatgactacgaatttttcattcgtgacaccaaaaacctagaaatggaaaccacacttgccaattcggtcaatgttttgaacccatataccggtgagatgaatgctaagagacacgctcgtgatttcttggcgcaatatggctacatggtcgaaaaccaaaccagttttgccgtttttacgtctaactcgaacagatgtcatgatactgcccagtatttcattgacggtttgggtgataaattcaacatatccttgcaaaccatcagtgaagccgagtctgctggtgccaatactctgagtgcccaccattcgtgtcctgcttgggacgatgatgtcaacgatgacattttgaaaaaatatgataccaaatatttgagtggtattgccaagagattaaacaaggaaaacaagggtttgaatctgacttcaagtgatgcaaacactttttttgcatggtgtgcatatgaaataaacgctagaggttacagtgacatctgtaacatcttcaccaaagatgaattggtccgtttctcctacggccaagacttggaaacttattatcaaacgggaccaggctatgacgtcgtcagatccgtcggtgccaacttgttcaacgcttcagtgaaactactaaaggaaagtgaggtccaggaccaaaaggtttggttgagtttcacccacgataccgatattctgaactatttgaccactatcggcataatcgatgacaaaaataacttgaccgccgaacatgttccattcatggaaaacactttccacagatcctggtacgttccacaaggtgctcgtgtttacactgaaaagttccagtgttccaatgacacctatgttagatacgtcatcaacgatgctgtcgttccaattgaaacctgttctactggtccagggttctcctgtgaaataaatgacttctacgactatgctgaaaagagagtagccggtactgacttcctaaaggtctgtaacgtcagcagcgtcagtaactctactgaattgacctttttctgggactggaataccaagcactacaacgacactttattaaaacagtaa

SEQ ID NO: 119396 - protein, 467 aa, Saccharomyces cerevisiae
MLKSAVYSILAASLVNAGTIPLGKLSDIDKIGTQTEIFPFLGGSGPYYSFPGDYGISRDLPESCEMKQVQMVGRHGERYPTVSKAKSIMTTWYKLSNYTGQFSGALSFLNDDYEFFIRDTKNLEMETTLANSVNVLNPYTGEMNAKRHARDFLAQYGYMVENQTSFAVFTSNSNRCHDTAQYFIDGLGDKFNISLQTISEAESAGANTLSAHHSCPAWDDDVNDDILKKYDTKYLSGIAKRLNKENKGLNLTSSDANTFFAWCAYEINARGYSDICNIFTKDELVRFSYGQDLETYYQTGPGYDVVRSVGANLFNASVKLLKESEVQDQKVWLSFTHDTDILNYLTTIGIIDDKNNLTAEHVPFMENTFHRSWYVPQGARVYTEKFQCSNDTYVRYVINDAVVPIETCSTGPGFSCEINDFYDYAEKRVAGTDFLKVCNVSSVSNSTELTFFWDWNTKHYNDTLLKQ

SEQ ID NO: 119397 - DNA, 1407 bp, Saccharomyces cerevisiae
  CDS (1)..(1407)
atggtgaagcccgttatttttgccatttgtttaggtgttctattatctaaggcactctccatcccactcagaagttttgcggatattgaactaattggctctcagaagagtctgtttccctttcttggagggtctgcgccatatttctcctttcccgctaactacggtatacccactgatattcctgaaggttgtagattaacgcaagttcaaatgattggcagacatggcgaaaggtatcctaccagaagtgaggccaaggatatttttgaagtatggtataaaatatccaattacacaggtaagtacgagggatcattatcgtttttgaataatggatatgaattttttattcccgatgaaagtcttctagaaatggagacaactttgcaaaattcgattgatgtgttgaacccgtatacaggagaaatgaatgcaaagagacatgcaagggagtttttagcaaaatatggaaaattgatggagaactgtaccaactttcctatcttcaccacaaattcgaaaagaatctacgatactgcgcaatattttgccgaggctttgggcgatggctttaatatatcacttcaaacacttagcgaaaattcctcgtcaggagcaaacacattagctgccaaaagttcgtgccccaattggaattcgaatgccaacaatgatatattaatgtcatattcgagggactacttagaaaatatttccgatcgtcttaatgacgaaaataaagggctgaacttgagcaggaaagatgcagcggccttgttttcttggtgtgccttcgagttgaacgcaaaaggttatagtaacatttgtgacattttctccgcggcagagttaatacattattcttatgagactgatttgacgagcttctaccaaaatggtcccggatacaaattgattaaatctataggtgctaatttgttcaatgcaacagtgaagctaatacgacaaagtgcgcacttggaccaaaaagtttggctgagctttacgcacgatactgatattctaaattatttgacaactgctggattgattgatgacactagaaatttaacaaccaatcatgttccctttcgtgatcattcctaccacaggtcgtggtacattcctcagggagctagagtctacacagaaaagtttcaatgctcaaacgattcgtacgtccgttatgtggtcaacgatgctgtggttcctatagagagttgctccagtggtccaggtttttcatgtgaagagggcacattttacgagtatgccaaagacagattacgaggtgtgagcttctatgaagattgcgacgtctccaaagttagcaaagaaaaggaattgacgttttactgggattggaacacaacaaggtataacgcatccttagtgaatcaataa

SEQ ID NO: 119398 - protein, 468 aa, Saccharomyces cerevisiae
MVKPVIFAICLGVLLSKALSIPLRSFADIELIGSQKSLFPFLGGSAPYFSFPANYGIPTDIPEGCRLTQVQMIGRHGERYPTRSEAKDIFEVWYKISNYTGKYEGSLSFLNNGYEFFIPDESLLEMETTLQNSIDVLNPYTGEMNAKRHAREFLAKYGKLMENCTNFPIFTTNSKRIYDTAQYFAEALGDGFNISLQTLSENSSSGANTLAAKSSCPNWNSNANNDILMSYSRDYLENISDRLNDENKGLNLSRKDAAALFSWCAFELNAKGYSNICDIFSAAELIHYSYETDLTSFYQNGPGYKLIKSIGANLFNATVKLIRQSAHLDQKVWLSFTHDTDILNYLTTAGLIDDTRNLTTNHVPFRDHSYHRSWYIPQGARVYTEKFQCSNDSYVRYVVNDAVVPIESCSSGPGFSCEEGTFYEYAKDRLRGVSFYEDCDVSKVSKEKELTFYWDWNTTRYNASLVNQ

SEQ ID NO: 119399 - DNA, 26 bp, Artificial sequence
  primer
atgtttaagtctgttgtttattcggt

SEQ ID NO: 119400 - DNA, 27 bp, Artificial sequence
  primer
ttattgttttaatagggtatcgttgta

SEQ ID NO: 119401 - protein, 464 aa, Artificial sequence
  consensus sequence
  Variant (2)..(3): Xaa in position 2 to 3 is any amino acid
  Variant (5)..(11): Xaa in position 5 to 11 is any amino acid
  Variant (12)..(12): Xaa in position 12 is any or no amino acid
  Variant (15)..(18): Xaa in position 15 to 18 is any amino acid
  Variant (20)..(21): Xaa in position 20 to 21 is any amino acid
  Variant (22)..(22): Xaa in position 22 is any or no amino acid
  Variant (24)..(26): Xaa in position 24 to 26 is any amino acid
  Variant (28)..(32): Xaa in position 28 to 32 is any amino acid
  Variant (38)..(38): Xaa in position 38 is any amino acid
  Variant (40)..(43): Xaa in position 40 to 43 is any amino acid
  Variant (45)..(63): Xaa in position 45 to 63 is any amino acid
  Variant (64)..(68): Xaa in position 64 to 68 is any or no amino acid
  Variant (70)..(70): Xaa in position 70 is any amino acid
  Variant (72)..(72): Xaa in position 72 is any amino acid
  Variant (74)..(77): Xaa in position 74 to 77 is any amino acid
  Variant (78)..(79): Xaa in position 78 to 79 is any or no amino acid
  Variant (81)..(89): Xaa in position 81 to 89 is any amino acid
  Variant (90)..(90): Xaa in position 90 is any or no amino acid
  Variant (92)..(92): Xaa in position 92 is any amino acid
  Variant (93)..(102): Xaa in position 93 to 102 is any or no amino acid
  Variant (104)..(104): Xaa in position 104 is any amino acid
  Variant (106)..(108): Xaa in position 106 to 108 is any amino acid
  Variant (110)..(112): Xaa in position 110 to 112 is any amino acid
  Variant (114)..(119): Xaa in position 114 to 119 is any amino acid
  Variant (121)..(122): Xaa in position 121 to 122 is any amino acid
  Variant (124)..(130): Xaa in position 124 to 130 is any amino acid
  Variant (131)..(138): Xaa in position 131 to 138 is any or no amino acid
  Variant (140)..(144): Xaa in position 140 to 144 is any amino acid
  Variant (146)..(148): Xaa in position 146 to 148 is any amino acid
  Variant (150)..(152): Xaa in position 150 to 152 is any amino acid
  Variant (154)..(155): Xaa in position 154 to 155 is any amino acid
  Variant (157)..(169): Xaa in position 157 to 169 is any amino acid
  Variant (170)..(174): Xaa in position 170 to 174 is any or no amino acid
  Variant (176)..(179): Xaa in position 176 to 179 is any amino acid
  Variant (180)..(180): Xaa in position 180 is any or no amino acid
  Variant (184)..(184): Xaa in position 184 is any amino acid
  Variant (186)..(189): Xaa in position 186 to 189 is any amino acid
  Variant (190)..(190): Xaa in position 190 is any or no amino acid
  Variant (192)..(213): Xaa in position 192 to 213 is any amino acid
  Variant (214)..(222): Xaa in position 214 to 222 is any or no amino acid
  Variant (224)..(230): Xaa in position 224 to 230 is any amino acid
  Variant (231)..(232): Xaa in position 231 to 232 is any or no amino acid
  Variant (234)..(234): Xaa in position 234 is any amino acid
  Variant (236)..(238): Xaa in position 236 to 238 is any amino acid
  Variant (239)..(239): Xaa in position 239 is any or no amino acid
  Variant (241)..(247): Xaa in position 241 to 247 is any amino acid
  Variant (249)..(250): Xaa in position 249 to 250 is any amino acid
  Variant (252)..(252): Xaa in position 252 is any amino acid
  Variant (254)..(255): Xaa in position 254 to 255 is any amino acid
  Variant (257)..(257): Xaa in position 257 is any amino acid
  Variant (258)..(258): Xaa in position 258 is any or no amino acid
  Variant (260)..(261): Xaa in position 260 to 261 is any amino acid
  Variant (263)..(264): Xaa in position 263 to 264 is any amino acid
  Variant (266)..(274): Xaa in position 266 to 274 is any amino acid
  Variant (276)..(277): Xaa in position 276 to 277 is any amino acid
  Variant (279)..(282): Xaa in position 279 to 282 is any amino acid
  Variant (284)..(285): Xaa in position 284 to 285 is any amino acid
  Variant (287)..(287): Xaa in position 287 is any amino acid
  Variant (289)..(295): Xaa in position 289 to 295 is any amino acid
  Variant (296)..(296): Xaa in position 296 is any or no amino acid
  Variant (298)..(301): Xaa in position 298 to 301 is any amino acid
  Variant (304)..(306): Xaa in position 304 to 306 is any amino acid
  Variant (309)..(316): Xaa in position 309 to 316 is any amino acid
  Variant (317)..(331): Xaa in position 317 to 331 is any or no amino acid
  Variant (334)..(334): Xaa in position 334 is any amino acid
  Variant (339)..(346): Xaa in position 339 to 346 is any amino acid
  Variant (347)..(347): Xaa in position 347 is any or no amino acid
  Variant (349)..(361): Xaa in position 349 to 361 is any amino acid
  Variant (362)..(364): Xaa in position 362 to 364 is any or no amino acid
  Variant (366)..(375): Xaa in position 366 to 375 is any amino acid
  Variant (376)..(376): Xaa in position 376 is any or no amino acid
  Variant (378)..(378): Xaa in position 378 is any amino acid
  Variant (380)..(380): Xaa in position 380 is any amino acid
  Variant (382)..(384): Xaa in position 382 to 384 is any amino acid
  Variant (386)..(388): Xaa in position 386 to 388 is any amino acid
  Variant (390)..(393): Xaa in position 390 to 393 is any amino acid
  Variant (394)..(402): Xaa in position 394 to 402 is any or no amino acid
  Variant (406)..(408): Xaa in position 406 to 408 is any amino acid
  Variant (411)..(411): Xaa in position 411 is any amino acid
  Variant (413)..(413): Xaa in position 413 is any amino acid
  Variant (415)..(417): Xaa in position 415 to 417 is any amino acid
  Variant (419)..(420): Xaa in position 419 to 420 is any amino acid
  Variant (424)..(424): Xaa in position 424 is any amino acid
  Variant (427)..(444): Xaa in position 427 to 444 is any amino acid
  Variant (445)..(447): Xaa in position 445 to 447 is any or no amino acid
  Variant (449)..(455): Xaa in position 449 to 455 is any amino acid
  Variant (456)..(459): Xaa in position 456 to 459 is any or no amino acid
  Variant (461)..(461): Xaa in position 461 is any amino acid
  Variant (463)..(463): Xaa in position 463 is any amino acid
GXXPXXXXXXXXGIXXXXPXXXCXXXQXXXXXRHGERXPXXXXGXXXXXXXXXXXXXXXXXXXXXXXXLXFXNXXXXXXFXXXXXXXXXXTXXXXXXXXXXXYXGXXXAXXXGXXXXXXYXXLXXXXXXXXXXXXXXXFXXXXXRXXXTXXXFXXGXXXXXXXXXXXXXXXXXXEXXXXXGANXLXXXXXCXXXXXXXXXXXXXXXXXXXXXXXXXXXXXXXRXXXXXXXXXLXLXXXXDXXXXXXXCXXEXNXXGXXSXXCXXFXXXXXXXXXYXXDXXXXYXXGXGXXXXXXXXGXXXXNAXXXLLXXXXXXXXXXXXXXXXXXXXXXXSFXHDTDXXXXXXXXXGXXXXXXXXXXXXXXXXFXXXXXXXXXXXPXGXRXXXEXXXCXXXXXXXXXXXXXYVRXXXNDXVXPXXXCXXGPGXSCXXXXXXXXXXXXXXXXXXXXXCXXXXXXXXXXXLXFXW

SEQ ID NO: 119402 - protein, 29 aa, Artificial sequence
  protein pattern
  Variant (2)..(2): Xaa in position 2 is any amino acid
  Variant (4)..(4): Xaa in position 4 is any amino acid
  Variant (5)..(5): Xaa in position 5 is Ile, Leu or Val
  Variant (6)..(6): Xaa in position 6 is any amino acid
  Variant (8)..(8): Xaa in position 8 is Asp or Glu
  Variant (9)..(9): Xaa in position 9 is Ala, Ser or Val
  Variant (10)..(10): Xaa in position 10 is Ile or Val
  Variant (11)..(11): Xaa in position 11 is any amino acid
  Variant (13)..(15): Xaa in position 13 to 15 is any amino acid
  Variant (17)..(17): Xaa in position 17 is Ala, Gln, Ser or Thr
  Variant (18)..(18): Xaa in position 18 is Asp, Gly, Asn, Ser or Thr
  Variant (22)..(22): Xaa in position 22 is any amino acid
  Variant (23)..(23): Xaa in position 23 is Ser or Thr
  Variant (25)..(26): Xaa in position 25 to 26 is any amino acid
  Variant (27)..(27): Xaa in position 27 is Ala, Asp, Glu, Gly, Asn, Ser or Thr
  Variant (28)..(28): Xaa in position 28 is Asp, Glu, Asn or Thr
  Variant (29)..(29): Xaa in position 29 is Phe or Tyr
YXRXXXNXXXXPXXXCXXGPGXXCXXXXX

SEQ ID NO: 119403 - protein, 22 aa, Artificial sequence
  protein pattern
  Variant (2)..(2): Xaa in position 2 is Glu, Ser or Thr
  Variant (3)..(3): Xaa in position 3 is Ile, Leu, Met or Val
  Variant (4)..(5): Xaa in position 4 to 5 is any amino acid
  Variant (6)..(6): Xaa in position 6 is Ala, Ile, Leu or Val
  Variant (7)..(7): Xaa in position 7 is any amino acid
  Variant (8)..(8): Xaa in position 8 is Leu, Met or Val
  Variant (9)..(10): Xaa in position 9 to 10 is any amino acid
  Variant (16)..(16): Xaa in position 16 is Phe or Tyr
  Variant (18)..(19): Xaa in position 18 to 19 is any or no amino acid
  Variant (21)..(21): Xaa in position 21 is any amino acid
  Variant (22)..(22): Xaa in position 22 is Ala, Asp, Gly, Asn, Ser or Thr
CXXXXXXXXXRHGERXPXXSXX

SEQ ID NO: 119404 - protein, 24 aa, Artificial sequence
  protein pattern
  Variant (2)..(2): Xaa in position 2 is Glu, Ser or Thr
  Variant (3)..(3): Xaa in position 3 is any amino acid
  Variant (4)..(4): Xaa in position 4 is Ala, Asp, Glu, Asn or Thr
  Variant (5)..(5): Xaa in position 5 is Asp or Glu
  Variant (6)..(10): Xaa in position 6 to 10 is any amino acid
  Variant (11)..(11): Xaa in position 11 is His or Tyr
  Variant (12)..(13): Xaa in position 12 to 13 is any amino acid
  Variant (14)..(14): Xaa in position 14 is Asp or Asn
  Variant (15)..(15): Xaa in position 15 is Leu or Val
  Variant (16)..(17): Xaa in position 16 to 17 is any amino acid
  Variant (18)..(18): Xaa in position 18 is Phe or Tyr
  Variant (20)..(21): Xaa in position 20 to 21 is any amino acid
  Variant (23)..(23): Xaa in position 23 is Ala, Leu or Pro
FXXXXXXXXXXXXXXXXXYXXGXG

SEQ ID NO: 119405 - protein, 13 aa, Artificial sequence
  protein pattern
  Variant (2)..(2): Xaa in position 2 is any amino acid
  Variant (4)..(4): Xaa in position 4 is Ala or Gly
  Variant (6)..(8): Xaa in position 6 to 8 is any amino acid
  Variant (10)..(10): Xaa in position 10 is Lys or Arg
  Variant (11)..(12): Xaa in position 11 to 12 is any amino acid
PXGXRXXXEXXXC

SEQ ID NO: 119406 - protein, 20 aa, Artificial sequence
  protein pattern
  Variant (2)..(2): Xaa in position 2 is any amino acid
  Variant (4)..(4): Xaa in position 4 is any amino acid
  Variant (5)..(6): Xaa in position 5 to 6 is any or no amino acid
  Variant (10)..(10): Xaa in position 10 is Asp or Asn
  Variant (11)..(11): Xaa in position 11 is Ile or Leu
  Variant (12)..(16): Xaa in position 12 to 16 is any amino acid
  Variant (17)..(17): Xaa in position 17 is Ala, Ser or Thr
  Variant (18)..(18): Xaa in position 18 is Ala, Ile, Leu or Val
  Variant (20)..(20): Xaa in position 20 is Ile, Leu or Val
LXFXXXHDTXXXXXXXXXGX

SEQ ID NO: 119407 - protein, 21 aa, Artificial sequence
  protein pattern
  Variant (2)..(2): Xaa in position 2 is any amino acid
  Variant (4)..(5): Xaa in position 4 to 5 is any amino acid
  Variant (6)..(6): Xaa in position 6 is Asp, Asn, Gln, Ser or Thr
  Variant (8)..(10): Xaa in position 8 to 10 is any amino acid
  Variant (11)..(11): Xaa in position 11 is Ala or Gly
  Variant (12)..(17): Xaa in position 12 to 17 is any amino acid
  Variant (19)..(19): Xaa in position 19 is Asp, Gly or Asn
  Variant (20)..(20): Xaa in position 20 is any amino acid
  Variant (21)..(21): Xaa in position 21 is Leu or Met
YXGXXXAXXXXXXXXXXYXXX

SEQ ID NO: 119408 - DNA, 1176 bp, Saccharomyces cerevisiae
  CDS (1)..(1176)
atgtctgctgctgctgatagattaaacttaacttccggccacttgaatgctggtagaaagagaagttcctcttctgtttctttgaaggctgccgaaaagcctttcaaggttactgtgattggatctggtaactggggtactactattgccaaggtggttgccgaaaattgtaagggatacccagaagttttcgctccaatagtacaaatgtgggtgttcgaagaagagatcaatggtgaaaaattgactgaaatcataaatactagacatcaaaacgtgaaatacttgcctggcatcactctacccgacaatttggttgctaatccagacttgattgattcagtcaaggatgtcgacatcatcgttttcaacattccacatcaatttttgccccgtatctgtagccaattgaaaggtcatgttgattcacacgtcagagctatctcctgtctaaagggttttgaagttggtgctaaaggtgtccaattgctatcctcttacatcactgaggaactaggtattcaatgtggtgctctatctggtgctaacattgccaccgaagtcgctcaagaacactggtctgaaacaacagttgcttaccacattccaaaggatttcagaggcgagggcaaggacgtcgaccataaggttctaaaggccttgttccacagaccttacttccacgttagtgtcatcgaagatgttgctggtatctccatctgtggtgctttgaagaacgttgttgccttaggttgtggtttcgtcgaaggtctaggctggggtaacaacgcttctgctgccatccaaagagtcggtttgggtgagatcatcagattcggtcaaatgtttttcccagaatctagagaagaaacatactaccaagagtctgctggtgttgctgatttgatcaccacctgcgctggtggtagaaacgtcaaggttgctaggctaatggctacttctggtaaggacgcctgggaatgtgaaaaggagttgttgaatggccaatccgctcaaggtttaattacctgcaaagaagttcacgaatggttggaaacatgtggctctgtcgaagacttcccattatttgaagccgtataccaaatcgtttacaacaactacccaatgaagaacctgccggacatgattgaagaattagatctacatgaagattag

SEQ ID NO: 119409 - protein, 391 aa, Saccharomyces cerevisiae
MSAAADRLNLTSGHLNAGRKRSSSSVSLKAAEKPFKVTVIGSGNWGTTIAKVVAENCKGYPEVFAPIVQMWVFEEEINGEKLTEIINTRHQNVKYLPGITLPDNLVANPDLIDSVKDVDIIVFNIPHQFLPRICSQLKGHVDSHVRAISCLKGFEVGAKGVQLLSSYITEELGIQCGALSGANIATEVAQEHWSETTVAYHIPKDFRGEGKDVDHKVLKALFHRPYFHVSVIEDVAGISICGALKNVVALGCGFVEGLGWGNNASAAIQRVGLGEIIRFGQMFFPESREETYYQESAGVADLITTCAGGRNVKVARLMATSGKDAWECEKELLNGQSAQGLITCKEVHEWLETCGSVEDFPLFEAVYQIVYNNYPMKNLPDMIEELDLHED

SEQ ID NO: 119410 - DNA, 1474 bp, Arabidopsis thaliana
  CDS (64)..(1266)
aaaaaaaacgtttctctctctctctcaacgtcaaacgtgtcccctttcaaatctccatcttccatgcgcttccgatcattcttcttctcctcctctatcttctccctttcacattctcgctctccttctctttcttcctctcgtttctcctctctctccgccgctatgtctcctgctctcgagaaatcccgacaaggcaatggtggatgtaatgatgattcgaaatctaaggtcacggtcgttggtagtggcaattggggaagtgttgctgctaagctcattgcttctaatgccctcaagcttccttctttccatgatgaagtgaggatgtgggtgtttgaggaggttctaccaaatggtgagaagctcactgatgttatcaacaagaccaatgaaaatgtcaagtacctccctgggattgagctaggaagaaatgttgttgcggatcctgaccttgaaaatgcagtgaaggacgcgaacatgttggtttttgttacaccgcatcagtttatggatggtatatgcaagaagttagatggaaagatcacaggagatgttgaggctatatctcttgttaaaggaatggaagtgaagaaggaaggtccttgtatgatctcaagtctcatttccaagcaacttggtatcaattgttgtgttcttatgggcgcaaacattgcaaacgagatagctgtggagaagtttagtgaagcaacggttggatatagagggagtagagaaatagcggacacatgggttcagttgtttagtactccgtattttatggtcacaccggtccatgatgtggaaggagtagagttatgtgggactttgaagaatgtagttgctattgcagcgggtttcgtggacggtttggaaatgggtaataacacaaaggctgcaatcatgaggattggtctaagagagatgaaagcactctcaaagcttttgtttccatctgttaaagatagtactttcttcgagagctgcggtgtagcagatgtcattacaacttgcttaggaggaagaaaccggagagttgcggaagcatttgcaaaaagcagaggaaaaaggtcttttgatgagcttgaagcagagatgctacaagggcaaaagctacagggggtatcgacggcaagagaggtctacgaggtgttgaaacattgtggatggttggagatgtttccgctcttttcaacggttcaccaaatctgcactggtcgtcttcaacctgaagccatcgtccaataccgcgagaacaaactataactttttattgatggtacattcatcttcaaagattgatgaatttgatgtagaggttaacgtttttgtgtgcgcctgtttgctggttagtgaaccttgtagcttgcttggaccgagttttcaaatggacttaaatttaaaatggattttgtaaaacaatggccttcttggacaaagtttgcgaatttataaaattaagcccaatataact

SEQ ID NO: 119411 - protein, 400 aa, Arabidopsis thaliana
MRFRSFFFSSSIFSLSHSRSPSLSSSRFSSLSAAMSPALEKSRQGNGGCNDDSKSKVTVVGSGNWGSVAAKLIASNALKLPSFHDEVRMWVFEEVLPNGEKLTDVINKTNENVKYLPGIELGRNVVADPDLENAVKDANMLVFVTPHQFMDGICKKLDGKITGDVEAISLVKGMEVKKEGPCMISSLISKQLGINCCVLMGANIANEIAVEKFSEATVGYRGSREIADTWVQLFSTPYFMVTPVHDVEGVELCGTLKNVVAIAAGFVDGLEMGNNTKAAIMRIGLREMKALSKLLFPSVKDSTFFESCGVADVITTCLGGRNRRVAEAFAKSRGKRSFDELEAEMLQGQKLQGVSTAREVYEVLKHCGWLEMFPLFSTVHQICTGRLQPEAIVQYRENKL

SEQ ID NO: 119412 - DNA, 2946 bp, Saccharomyces sp
  CDS (1439)..(2593)
gaattcgagcctgaagtgctgattaccttcaggtagacttcatcttgacccatcaaccccagcgtcaatcctgcaaatacaccacccagcagcactaggatgatagagataatatagtacgtggtaacgcttgcctcatcacctacgctatggccggaatcggcaacatccctagaattgagtacgtgtgatccggataacaacggcagtgaatatatcttcggtatcgtaaagatgtgatataagatgatgtatacccaatgaggagcgcctgatcgtgacctagaccttagtggcaaaaacgacatatctattatagtggggagagtttcgtgcaaataacagacgcagcagcaagtaactgtgacgatatcaactctttttttattatgtaataagcaaacaagcacgaatggggaaagcctatgtgcaatcaccaaggtcgtcccttttttcccatttgctaatttagaatttaaagaaaccaaaagaatgaagaaagaaaacaaatactagccctaaccctgacttcgtttctatgataataccctgctttaatgaacggtatgccctagggtatatctcactctgtacgttacaaactccggttattttatcggaacatccgagcacccgcgccttcctcaacccaggcaccgccccaggtaaccgtgcgcgatgagctaatcctgagccatcacccaccccacccgttgatgacagcaattcgggagggcgaaaataaaactggagcaaggaattaccatcaccgtcaccatcaccatcatatcgccttagcctctagccatagccatcatgcaagcgtgtatcttctaagattcagtcatcatcattaccgagtttgttttccttcacatgatgaagaaggtttgagtatgctcgaaacaataagacgacgatggctctgccattggttatattacgcttttgcggcgaggtgccgatgggttgctgaggggaagagtgtttagcttacggacctattgccattgttattccgattaatctattgttcagcagctcttctctaccctgtcattctagtattttttttttttttttttggttttacttttttttcttcttgcctttttttcttgttactttttttctagttttttttccttccactaagctttttccttgatttatccttgggttcttctttctactcctttagattttttttttatatattaatttttaagtttatgtattttggtagattcaattctctttccctttccttttccttcgctccccttccttatcaatgcttgctgtcagaagattaacaagatacacattccttaagcgaacgcatccggtgttatatactcgtcgtgcatataaaattttgccttcaagatctactttcctaagaagatcattattacaaacacaactgcactcaaagatgactgctcatactaatatcaaacagcacaaacactgtcatgaggaccatcctatcagaagatcggactctgccgtgtcaattgtacatttgaaacgtgcgcccttcaaggttacagtgattggttctggtaactgggggaccaccatcgccaaagtcattgcggaaaacacagaattgcattcccatatcttcgagccagaggtgagaatgtgggtttttgatgaaaagatcggcgacgaaaatctgacggatatcataaatacaagacaccagaacgttaaatatctacccaatattgacctgccccataatctagtggccgatcctgatcttttacactccatcaagggtgctgacatccttgttttcaacatccctcatcaatttttaccaaacatagtcaaacaattgcaaggccacgtggcccctcatgtaagggccatctcgtgtctaaaagggttcgagttgggctccaagggtgtgcaattgctatcctcctatgttactgatgagttaggaatccaatgtggcgcactatctggtgcaaacttggcaccggaagtggccaaggagcattggtccgaaaccaccgtggcttaccaactaccaaaggattatcaaggtgatggcaaggatgtagatcataagattttgaaattgctgttccacagaccttacttccacgtcaatgtcatcgatgatgttgctggtatatccattgccggtgccttgaagaacgtcgtggcacttgcatgtggtttcgtagaaggtatgggatggggtaacaatgcctccgcagccattcaaaggctgggtttaggtgaaattatcaagttcggtagaatgtttttcccagaatccaaagtcgagacctactatcaagaatccgctggtgttgcagatctgatcaccacctgctcaggcggtagaaacgtcaaggttgccacatacatggccaagaccggtaagtcagccttggaagcagaaaaggaattgcttaacggtcaatccgcccaagggataatcacatgcagagaagttcacgagtggctacaaacatgtgagttgacccaagaattcccaattattcgaggcagtctaccagatagtctacaacaacgtccgcatggaagacctaccggagatgattgaagagctagacatcgatgacgaatagacactctccccccccctccccctctgatctttcctgttgcctctttttcccccaaccaatttatcattatacacaagttctacaactactactagtaacattactacagttattataattttctattctctttttctttaagaatctatcattaacgttaatttctatatatacataactaccattatacacgctattatcgtttacatatcacatcaccgttaatgaaagatacgacaccctgtacactaacacaattaaataatcgccataaccttttctgttatctatagcccttaaagctgtttcttcgagcttttcactgcag

SEQ ID NO: 119413 - protein, 384 aa, Saccharomyces sp
MTAHTNIKQHKHCHEDHPIRRSDSAVSIVHLKRAPFKVTVIGSGNWGTTIAKVIAENTELHSHIFEPEVRMWVFDEKIGDENLTDIINTRHQNVKYLPNIDLPHNLVADPDLLHSIKGADILVFNIPHQFLPNIVKQLQGHVAPHVRAISCLKGFELGSKGVQLLSSYVTDELGIQCGALSGANLAPEVAKEHWSETTVAYQLPKDYQGDGKDVDHKILKLLFHRPYFHVNVIDDVAGISIAGALKNVVALACGFVEGMGWGNNASAAIQRLGLGEIIKFGRMFFPESKVETYYQESAGVADLITTCSGGRNVKVATYMAKTGKSALEAEKELLNGQSAQGIITCREVHEWLQTCELTQEFPIIRGSLPDSLQQRPHGRPTGDD

SEQ ID NO: 119414 - DNA, 1380 bp, Saccharomyces sp
  CDS (103)..(1278)
ctttaattttcttttatcttactctcctacataagacatcaagaaacaattgtatattgtacaccccccccctccacaaacacaaatattgataatataaagatgtctgctgctgctgatagattaaacttaacttccggccacttgaatgctggtagaaagagaagttcctcttctgtttctttgaaggctgccgaagggcctttcaaggttactgtgattggatctggtaactggggtactactattgccaaggtggttgccgaaaattgtaagggatacccagaagttttcgctccaatagtacaaatgtgggtgttcgaagaagagatcaatggtgaaaaattgactgaaatcataaatactagacatcaaaacgtgaaatacttgcctggcatcactctacccgacaatttggttgctaatccagacttgattgattcagtcaaggatgtcgacatcatcgttttcaacattccacatcaatttttgccccgtatctgtagccaattgaaaggtcatgttgattcacacgtcagagctatctcctgtctaaagggttttgaagttggtgctaaaggtgtccaattgctatcctcttacatcactgaggaactaggtattcaatgtggtgctctatctggtgctaacattgccaccgaagtcgctcaagaacactggtctgaaacaacagttgcttaccacattccaaaggatttcagaggcgagggcaaggacgtcgaccataaggttctaaaggccttgttccacagaccttacttccacgttagtgtcatcgaagatgttgctggtatctccatctgtggtgctttgaagaacgttgttgccttaggttgtggtttcgtcgaaggtctaggctggggtaacaacgcttctgctgccatccaaagagtcggtttgggtgagatcatcagattcggtcaaatgtttttcccagaatctagagaagaaacatactaccaagagtctgctggtgttgctgatttgatcaccacctgcgctggtggtagaaacgtcaaggttgctaggctaatggctacttctggtaaggacgcctgggaatgtgaaaaggagttgttgaatggccaatccgctcaaggtttaattacctgcaaagaagttcacgaatggttggaaacatgtggctctgtcgaagacttcccattatttgaagccgtataccaaatcgtttacaacaactacccaatgaagaacctgccggacatgattgaagaattagatctacatgaagattagatttattggagaaagataacatatcatacttcccccacttttttcgaggctcttctatatcatattcataaattagcattatgtcatttctcataactactt

SEQ ID NO: 119415 - protein, 391 aa, Saccharomyces sp
MSAAADRLNLTSGHLNAGRKRSSSSVSLKAAEGPFKVTVIGSGNWGTTIAKVVAENCKGYPEVFAPIVQMWVFEEEINGEKLTEIINTRHQNVKYLPGITLPDNLVANPDLIDSVKDVDIIVFNIPHQFLPRICSQLKGHVDSHVRAISCLKGFEVGAKGVQLLSSYITEELGIQCGALSGANIATEVAQEHWSETTVAYHIPKDFRGEGKDVDHKVLKALFHRPYFHVSVIEDVAGISICGALKNVVALGCGFVEGLGWGNNASAAIQRVGLGEIIRFGQMFFPESREETYYQESAGVADLITTCAGGRNVKVARLMATSGKDAWECEKELLNGQSAQGLITCKEVHEWLETCGSVEDFPLFEAVYQIVYNNYPMKNLPDMIEELDLHED

SEQ ID NO: 119416 - DNA, 1197 bp, Yarrowia lipolytica; identical to SEQ ID NO: 58917
  CDS (40)..(1197)

SEQ ID NO: 119417 - protein, 385 aa, Yarrowia lipolytica
MSAVNRLTQQLRLLTASAPLSAANTAGKAPFKVAVVGSGNWGTTVAKIVAENCTAHPELFEPEVRVWVREEKVNGKNLTDIFNAEHENVRYLPKIKLPHNLIAEPDLLKAVEGANIIVFNLPHQFLAGVCKQLKGHVNPKARAISCLKGLDVTPQGVYLLSDVIENETGLHCGVLSGANLATEIALEKYSETTVAYNRPKDFFGEGDVTNDVLKALFHRPYFHVRCVQDVAGVSIGGALKNVVALCAGFVEGKNWGDNAKAAIMRRGMLEMINFSKRFFPETDINTLTVESAGVADLITSCAGGRNFKVGRAFGKESGSGKTIQDVEKELLNGQSAQGVITCNEVHELLKNKNMQKDFPLFESTWGIIHGELKIDDLPEILYHAN

SEQ ID NO: 119418 - DNA, 1092 bp, Apis mellifera
  CDS (1)..(1092)
atggcagaaaaactacgtatttgtatcgttggatcaggaaattggggttcgactatcgctaagataattggaataaatgctgctaattttagtaacttcgaggatcgcgttacaatgtatgtttatgaagaaataatcaatggaaaaaaactaacagaaattattaatgagacacatgaaaatgtaaagtatcttccaggacataagcttccgcccaatataattgcaattcccgatgtagtagaagctgctaaagatgcagatattctaacttttgtagtacctcatcaatttataaagagaatatgtagtgcattatttggaaaaataaagcctacagctattggcctttctcttataaagggttttgataaaaagcaaggaggtggtattgaacttatttcacatataatttcaaaacaacttcacattcctgtttcagttttaatgggagcaaatttggcttctgaagtagcaaacgaaatgttttgtgaaactactattggttgcaaggataaaaatatggctcctatactgaaagatttaatggaaacatcatattttaaagttgtagtagttgaagatgttgattcagttgaatgttgtggagcattaaagaatatagtagcttgcggtgctggtttcatcgatggtttaggattaggtgataatacaaaagctgcagtaatgagattgggccttatggaaataattaaatttgtgaatatttttttccctggtggaaaaaaaactacattctttgaaagttgtggagtagcagatctaattgcaacttgttacggtggtcgaaatcgtaaaatttgcgaagcatttgtaaaaacgggcaagaaaatctctgaattggaaaaggaaatgttgaatggacaaaaattgcaaggtcctttcactgctgaagaagtaaattatatgttaaaagcgaaaaatatggaaaacagatttcccctttttacaactgtacatcggatttgtattggtgagacaatgcctatggaactaattgaaaacttacgcaatcatccagaatacatagatgaaacaagaaattatcaagaatgtaaatgctctatatga

SEQ ID NO: 119419 - protein, 363 aa, Apis mellifera
MAEKLRICIVGSGNWGSTIAKIIGINAANFSNFEDRVTMYVYEEIINGKKLTEIINETHENVKYLPGHKLPPNIIAIPDVVEAAKDADILTFVVPHQFIKRICSALFGKIKPTAIGLSLIKGFDKKQGGGIELISHIISKQLHIPVSVLMGANLASEVANEMFCETTIGCKDKNMAPILKDLMETSYFKVVVVEDVDSVECCGALKNIVACGAGFIDGLGLGDNTKAAVMRLGLMEIIKFVNIFFPGGKKTTFFESCGVADLIATCYGGRNRKICEAFVKTGKKISELEKEMLNGQKLQGPFTAEEVNYMLKAKNMENRFPLFTTVHRICIGETMPMELIENLRNHPEYIDETRNYQECKCSI

SEQ ID NO: 119420 - DNA, 1089 bp, Bombyx mori
  CDS (1)..(1089)
atggcagataaacagccaaagaacaaagtttgcatcgttggatcgggaaactggggttctgctattgcgaaaattgttggtcgaaatgctgcgagtctatcaaattttgaggatagagttacaatgtgggtgtatgaagaaataattgaaggaaagaagttaactgaaataatcaatgaaactcatgaaaatgttaaatacctgcctggccacaaattgccttctaatgttgttgctgttccagatgtagttgaagctgcaaaagatgctgatcttttaatatttgtggtgcctcatcaatttgtcagaactatctgctctactttgcttggaaaaataaagccaactgcagctgctctgtctttgattaagggatttgatatagccgaaggtggtggcatcgatcttatatcacatattattacaagatgcctaaaaattccctgtgctgtattaatgggagccaatattgcatcggaggttgctgaggaaaaattctgcgaaacgaccattggttgtcgggacgtaatgctggctccgttaatgcgggatatcatacagacagactacttcagggtcgtggtggtggacgatgaggacgcagtcgaaatatgtggagcgttaaagaacattgtggcagtgggtgcgggtttcgtggatggcctcggctacggtgataacacaaaggctgctgtcatcagactcggtctcatggagatgatcaaattcgttgatgtgttctacccgggaagtaagctgagcacgttcttcgagtcatgcggtgtcgcagatttaataacgacctgctacgggggcagaaacagacgagttgccgaagcgtttgttaaaacgggacggtcaataaaagagctggaagacgaaatgcttaacggtcagaaactacaaggtcctatcaccgcggaggaagtaaaccatatgctcgctaataaaaatatggaaaacaagttccctttgttcactgcggtgttccgcatctgtcgcggagaactcaaaccgaacgactttattgattgcattcgcagtcacccggaacacatgaaactgcccttggtcaaatgttcactgtga

SEQ ID NO: 119421 - protein, 362 aa, Bombyx mori
MADKQPKNKVCIVGSGNWGSAIAKIVGRNAASLSNFEDRVTMWVYEEIIEGKKLTEIINETHENVKYLPGHKLPSNVVAVPDVVEAAKDADLLIFVVPHQFVRTICSTLLGKIKPTAAALSLIKGFDIAEGGGIDLISHIITRCLKIPCAVLMGANIASEVAEEKFCETTIGCRDVMLAPLMRDIIQTDYFRVVVVDDEDAVEICGALKNIVAVGAGFVDGLGYGDNTKAAVIRLGLMEMIKFVDVFYPGSKLSTFFESCGVADLITTCYGGRNRRVAEAFVKTGRSIKELEDEMLNGQKLQGPITAEEVNHMLANKNMENKFPLFTAVFRICRGELKPNDFIDCIRSHPEHMKLPLVKCSL

SEQ ID NO: 119422 - DNA, 1056 bp, Oryza sativa (japonica cultivar-group)
  CDS (1)..(1056)
atggagaacggacacgccaagaatcttgtggccgtcatcggcagcggcaactggggcagcgtcgcctcccgcctcatcgcttctaacaccgctaagttgccctcctttcatgatgaagtaaggatgtgggtgtttgaagaaatattaccaacaggcaagaagctctctgagtccattaaccaagcaaatgagaattgcaaatacttacctggtataaagctcggagctaatgtaattgctgatcctgatttggagaatgcagtgaaagatgcaaatatgcttgtttttgtgactccccatcaatttgtggagggtatatgtaagaagcttgtgggtaaactaaggccaggaactgagggtatctccctcatcaagggcatggaggtcaagatggaaggaccatgcatgatatctaaattaattacaaacatacttggaatcaattgctgtgtccttatgggtgctaacattgcaaatgagattgctgttgagaaattcagtgaagcgacaattggatataagaaagacaaggaagtggcaacccgatgggctaaactttttacaacaccttacttcctggtttctgttgtagaggatattgaaggagttgaattatgtggaacactgaaaaatgtcgtggccattgcagcaggtcttgttgatggtttggatatggggaacaataccaaggctgcaataatgaggattggtttgcgggaaatgcgtgctttctctaagcttctatcccctacagtcagggacaacactttctttgagagctgtggtgtggctgacctaataactacatgccttggtgggagaaacagaagagtcgctgaggcctttgcacgaaatggtggcaaaaggtcttttgatgagttggaggccgagatgctacatggccaaaaacttcagggagtgtccacagcaaaagaagtttatgaagtcttgacttatcgagggtggcaagaattgtttcctcttctgtccacagtgcatgagatttgtattggtcagctacctcctacatcaatagttgaatacagaatccactga

SEQ ID NO: 119423 - protein, 351 aa, Oryza sativa (japonica cultivar-group)
MENGHAKNLVAVIGSGNWGSVASRLIASNTAKLPSFHDEVRMWVFEEILPTGKKLSESINQANENCKYLPGIKLGANVIADPDLENAVKDANMLVFVTPHQFVEGICKKLVGKLRPGTEGISLIKGMEVKMEGPCMISKLITNILGINCCVLMGANIANEIAVEKFSEATIGYKKDKEVATRWAKLFTTPYFLVSVVEDIEGVELCGTLKNVVAIAAGLVDGLDMGNNTKAAIMRIGLREMRAFSKLLSPTVRDNTFFESCGVADLITTCLGGRNRRVAEAFARNGGKRSFDELEAEMLHGQKLQGVSTAKEVYEVLTYRGWQELFPLLSTVHEICIGQLPPTSIVEYRIH

SEQ ID NO: 119424 - DNA, 975 bp, Ureaplasma parvum serovar 3 str. ATCC 700970
  CDS (1)..(975): transl_table=4
atgagtaaaattttaattgttggaagcggagcttttggaagtgctttaacacaagttttagtttcaaattctcatattgttgatgtttatggaattaatgaaaatgagcttaatgatttgaaagaaaatcaaaaaaataagaaatattttcaggatcaaaaattagatttaccaattaataatacatatttggatattaatttagcacttcagaatcaatatgattttatcatcattgctattccttcatttgctattaaaaactttgttgataatatcaaaatttttaatttatcaaaaactattgttgttaatgcagcgaaaggattaaatcttgaaacaaaatcatcatggtgtgattatattaaacaaaatttaaaaattaaagccttagttggattagttggcccttcatttgcaattgatgtttttttaaaaaaaccaacagtcgttaatttagtaggcaataattcaaacgcccttataaaagttaaagaagaatttgaaaacaattgatttaaatgcattttatctaaacagtttgatgctgctaattatatttcttgttttaaaaatgcattagcaataggttgtggtatcatttatggattacaaaattcaaataattctttagtagcttttttaactaaaggaatcaatgaaatgcaactaattttagagaaaatttttcacaaaaaagtcaatccgttagaatacttttttattggtgatacaattttaacttgtactgatcaaaaatcacgtaattttagttttggtttactgattgcacaacaaggcgtacaagaagctttagtaaataaacaacagactattgaaggtttaaataacatcaaagttatttatgaaattattaaaacaaatcaaattagtgctccacttttccaaaatttatataaggtaattattaacgccttaaatccccaggatttatttgataaaagtttttgttaa

SEQ ID NO: 119425 - protein, 324 aa, Ureaplasma parvum serovar 3 str. ATCC 700970
MSKILIVGSGAFGSALTQVLVSNSHIVDVYGINENELNDLKENQKNKKYFQDQKLDLPINNTYLDINLALQNQYDFIIIAIPSFAIKNFVDNIKIFNLSKTIVVNAAKGLNLETKSSWCDYIKQNLKIKALVGLVGPSFAIDVFLKKPTVVNLVGNNSNALIKVKEEFENNWFKCILSKQFDAANYISCFKNALAIGCGIIYGLQNSNNSLVAFLTKGINEMQLILEKIFHKKVNPLEYFFIGDTILTCTDQKSRNFSFGLLIAQQGVQEALVNKQQTIEGLNNIKVIYEIIKTNQISAPLFQNLYKVIINALNPQDLFDKSFC

SEQ ID NO: 119426 - DNA, 897 bp, Campylobacter jejuni subsp. jejuni NCTC 11168
  CDS (1)..(897): transl_table=11
ttgatgcgtatagcggttattggtgcgggaaaatggggcagtgctttacatctagccttaaaagaaaatcacaattgttttatcagttctttgcatcagcgtgatttagaagattttgttagcataaaagaagctttagaatgtgaatatcttgtttttgctttaagttctcaagggatgcgtgcttggcttaaagaaaatttcatcaacaaggggcaaaaaattttaattgcttcaaaaggtatagaagatcaaagttgtcaatttttagatgaaatttttttagattttgtaccaaaagaaaatttttgtgttttaagcggtccttcttttgctgctgaagtgatgcaaaaacttcctactgctttgatgattagcgggataaatcaagagctttgtaaaaaatttgcaagttttttccctgattttattaaaacttatattgataatgatgttcgtggtgctgaaatttgtggtgcttataagaatgttttagcaattgcaagtgggattagtgatgggttaaaacttggtaataatgcaagagcagcactgatttcaagaggacttatagaaatgcatcgttttggtaaattttttggcactaaagaagaaacttttttaggattgagtggggcaggggatttgtttttaactgcaacgagtgttttatcaagaaattatagagtgggtttaaaactggcgcaaaatcaaaaattagatagtattttagccgaacttaatgaagtagcagaaggtgtaaaaactgcttatgctatagaaaaactagcaaaaatgaaaggaatttatacacctattgtaaatgaagtagtggcaatttttaagggtaaaagcgtgcaagaagcaacgcagaatttattaaagcaaaatgattaa

SEQ ID NO: 119427 - protein, 298 aa, Campylobacter jejuni subsp. jejuni NCTC 11168
MMRIAVIGAGKWGSALHLALKENHNCFISSLHQRDLEDFVSIKEALECEYLVFALSSQGMRAWLKENFINKGQKILIASKGIEDQSCQFLDEIFLDFVPKENFCVLSGPSFAAEVMQKLPTALMISGINQELCKKFASFFPDFIKTYIDNDVRGAEICGAYKNVLAIASGISDGLKLGNNARAALISRGLIEMHRFGKFFGTKEETFLGLSGAGDLFLTATSVLSRNYRVGLKLAQNQKLDSILAELNEVAEGVKTAYAIEKLAKMKGIYTPIVNEVVAIFKGKSVQEATQNLLKQND

SEQ ID NO: 119428 - DNA, 1056 bp, Mycobacterium leprae TN; identical to SEQ ID NO: 58825
  CDS (1)..(1056): transl_table=11

SEQ ID NO: 119429 - protein, 351 aa, Mycobacterium leprae TN; identical to SEQ ID NO: 58826

SEQ ID NO: 119430 - DNA, 993 bp, Synechocystis sp. PCC 6803
  CDS (1)..(993): transl_table=11
gtggtcataatggaggcgaagtcaaattacccaaaaaccatgtcctttgctaatgccgatactcccccccaagtcgttgtgttgggggccggagcctggggctctagtcttgcctacgtgctgaataacaatgacattcctacccaagtttggtctcgccgatcgccgcagagcctagaatccatggtggctggagcggatgtaattgtctcggcggtttccattaagggggtaccatcggtggcggcccggttggaggccatggacctccagcggcggactattttggtgacggccactaagggtttagatccagaaaccatgactaccccttcccaaatttggcaagctgcccttccttcccagccgatcgccgttttgtcggggccgaatttatcgaaggaaattgaccagggtttaccggcggccacggtggtggccagtagcgaccaagccgcagcggaggaaattcaaaccatttttgccgcggataacttccgggtttacaccaacaatgatcccttgggtacggaattgggtggcaccctgaaaaacgtcatggcgatcgccgtgggagtatgcgaagggttggggctaggcaccaatgctaaatcagcgttaattaccagagctttaccagaaattaccagggtggggttacattttggggcccaaccggataccttttggggtttagccggactaggagatttattggccacctgctctagcatgctcagccgcaattatcgagtgggttatggtttatccaaaggtcagtccttagaagaaattttggccaacctggggggcaccgccgaaggggtcaacaccaccgacgtactaatcaaaattgccaatcgagaaaaaattgctgtgcccatcacccggcaggtttaccgtttgctccatggaaaaattacccctccccaggcagtggaagcattaatggaaagggaattgaaagcggaatttgaagattttgatctttaa

SEQ ID NO: 119431 - protein, 330 aa, Synechocystis sp. PCC 6803; identical to SEQ ID NO: 58824

SEQ ID NO: 119432 - DNA, 1083 bp, Drosophila melanogaster
  CDS (1)..(1083)
atggcggataaagtaaatgtgtgcattgtgggctccggcaactggggttcggccatagcgaaaatcgtgggcgccaatgccgccgctctgccggagttcgaggagcgtgtgacgatgttcgtctacgaggagctcatcgatggcaagaagctgacggagattatcaacgagacgcacgagaacgtcaagtacctgaaaggacacaagctgcccccgaatgtggttgccgtgcccgacctggttgaggccgccaagaacgctgacatcctgatcttcgtggtgccccaccagttcattcccaacttctgcaaacagctactgggcaagattaagccaaatgccatcgctatctccctgatcaagggcttcgacaaggccgagggcggcggcatcgatctgatctcgcatataatcacgcgtcacctgaagatcccatgcgccgtgttgatgggcgcaaacctggccaacgaggtggctgagggcaacttctgcgaaacgacaatcggctgcacggacaagaagtatggcaaggtgctgcgcgatctcttccaggcgaaccacttccgcgtggtggtcgtggacgatgctgatgccgtggaggtttgcggtgccctcaagaacatcgtggcctgcggcgctggctttgttgatggcctcaagctgggcgacaacaccaaggcggctgtcatccggctgggcctcatggagatgattcgcttcgtggacgtcttctatcccggaagcaagctgtccaccttcttcgagagctgcggcgtggccgatctgatcacgacgtgttacggtggccgtaaccgccgcgtctctgaggcgtttgtgacttctggaaaaaccattgaggagctggagaaggaaatgctcaacggccagaagctgcagggcccacccactgccgaggaggtcaactacatgctgaagaacaagggtctggaggacaaattccccctgttcacggctattcacaaaatatgcacaaatcagctcaagcctaatgatttaattgattgcatacgcaatcaccctgagcatatggatacgtccatcatgccgtcgccaaaactttaa

SEQ ID NO: 119433 - protein, 360 aa, Drosophila melanogaster
MADKVNVCIVGSGNWGSAIAKIVGANAAALPEFEERVTMFVYEELIDGKKLTEIINETHENVKYLKGHKLPPNVVAVPDLVEAAKNADILIFVVPHQFIPNFCKQLLGKIKPNAIAISLIKGFDKAEGGGIDLISHIITRHLKIPCAVLMGANLANEVAEGNFCETTIGCTDKKYGKVLRDLFQANHFRVVVVDDADAVEVCGALKNIVACGAGFVDGLKLGDNTKAAVIRLGLMEMIRFVDVFYPGSKLSTFFESCGVADLITTCYGGRNRRVSEAFVTSGKTIEELEKEMLNGQKLQGPPTAEEVNYMLKNKGLEDKFPLFTAIHKICTNQLKPNDLIDCIRNHPEHMDTSIMPSPKL

SEQ ID NO: 119434 - DNA, 1062 bp, Drosophila melanogaster
  CDS (1)..(1062)
atggcggataaagtaaatgtgtgcattgtgggctccggcaactggggttcggccatagcgaaaatcgtgggcgccaatgccgccgctctgccggagttcgaggagcgtgtgacgatgttcgtctacgaggagctcatcgatggcaagaagctgacggagattatcaacgagacgcacgagaacgtcaagtacctgaaaggacacaagctgcccccgaatgtggttgccgtgcccgacctggttgaggccgccaagaacgctgacatcctgatcttcgtggtgccccaccagttcattcccaacttctgcaaacagctactgggcaagattaagccaaatgccatcgctatctccctgatcaagggcttcgacaaggccgagggcggcggcatcgatctgatctcgcatataatcacgcgtcacctgaagatcccatgcgccgtgttgatgggcgcaaacctggccaacgaggtggctgagggcaacttctgcgaaacgacaatcggctgcacggacaagaagtatggcaaggtgctgcgcgatctcttccaggcgaaccacttccgcgtggtggtcgtggacgatgctgatgccgtggaggtttgcggtgccctcaagaacatcgtggcctgcggcgctggctttgttgatggcctcaagctgggcgacaacaccaaggcggctgtcatccggctgggcctcatggagatgattcgcttcgtggacgtcttctatcccggaagcaagctgtccaccttcttcgagagctgcggcgtggccgatctgatcacgacgtgttacggtggccgtaaccgccgcgtctctgaggcgtttgtgacttctggaaaaaccattgaggagctggagaaggaaatgctcaacggccagaagctgcagggcccacccactgccgaggaggtcaactacatgctgaagaacaagggtctggaggacaaattccccctgttcacggctattcacaaaatatgcacaaatcagctcaagcctaatgatttaattgattgcatacgcaatcaccctgagcatatgcaaaatttgtaa

SEQ ID NO: 119435 - protein, 353 aa, Drosophila melanogaster
MADKVNVCIVGSGNWGSAIAKIVGANAAALPEFEERVTMFVYEELIDGKKLTEIINETHENVKYLKGHKLPPNVVAVPDLVEAAKNADILIFVVPHQFIPNFCKQLLGKIKPNAIAISLIKGFDKAEGGGIDLISHIITRHLKIPCAVLMGANLANEVAEGNFCETTIGCTDKKYGKVLRDLFQANHFRVVVVDDADAVEVCGALKNIVACGAGFVDGLKLGDNTKAAVIRLGLMEMIRFVDVFYPGSKLSTFFESCGVADLITTCYGGRNRRVSEAFVTSGKTIEELEKEMLNGQKLQGPPTAEEVNYMLKNKGLEDKFPLFTAIHKICTNQLKPNDLIDCIRNHPEHMQNL

SEQ ID NO: 119436 - DNA, 1053 bp, Drosophila melanogaster; identical to SEQ ID NO: 58827
  CDS (1)..(1053)

SEQ ID NO: 119437 - protein, 350 aa, Drosophila melanogaster; identical to SEQ ID NO: 58828

SEQ ID NO: 119438 - DNA, 1263 bp, Arabidopsis thaliana
  CDS (1)..(1263)
atggcggcttcggtgcaacctgcatgcttagacctccacttctccggaaagcatccaccgcttcttaaacacaacgctattatcgtccgctgcgtttcttctccaaatgtaattcccgaagctgactccatctctggtccgcctgatatcatcaatacgaaccgtgaccagcgcaaagtggttcgtatcgcttgggagaagttggttcgatggtctcgttctttgcgcgctaaagctaaaaccgatgttcttgagcgtactcgcaaggttgttgttcttggtggaggttcgtttggtactgcaatggctgctcatgtagctagaaggaaagagggattagaggttaatatgcttgttcgtgactcttttgtttgtcaatctatcaacgagaaccaccataattgtaagtattttcctgagcacaagttacctgagaatgtgattgctacaactgatgcgaaagctgcattgcttgatgctgattactgccttcatgccgtgcctgtgcagtttagctcttcgtttctagagggaattgccgattatgtcgatccaggattgccttttatatctcttagcaaaggtctggagcttaatactcttaggatgatgtctcagatcattcccattgcgcttaagaatccccggcaaccttttgttgctctttctggcccgtcatttgctctggagctgatgaacaatttaccaactgcaatggtggttgcctcaaaagataagaaattggccaatgctgttcagcagcttcttgcttctagttacttgagaataaatacttccagtgatgttacaggcgtggaaatcgccggtgccctgaagaatgttctagcaatagctgcaggaattgttgatggaatgaatctcggtaacaactctatggcagctcttgtgtcccaaggttgttcagagataagatggttagccacaaagatgggtgcaaagccaacaaccattactggtttatcaggaactggggacataatgcttacgtgttttgtaaatctttcaagaaaccgaacagttggagtcaggttagggtcaggggagacactagatgacatactaacctctatgaatcaggttgcagaaggtgtagcaacagccggggcagtgatagcattagcacagaaatacaatgtgaaactgccggttttgacagccgtagctaagataatagataatgaactgaccccgactaaggctgttcttgagctcatgaaccttcctcagattgaagaagtatga

SEQ ID NO: 119439 - protein, 420 aa, Arabidopsis thaliana
MAASVQPACLDLHFSGKHPPLLKHNAIIVRCVSSPNVIPEADSISGPPDIINTNRDQRKVVRIAWEKLVRWSRSLRAKAKTDVLERTRKVVVLGGGSFGTAMAAHVARRKEGLEVNMLVRDSFVCQSINENHHNCKYFPEHKLPENVIATTDAKAALLDADYCLHAVPVQFSSSFLEGIADYVDPGLPFISLSKGLELNTLRMMSQIIPIALKNPRQPFVALSGPSFALELMNNLPTAMVVASKDKKLANAVQQLLASSYLRINTSSDVTGVEIAGALKNVLAIAAGIVDGMNLGNNSMAALVSQGCSEIRWLATKMGAKPTTITGLSGTGDIMLTCFVNLSRNRTVGVRLGSGETLDDILTSMNQVAEGVATAGAVIALAQKYNVKLPVLTAVAKIIDNELTPTKAVLELMNLPQIEEV

SEQ ID NO: 119440 - DNA, 1038 bp, Encephalitozoon cuniculi GB-M1
  CDS (1)..(1038)
atgtcgaaaaaggtttctatcataggtaatggaaattggggcactgcaatgggaaggcttcttgcaaacaacaccgtggagagcaccatatttgacaaggacgttaggatgtggggatgcagggaggaatacgaggggaggttcctgaatgacattatcaacagtgatagaatcaaccccagatatctcccaggagtccatcttcccgaaaacctgaaggctgttgatgacatatgctcgcttgcagactctgacgtgcttgtttttgctctaccccaccaatacatgggggccatagagccattgaaggggttggtgaagagcagttgcatcggagtgtcgttgacaaaaggatttgttagtgcagaggatggagacatagatctagtaagcagattgatccacaggatcttagatataaatgtaagcgtggtgatgggggcaaacattgcaagccaggttgcccaggacatgataagcgaagggacgctgggatacactgatgaagatgcggcagacatagtgtacaagctcttcaacagctatgcataccgagttaccaagattaaggatatatatggcgttgaaatctcaggaactcttaaaaacattgtctcaatggcatatgggtttgcagaaggtcttggatattgcaccaacacaaaggtagccatattccgaaatggatttgccgagatgaggaagtttttcaagtttttctacccgatggccactacagaatccctgttccagtcatcgggggtgggagatctccttgtatcctgtatgtctggaagaaatttcggatgtgcaagactcatggcagaaaagagaatgaacctgagggaggctgaggagtccatgtgttttacgaagctccaggggccaggcacagctctcattgtgtataactatctgagaaggcagaagagagttgatgagtttcctcttatgagcacagtttacagaatatgctatgaaaatgaggcgtatgatgctattttagaatgtatttcctccgagtcggtcgaaaaataa

SEQ ID NO: 119441 - protein, 345 aa, Encephalitozoon cuniculi GB-M1
MSKKVSIIGNGNWGTAMGRLLANNTVESTIFDKDVRMWGCREEYEGRFLNDIINSDRINPRYLPGVHLPENLKAVDDICSLADSDVLVFALPHQYMGAIEPLKGLVKSSCIGVSLTKGFVSAEDGDIDLVSRLIHRILDINVSVVMGANIASQVAQDMISEGTLGYTDEDAADIVYKLFNSYAYRVTKIKDIYGVEISGTLKNIVSMAYGFAEGLGYCTNTKVAIFRNGFAEMRKFFKFFYPMATTESLFQSSGVGDLLVSCMSGRNFGCARLMAEKRMNLREAEESMCFTKLQGPGTALIVYNYLRRQKRVDEFPLMSTVYRICYENEAYDAILECISSESVEK

SEQ ID NO: 119442 - DNA, 1077 bp, Drosophila melanogaster
  CDS (1)..(1077)
atggacaagataatgatttgcatcattgggtcgggaaactgggccactaccatagcccgtaatgtgggcagaaacgtgctgaactcgcagacactggacgaaaaggtgcccatgtacgtttatgaggaaattgttgaaggtcgcaaactcacggaaatcatcaacaccacccacataaattccaagtacatgccgaactttgaactgccgccaaatattgtggccgtggatgatatcgtgactacagctcgagatgcggacattataatattcgccattccgccgactttcgtgagtagctgctgcaagacgctgctcggaaaagtcaagcccacggcccacgccgtttccctgatcaaaggattcgagcgcggcgacgatggccagttcgtcctgatttcgcagattataatgcggcagctaaagattccctgctccgtcctggtcggctgtaacttggcccatgagctggcccacgaccactttgccgagggcacagttggctgtcgggatcagaagtattacagggtgctccacgacatattcaagtcgcccactttccgcgtggtggtcaccgaggatgccgactgtgtggagatctgttccactctaaggaacatcattgcctttgcggctggctgttccgacgggatggagctgaatgagaacaccaagggaggcatcatcaggagaggatttctggagatgcttcagttcgtcgatgttttctatcccggctgccgcatgggaaccttttttgagtcctgcggaatatccgatttggttactagttgttatgcaaaccgcaatcgcaagttggccgaagcttttgtgaagacgggcaaacccttgagcgaactggagcacattctcattccaggacacgagccactgggtccggtgacagcggagctggtgcatcatatgctcaagaagaagggcttggaggacaaattccccctctttacaactgtgtacagaatctgcactggagactatccactgcagcgcctggtcgaaactctgattaaggcacgcgaggatatatttcacccgctccatactttccaattgtga

SEQ ID NO: 119443 - protein, 358 aa, Drosophila melanogaster
MDKIMICIIGSGNWATTIARNVGRNVLNSQTLDEKVPMYVYEEIVEGRKLTEIINTTHINSKYMPNFELPPNIVAVDDIVTTARDADIIIFAIPPTFVSSCCKTLLGKVKPTAHAVSLIKGFERGDDGQFVLISQIIMRQLKIPCSVLVGCNLAHELAHDHFAEGTVGCRDQKYYRVLHDIFKSPTFRVVVTEDADCVEICSTLRNIIAFAAGCSDGMELNENTKGGIIRRGFLEMLQFVDVFYPGCRMGTFFESCGISDLVTSCYANRNRKLAEAFVKTGKPLSELEHILIPGHEPLGPVTAELVHHMLKKKGLEDKFPLFTTVYRICTGDYPLQRLVETLIKAREDIFHPLHTFQL

SEQ ID NO: 119444 - DNA, 1038 bp, Bacteroides thetaiotaomicron VPI-5482
  CDS (1)..(1038): transl_table=11
atgaccaactctcaactttcaactttcaactttcaactaaatatgaaactacccggtaagatagcgataatgggcggaggaagttgggctacagccatcgcaaagatgtgtctggctcaggaagactctattaattggtacatgcgacgagatgaccgcatcgctgattttaagagacttggacataatcccgcctatctgacaggggtgaaattcgacacgaagcgtatcactttcagttctaacatcaacgatgtcgtgaaggaatcggatacactgattttcgtcaccccctctccttatctgaaagctcatctgaaaaagctgaaaacaaagattaaggataagtttattatcactgctatcaaaggaatcgtacccgatgacaacgtgattgtatcggaatatttcacaaaagaatatggcgtaccacccgaaaacatcgcagtactggcaggtccctgccacgcagaagaagtagcgctggaacgcctctcttatctgaccatcgcctgcccggacaaggacaaagcgcgcatcttcgcccgccgtttgggaagcagcttcatcaagacttccgtcagcgacgacgtagccggcatcgaatacagttcggtgcttaaaaatgtatacgccattgccgccggcatctgcagcggactgaaatacggcgataacttccaggcagtactgatatccaatgcgattcaggaaatgaaccgcttcctgaatacagtacatcccctgaacagaaatgtagatgattctgtttatttaggagacttattggtgacaggatactccaacttcagccgtaaccgcacgttcggttcgatgataggcaagggatactccgttaaaagtgcgcagattgaaatggaaatgatcgcggaaggatactacggcacgaagtgcatcaaagagatcaacaagcatcaccacgtcaacatgccgatactggatgccgtatacaatatcttgtatgaacgcatctcacccatgatagagatcaaattgctgactgattcttttagatga

SEQ ID NO: 119445 - protein, 345 aa, Bacteroides thetaiotaomicron VPI-5482
MTNSQLSTFNFQLNMKLPGKIAIMGGGSWATAIAKMCLAQEDSINWYMRRDDRIADFKRLGHNPAYLTGVKFDTKRITFSSNINDVVKESDTLIFVTPSPYLKAHLKKLKTKIKDKFIITAIKGIVPDDNVIVSEYFTKEYGVPPENIAVLAGPCHAEEVALERLSYLTIACPDKDKARIFARRLGSSFIKTSVSDDVAGIEYSSVLKNVYAIAAGICSGLKYGDNFQAVLISNAIQEMNRFLNTVHPLNRNVDDSVYLGDLLVTGYSNFSRNRTFGSMIGKGYSVKSAQIEMEMIAEGYYGTKCIKEINKHHHVNMPILDAVYNILYERISPMIEIKLLTDSFR

SEQ ID NO: 119446 - DNA, 1005 bp, Mycoplasma gallisepticum R
  CDS (1)..(1005): transl_table=4
attcaagatagcttaatgaaaactaaaattggtgtccttggtacgggagcttgaggaactgctctagctaatatcttattaaaaaacggtcatatcgtacagatgtgagggatcgatcaagacgaaatcaatagccttaaaacaggttataataatcgttattttggtcatataaaactagttaaatcacctgatctagtttcaagtgatttagctgcagttgttgatgggtgtgattatttattattagcaattccatcaaagttttttaatgatgtcttagcaaaactaactaacgttctaaaagatcgtaaagttaatctgattaatgtagctaagggaatggatggtcaaactaaacaattttgatcagaagtgatcaaacaagcgtttagtaagaatttgctatcattaacatcattattaggaccttcgtttgctactgaggtgtttgataatcacccaacagtgattaatgccgtatctaatgatatgactagttgtaaaaaagtgtgtgaactatttaataataacacttttcaattagtaccatttgacaacgaactatcagcacaactgtttgctgcaattaaaaacgtttgtgccatcggaactgggatcgtttttgaacaaacaacatcagccaacactagatctgctttactaacaaaactatttaatgagatggatcgtttgtatgaaagtttagctaaagataaataccgaccaaaagattgtacccaacttagtgggatcggtgattttattctgacttgtacaaacgatcaatcaagaaactttagttttggtaagttagtggctaaatacggaattaaaaacgcgttagaaaaaaatatcaaaaccgttgaaggttatctagcagctaaaacgatgtatgagatcattaagaacaataatttagaattaaaactcctaatcacaatttatcagatcttatatgaagatctggatgaatctgtcctagttaaaaagttgattaattaa

SEQ ID NO: 119447 - protein, 334 aa, Mycoplasma gallisepticum R
MQDSLMKTKIGVLGTGAWGTALANILLKNGHIVQMWGIDQDEINSLKTGYNNRYFGHIKLVKSPDLVSSDLAAVVDGCDYLLLAIPSKFFNDVLAKLTNVLKDRKVNLINVAKGMDGQTKQFWSEVIKQAFSKNLLSLTSLLGPSFATEVFDNHPTVINAVSNDMTSCKKVCELFNNNTFQLVPFDNELSAQLFAAIKNVCAIGTGIVFEQTTSANTRSALLTKLFNEMDRLYESLAKDKYRPKDCTQLSGIGDFILTCTNDQSRNFSFGKLVAKYGIKNALEKNIKTVEGYLAAKTMYEIIKNNNLELKLLITIYQILYEDLDESVLVKKLIN

SEQ ID NO: 119448 - DNA, 1005 bp, Porphyromonas gingivalis W83
  CDS (1)..(1005): transl_table=11
atggggggaatcgggagaataggaatattgggtagtggcagttgggctacggctctggccaaaatcatattgacctctcaaccatccatcaattggtttatgcgccgcgaagagcaggcgcagggcattaagcgtacggggcgcaatcctaactatctgcgcgatgccgtattcgatcctcggaaaatctcatttttcaccgattcggatctgaacagttttttcagagccagcgatgtggtggttcttgtcactccttcgcctttcatcaaatcctatctgaaacgcgttcgctcgtccagcatgcgcgacaagctgattatcaatgctatcaaggggatcgtgccggatgagaatgtcttggtatcggaatatctgcacgatttctgcgatgtccccaacgaactgataggtgtagtctccggtccttgccatgcagaggaggtggccagagagcgcagatcatatctgacggtgggctgcttcgatatcaataaggcaaaagccatggcaaacgtactacgcaacgattatgtgagctgtacgaccagtcaggacgtagtaggcatcgaatatgcctcggtgctgaagaatgtttatgccattgctgccggaatatgcaacggtctgcagtatggcgacaactttcagtctgtcttgatgtcgaatgccattgctgaaatgaatagtttcgtcaataccgtccacctcttggaaagagagatcacggattcggtatatttgggcgacctccttgtgacagcttattcgaactacagccgcaatcgtactttcggcaatatgataggaaagggatacagtgtcaaatccgctcaaatggagatggagatgatagcagagggctactatggagccaagtgtgtaagggaggtaaacaaacgctatcaggtcaatatgccgatcatgaatacggtgtacgaggtactgtacgagaagcgagatgcggccgaagccattactgctttgacggcacatttcaaataa

SEQ ID NO: 119449 - protein, 334 aa, Porphyromonas gingivalis W83
MGGIGRIGILGSGSWATALAKIILTSQPSINWFMRREEQAQGIKRTGRNPNYLRDAVFDPRKISFFTDSDLNSFFRASDVVVLVTPSPFIKSYLKRVRSSSMRDKLIINAIKGIVPDENVLVSEYLHDFCDVPNELIGVVSGPCHAEEVARERRSYLTVGCFDINKAKAMANVLRNDYVSCTTSQDVVGIEYASVLKNVYAIAAGICNGLQYGDNFQSVLMSNAIAEMNSFVNTVHLLEREITDSVYLGDLLVTAYSNYSRNRTFGNMIGKGYSVKSAQMEMEMIAEGYYGAKCVREVNKRYQVNMPIMNTVYEVLYEKRDAAEAITALTAHFK

SEQ ID NO: 119450 - DNA, 1152 bp, Onion yellows phytoplasma OY-M
  CDS (1)..(1152): transl_table=11
ttgcaagtattttattatttgttcttattttatgatttaattatagtggttgaaaaaaattcaaccttatttttaattatcaaaaaaacttttgtcatttttgctgtaacttttttcatgaccgtttttgctattttgattacaagaaagaagctatattttatgaaaattactattattggcagtggtgcttggggttctactttggcacaagttttaactgataacaacaatcaagttttactctatgacattaacctttcttatgtggaaaaaataaatcaaggaaaacatcccatttttaatgctccactagtaaatgtcaaagcagtttcttgccttaaacaagcccttgattattctgatttgatagttttgtcagttcctatgaaatttatgcgtcatcttctcaaacaaattgcccttatgttaactactcccaaatcgtttgtcaatgtttctaaaggtattgaacctttaacttttttgcgtgtttctgaaattgtcaaacaagttattcctgcccctcttttagctaattttgcttccttaatgggtccatcgcatgctgaagaagttattttacgcaaattaactctgttaactgcagcttcttccaatcccgcttttgccttggaaattcaaaaattattttcttgccctaattatttgaaagtatatacttcttctgatttggtaggaaatgaaatttgcagtgcttttaaaaatgttttagcctttattaacggtattttagtagccaagaactttggaattaattctcaagcagctttgatgagtcgtggtattttagaaatgtcggtgttagttactttttatcaaggaaacccccaaaccgttttaggacttccaggattaggtgatttaattgtgactgcttttagcaaatactccagaaattttaatgctggtgctaaaattgctgcaggcattacttaccaacaaattattgactcttctttgcaaaccatcgaaggattccaaactcttaatgctttttatcaattgcaattaaaacataatttagatctgcccattattcaagcctcttatcaattaatttttgaatccaagccctttgaaactgtttttgcaactttaatgcaaagacctttcaaaagtgaattctaa

SEQ ID NO: 119451 - protein, 383 aa, Onion yellows phytoplasma OY-M
MQVFYYLFLFYDLIIVVEKNSTLFLIIKKTFVIFAVTFFMTVFAILITRKKLYFMKITIIGSGAWGSTLAQVLTDNNNQVLLYDINLSYVEKINQGKHPIFNAPLVNVKAVSCLKQALDYSDLIVLSVPMKFMRHLLKQIALMLTTPKSFVNVSKGIEPLTFLRVSEIVKQVIPAPLLANFASLMGPSHAEEVILRKLTLLTAASSNPAFALEIQKLFSCPNYLKVYTSSDLVGNEICSAFKNVLAFINGILVAKNFGINSQAALMSRGILEMSVLVTFYQGNPQTVLGLPGLGDLIVTAFSKYSRNFNAGAKIAAGITYQQIIDSSLQTIEGFQTLNAFYQLQLKHNLDLPIIQASYQLIFESKPFETVFATLMQRPFKSEF

SEQ ID NO: 119452 - DNA, 1260 bp, Nasonia vitripennis
  CDS (1)..(1260)
atgtcgaaaacgaggatttgcatcgttggaagcggaaactggggctcggcgatcgcgaagatcgtgggcgctaatgccaccaagttcagcgacaagttcgaggagaaggtgacgatgtacgtgttcgaggagatggtcaacggcaagaagctcaccgagatcatcaacgagacgcacgagaacgtcaagtacctgccaggacacaagcttccgccaaatatcgtcgcggtgccggacgtcgtggaggcggccaaggaagccgatattctgatcttcgtggtgccccatcagttcatccccggcctgtgcgcgactttgctgggaaagatcaagcccagcgccgttggactgtcgctcatcaagggattcgctcagggcgacggtaccaacatcaagctcatttccaagatcatcgaggagaagctgaagatcccctgctcggtactgatgggtgccaatcttgccaacgaggtcgccgaggagcacttctgcgagaccactatcggctgcaaagacaagcgcatgggtcccatcatgaaggactgcatgcagacgccaaacttccgagtcacagtcgtggaggacacggaagccgttgaggtctgcggcgccctgaagaacatcgtcgcctgcgctgccggtttcgtcgacggtctcgccctaggtgacaacaccaaggccgccgtcatcaggcttggcctcatggagatggtcaggtacgtcgaccagttccacggcggttccaagatcaacaccttcttcgagagctgcggtgtcgccgatctcatcaccacctgctacggtggcaggaaccgcaaagtctccgaagccttcgtcaagaccggcaaatcgatcgaggaactggagaaagaaatgctgaacggccagaagctccaaggcccggcgacagccgaggaggtgaacggcatgctcaagggctgcaactcgacggacaagttcccgttgttcacagcggtgcaccgcatctgcgcgaaggagctgaagcctcaggacctgatcgaccagatccgcaaccatcccgagcatgcactaaaaattcgtcgtccagccagcacatgtcgtacacgggaagaccgtgtgcttgtcccccgacgcaaacgggatccagggatggcaatctataaacggctatttcttggctacttttgcccacagtggccaacagtgtcctgcaacgagcaaacgaaaagttacattatcttgtgcagcgtatacatacgagtagtgtttgtaaaatga

SEQ ID NO: 119453 - protein, 419 aa, Nasonia vitripennis
MSKTRICIVGSGNWGSAIAKIVGANATKFSDKFEEKVTMYVFEEMVNGKKLTEIINETHENVKYLPGHKLPPNIVAVPDVVEAAKEADILIFVVPHQFIPGLCATLLGKIKPSAVGLSLIKGFAQGDGTNIKLISKIIEEKLKIPCSVLMGANLANEVAEEHFCETTIGCKDKRMGPIMKDCMQTPNFRVTVVEDTEAVEVCGALKNIVACAAGFVDGLALGDNTKAAVIRLGLMEMVRYVDQFHGGSKINTFFESCGVADLITTCYGGRNRKVSEAFVKTGKSIEELEKEMLNGQKLQGPATAEEVNGMLKGCNSTDKFPLFTAVHRICAKELKPQDLIDQIRNHPEHALKIRRPASTCRTREDRVLVPRRKRDPGMAIYKRLFLGYFCPQWPTVSCNEQTKSYIILCSVYIRVVFVK

SEQ ID NO: 119454 - DNA, 1110 bp, Nasonia vitripennis
  CDS (1)..(1110)
atggcccagaaacacagcgtgtgcatcatcggctccggaaactggggatcggcgatcgccaagatcgtcggcgccaatgcagcggagaaggaccaattcgaggatcgggtgacgatgtacgtctacgaggagatggtagacggcagaaagctcaccgagatcatcaacgagactcacgagaacgtcaagtacctgcctggtcacaagatccccgagaacgtcattgctgttcccgacgtcgtcgaggccgcgaaggacgctgacatcctgatcttcgtggtgccccaccagttcatccgcaggatatgcagcacactcctgggaaaaatcaagcccaacgccattggactttctctcgttaagggctttgacatcaaggaaggcggtggcatcgagctcatttcccacatcatcgccagggagttgcacattcccgtcagcgttctcatgggagccaacctggcctccgaagtcgccgacgagatgttctgcgagaccactatcggttgcaaggacaaggtgaaggctccaatactgagggagctcattcagacttcctacttccgagttgtcgtcgtcgaagatgccgattcggtcgagtgttgcggtgctcttaagaacattgttgcttgtggtgctggttttgttgacggtatgggacttggagacaacaccaaagccgccgtcatcaggctcggtctgatggaaatgatcaagtttgtcgacgtcttcttccctggaggcaaacttgcgaccttcttcgagagctgcggtgtagccgatctcatcaccacctgctacggtggcaggaaccgcaaagtctctgaagcctttattcagaccggcaaaacaatcgaagaattggagagagaaatgctgaacggacagaaacttcagggtccgattaccgccgaggaagtcaactacatgctcaagaacaagggcatggagagccgcttccctctgttcacggctattcaccgaatctgcgtgggcgagctcaaggcaacggacctcatcgactgcattcgcaatcacccagagcacatggaagacaccgacgccgagtacgagcagcaacaagccaactcaccgaaggctcacctctga

SEQ ID NO: 119455 - protein, 369 aa, Nasonia vitripennis
MAQKHSVCIIGSGNWGSAIAKIVGANAAEKDQFEDRVTMYVYEEMVDGRKLTEIINETHENVKYLPGHKIPENVIAVPDVVEAAKDADILIFVVPHQFIRRICSTLLGKIKPNAIGLSLVKGFDIKEGGGIELISHIIARELHIPVSVLMGANLASEVADEMFCETTIGCKDKVKAPILRELIQTSYFRVVVVEDADSVECCGALKNIVACGAGFVDGMGLGDNTKAAVIRLGLMEMIKFVDVFFPGGKLATFFESCGVADLITTCYGGRNRKVSEAFIQTGKTIEELEREMLNGQKLQGPITAEEVNYMLKNKGMESRFPLFTAIHRICVGELKATDLIDCIRNHPEHMEDTDAEYEQQQANSPKAHL

SEQ ID NO: 119456 - DNA, 1053 bp, Anopheles gambiae str. PEST
  CDS (1)..(1053)
atgtctgataaggtccgtgtgtgcatcgtcggttccggaaactggggatcggccatcgccaagatcgtgggtgccaatgccaagcggctggccacgttcgaggaccgcgtcacgatgtacgtgtacgaggagatgatcgatggcaagaagctaacggaaatcatcaacacgacgcacgagaacgtcaagtatctacctggacacaagctgcccgagaacgtcgtcgccgttccggatgtggtggaagctgccaaggatgccgacattctgatctttgtcgtgccgcaccagtttatccgtggactgggcacgcagctgctcggcaaaatcaagccaacggccgtcggactgtccctgatcaagggcttcgatgttgccgagggtggtggcatggagctgatctcgcacctgatcaccaagcatctgaagatcccgtgctcggtgctgatgggcgccaatctggccggtgaggtcgcggaggagaagttctgcgagacgaccatcggctgccgggacatgaagattgcgcaaaccctgcgcgatctcttcctgacgccaaacttccgcgtggtcgtggtggacgatgtcgatgcggtcgagatctgcggtgcgctcaagaacattgtggcttgcggtgccggattcgtcgacggcatgggactgggcgacaacacgaaggcggccgtcattcggttaggtctgatggagatgatcaagttcgtggatgtgttctacccgggcagcaagctgtcgacgttcttcgagagctgcggcgttgctgatctcatcactacgtgttacggtggccgtaaccgtaaggtgtcggaagcgttcgtgaagacgggcaaaacgatcgtagagctggagaacgagatgctcaatggacagaagctgcagggcccgatcactgccgaggaggtgaactttatgctgaagagcaaaggcatggaggataaattcccactatttaccgccatccacaagatctgcaccggtacggtgaagccgcaaggattcctggactgtctgcgcaaccacccggagcacatgtaa

SEQ ID NO: 119457 - protein, 350 aa, Anopheles gambiae str. PEST
MSDKVRVCIVGSGNWGSAIAKIVGANAKRLATFEDRVTMYVYEEMIDGKKLTEIINTTHENVKYLPGHKLPENVVAVPDVVEAAKDADILIFVVPHQFIRGLGTQLLGKIKPTAVGLSLIKGFDVAEGGGMELISHLITKHLKIPCSVLMGANLAGEVAEEKFCETTIGCRDMKIAQTLRDLFLTPNFRVVVVDDVDAVEICGALKNIVACGAGFVDGMGLGDNTKAAVIRLGLMEMIKFVDVFYPGSKLSTFFESCGVADLITTCYGGRNRKVSEAFVKTGKTIVELENEMLNGQKLQGPITAEEVNFMLKSKGMEDKFPLFTAIHKICTGTVKPQGFLDCLRNHPEHM

SEQ ID NO: 119458 - DNA, 1302 bp, Magnaporthe grisea 70-15
  CDS (1)..(1302)
atggcttcacttgggagctacgcgaagaaacacaaggtcacgatcattggatcggggaactggggctctaccattgccaagattgtggccgagagcacaagagaacacaaggatgttttcgaagaagatgtgcagatgtgggtgtttgaggagaaggttacaatcccaaaggattcgccatactacgagagcgaagagccacaaaagctcacagaggtaatcaacaaacaccacgaaaacgtcaagtacctccctggtatcaaactgccatccaacatcattgccaacccctcgctcaccgacgctgtccgcgactcatccgtcctcgtcttcaacttgccccatgagttcctcggcaaggtttgccagcagctcaatggtcacattgtaccatttgcccgaggaatatcttgcatcaagggcgtggacgtgtcgggctccggcatcaacctgttttgcgaggtcatcggcgagaaattgggcatttactgtggtgcactctccggagccaacgtggcatctcagattgctgcagaggaaggcgtcagcgagaccactatcgcctacgacccgccgcccattgacagcagccgcgcggctactccccgcgaccgctcgcctaactacgattccaccagcgcaaacaagcttcctgacttgaccgtgacgtcggccgactccaacgggaaagatgacaggggccgcaggaccaaggcgaaactgactcctgtacctgagtcgtatccgccactcgaccacgggacattgcaaattctcttcgaccgtccttacttttccgtttccatggtgtctgacgtggctggcgtgtcgctcagcggtgccttgaagaacatcgtcgccctcgctgctggatttgtcgacggcaagggctggggttccaacgtgcagtcggcagtgattcgagttggcctggcagaaatgctcaaattcgcccgcgagttctttggggagtcggtcgatccgttcacgattctgctcgaaagtgccggcgtggctgatgtcatcacatcatgcatcagtggaagaaatttccgttgcgcgagcatggcagtcaagcgaggtgtatccgttgctgaaatcgaggaaaaggaacttaatggacagaagttgcagggaacctctaccgccaaagaagtaaacagcctgttgaaggcacgtggcagggagggcgactatcccctgttcaccactgttaatgaaattcttgaaggcaaggcgagagtggacgaccttcccaagctcgtcatccgacaaaagcacaccatcgagaaatcaggctag

SEQ ID NO: 119459 - protein, 433 aa, Magnaporthe grisea 70-15
MASLGSYAKKHKVTIIGSGNWGSTIAKIVAESTREHKDVFEEDVQMWVFEEKVTIPKDSPYYESEEPQKLTEVINKHHENVKYLPGIKLPSNIIANPSLTDAVRDSSVLVFNLPHEFLGKVCQQLNGHIVPFARGISCIKGVDVSGSGINLFCEVIGEKLGIYCGALSGANVASQIAAEEGVSETTIAYDPPPIDSSRAATPRDRSPNYDSTSANKLPDLTVTSADSNGKDDRGRRTKAKLTPVPESYPPLDHGTLQILFDRPYFSVSMVSDVAGVSLSGALKNIVALAAGFVDGKGWGSNVQSAVIRVGLAEMLKFAREFFGESVDPFTILLESAGVADVITSCISGRNFRCASMAVKRGVSVAEIEEKELNGQKLQGTSTAKEVNSLLKARGREGDYPLFTTVNEILEGKARVDDLPKLVIRQKHTIEKSG

SEQ ID NO: 119460 - DNA, 1254 bp, Gibberella zeae PH-1
  CDS (1)..(1254)
atggcgagcttgggcgctccttcaaagaagcacaaggtgaccattgtgggatccggcaactggggctcaactattgccaagatagttgctgaaaacacccgcgcacacaaggaactcttcgaggaagatgtccagatgtgggtctacgaggagaacgtaacaattcccaaggagtctaaactctatgacgaagccaacggcgatgcaccccaaaaactcacagaggtcatcaacaagcaccacgagaacgtcaagtacctaccgggcattcctctgcccacaaacctcatcgccaaccccgacatccgcgacgctgtcaaggactcctccatccttgttttcaacctgccccaccagtttatcgcaaacgtctgcaagcagatcaacggacatattctcccctttgctcgaggaatcagctgtatcaagggtgttaatgttactgacacagacattagcttgttcagcgagtggattggcgatggactaggtatctactgtggtgccctcagtggtgctaacctggctcgagaaattgccgaggagaagtggtcagagacaaccatcgcttatgatcctcctgctcttgataacagcagagctcccacacctcgatccggtagccccaacccaacaatgggtgagctccctgaagcccatcacaaggacgttcgtggtcgaacatccaagacaaagttgaccgccatgcccgctgagtaccctcctctggaccagcactgcttccgaacgctgttccaccgaccttacttccacgttcagatggtttccgacgtcgctggtgtatccctgagcggtgcgttgaagaacgtcgttgctttggcagctggtttcgtcgatggccgaggctggggtgacaatgccaaggcagccatcatgcgtgttggacttatggagatggtcaagtttggcaaggagttctttggtgagactgtccacaccgccacctttacagagtcatctgctggtgttgccgatctgatcacatcctgttccggaggccgtaacttccgatgtgccaagatggctgtccaaaagggcattagcgttcaagaagtcgagaagcaggagctcaatggtcaaaagatccagggtacaaccaccgccgaggaggtgaacagtttcctcaaggctcgaggtctcgagtcggagtatcctctgttcacagccgtcaacgccattttgaacggcgaggcgcaggtggacgatattcctactcttatccaggattcttga

SEQ ID NO: 119461 - protein, 417 aa, Gibberella zeae PH-1
MASLGAPSKKHKVTIVGSGNWGSTIAKIVAENTRAHKELFEEDVQMWVYEENVTIPKESKLYDEANGDAPQKLTEVINKHHENVKYLPGIPLPTNLIANPDIRDAVKDSSILVFNLPHQFIANVCKQINGHILPFARGISCIKGVNVTDTDISLFSEWIGDGLGIYCGALSGANLAREIAEEKWSETTIAYDPPALDNSRAPTPRSGSPNPTMGELPEAHHKDVRGRTSKTKLTAMPAEYPPLDQHCFRTLFHRPYFHVQMVSDVAGVSLSGALKNVVALAAGFVDGRGWGDNAKAAIMRVGLMEMVKFGKEFFGETVHTATFTESSAGVADLITSCSGGRNFRCAKMAVQKGISVQEVEKQELNGQKIQGTTTAEEVNSFLKARGLESEYPLFTAVNAILNGEAQVDDIPTLIQDS

SEQ ID NO: 119462 - DNA, 1320 bp, Kluyveromyces lactis NRRL Y-1140; identical to SEQ ID NO: 58829
  CDS (1)..(1320)

SEQ ID NO: 119463 - protein, 439 aa, Kluyveromyces lactis NRRL Y-1140; identical to SEQ ID NO: 58830

SEQ ID NO: 119464 - DNA, 1170 bp, Debaryomyces hansenii CBS767; identical to SEQ ID NO: 58831
  CDS (1)..(1170)

SEQ ID NO: 119465 - protein, 389 aa, Debaryomyces hansenii CBS767; identical to SEQ ID NO: 58832

SEQ ID NO: 119466 - DNA, 1254 bp, Aspergillus nidulans FGSC A4
  CDS (1)..(1254)
atgggctctcttggaccgtataagcaaaagcacaaggtgactgtggtgggatcgggtaactggggcaccgctatagccaaaatcgtcgccgagaatactgccagcaaccctgcggtctttgagaaggatgttcagatgtgggttttcgaggaaaaggtcgagattccgaaatcgtcgaagcattatgatcctgcctcttctctttgccagggcccgcagaatctgacagatattatcaaccatacccatgagaatatcaagtacctccccggaattacccttccggaaaacttgattgccaatccatcgctagtcgacgcggttcaagacagcactatcctcgtcttcaacctaccccatcaattcatcatcaatatttgtgaacagatcaagggcaagattgtcccatacgcgcgtggaatttcttgcataaagggcgtggatgtgaatgaggaaggagtccacctgttttccgaaacaattggaaagattctcgggatctactgtggcgccctgtccggtgccaacatcgcgaatgaggtcgcccaggaaaagtggtccgagtctagcattggttatgatccaccgcattttgactctaaagccccttctcctcccaaccgatccccttccgcatcgactgacaatatcctgcacttcgagcacaaagacgtttcgggtcaactttcgcgggtaaagctacaggctctaccttccgaatttcctcccatcgaccatgcccttctcaagtcgctattccaccgtccttacttccatattggtgtggtaagtgacgtcgcaggtgtttcgttaggaggtgcccttaagaatgtcgttgctgtcgcggcagggtgggttgtgggcaaaggatggggagacaatgcgaaggctgcaattatgcgagttgggcttttggaaatggtgaagttcggcgaacagtttttcggtgctaccatcaacactcgcaccttcactgaagaaagtgctggtgttgccgatctaatcacgagttgcagtggcggacgaaacttccgctgcgcaaagcttagcattgaaagaaaccagccgattgagaaaatcgaggagacagagttgaacggccagaagctgcaaggcactttgactgcagtcgaagtcaacagtttcttgaaaaagcaaggtttagaagaagagttcccattgtttactgcagtctaccgagttcttcaaggcaccatgtctgtggacgagattccttctttcattgagcggtaa

SEQ ID NO: 119467 - protein, 417 aa, Aspergillus nidulans FGSC A4
MGSLGPYKQKHKVTVVGSGNWGTAIAKIVAENTASNPAVFEKDVQMWVFEEKVEIPKSSKHYDPASSLCQGPQNLTDIINHTHENIKYLPGITLPENLIANPSLVDAVQDSTILVFNLPHQFIINICEQIKGKIVPYARGISCIKGVDVNEEGVHLFSETIGKILGIYCGALSGANIANEVAQEKWSESSIGYDPPHFDSKAPSPPNRSPSASTDNILHFEHKDVSGQLSRVKLQALPSEFPPIDHALLKSLFHRPYFHIGVVSDVAGVSLGGALKNVVAVAAGWVVGKGWGDNAKAAIMRVGLLEMVKFGEQFFGATINTRTFTEESAGVADLITSCSGGRNFRCAKLSIERNQPIEKIEETELNGQKLQGTLTAVEVNSFLKKQGLEEEFPLFTAVYRVLQGTMSVDEIPSFIER

SEQ ID NO: 119468 - DNA, 1224 bp, Aspergillus nidulans FGSC A4
  CDS (1)..(1224)
atggcaccaacaaagaaacaccaggtctccgtcatcggctccggtaactggggctcaacaattggcaagattctcgccgagaatacctcagaacataccgacaccttcgaaactccagtgcgaatgtgggtattcgaagaagaaatcaccgtcccttccgattctccccaccacagcaaatatggcgacaagccacaaaaattgacgcagattatcaacgaaacgcacgagaatgttaagtatctgccaggcatcaaactgcctgacaaccttatcgcaacgccagacatcaaagaagccgtcaaggatgccagtatcctcgtcttcaacctcccgcaccagtttatcggcaagacactcgaccaaatcaagggacaccatttaccttatgcccgtggagtcagctgtatcaagggcgttgatgtttcagacgggaaggtgacgctcttctccgagcttatcatgcagaaactaggtatatactgtggcgcattatcgggtgcgaacattgcgcctgaggttgcggccgaaagactatgcgagacgacaattggatacgaccccccgcctatggatcttacctctagtgacggctcgcctgaggataacctgccccatgtagatggccagcgccagaaggacctgagctcgacggatataaagttggagcgtgtgccgcaggattatccgcatgtgaatgatgaactcctcgagaagatgttcgagcggccgtacttcctcgtacatgttatcaaggatgttgcaggggttgcgttgggtggagcgttaaagaacattgttgccctggcagctggatttgtcgccggaaagcagtggggtgaaaatacgaaggcggcgattatccggcagggtgtaggagagatgatccggtttggacggacgtggtttccttcctcggtcaatgagaagacatttacagaggagagcgcgggcattgcggacctggtagctagctgctatggcggccggaacgtaaggtccgcaacgcacgctgtggagaaaggggtgagcgttgctgagattgagaagacagagatgaatggacaaaagttgcagggggtttcgactgctcagacggtgtacgggttcctggagaagcacggcaagacagacgaattccccttgttctgtgctgtgtacaatatcatcgaaggaaaagcacaggtggatgatcttccggcgttgcttaacaggaagaaatag

SEQ ID NO: 119469 - protein, 407 aa, Aspergillus nidulans FGSC A4
MAPTKKHQVSVIGSGNWGSTIGKILAENTSEHTDTFETPVRMWVFEEEITVPSDSPHHSKYGDKPQKLTQIINETHENVKYLPGIKLPDNLIATPDIKEAVKDASILVFNLPHQFIGKTLDQIKGHHLPYARGVSCIKGVDVSDGKVTLFSELIMQKLGIYCGALSGANIAPEVAAERLCETTIGYDPPPMDLTSSDGSPEDNLPHVDGQRQKDLSSTDIKLERVPQDYPHVNDELLEKMFERPYFLVHVIKDVAGVALGGALKNIVALAAGFVAGKQWGENTKAAIIRQGVGEMIRFGRTWFPSSVNEKTFTEESAGIADLVASCYGGRNVRSATHAVEKGVSVAEIEKTEMNGQKLQGVSTAQTVYGFLEKHGKTDEFPLFCAVYNIIEGKAQVDDLPALLNRKK

SEQ ID NO: 119470 - DNA, 1116 bp, Candida albicans SC5314
  CDS (1)..(1116): transl_table=12
atgactacttccccatatccaattgaaactccatttaaagtttgtattgtcggttccggtaactggggtactgcagttgcaaaattagttgctgaaaactgtgctgaaaaaccaaatattttccaaagagacgttaaaatgtgggttttcgaagaagaaattgaaggtagaaaattgacagaaataattaacaccgaacatgaaaatgttaaatacttgccagaaattaaattgccaactaacttggttgccaacccagacattgttgacactgttcaagatgccgacttgattgttttcaatattccacatcaattcttgggtagaattgtcaaacaaatcgaaggtaaagtgaaaccaactgctagagccatttcatgtttgaaaggtttggatgtgagtccagaaggttgcaaattgttgtcaacctctatcactgatactttgaagatttactgtggtgtcttatctggtgctaatattgccaacgaagttgccaaaggtaactggtcagaaacttccattgcctacactgttccagaagatttcagaggtgccggtaaagatattgatccatttattttgaaagaagctttccacagaccatacttccatgtcagagttattgaagatgttgttggtgcctctattgctggtgccttaaagaatgtcattgcctgttctgttggtttcgttgaaggtgctggctggggtgacaatgctaaagctgctattatgagaatcggtatcaaagaaaccatccgttttgcttcttactgggaattgttcaagatcaaggctttgtctccaccaaacccaaaaactttcaccgaagaaagtgctggtgttgctgatttgatcactacttgctcaggtggtagaaatgttaaagtcgccagatacatgattaaaaacaatgtcgatgcatttgaagctgaaaaaattgttttgaaaggacaaagttctcaaggtatcttgactgccaaagaagttcacgaattgttaacaaatttcaaccttcaagacgaattcccattactcgaagccacctataaagttatctacgagaatggtagtgttgacgatttcccacaattattagaaggtgatcaataa

SEQ ID NO: 119471 - protein, 371 aa, Candida albicans SC5314
MTTSPYPIETPFKVCIVGSGNWGTAVAKLVAENCAEKPNIFQRDVKMWVFEEEIEGRKLTEIINTEHENVKYLPEIKLPTNLVANPDIVDTVQDADLIVFNIPHQFLGRIVKQIEGKVKPTARAISCLKGLDVSPEGCKLLSTSITDTLKIYCGVLSGANIANEVAKGNWSETSIAYTVPEDFRGAGKDIDPFILKEAFHRPYFHVRVIEDVVGASIAGALKNVIACSVGFVEGAGWGDNAKAAIMRIGIKETIRFASYWELFKIKALSPPNPKTFTEESAGVADLITTCSGGRNVKVARYMIKNNVDAFEAEKIVLKGQSSQGILTAKEVHELLTNFNLQDEFPLLEATYKVIYENGSVDDFPQLLEGDQ

SEQ ID NO: 119472 - DNA, 1212 bp, Candida albicans SC5314; identical to SEQ ID NO: 58833
  CDS (1)..(1212): transl_table=12

SEQ ID NO: 119473 - protein, 403 aa, Candida albicans SC5314; identical to SEQ ID NO: 58834

SEQ ID NO: 119474 - DNA, 1071 bp, Ustilago maydis 521; identical to SEQ ID NO: 58835
  CDS (1)..(1071)

SEQ ID NO: 119475 - protein, 356 aa, Ustilago maydis 521; identical to SEQ ID NO: 58836

SEQ ID NO: 119476 - DNA, 1182 bp, Cryptococcus neoformans var. neoformans B-3501A
  CDS (1)..(1182)
atgtctgccgcctctaccgccccatcctcccctgaggttgtccagcagttctctgacctcgatatcggttctaccgtcacaaccccagcggtgacccgtccttcttctccctcacctccatcactccctccgtctccgctttccagtgggaagcacaaaattgccgttatcggttctggatcgtggggaactgctctcgccaagattgctgcggagaatgcctggcgccgcaaagaggacttccattctgaggttaggatgtgggtgcgtgagaagattgtgaacggcaagcctcttacgcacgtcatcaacaaaacgcaccttaactcgcgatatcttcccgatgtcgttcttcctcggaaccttgttgccgttccgcatcttaaagacgtcgttaaggatgcgactctcatcgtctttgtcgtacctcatcagttcctgcacactgttcttaatgaactcgccagacccggcgttcttttacgcggtgctaaggctgttaccgccatcaaaggcgtggaggtgaacggtaccgatattcagacttttgctagcttgattgaagccaaagttgggttgccgtgctcagccttgagcggtgccaatattgctcttgaagtggccatgggtcaattctgcgagactactattggttgccctacacccgaccaatctctgttatggcacgccgtcttcaactcgccttctttccgagtcaataccgtggaagacgtcagcggagtgtctcttgccggtgcacttaaaaacgtagtagcactcgctgctggtatggtggacggcttgggattaggaggtaacaccaaagctgccattatgcgaattgggctgaaggagatgacccaattctgtttggagttctttgagggcgttcgacctgaaaccttttccaacgaatctgcaggcgtcgctgatctcaccgtcacctgtttctcaggcaggaatcgaaaatgcgctgaagagtttgtcagatctgggcagccatttgatgttgttgagaagaagttgctcaacggtcagaaacttcaaggtaccgccacagccgaagaagtcaatgcgttcctttttgcgcgaaagcgtgctcatgcctatccgttgttcgaaaaggtatacaagattgctttcgagggcatgcccccaaagaaccttgttgtggggttataa

SEQ ID NO: 119477 - protein, 393 aa, Cryptococcus neoformans var. neoformans B-3501A
MSAASTAPSSPEVVQQFSDLDIGSTVTTPAVTRPSSPSPPSLPPSPLSSGKHKIAVIGSGSWGTALAKIAAENAWRRKEDFHSEVRMWVREKIVNGKPLTHVINKTHLNSRYLPDVVLPRNLVAVPHLKDVVKDATLIVFVVPHQFLHTVLNELARPGVLLRGAKAVTAIKGVEVNGTDIQTFASLIEAKVGLPCSALSGANIALEVAMGQFCETTIGCPTPDQSLLWHAVFNSPSFRVNTVEDVSGVSLAGALKNVVALAAGMVDGLGLGGNTKAAIMRIGLKEMTQFCLEFFEGVRPETFSNESAGVADLTVTCFSGRNRKCAEEFVRSGQPFDVVEKKLLNGQKLQGTATAEEVNAFLFARKRAHAYPLFEKVYKIAFEGMPPKNLVVGL

SEQ ID NO: 119478 - DNA, 1035 bp, Cryptococcus neoformans var. neoformans B-3501A
  CDS (1)..(1035)
atgggcaaggaaaaggtcgctgtcgtcggctctggtaactggggttctgctatctctcgcattgccggtatcaacactaagaagcaccccgacgtctttgacgacacccgcgtctctgtctgggtgtatgaggaagagtttgagggcaagaagcttactgagattatcaactctgagcacgaaaacagaaagtacctccccggtgttaagctcgaggacaatgtcgtggctgtccccgacttgaaagaggccgtcaaggacgcaacagctttggtattcgtcacccctcaccagttccttggaaaggttttagacactttggagggtaacgtccggaaggatgccaaggccatcactcttatcaaaggtgtcgaagtccagggcgatgatattcacatcttcgctgatgttatcgagcaacgtctcggtatcccctgctctgctttgagtggagccaacattgccaatgaagtcgctagggatactttctcagagactactatcggttaccgaaacaaggaagatggagagctgtggctgaagcttttccaaactcccaagttcaaggttcagctcattgacgatgtcgctggtgtcagtctttgcggcgctctcaagaacattgtcgctgttgcggctggctttatcgacggtctcggctacggtagtaactccaaggcggccattatgcgtattggccttctggagatgaagcacttttgccaagaattctttgtagacgtcaaggaggagagtttcttgcaggagagtgcgggtgtcagtgatgtgattacttcttgtctttctggaaggaactacaaggttgcggctgcgtttgtaggagctaacaagtcatttgatcaacttgaggcagagatgttgaacggacaaaagctccaaggtatccacactgccaaggacgtgcacaactttctcagcgccaagaaccgatctcgagcgtatcccctgttcgacaaggtctaccagatttcctgggaaggtgtccccgttgagcaactgaccgaggggctctaa

SEQ ID NO: 119479 - protein, 344 aa, Cryptococcus neoformans var. neoformans B-3501A
MGKEKVAVVGSGNWGSAISRIAGINTKKHPDVFDDTRVSVWVYEEEFEGKKLTEIINSEHENRKYLPGVKLEDNVVAVPDLKEAVKDATALVFVTPHQFLGKVLDTLEGNVRKDAKAITLIKGVEVQGDDIHIFADVIEQRLGIPCSALSGANIANEVARDTFSETTIGYRNKEDGELWLKLFQTPKFKVQLIDDVAGVSLCGALKNIVAVAAGFIDGLGYGSNSKAAIMRIGLLEMKHFCQEFFVDVKEESFLQESAGVSDVITSCLSGRNYKVAAAFVGANKSFDQLEAEMLNGQKLQGIHTAKDVHNFLSAKNRSRAYPLFDKVYQISWEGVPVEQLTEGL

SEQ ID NO: 119480 - DNA, 1065 bp, Tribolium castaneum
  CDS (1)..(1065)
atgtctcagaaattaaaaaaagtgtgcatagtaggcagcggcaactggggctcagccatcgcgaaaattgtcgggagcaatgcgaaaaaactaccccatttcgatgataaggttacgatgtatgtttacgaagaaatgataaatgggaaaaaacttacagagatcattaatgaaacccacgaaaatgtcaaatatcttccaggtcacaagcttcctcctaatgtcgtggcggttcccgatgtagtagaggccgccaaagaggctgatattcttatttttgtagtgccacaccagttcataagaactttatgctcaactcttttagggaaaatcaaaccaacagctattgctttatctctgattaagggctttgaccgagcagagggcggcggaatcgacctcatttcgcacataatcacccgccacttgcgcatcccttgctccgtcctcatgggggcgaacctcgctggtgaagtggccgacgagaatttctgcgaaacaaccatcggttgtagagacaccaaacagggaccactgctccgcgatattatccaaactgattatttccgagtggtcgtagtggacgacgaagacactgtcgagatttgtggggcgttgaaaaacatcgtcgcgtgtggggcaggtttcgtggacggtttgggcttgggtgacaacaccaaggccgccgtaatccgattggggctcatggagatgatcaaattcgtcgatgttttctacccgggaggaaaattgtcaaccttctttgaaagttgcggcgtcgctgatttgatcacgacgtgttacgggggtagaaataggaaagtgagcgaagcgttcgtcaaaacaggaaaatcgataaaagtgttggaggacgagatgctgaacggacagaagttgcaagggcccttcacggcagaggaggtcaactatatgttgaaaaataagggcatggaggaaaagttcccgttgtttacagccattcataaaatatgtacaggacagaaaccagtcgctgaatttatcgactgcattaggcaccatcctgagcacatggtcaagcagtaa

SEQ ID NO: 119481 - protein, 354 aa, Tribolium castaneum
MSQKLKKVCIVGSGNWGSAIAKIVGSNAKKLPHFDDKVTMYVYEEMINGKKLTEIINETHENVKYLPGHKLPPNVVAVPDVVEAAKEADILIFVVPHQFIRTLCSTLLGKIKPTAIALSLIKGFDRAEGGGIDLISHIITRHLRIPCSVLMGANLAGEVADENFCETTIGCRDTKQGPLLRDIIQTDYFRVVVVDDEDTVEICGALKNIVACGAGFVDGLGLGDNTKAAVIRLGLMEMIKFVDVFYPGGKLSTFFESCGVADLITTCYGGRNRKVSEAFVKTGKSIKVLEDEMLNGQKLQGPFTAEEVNYMLKNKGMEEKFPLFTAIHKICTGQKPVAEFIDCIRHHPEHMVKQ

SEQ ID NO: 119482 - DNA, 1020 bp, Clostridium thermocellum ATCC 27405
  CDS (1)..(1020): transl_table=11
atgaacaaaaaaatatccataattggtgcgggaagctgggggaccgctctggcggtgttattggccaacaacggcatgagtgttaccatgtggtcgatttttgaagacgaaattaagatgctgaacgaaaaaagagagcatgtacataagttgccgggtgttattgttccggagaatgtcacatttacatcggatcttgaaaaagctgtgtgtgatgccgaggttgtggttgtggtggtaccttcccaaactgtcaggcagactgcaaaggatatatcgaaatatataagggatgatacggtaattgttagttgttccaaagggttggaggaaggaacggggcttagaatgtccgaggtaataggtcaggagataaaagacgcaaaaaccgttatcctttcaggtccaagccatgccgaagaagtgggaagaggtgtgcccacggcaattgtggcggcatcttgtgatatcaaagcggcggaacttattcaggatatattcatgtcaccggaatttagagtttacaccaacacggatgttgtcggagtggagcttggaggtgccttgaaaaatgtaatagcattgtgtgccggaatatcggatggtttgggttttggggacaataccaaggctgcgcttatgacaagaggaataaccgaaatttcaaggctgggagtttccatgggggcaaatccccagacttttgccggacttacgggtataggagaccttattgtgacttgtaccagcatgcacagcagaaacaggcgtgccggaattttgatcggtcagggaaaatcaccgcaggaagcaatggatgaagttaaaatggttgttgagggtgttacaacgacaaaagcagcttatgaacttgcacggaaaatggatgttgcgatgcccataaccttcgaagcatacgaagtattgtttaacggaaagaatccaagacaggcagtgtatgatcttatgatgaggaacaagaaaaatgaggttgaagaattggatgccaaatggctttga

SEQ ID NO: 119483 - protein, 339 aa, Clostridium thermocellum ATCC 27405
MNKKISIIGAGSWGTALAVLLANNGMSVTMWSIFEDEIKMLNEKREHVHKLPGVIVPENVTFTSDLEKAVCDAEVVVVVVPSQTVRQTAKDISKYIRDDTVIVSCSKGLEEGTGLRMSEVIGQEIKDAKTVILSGPSHAEEVGRGVPTAIVAASCDIKAAELIQDIFMSPEFRVYTNTDVVGVELGGALKNVIALCAGISDGLGFGDNTKAALMTRGITEISRLGVSMGANPQTFAGLTGIGDLIVTCTSMHSRNRRAGILIGQGKSPQEAMDEVKMVVEGVTTTKAAYELARKMDVAMPITFEAYEVLFNGKNPRQAVYDLMMRNKKNEVEELDAKWL

SEQ ID NO: 119484 - DNA, 1032 bp, Clostridium difficile 630
  CDS (1)..(1032): transl_table=11
gtggtgttaaacatggagaaagtatgtgtattaggtactggaagctggggaagtgcattagctttagggcttgcaaaaaaaggtaatgatgtgagcatgtggactcgaaaagaggaacaagctaaaaaaataaacagaactaaagaaaatacagactatttaccaggagtattatttccaaataatataactataagtactgatatagaaaaaactataaaagattgtaaggtaatagttttagcagttccatcacaggctgtaagaagtacttgccaaaaaataaaaccatttataaaagaaggacaagttattgttaatgtagctaaaggtcttgaaaaagggactgggcttagattatcacaagtctgtgaagaagaattaccacaaaatccatatgtaatactatctgggccatctcatgctgaagaagtagcaagggatattcctactaccgtagtagttgcttctaaagatttaaaaatagcacagatgatacaagatttgtttatgagccctaaacttagagtttatacgaatccagacatagttggagtagaacttggaggagcattaaaaaatattatagcatttggagctgggatatgtgacggattagggtatggtgataatgcaaaagctgcccttatgacaagaggtattagtgaaatgagcagacttggaattgctatgggagctaatatgtctacctttgcaggtctttcaggtattggagatttaatagttacttgtacaagtatgcatagtagaaatagaagagctggtatactcataggtaaagggatgagtttagaagatactttaaaagaagtaaagatggttgtagaaggcataactgctactgaagtagcacatgatgttgctgaaaaattagatatagatatgcctataactaatgctatatattctgtaataaagaaaggttcaaatcctaaagaagttggaatagaactaatgatgagaagtaaaaagcatgaaatggaagaagtagttttaggtgatgatatataa

SEQ ID NO: 119485 - protein, 343 aa, Clostridium difficile 630
MVLNMEKVCVLGTGSWGSALALGLAKKGNDVSMWTRKEEQAKKINRTKENTDYLPGVLFPNNITISTDIEKTIKDCKVIVLAVPSQAVRSTCQKIKPFIKEGQVIVNVAKGLEKGTGLRLSQVCEEELPQNPYVILSGPSHAEEVARDIPTTVVVASKDLKIAQMIQDLFMSPKLRVYTNPDIVGVELGGALKNIIAFGAGICDGLGYGDNAKAALMTRGISEMSRLGIAMGANMSTFAGLSGIGDLIVTCTSMHSRNRRAGILIGKGMSLEDTLKEVKMVVEGITATEVAHDVAEKLDIDMPITNAIYSVIKKGSNPKEVGIELMMRSKKHEMEEVVLGDDI

SEQ ID NO: 119486 - DNA, 996 bp, Herminiimonas arsenicoxydans
  CDS (1)..(996): transl_table=11
atgaatatcacaatacttggcgcaggcgcatggggtacggccttggcaatgtcgctggctgaccggcattccgtgatgttgtgggggcgcgatgctgctgtgatgcaggaagcggagcagcgacgcgaaaataccgtctatctgcccggtttccgtttgccggacagtctgtccttgagctccgatttctctgccgcgattgcgcatgtcggaacggatggcctgttgctggtggcgacatcgttggcgggattgcgcccgctggccatgcaattgcagccgtatgccattccaaacatcgtctggctgtgcaagggcttcgaggcagacacgcatttgctgccgcatcagatcgtgcgcgaagtgctggggaatgacattcctgccggcgccttgtcggggccgtcttttgcgcaagaggttgcacagggactgccttgcgcattggcgattgcttccgataacgcggcattacgcgaactggtggtcagcgccgtgcacgggccgagcatgcgtatttattcaaccgacgatgtgatcggcgtcgaagttggcggtgcggtaaaaaacatactggcgattgccaccggcatcatcgacggcctcaaactcggcatgaatgcacgcgcggctctgattacgcgcggcctggtggaaattacgcgcttcggcgtcgcactcggcgggcgtacggaaaccttcatgggcctggccggcatgggtgatctgattctgacctgtaccggcgatctgtcacgcaaccgcaaggtcgggctgggcctggcgcagggaaaaaaactggagcagatcgtgaccgagctgggccatgttgcagaaggtgtgcgttgtgcacaggcagtgcgttcactggcggccgagcgcggtatagatatgccgattaccaatgcagttgcagccgtcctgttcgatggcgatttgccgagggaaatggtcggtcgtttgctcgcgcgcgatgcgcgcaatgaaatggcctga

SEQ ID NO: 119487 - protein, 331 aa, Herminiimonas arsenicoxydans
MNITILGAGAWGTALAMSLADRHSVMLWGRDAAVMQEAEQRRENTVYLPGFRLPDSLSLSSDFSAAIAHVGTDGLLLVATSLAGLRPLAMQLQPYAIPNIVWLCKGFEADTHLLPHQIVREVLGNDIPAGALSGPSFAQEVAQGLPCALAIASDNAALRELVVSAVHGPSMRIYSTDDVIGVEVGGAVKNILAIATGIIDGLKLGMNARAALITRGLVEITRFGVALGGRTETFMGLAGMGDLILTCTGDLSRNRKVGLGLAQGKKLEQIVTELGHVAEGVRCAQAVRSLAAERGIDMPITNAVAAVLFDGDLPREMVGRLLARDARNEMA

SEQ ID NO: 119488 - DNA, 999 bp, Burkholderia vietnamiensis G4; identical to SEQ ID NO: 58865
  CDS (1)..(999): transl_table=11

SEQ ID NO: 119489 - protein, 332 aa, Burkholderia vietnamiensis G4; identical to SEQ ID NO: 58866

SEQ ID NO: 119490 - DNA, 984 bp, Bradyrhizobium sp. ORS278
  CDS (1)..(984): transl_table=11
gtgtcgcatcgctttcaaacgatcgccgtcgtcggcgccggtgcgtggggcacagcgcttgcggccgtggccgcgcgcgccggccgcaacgtgacgctctatgcccgcgacgccgatcacgccgttcgcatcgcgacagcgcgtgagaatccccgtctgcccggcattccgctcgccgacagcatcaccgtcactaccgacctcgcccgggccgcccgcgccgacgccatcctgatcgtcgttcccgcgcagcatctgcgcggtgccgtcatgcatctcgcgcctctgcttgcgcccggcacgccgcttgtcgcctgcgccaagggcatcgagcacagcactcacaaattcatgacggaggtgatcgccgaggctgcgccacgtgcaacgccggcgatcctgtccggccccagcttcgccgacgacgtcgcgcgcggactgccgactgcggtcacgctcgccgcgcctgacgaggcgcttgcctcggcgctggtgcaggcgctgggctcgtcgaccttccggccctatcactcgaccgacgtgcgcggcgtcgagatcggtggtgccgccaagaacgtgctggcgatcgccgccggcatcgtctcagggcgcgatctcggcgcctccgcgctggcggcgctgaccacgcgcggctttgccgaactggtgcggctcggccgcgcctatggcgcccgcagcgagacgttgaccggcctgtccggcctcggcgacctgattctcacctgcgccggtccgcaatcgcgcaatttcgccgccggcctcgcgctcggacgcggcgagccgctgccggccggcaagctcgccgaaggccaatacaccgcgccggtgctggtcgaactcgcggcgtcgcgcggcgtcgagatgccggtggcgcaggcggtggccgcgatcctgtccggcaccgtgacgatcgacgccgcgatcgaggcgctgatgttgcggccgttcaaggcggaggagtga

SEQ ID NO: 119491 - protein, 327 aa, Bradyrhizobium sp. ORS278
MSHRFQTIAVVGAGAWGTALAAVAARAGRNVTLYARDADHAVRIATARENPRLPGIPLADSITVTTDLARAARADAILIVVPAQHLRGAVMHLAPLLAPGTPLVACAKGIEHSTHKFMTEVIAEAAPRATPAILSGPSFADDVARGLPTAVTLAAPDEALASALVQALGSSTFRPYHSTDVRGVEIGGAAKNVLAIAAGIVSGRDLGASALAALTTRGFAELVRLGRAYGARSETLTGLSGLGDLILTCAGPQSRNFAAGLALGRGEPLPAGKLAEGQYTAPVLVELAASRGVEMPVAQAVAAILSGTVTIDAAIEALMLRPFKAEE

SEQ ID NO: 119492 - DNA, 996 bp, Dichelobacter nodosus VCS1703A
  CDS (1)..(996): transl_table=11
gtgcataccattgccgtattgggcgcgggcagttggggcacggcattagcattacagcttgcgcgtaaccaacaccgcgtttttttatggggacatcgcgccgctcatattgaacaattaattgccgacggcgcgaatcacaaatatctccccgatgttttttttcccaaaaacctcataccgaccgcggatctcgctgcggcggtggcatctgctgaaatggttttagccgtggtgccgagcgtaggttttgcggggctactttccgatttgaaaccgttgctaggcaaaaagccttttatgtgggcaatcaaaggctttgaacaaggcagtgggcggttgttatccgatgttttcacggaacattttggcaaacatcatgcgcatgcgattttggcaggcccgagttttgcgcgcgaagttgccgccggaaaaccaaccgcggtgacgattgccgcggcgcacaaaaatgatgcgccggcatttgccgaaccgtttcacagcagtaattttttgtgttacaccagcgacgatttaatcggtgcgcaaattggtggtgcggttaaaaatgtgattgcaattgctgtcggcattgccgatggtttgcgttgtggcgccaatacccgcgcggcattaattacccgtggtttgcaggaaatgacgcgtttggcaaccgctttaggtgcacaggcacaaacgttatcaggattaaccggtttaggcgatttggttttaacggcgaccgatgatcaatcgcgcaatcggcgatttggtttagcgttaggacaaggtaaaaccgcgctcgaagctaaagcgttgattggacaagtcattgaaggcgagggtgccgcacatgatacgtgggcgctggcatgtcgttatcaagtgcgtatgccgattacgcaatatatgcatcaatttcttaacggtgaaattgatattcaaaccgcggtgatgcatttgagtaaccgcgatctcaaagctgaatcagcctaa

SEQ ID NO: 119493 - protein, 331 aa, Dichelobacter nodosus VCS1703A
MHTIAVLGAGSWGTALALQLARNQHRVFLWGHRAAHIEQLIADGANHKYLPDVFFPKNLIPTADLAAAVASAEMVLAVVPSVGFAGLLSDLKPLLGKKPFMWAIKGFEQGSGRLLSDVFTEHFGKHHAHAILAGPSFAREVAAGKPTAVTIAAAHKNDAPAFAEPFHSSNFLCYTSDDLIGAQIGGAVKNVIAIAVGIADGLRCGANTRAALITRGLQEMTRLATALGAQAQTLSGLTGLGDLVLTATDDQSRNRRFGLALGQGKTALEAKALIGQVIEGEGAAHDTWALACRYQVRMPITQYMHQFLNGEIDIQTAVMHLSNRDLKAESA

SEQ ID NO: 119494 - DNA, 1080 bp, Dehalococcoides sp. BAV1; identical to SEQ ID NO: 58875
  CDS (1)..(1080): transl_table=11

SEQ ID NO: 119495 - protein, 359 aa, Dehalococcoides sp. BAV1; identical to SEQ ID NO: 58876

SEQ ID NO: 119496 - DNA, 1029 bp, Mycoplasma mobile 163K
  CDS (1)..(1029): transl_table=4
ttgattaaggagaataaaactgtgaataaaacaaataaaatatcaattataggatctggagcaatggcaaccgcaatggcaaaagtcttatatgattcaggtaatacaaatattttcatctatgggatagatgaaaaggaattagaagatttaaaaatcgggaaaaatgcaaaatatttttctacagatataaaattaccttcttttaatacaactaaagatttaaaaatagctttggataaaacagattatattgttttagcaattccttcgatttttattcaagctacttttttggaaattttaaaactcttaaattcaaaagtacttgtaatatctgtttcaaaaggattttatcctaattcatttttatctattcatgaaggtttatctaaagattcaaagtccaatgaatttgtaagaggtgttgttactgttactggtcctagttttgcagaagaaattataaaagaacaattaacaacaatttgtgctgttgattcaaacatcaaaaatgctcaagaagttcaaaaacttttttcaaataaatatttcaaactatatgttcaatctgatgtaatcggagctgaagtaggagcttcatttaaaaatgttttagcaattttttctggaattgcaaatcaacaaggttacggaatcaacactcttgcttctattttatcaagagggttaaaagaaatgaaactgtataatgacaaagtaggtggaaaactatcaacacttttagggctaacaggtgttggtgatttgattcttactgcaacaagccctttaagtagaaacttctcttttggtaaggaatttgttataaataaatctaaagctttagaaacagtaaaaactgttgaaggtttaaaagcattagaaaatatttatagatcaaataaaaaatatggattagatttacctattatttcaagtttatatgaattaatttttgaaaatatttcactagaagaattcaaagaaaaaatttgaaatagaacattaaaatcagaatttgagtaa

SEQ ID NO: 119497 - protein, 342 aa, Mycoplasma mobile 163K
MIKENKTVNKTNKISIIGSGAMATAMAKVLYDSGNTNIFIYGIDEKELEDLKIGKNAKYFSTDIKLPSFNTTKDLKIALDKTDYIVLAIPSIFIQATFLEILKLLNSKVLVISVSKGFYPNSFLSIHEGLSKDSKSNEFVRGVVTVTGPSFAEEIIKEQLTTICAVDSNIKNAQEVQKLFSNKYFKLYVQSDVIGAEVGASFKNVLAIFSGIANQQGYGINTLASILSRGLKEMKLYNDKVGGKLSTLLGLTGVGDLILTATSPLSRNFSFGKEFVINKSKALETVKTVEGLKALENIYRSNKKYGLDLPIISSLYELIFENISLEEFKEKIWNRTLKSEFE

SEQ ID NO: 119498 - DNA, 1068 bp, Legionella pneumophila subsp. pneumophila str. Philadelphia 1; identical to SEQ ID NO: 58837
  CDS (1)..(1068): transl_table=11

SEQ ID NO: 119499 - protein, 355 aa, Legionella pneumophila subsp. pneumophila str. Philadelphia 1; identical to SEQ ID NO: 58838

SEQ ID NO: 119500 - DNA, 1170 bp, Anaplasma marginale str. St. Maries
  CDS (1)..(1170): transl_table=11
atgcaccacaatttttacaggcgggccattgaatggttcctgcttgccaggtctgtgctgcttatgccccaaaccccgatctatccgccgccacacgttttttatgttgataaatggcatgctaagctataccatgctgggcgtgtgtttttgaaggttgaagtgcaggtcacaattcttggagctggagcattcggcaccgcgctatccattgcactgtgcaacacaggtaaaaaggtgcgcatttggagtcgaaacgggcaggttgtggagtccctacgcacacatggggaaaattctgtgtacctaccggggttcaaagtgcccagagaagttttggtgcattccgatatgggcttggccacagacggccctgcggctattttgatgtgtgttccggctcaggagttgcgcagtctgtgcaacactataacggcggctagtgcgctggaagccggggtaccactgctggtgtgcagcaaggggatagaaaactcctcactaaaattcccgagtgaggtagtggcggaaatgtttccgcagaaccccgtctttgtcctctccggccccgcactcgccagggaacttgcgtccgggctaccctgcgctatggtgctcgcgggtgacgaaattacaacagcagaaacattggcgtcgcaactcagcgggccagccctcgccatagtacatagtggcgacctaatgggggtacaggttggcgccgtaatgaaaaacataatagccatagcgtcgggcataattgccggcatgggtttgggacacaacgcgtctgcaattgtcatggtgcaaggtatgtcagaaatcaaagcagtgtgtgaggcaaaagtaggggttgccgctacggaaactctaattggtctttcgtgcttgggtgacctagtgctaacatgcacggcaccgggctcacgtaacatgtcttttggctcatcggtaggaaaggcggggcgcgcaggtgcttctggccaacaaaagcctatgttagttgagggggttgaaagcgttacggctatggtaaacatgggcaaagcgcttaatctagagctacccatatgttctgcgatagcccgcatgcttcatggacaactaggcgtgcgtcaggcagccgctgaaatactttccgccccagtaaaatcacgtctcaatgtgtga

SEQ ID NO: 119501 - protein, 389 aa, Anaplasma marginale str. St. Maries
MHHNFYRRAIEWFLLARSVLLMPQTPIYPPPHVFYVDKWHAKLYHAGRVFLKVEVQVTILGAGAFGTALSIALCNTGKKVRIWSRNGQVVESLRTHGENSVYLPGFKVPREVLVHSDMGLATDGPAAILMCVPAQELRSLCNTITAASALEAGVPLLVCSKGIENSSLKFPSEVVAEMFPQNPVFVLSGPALARELASGLPCAMVLAGDEITTAETLASQLSGPALAIVHSGDLMGVQVGAVMKNIIAIASGIIAGMGLGHNASAIVMVQGMSEIKAVCEAKVGVAATETLIGLSCLGDLVLTCTAPGSRNMSFGSSVGKAGRAGASGQQKPMLVEGVESVTAMVNMGKALNLELPICSAIARMLHGQLGVRQAAAEILSAPVKSRLNV

SEQ ID NO: 119502 - DNA, 1008 bp, Burkholderia thailandensis E264; identical to SEQ ID NO: 58839
  CDS (1)..(1008): transl_table=11

SEQ ID NO: 119503 - protein, 335 aa, Burkholderia thailandensis E264; identical to SEQ ID NO: 58840

SEQ ID NO: 119504 - DNA, 1008 bp, Cytophaga hutchinsonii ATCC 33406
  CDS (1)..(1008): transl_table=11
atgcagaaaaaggtagacgcaacaaaaattgcagtaataggtggaggaagttgggcaaccgcacttgttaaaatactttcagaacagaatgttcgcatcaattggtggttaaagaataaaaaagatgttgattatattttacagcatggcaagaaccccaattatttaagcaatgtcccgattgatacaaaaaaagttactccgactacaaatgtcagaaaagcattagaaggtgcctcggttgtaatttttgttgtgcccgcagcttttataggtgaggtactggaaacaattccggcagcagacttaaaagataaaattgtggtgtctgctatcaaaggtatgataccttctgaaaatatactggttacagacctgttacagaaaacacacgcggtaccttctcagaagatctgtatcatcgcggggccttgccacgccgaagaagtagccttagagaaacgttcttatttatccattgccggtgaagattttactgccgcatccgtagtagccgatctgcttcagtgcggttttgttaaagcaaccgttgttgaagatctgtatggcgtagaatattgtgccgtaatgaaaaatgttgtggccattgcctgcggtattgcaagaggattaaactacggagacaattttcaggcagttttagtatctaatgccatgttagagatcgaattgtttgtagatgcattaagtaaaaaggagcggaactggaatgcttctgcttacctgggagatttactggttacctgttattcaccatatagtcgcaaccgtaccttaggaaacatggttggcagaggatactcggttaaagccgcacaggtagaaatgaatatgattgcagaagggtattatgccgttaaatgtgtgtatgaactgaataaaaagctgcatgtacagatgccgattacaaaggctgtatataatattctatatgaaaaaatttcaccttcagtagaattgagaattcttgaagattctatgtgctaa

SEQ ID NO: 119505 - protein, 335 aa, Cytophaga hutchinsonii ATCC 33406
MQKKVDATKIAVIGGGSWATALVKILSEQNVRINWWLKNKKDVDYILQHGKNPNYLSNVPIDTKKVTPTTNVRKALEGASVVIFVVPAAFIGEVLETIPAADLKDKIVVSAIKGMIPSENILVTDLLQKTHAVPSQKICIIAGPCHAEEVALEKRSYLSIAGEDFTAASVVADLLQCGFVKATVVEDLYGVEYCAVMKNVVAIACGIARGLNYGDNFQAVLVSNAMLEIELFVDALSKKERNWNASAYLGDLLVTCYSPYSRNRTLGNMVGRGYSVKAAQVEMNMIAEGYYAVKCVYELNKKLHVQMPITKAVYNILYEKISPSVELRILEDSMC

SEQ ID NO: 119506 - DNA, 1017 bp, Haemophilus somnus 129PT
  CDS (1)..(1017): transl_table=11
atgaatgataacagtccttctccaactccaatcaccgtaattggtgccggtgcttatggaactgccttagctattgccttttctcgcaatggttatccaacctacttatggggacatcatcctcaacattgtcaacgcttacgtaatgagcgaaaaaatcaagcatttttacctaatattcactttcctgattctttatatgtagaagacaatttagcacaagccattcaacactccagagagttattaattgttgtaccaagtcatgtttttggcgacgttatcatgcaaattaaaccgcacttaagatcggatcaacgtatcgcttgggcaacgaaaggactggagcgaaatacaggacgcttattacaagaagttgttgaagagcatgtaggatatggttatcctttagcagtcttatcaggacctacctttgctaaagaattggctgccggtatgccgacagctattacattagcctcaaataacgaacaatttgccttagagttccaagaaagaattcattgtagcaaacatttccgagtctatattaatcaagatatgattggtgtacaactaggaggggcggttaaaaatgtaattgctattgctgcagggatttctgatggtatggggtttggtgctaatgcacgtacagcattaattactcgaggaatcgctgaaatcagtcgtttgggcatatctctaggtgcaaatccaaatacttttatgggaacatccggcttaggggatttagtccttacttgtaccgataaccagtctcgtaaccgtcgttttggattaatgttaggacaaggttttgattgtacaacggctatcaatgaacttggtccagttatagagggtttttacaatacaaaagaaacctttttattagcccagcaacagggtgtagaaatgccgattaccgagcaggtatatcaaatactattttgtggtaaaaaacctgaagatgcagctattactttattgggaagaaaacgcaaaagggagtaa

SEQ ID NO: 119507 - protein, 338 aa, Haemophilus somnus 129PT
MNDNSPSPTPITVIGAGAYGTALAIAFSRNGYPTYLWGHHPQHCQRLRNERKNQAFLPNIHFPDSLYVEDNLAQAIQHSRELLIVVPSHVFGDVIMQIKPHLRSDQRIAWATKGLERNTGRLLQEVVEEHVGYGYPLAVLSGPTFAKELAAGMPTAITLASNNEQFALEFQERIHCSKHFRVYINQDMIGVQLGGAVKNVIAIAAGISDGMGFGANARTALITRGIAEISRLGISLGANPNTFMGTSGLGDLVLTCTDNQSRNRRFGLMLGQGFDCTTAINELGPVIEGFYNTKETFLLAQQQGVEMPITEQVYQILFCGKKPEDAAITLLGRKRKRE

SEQ ID NO: 119508 - DNA, 999 bp, Trichodesmium erythraeum IMS101; identical to SEQ ID NO: 58843
  CDS (1)..(999): transl_table=11

SEQ ID NO: 119509 - protein, 332 aa, Trichodesmium erythraeum IMS101; identical to SEQ ID NO: 58844

SEQ ID NO: 119510 - DNA, 999 bp, Alkalilimnicola ehrlichei MLHE-1; identical to SEQ ID NO: 58845
  CDS (1)..(999): transl_table=11

SEQ ID NO: 119511 - protein, 332 aa, Alkalilimnicola ehrlichei MLHE-1; identical to SEQ ID NO: 58846

SEQ ID NO: 119512 - DNA, 1011 bp, Hyphomonas neptunium ATCC 15444
  CDS (1)..(1011): transl_table=11
atgacacagcacttcaagacattcggcgtcatcggcgcgggcgcctggggcacagccatcgcgcagatgctggcccgcgaaggccagaccgtgcatctctgggcgctcgagcccgaggtcgccgccgccatcaacaccgcccgcgagaacaccgccttcctcaaaggcgtgcccctgaagccggaaatccgcgccaccaacaagctggaagaccttggcctcgccgacgccatcttcgccgtcgcccccgcccagcacacccgcacaaccctgcgcgccctgcgcgccagcctgcgtcccggcacgcccgtcgtcctctgctccaagggcatcgaactcgccaccggcgaattcatgacccaggttctgaaggatgagcttcccgaagccatccccgccgtcatgtccggccccagcttcgccatcgacgtcgccaagggcctgcccaccgcggtcaccctcgccatcgaagatacccgcctcggcacagagctgatccaggccatctccacgcccaccttccggccctatctgggtacggaccttctgggggcggaagtcggcggctcggtgaaaaacgtcctcgccatcgcctgcggcatcgcgctcggcaagggcctcggccgctccgcccatgccgccctcatcgcacgcggctatgccgagatgacccgcctcgccctgacgctgggcgcagaggcggaaaccctcaccggcctctccggcctcggcgatctcgtgctcacctgctcgtcggaaaccagccgcaacatgtccctcggcctcgcgctcggcaaaggcgaaaccctcgccagcatcctcgccgcccgcaacgccgtgaccgaaggcgttgccaccgccccggtcctgcgccgcctcgcccgcagccagggcatcgaaatgcccatctgcgaagccgtcgccgccgtcatcgaaggcgaaatcaccgtggatgacgccatcaccgccctcctgatgcgcccggtaaaagccgaagcggtaaagccttag

SEQ ID NO: 119513 - protein, 336 aa, Hyphomonas neptunium ATCC 15444
MTQHFKTFGVIGAGAWGTAIAQMLAREGQTVHLWALEPEVAAAINTARENTAFLKGVPLKPEIRATNKLEDLGLADAIFAVAPAQHTRTTLRALRASLRPGTPVVLCSKGIELATGEFMTQVLKDELPEAIPAVMSGPSFAIDVAKGLPTAVTLAIEDTRLGTELIQAISTPTFRPYLGTDLLGAEVGGSVKNVLAIACGIALGKGLGRSAHAALIARGYAEMTRLALTLGAEAETLTGLSGLGDLVLTCSSETSRNMSLGLALGKGETLASILAARNAVTEGVATAPVLRRLARSQGIEMPICEAVAAVIEGEITVDDAITALLMRPVKAEAVKP

SEQ ID NO: 119514 - DNA, 1017 bp, Pediococcus pentosaceus ATCC 25745; identical to SEQ ID NO: 58847
  CDS (1)..(1017): transl_table=11

SEQ ID NO: 119515 - protein, 338 aa, Pediococcus pentosaceus ATCC 25745; identical to SEQ ID NO: 58848

SEQ ID NO: 119516 - DNA, 1023 bp, Oenococcus oeni PSU-1
  CDS (1)..(1023): transl_table=11
atgatcaagcaaacacgtaaaattgctattcttggagccggatcttggggaactgctttggcttcaaccttttcgatgaatggtaatcaagtaattctttgggggaaaaaccaaagcgatattgatgatattaatcaaaatcatcaaaatcgaaggtttcttcaagaagcttttttggataaaaatcttaaagcaacaactgatttaaaagatgctgttaaagatgccgagattgttttgtttgttgtaccaacttcggcggttcgccaggttgccgggaaattagccagtattttgccgagtttgaaaaatgaaattatcttcggccatgctattaaaggaattgaagtagattccaataagcgtgtcagccaaatgattagcgaggaaatcccgagtatcaaggaggatgatttattctttatttccgggccatcccatgccgagtcagttgttaaaagggctattactttagttgcagttgcaagctccaatcaagcacgggcggcaattattcaggcagcgctgtctaattccttctttcgtgtatataccaattctgatttatgcggatcggaatatgcagcagctttgaaaaacgttcttgcaattgctggtggcatcataaaaggcctcaaaatgaccgacaatactcaagcagctttggttactcgcgggctttccgaaatgcgtcgtttgggagttgctttaggcggaaaaagcgaaacatttaatggtttggctggcttaggcgatttgatcgttactgctatgtcaactaattcccgcaattttcgtgccggtctcggccttgcttccgggaaagatttaaaacaggtccaaaaagagatgggtatggtgattgaaggcgttaaaactgccaaagcagtagaccaattgtcaagaaaaaacaatatttctatgccaattagcgaaagtgtctataaaatactctatgaaaatgcgaaaatagatgatgtagtcgctgatcttatgaatcggccactgatctcggaggaataa

SEQ ID NO: 119517 - protein, 340 aa, Oenococcus oeni PSU-1
MIKQTRKIAILGAGSWGTALASTFSMNGNQVILWGKNQSDIDDINQNHQNRRFLQEAFLDKNLKATTDLKDAVKDAEIVLFVVPTSAVRQVAGKLASILPSLKNEIIFGHAIKGIEVDSNKRVSQMISEEIPSIKEDDLFFISGPSHAESVVKRAITLVAVASSNQARAAIIQAALSNSFFRVYTNSDLCGSEYAAALKNVLAIAGGIIKGLKMTDNTQAALVTRGLSEMRRLGVALGGKSETFNGLAGLGDLIVTAMSTNSRNFRAGLGLASGKDLKQVQKEMGMVIEGVKTAKAVDQLSRKNNISMPISESVYKILYENAKIDDVVADLMNRPLISEE

SEQ ID NO: 119518 - DNA, 1011 bp, Leuconostoc mesenteroides subsp. mesenteroides ATCC 8293
  CDS (1)..(1011): transl_table=11
atgactaaaatagccgtattgggcggtggctcttggggcactgcgttggcaaacgttgctgcagaaaataataatgatgtgcgtctgtggacacgtactgcgacacaagcggatgaaataaacagtcaacataccaaccaaaagtatttgccagacgcaaagttatcatctgagttaatggcaaccagtaacatggccttggcagtgatggatgctgaaattgttttgacagttgttcctactaaagttgtacgagaagttgcacgtcagctagccgacgttttaaataagcaagatcatcaggtgattttggcgcatgctactaaaggactagagcaagtaacctataagcgtgtgtcggaaatgcttgccgaagaagtacctgcaaagtaccgttccacgttggcaatgatttctggcccatcgcatgcagaagatgttatcaagcatgacttgacatctgtatcgattgcttctgaaaatgaagaggctgccaaattactacagcaggtatttgccaatagttcatttagaccttatacgaatcatgatttgttaggatcagaactggcagcggctttaaagaatattatcgccatcggatcaggtgcgttaataggattaggttatggtgctaatgcacaggctgctttgctgacacgtggtttatcggaaatgcgcgccctaggtcaagcaatgggcgcccaaccagaaacgtttttaggacttgcaggcattggtgatttgattgttactggcatgtcaccaaactccagaaattaccgtgctgggaaacagttaggtgaaggaaagagtttgcaagagattcaagatgacatgggcatggttattgagggtgttagcactacaaaagcagtatatgaattttcgcaacatcatcatgtggaaatgcctataacagccggtatttatcgcatattatatgaaaatgagccattacgcgatgtaattagcgacctaatgagtcgtccgttgcgcagtgaagattag

SEQ ID NO: 119519 - protein, 336 aa, Leuconostoc mesenteroides subsp. mesenteroides ATCC 8293
MTKIAVLGGGSWGTALANVAAENNNDVRLWTRTATQADEINSQHTNQKYLPDAKLSSELMATSNMALAVMDAEIVLTVVPTKVVREVARQLADVLNKQDHQVILAHATKGLEQVTYKRVSEMLAEEVPAKYRSTLAMISGPSHAEDVIKHDLTSVSIASENEEAAKLLQQVFANSSFRPYTNHDLLGSELAAALKNIIAIGSGALIGLGYGANAQAALLTRGLSEMRALGQAMGAQPETFLGLAGIGDLIVTGMSPNSRNYRAGKQLGEGKSLQEIQDDMGMVIEGVSTTKAVYEFSQHHHVEMPITAGIYRILYENEPLRDVISDLMSRPLRSED

SEQ ID NO: 119520 - DNA, 990 bp, Solibacter usitatus Ellin6076; identical to SEQ ID NO: 58849
  CDS (1)..(990): transl_table=11

SEQ ID NO: 119521 - protein, 329 aa, Solibacter usitatus Ellin6076; identical to SEQ ID NO: 58850

SEQ ID NO: 119522 - DNA, 1026 bp, Magnetococcus sp. MC-1; identical to SEQ ID NO: 58851
  CDS (1)..(1026): transl_table=11

SEQ ID NO: 119523 - protein, 341 aa, Magnetococcus sp. MC-1; identical to SEQ ID NO: 58852

SEQ ID NO: 119524 - DNA, 1017 bp, Shewanella sp. ANA-3
  CDS (1)..(1017): transl_table=11
atgaaaaactctgccgatatcactgtgttaggggcgggctcttatggcaccgcccttgccatctctctagccagcaatggtcataagaccttgttgtgggggcacgatcctgcccatatgcaaacgctcgctcaggacaaatgcaaccaagctttcttgcctggtattgccttccccgagtgtttacatatcgaagccgacttagccaaagccttagcggccagcaataatgtgctggttgtggtacctagccatgtatttggctcggtactggcccaagcgaaacctttgttacgccaagatgctcgcatcgtatgggcgaccaaaggactcgagcctgaaaccggacgtttgctgcaagatgtggcccgtgatgtgttaggcgagcaatatccgctggcggtattgtcaggaccgacgttcgcgaaggaattagctatggggttacctacggcgatttcggttgcgggtacttgtcccaaatttaccgctgagctagtggaattgctgcacagccctaaacgtttacgcgtttatgctaacgacgactttatcggcctgcaattaggcggcgcggtgaagaacgttatcgccattggtgcgggcatgtcagacggtattggctttggtgctaatgccagaacggcgttaattacccgtggtttagtcgagttaacccgcttaggcgaagccttaggtgcaagtaccgctacctttatgggcatggctggattaggcgacctagtgttaacttgtaccgacaaccaatcccgtaaccgccgctttggtttagccttaggtaaaggttgcgatgtggataccgcccaggccgaaatcggccaagtggttgaaggttatcgcaatactaaagaagtgtttactctagcgaagcgcatgggcgtcgaaatgccgatcaccgagcaaatctaccaagtgttataccaaggcaaagcgcccttggatgccgccaaagaactgctcagcagagaaaagaaatcagaaacgccagcgcaataa

SEQ ID NO: 119525 - protein, 338 aa, Shewanella sp. ANA-3
MKNSADITVLGAGSYGTALAISLASNGHKTLLWGHDPAHMQTLAQDKCNQAFLPGIAFPECLHIEADLAKALAASNNVLVVVPSHVFGSVLAQAKPLLRQDARIVWATKGLEPETGRLLQDVARDVLGEQYPLAVLSGPTFAKELAMGLPTAISVAGTCPKFTAELVELLHSPKRLRVYANDDFIGLQLGGAVKNVIAIGAGMSDGIGFGANARTALITRGLVELTRLGEALGASTATFMGMAGLGDLVLTCTDNQSRNRRFGLALGKGCDVDTAQAEIGQVVEGYRNTKEVFTLAKRMGVEMPITEQIYQVLYQGKAPLDAAKELLSREKKSETPAQ

SEQ ID NO: 119526 - DNA, 1026 bp, Mycobacterium avium 104; identical to SEQ ID NO: 58853
  CDS (1)..(1026): transl_table=11

SEQ ID NO: 119527 - protein, 341 aa, Mycobacterium avium 104; identical to SEQ ID NO: 58854

SEQ ID NO: 119528 - DNA, 1026 bp, Mycobacterium smegmatis str. MC2 155
  CDS (1)..(1026): transl_table=11
atggcagcatcgctacgcgtacccaaggtcgtcgtcctcggcggtggctcctggggcaccacggtcgcctcgatctgcgcgcggcgcgggcccacgttgcagtgggtgcggtcggaggaaaccgcgaaagacatcaacgagaaccaccgcaactcgcgctacctcggtgacgacgtcgtcctacccgactcgctcacggccacgaatgatttcagcgaggccgccgcgtgcgccgacgtcatcgtgatgggcgtgccgtcgcacggcttccgtggcgtcctgcaggaactcgcgcgcgagctgcggccgtgggtgccggtggtgtcgctggtcaagggtctggagcagggcaccaacctgcggatgagccagatcgtcgacgaggtgctgcccgggcacccggccggcatcctcgccggaccgaacatcgcccgtgaggtcgccgagggttacgccgcggccgcggtgctggccatgcccgatcagcacctggcggcgaagctcgcagagctgttccgcacgaagcggttccgtacctacaccactgacgacgtgaccggcgtcgagatggccggtgcgttgaagaacgtctatgcgatcgcggtcggcatgggttactccctgggcatcggcgagaacacacgcgccatggtcatggctcgtgccgtgcgcgagatggcgaagctgggcgaggccgcaggcgggcatcgcgacacgttcgccgggctggccggcatgggtgatctcatcgtcacctgcaccagccagcgcagccgcaaccggcacgtcggcgaacaactcggcgcgggaaagaagatcgacgagatcatcgcatcgatgaaccaggtcgccgagggcgtcaaagccgcgagcgtcatcatggagttcgccgaccagtacggcctgaacatgccgatcgcgcgagaggtcgacgccgtgatcaaccacgggtcgtcggttgagcaggcctatcgcgggctcatggccgagaagaccggccacgaggtgcacagctcggggttctga

SEQ ID NO: 119529 - protein, 341 aa, Mycobacterium smegmatis str. MC2 155
MAASLRVPKVVVLGGGSWGTTVASICARRGPTLQWVRSEETAKDINENHRNSRYLGDDVVLPDSLTATNDFSEAAACADVIVMGVPSHGFRGVLQELARELRPWVPVVSLVKGLEQGTNLRMSQIVDEVLPGHPAGILAGPNIAREVAEGYAAAAVLAMPDQHLAAKLAELFRTKRFRTYTTDDVTGVEMAGALKNVYAIAVGMGYSLGIGENTRAMVMARAVREMAKLGEAAGGHRDTFAGLAGMGDLIVTCTSQRSRNRHVGEQLGAGKKIDEIIASMNQVAEGVKAASVIMEFADQYGLNMPIAREVDAVINHGSSVEQAYRGLMAEKTGHEVHSSGF

SEQ ID NO: 119530 - DNA, 996 bp, Mycobacterium smegmatis str. MC2 155; identical to SEQ ID NO: 58855
  CDS (1)..(996): transl_table=11

SEQ ID NO: 119531 - protein, 331 aa, Mycobacterium smegmatis str. MC2 155; identical to SEQ ID NO: 58856

SEQ ID NO: 119532 - DNA, 1008 bp, Nocardioides sp. JS614
  CDS (1)..(1008): transl_table=11
atgagcgccggcaaggtcgcggtgttcagcgccgggtcgtggggcaccgcgttctcgatcgtgctcgccgacgccggcaacgacgtcacgctctgggcccgccgcgaggaggttgccgcggcgatcaccgagcagcgggagaaccccgagtacctccccggggtggagctgccgccgcaggtgtccgcgacccacgacgtcgagaaggcgctgcacggcgccgacctggtcgtgctcgccaccccgtcgcagtcgctgcgggccaacctgagcgagtgggcgccctacgtcgagccgaacgcggtgctcgtgtcgctgatgaagggcgtcgagctcggcaccctcgagcggatgagccaggtgatcgcggaggtgaccggcgccggaccggagcggatcgcggtgatcagcgggcccaacctcgccaaggagatcgcccgccgcgagccagccgcgtccgtggtcgcctgcgagcacgaggaggtcgcccggcagctgcaggcacggatccactcgccggcgttccggccgtacacgagcgtcgacgtcctcggctgcgaggtcgggggcgcctacaagaacgtcgtcgcgctgtcggtcggcatggccgtcggcctgggcttcggcgacaacacgaccgcgtcggtgatcacccgcggcctggccgagaccgcccggctcgccaccgcgctcggcgcgaacccgatgaccctgatggggctggccggcctcggcgacctggtcgccacctgctcctcaccgctgtcccgcaaccgcacgttcggggagaagcttggccaggggatgacggcggccgagatctacgccaccacccggcaggtcgccgagggcgccaagtcctgcgcctcgctgctcgccctcgccgagcgcaccggcgtggacgcgcccatcgcccaccacgtcaccgccgtggtcgacggccggatgaccgcgcaggagatgatggactccttcatcgcccgcgacaccaaggccgagactgactga

SEQ ID NO: 119533 - protein, 335 aa, Nocardioides sp. JS614
MSAGKVAVFSAGSWGTAFSIVLADAGNDVTLWARREEVAAAITEQRENPEYLPGVELPPQVSATHDVEKALHGADLVVLATPSQSLRANLSEWAPYVEPNAVLVSLMKGVELGTLERMSQVIAEVTGAGPERIAVISGPNLAKEIARREPAASVVACEHEEVARQLQARIHSPAFRPYTSVDVLGCEVGGAYKNVVALSVGMAVGLGFGDNTTASVITRGLAETARLATALGANPMTLMGLAGLGDLVATCSSPLSRNRTFGEKLGQGMTAAEIYATTRQVAEGAKSCASLLALAERTGVDAPIAHHVTAVVDGRMTAQEMMDSFIARDTKAETD

SEQ ID NO: 119534 - DNA, 990 bp, Azoarcus sp. BH72; identical to SEQ ID NO: 58857
  CDS (1)..(990): transl_table=11

SEQ ID NO: 119535 - protein, 329 aa, Azoarcus sp. BH72; identical to SEQ ID NO: 58858

SEQ ID NO: 119536 - DNA, 1026 bp, Mycobacterium sp. KMS
  CDS (1)..(1026): transl_table=11
atggcacacgcgcaacgacaacccaaggtcgtcgtcctcggaggtgggtcctggggcaccaccgtcgcatcgatctgttcccggcgcgcgcccacgatccagtgggtgcgctcggaggacaccgccaaggacatcaacgccaaccaccgcaactcgcgctacctcggcgaggatgtggtgttgagcgagtcgctgcgcgcgaccaccgacttcgccgaggccgccagcagcgccgacgtcgtcgtcatgggggtgccgtcacacggattccgtggggtgctcgagaaactcgccgccgagctgcggccgtgggtgccggtggtgtcgctggtcaaggggctcgaacagggcaccaacatgcggatgagcgagatcgtcgacgaggtgctgcccggacacccggcgggcatcctggccgggccgaacatcgcccgtgaggtcgccgacgggtacgccgccgcggcggtgctggcgatgcccgaccagcacctcgccgcgcagttggcagagttgttccgcaccaagcgttttcgcacctacaccaccgacgacgtggtcggcgtggagatggccggcgccctgaagaacgtctacgcgatcgccgtcggcatggggtattcactcggcatcggcgagaacacccgcgcgatggtgatcgcgcgcgcggtgcgggagatgtcgaaactcggcgaggccatgggcgggcaccgcgataccttcgcgggcctggccgggatgggtgacctcatcgtcacctgcaccagccagcgcagccgcaaccggcacgtgggtgaacagctgggctcgggcaagccgatcgacgagatcatcgcgtcgatgaaccaggtcgccgagggtgtgaaggcctccaaggtcatcatggagttcgccgacgagtacgggctgaacatgccgatcgcccgtgaggtcgacagcgtgatcaaccacgggtcgacggtggagcaggcctaccgcggtctggttgcagagaagcccggccacgaggtgtacgggtcgggcttctag

SEQ ID NO: 119537 - protein, 341 aa, Mycobacterium sp. KMS
MAHAQRQPKVVVLGGGSWGTTVASICSRRAPTIQWVRSEDTAKDINANHRNSRYLGEDVVLSESLRATTDFAEAASSADVVVMGVPSHGFRGVLEKLAAELRPWVPVVSLVKGLEQGTNMRMSEIVDEVLPGHPAGILAGPNIAREVADGYAAAAVLAMPDQHLAAQLAELFRTKRFRTYTTDDVVGVEMAGALKNVYAIAVGMGYSLGIGENTRAMVIARAVREMSKLGEAMGGHRDTFAGLAGMGDLIVTCTSQRSRNRHVGEQLGSGKPIDEIIASMNQVAEGVKASKVIMEFADEYGLNMPIAREVDSVINHGSTVEQAYRGLVAEKPGHEVYGSGF

SEQ ID NO: 119538 - DNA, 999 bp, Mycobacterium sp. KMS; identical to SEQ ID NO: 58841
  CDS (1)..(999): transl_table=11

SEQ ID NO: 119539 - protein, 332 aa, Mycobacterium sp. KMS; identical to SEQ ID NO: 58842

SEQ ID NO: 119540 - DNA, 993 bp, Acidovorax sp. JS42
  CDS (1)..(993): transl_table=11
atgaaaatagtagtccttggcgcaggcgcctggggcactgccctggccatgagcgcggctgcgcacgcagcctgccatgaggtgacgctgtgggcccgtgacgcacagcaggcgcaggccatgcaggcgaagcggcagaaccagcgctacctgcccggccttgcgttcccgcccggcctgcacgtggcgtcgggtgacatgggcgcgctggccgcggacgccgacctcgtcgtcgtcggcacgcccatggctgcgctgcgcggcatgctggaacggctggacggctgcgcggcgcccatcgcgtggctgtgcaagggcttcgaggccgacacggggctgatggcgcatgaagtgtgcgcgcaggtcgcaccgcggctgcacagtggtgtgttcagcggccccagcttcgcccaggaggtcgccaccgcccagcccacggccatggtggccgccagcccccgtgccacggtgcgcgatgcgctggtgcaggccttccacgggcccgcgttgcgcgtgtacgccagcgaggacatcgtaggcgtggaagtcggcggtgcggtcaagaacgtattggcgattgccaccggcctgtgcgacgggctgcaactggggatgaatgcgcgtgcggcattgattacccgcggtttggcggaaatgacccgcttaggccttgccctgggcgcgcggcccgagaccttcatgggcctgtcgggcctgggggatctggtgctgaccgctacaggcgacctgtcgcgcaaccgccgtgtggggttgttgctggccgaggggcggaccttggcacaggcggtggagtcgctgggccatgtggctgagggggtgtacagcgcccgcaccgtggtacagcgcgcgcgcgcggtgggcgttgagatgcctattgcggagtgtgtcgtggcgctgctcgacggtgaactgcgcgctgccgaggcggtggcccggctcatggagcgcgagcctaccgtcgagcgccattga

SEQ ID NO: 119541 - protein, 330 aa, Acidovorax sp. JS42
MKIVVLGAGAWGTALAMSAAAHAACHEVTLWARDAQQAQAMQAKRQNQRYLPGLAFPPGLHVASGDMGALAADADLVVVGTPMAALRGMLERLDGCAAPIAWLCKGFEADTGLMAHEVCAQVAPRLHSGVFSGPSFAQEVATAQPTAMVAASPRATVRDALVQAFHGPALRVYASEDIVGVEVGGAVKNVLAIATGLCDGLQLGMNARAALITRGLAEMTRLGLALGARPETFMGLSGLGDLVLTATGDLSRNRRVGLLLAEGRTLAQAVESLGHVAEGVYSARTVVQRARAVGVEMPIAECVVALLDGELRAAEAVARLMEREPTVERH

SEQ ID NO: 119542 - DNA, 930 bp, Nostoc punctiforme PCC 73102; identical to SEQ ID NO: 58859
  CDS (1)..(930): transl_table=11

SEQ ID NO: 119543 - protein, 309 aa, Nostoc punctiforme PCC 73102; identical to SEQ ID NO: 58860

SEQ ID NO: 119544 - DNA, 1014 bp, Haemophilus somnus 2336
  CDS (1)..(1014): transl_table=11
atgaatgataacagtccttctccaactccaatcaccgtaattggtgccggtgcttatggaactgccttagctattgccttttctcgcaatggctatccaacctacttatggggacatcgtcctcaacattgtcaacgcttacgtaatgagcgaaaaaatcaagcatttttacctaatattcactttcctgattctttatatgtagaagacaatttagcacaagccattcaacactccagagagttattaattgttgtaccaagtcatgtttttggcgacgttatcatgcaaattaaaccgcacttaagatcggatcaacgtatcgcttgggcaacgaaaggactggagcgaaatacaggacgcttattacaagaagttgttgaagagcatgtaggatatggttatcctttagcagtcttatcaggacctacctttgctaaagaattggctgccggcatgccgacagctattacattagcctcaaataacgaacaatttgccttagagttccaagaaagaattcattgtagcaaattccgagtctatgttaatcaagatatgattggtgtacaacttggaggggcggttaaaaatgtaattgctattgctgcagggatttctgatggtatggggtttggtgctaatgcacgtacagcattaattactcgaggaatcgctgaaatcagtcgtttgggcatatctctaggtgcgaatccgaatacgtttatgggaacatccggcttaggggatttagtccttacttgtaccgataaccagtctcgtaaccgtcgttttggattaatgttaggacaaggttttgattgtacaacggctatcaatgaacttggtccggttatagagggtttttacaatacaaaagaaacctttttattagcccagcaacagggtgtagaaatgccgattaccgagcaggtatatcaaatactattttgtggtaaaaaacctgaagatgcggctattactttattgggaagaaaacgcaaaagggagtaa

SEQ ID NO: 119545 - protein, 337 aa, Haemophilus somnus 2336
MNDNSPSPTPITVIGAGAYGTALAIAFSRNGYPTYLWGHRPQHCQRLRNERKNQAFLPNIHFPDSLYVEDNLAQAIQHSRELLIVVPSHVFGDVIMQIKPHLRSDQRIAWATKGLERNTGRLLQEVVEEHVGYGYPLAVLSGPTFAKELAAGMPTAITLASNNEQFALEFQERIHCSKFRVYVNQDMIGVQLGGAVKNVIAIAAGISDGMGFGANARTALITRGIAEISRLGISLGANPNTFMGTSGLGDLVLTCTDNQSRNRRFGLMLGQGFDCTTAINELGPVIEGFYNTKETFLLAQQQGVEMPITEQVYQILFCGKKPEDAAITLLGRKRKRE

SEQ ID NO: 119546 - DNA, 978 bp, Rickettsia sibirica 246
  CDS (1)..(978): transl_table=11
atgaacaaatttaaaaatattgcggtgtatgggggagggagtttcggtactagccttgcttctttagcagcacaaaactgtaataacgttactttatttttacgtgatgaggcaatagcaaaggaaattttacataacaaaactaatgtaaaatatttaggggatattaaattacctgctcatttacaggctactacaaacttagatataattaaggattttgaactaattattattgcattgccgtcttacgcttttgatgactcaataaaattattaaaaactcacagcatttctaaagacaatactcttctaattgcaacaaaaggctttgcccgcaatcctaccgcattattttcagataggttaaaaactctattaccgtataaccctacagcgttttttgtaggtccgaatctagcaaaagaacttgctaaaaatttacctgcttcggcaagtattgcaagtttagatatagatatagcaaataaaatagcttataacctaagttcaaaaatttttactactaatgtgtcaagcgatattgtaacattacaggtagcaggagctttaaaaaatatttttgctattaaaagcgggattgatttagcaagaaagcagggcgaaaatgcaagagcaacgcttatagtagctgccttaaaagaaattgctattttgtcgaaagcgttaggtggtatgcaaaaaaattctgatattttactagagggcgtagtaggcgatttagtgcttacttgttattcgttaggttcacgtaatacaaaatttggttatgaacttggaattagtagcgataaaaagaaatttttacaggaatataaagagctagtagagggaagagaagcattaaaattagttttggatttgataaaaaaatataatttacatatgcctataatttccgaagtagcttcgtgtgttatgccttatgtcattcctgcgaaagcaggaatgacatag

SEQ ID NO: 119547 - protein, 325 aa, Rickettsia sibirica 246
MNKFKNIAVYGGGSFGTSLASLAAQNCNNVTLFLRDEAIAKEILHNKTNVKYLGDIKLPAHLQATTNLDIIKDFELIIIALPSYAFDDSIKLLKTHSISKDNTLLIATKGFARNPTALFSDRLKTLLPYNPTAFFVGPNLAKELAKNLPASASIASLDIDIANKIAYNLSSKIFTTNVSSDIVTLQVAGALKNIFAIKSGIDLARKQGENARATLIVAALKEIAILSKALGGMQKNSDILLEGVVGDLVLTCYSLGSRNTKFGYELGISSDKKKFLQEYKELVEGREALKLVLDLIKKYNLHMPIISEVASCVMPYVIPAKAGMT

SEQ ID NO: 119548 - DNA, 1008 bp, Fusobacterium nucleatum subsp. vincentii ATCC 49256
  CDS (1)..(1008): transl_table=11
atggcaaaaatatcagttattggttcaggaggttggggaatagcattagctattttactacataagaatggacataacttaacaatatggtcttttgataaaaaagaagcagaagaattaaaaactacaagagaaaataaaactaagttacctaatatattacttccagaagatataaaggtaactgatgatttaaaagaagcagttaatgacaaagatattttgatacttgctgttccttcaaaagcaataagatcagtgtcaaaatctttaaaagatattatcaaagataatcaaattattgttaatgttgcaaaaggcttagaagaggatacattaaaaactatgacaggtattattgaggaagagttaaaggaaaaaaatcctcaggtagcagttttatcaggtcctagccatgcagaagaagttggtaaaggaataccaactacctgtgttgtatcagctcataataaggagcttacattatatttgcaaaatatttttatgaaccctagttttagagtttatacaagtcctgatatgttgggaatagaaattggaggagctttaaaaaatgttattgctcttgctgctggtatagctgatggattaaattatggagataatacaaaagcagctcttataactcgtggaataaaagaaatctctgcactaggagttgcaatgggtggagaacaatctacattttatgggctgactggtttaggagatttaatagtaacttgtgcaagtatgcacagtagaaatagaagagctggaattttattaggacagggaaaaacattagatgaagctataaaagaagttaatatggtagttgagggtgtttacagtgctaaatctgctttaatggctgctaaaaaatataatgtggagatacctataattgaacaagttaatgcagtcttatttgaaaataaaaatgcagcagaagctgttaacgaacttatgattagagataaaaaattagaaattcaatcttggtag

SEQ ID NO: 119549 - protein, 335 aa, Fusobacterium nucleatum subsp. vincentii ATCC 49256
MAKISVIGSGGWGIALAILLHKNGHNLTIWSFDKKEAEELKTTRENKTKLPNILLPEDIKVTDDLKEAVNDKDILILAVPSKAIRSVSKSLKDIIKDNQIIVNVAKGLEEDTLKTMTGIIEEELKEKNPQVAVLSGPSHAEEVGKGIPTTCVVSAHNKELTLYLQNIFMNPSFRVYTSPDMLGIEIGGALKNVIALAAGIADGLNYGDNTKAALITRGIKEISALGVAMGGEQSTFYGLTGLGDLIVTCASMHSRNRRAGILLGQGKTLDEAIKEVNMVVEGVYSAKSALMAAKKYNVEIPIIEQVNAVLFENKNAAEAVNELMIRDKKLEIQSW

SEQ ID NO: 119550 - DNA, 1017 bp, Rickettsia rickettsii
  CDS (1)..(1017): transl_table=11
atgaacaaatttaaaaatattgcggtttatgggggagggagttttggtactagccttgcttctttagcagcacaaaactgtaataacgttactttatttttacgtgatgaggcaatagcaaaggaaattttacataacaaaactaatgtaaaatatttaggggatattaaattacctgctcatttacaggctactacaaacttagatataattaaggattttgaattaattattattgcagtgccgtcttacgcttttgatgactcaataaaattattaaaaactcacagcatttctaaagacaatactcttctaattgcaacaaaaggctttgcccgtaatcctaccacattattttcagataggttaaaaactctattaccgcatagtcctacagcgttttttgtaggtccgaatctagcaaaagaacttgctaaaaatttacctgcttcggcaagtattgcaagtttagatatagatatagcaaataaaatagcttataacctaagttcaaaaatttttactactaatgtgtcaagcgatattgtaacattacaggtagcaggagctttaaaaaatatttttgctattaaaagcgggattgatttagcaagaaagcagggcgagaatgcaagagcaacgcttatagtagctgccttaaaagaaattgctattttgtcgaaagcgttaggtggtatgcaaaaaaattctgatattttactagagggcgtagtaggcgatttagtgcttacttgttattcgttaggttcacgtaatacaaaatttggttatgaacttggaattagtagcgataaaaagcaatttttacaggaatataaagagctagtagagggaagagaagcattaaaattagttttggatttgataaaaaaatataatttacatatgcctataatttccgaagtagcttcatgtgttattccttatgtcattcctgcaaaagcaggaatgacatatgaatccacacaacaatgcctccgcaggaatgacatatga

SEQ ID NO: 119551 - protein, 338 aa, Rickettsia rickettsii
MNKFKNIAVYGGGSFGTSLASLAAQNCNNVTLFLRDEAIAKEILHNKTNVKYLGDIKLPAHLQATTNLDIIKDFELIIIAVPSYAFDDSIKLLKTHSISKDNTLLIATKGFARNPTTLFSDRLKTLLPHSPTAFFVGPNLAKELAKNLPASASIASLDIDIANKIAYNLSSKIFTTNVSSDIVTLQVAGALKNIFAIKSGIDLARKQGENARATLIVAALKEIAILSKALGGMQKNSDILLEGVVGDLVLTCYSLGSRNTKFGYELGISSDKKQFLQEYKELVEGREALKLVLDLIKKYNLHMPIISEVASCVIPYVIPAKAGMTYESTQQCLRRNDI

SEQ ID NO: 119552 - DNA, 1008 bp, Haemophilus influenzae R2846
  CDS (1)..(1008): transl_table=11
atgataacttcgcaaacaccaatcactgtgctaggtgcgggatcttatggaactgcgctggcaattaccttttctcgcaatggttctcccactcacttatgggggcacaatcccgtccatatcgcacaaatgcagacagaacgacaaaattatcgttttttgccggatgtcatctttcctgaggatcttcatttagaaagtaatcttgcacaagcaatggaatattctcaagatattttaatcgtggtgccaagccatgctttcggtgaaattcttataaaaattaaaccgcacttaaaagcccatcaccgattaatttgggcaacaaaaggtttggaacgtaacacagggcgtttactacaaaccgtagttgaagaacaactcggaacgcaatatccactagctgtactttctggcccaacttttgcaaaagaattagcgcaaggtctaccatcagctattacgcttgctgccaataacgagcaattcgcgcgggaatttcagtctcgtattcattgtagtaaaggtttccgagtttatataaattcggatatgacaggcgttcaacttggtggtgcaattaaaaatgtgatcgcaattggcgcgggtatttcagacggtatgggatttggcgcaaatgctcgcacagcactgattactcgaggtattgcagaaattacccgcttaggtatctcgctcggtgcaaataccaatacatttatgggaatgtctggattgggcgatttagtgctaacttgcaccgataatcaatcgcgcaatcgacgttttggattaatgctaggtaaaggattagatgcccaaatggctatggaaaatatcgggcaagtcgtagaaggtttttataatacaaaagaagcctatttgcttgcacaaagacaaggtgtggaaatgccgattacagaacaaatttatcaaatgctgttttgtggcaaaagcgcacaagatgtagccatcagccttttggggcgagcatgtaaaggcgaataa

SEQ ID NO: 119553 - protein, 335 aa, Haemophilus influenzae R2846
MITSQTPITVLGAGSYGTALAITFSRNGSPTHLWGHNPVHIAQMQTERQNYRFLPDVIFPEDLHLESNLAQAMEYSQDILIVVPSHAFGEILIKIKPHLKAHHRLIWATKGLERNTGRLLQTVVEEQLGTQYPLAVLSGPTFAKELAQGLPSAITLAANNEQFAREFQSRIHCSKGFRVYINSDMTGVQLGGAIKNVIAIGAGISDGMGFGANARTALITRGIAEITRLGISLGANTNTFMGMSGLGDLVLTCTDNQSRNRRFGLMLGKGLDAQMAMENIGQVVEGFYNTKEAYLLAQRQGVEMPITEQIYQMLFCGKSAQDVAISLLGRACKGE

SEQ ID NO: 119554 - DNA, 1023 bp, Bacillus cereus G9241; identical to SEQ ID NO: 58863
  CDS (1)..(1023): transl_table=11

SEQ ID NO: 119555 - protein, 340 aa, Bacillus cereus G9241; identical to SEQ ID NO: 58864

SEQ ID NO: 119556 - DNA, 954 bp, Rickettsia akari str. Hartford
  CDS (1)..(954): transl_table=11
atgaataaatttaaaaatattgctgtttatggcggagggagtttcggtactagtcttgctgctttagcagcacaaaactgtagtaatgttactttatttttacgtgacgaggaaatagcaaaagaaattttacataaaaaaactaacataaaatatttaggtggtattaaattacctgctcatttacatgctactacaaacttaagtgtaattaaggattttgagctaattattattgcagtgccgtcttatgcttttgatgactcaataaaattattaaaaactcacggcatttctgaagataatactcttctaatcgcaacaaaaggctttgcccgtaatcctactgaactattttctgatagattaaaaactctattaccgcatagctctacagcgttttttgcaggtccgaatttagcaaaagaactcgctaagaatttaccggcttcggcaagtattgcaagtttagatatagatatagcaaataaaatagccaataacataagttcaaaaatttttactactaatatgacaagcgatattgtaacattacaggtagcaggagcgttgaaaaatatttttgctattaaaagtggaattgatttagcaagtgagcagggcgagaatgcaagggcaacgcttatagtggatgccttaaaagaaattattactttatctaaggtctttggaggtttgcaaaaaaattctgatattttgctagaggcaggagtagtaggcgatttagtgcttacttgttacgctttaggttcacgtaatacaaattttggttatgagcttggaattagtagtgataaaaagaaatttttacaggaatataaacagctagtagagggaagagaagcattaaaattagttttagatttgataaagcaatatgatttacatatgcctataatttcagaagtggctagctatgtcatgcctgcatag

SEQ ID NO: 119557 - protein, 317 aa, Rickettsia akari str. Hartford
MNKFKNIAVYGGGSFGTSLAALAAQNCSNVTLFLRDEEIAKEILHKKTNIKYLGGIKLPAHLHATTNLSVIKDFELIIIAVPSYAFDDSIKLLKTHGISEDNTLLIATKGFARNPTELFSDRLKTLLPHSSTAFFAGPNLAKELAKNLPASASIASLDIDIANKIANNISSKIFTTNMTSDIVTLQVAGALKNIFAIKSGIDLASEQGENARATLIVDALKEIITLSKVFGGLQKNSDILLEAGVVGDLVLTCYALGSRNTNFGYELGISSDKKKFLQEYKQLVEGREALKLVLDLIKQYDLHMPIISEVASYVMPA

SEQ ID NO: 119558 - DNA, 984 bp, Wolbachia endosymbiont of Drosophila simulans
  CDS (1)..(984): transl_table=11
gtggcaatatcaattttaggtgctggtgcatggggtacagcaatcgcaatttcattaggtagtaagaaagatgtgattttgtggactcgcaatgaaactacatttgaatcaatcaacgggaaaagagaaagtgacaagctacccggttgtcgaatttctgataatgtgtcagtaaaattggctattgaagacacaattaatgcttcagtaacaatcctcgctgttcccactcagtctctgaggaaggtatgtcagcaattgcataattgtaatctgaaaaaagatgtagcaataattttagcttgtaagggaatagaaaagtctacattaaaattacctagtgaaatagtaaatgaaattttacctaacaatcctattgctattttttcaggtcctagctttgctgtagaagttgcaagaaaattaccctattcaatggttcttgcatgccaaaataacacattaggttcaaagctagtatcagagctgcaacaagaaaatgttaaattggagtttagtaacgacattataggagtacagatttgtgcagcgttaaagaacgtttttgctatagcgtgtgggattgttctaggtagtaaacttgggtttaatgctcatgcagcattgattacgaaaagtatgagcgaaattaaggctttatactcagcaaaaattggtgacggtagtgtggatataaatacactacttgggccagcatgtctgggtgacctaattatgacatgcacatccttgaattcaagaaacttatcttttgggtttaaaataggtaatagtgacaatggctttaatgttcagcagattttgtcagaaggcaagtcagtgattgaaggttttagcactgctgagtccatatttaatttagcaggaaagctaaagataaaaatgcctatatgtgaagcggtctatagattattgtatgaaagcgcctctatagaggatactatttctgttcttataagttaa

SEQ ID NO: 119559 - protein, 327 aa, Wolbachia endosymbiont of Drosophila simulans
MAISILGAGAWGTAIAISLGSKKDVILWTRNETTFESINGKRESDKLPGCRISDNVSVKLAIEDTINASVTILAVPTQSLRKVCQQLHNCNLKKDVAIILACKGIEKSTLKLPSEIVNEILPNNPIAIFSGPSFAVEVARKLPYSMVLACQNNTLGSKLVSELQQENVKLEFSNDIIGVQICAALKNVFAIACGIVLGSKLGFNAHAALITKSMSEIKALYSAKIGDGSVDINTLLGPACLGDLIMTCTSLNSRNLSFGFKIGNSDNGFNVQQILSEGKSVIEGFSTAESIFNLAGKLKIKMPICEAVYRLLYESASIEDTISVLIS

SEQ ID NO: 119560 - DNA, 1023 bp, Bacillus anthracis str. A2012
  CDS (1)..(1023): transl_table=11
  misc_feature (818)..(818): w is a or t
atgacaaaaatcacagtagttggagcaggtagctggggaacagcgttagcgatggtattagctgacaatgggcatgatgtacgtatttggggaaatcgttctgaacttatggatgagattaatacaaaacatgagaatagtcgatatctcccaggaattacattgccaagcacaatcgtagcctactcttctttagaagaagcattagtagatgtaaatgtagtacttattgtagtaccaacgaaagcgtatagagaagtactgcaagatatgaagaaatatgtagcaggcccgactacttggattcatgcaagtaaaggaattgaacctggtacgtcaaaacgtatttcggaagtgattgaggaagaaattccagaggacttgattaaagatgttgttgtattgtctggaccgagtcatgctgaagaagtagggttgcgtcaagcgacaactgttacgtctgcagcaaagcgtatggaagcggctgaggaagtacaagatttgtttatgaatagttacttccgtgtatacacaaatccagatatcgttggagttgaacttggtggtgcgttaaaaaatattatcgcattagctgctgggataactgatggtcttggattaggtgataatgcaaaagcggcattgatgacacgtggtttaacggagattgctcgtttaggaagaaaaatgggcggaaatccgttaacgtttgctggactaactggtatgggtgacttaattgtaacttgtacaagtgttcatagccgaaattggcgcgctggaaatatgcttggaaaaggacactctttagaagaagwgttagaaagcatgggtatggttgtcgaaggtgtaagaacaacgaaagctgctcatgaattggcagaaaaaatggaagtagaaatgccgattacagctgctttatatgatgtgctattcaatgggaataatgtaaaagatgcagtaggctcattaatggggcgtgttcgaaaacacgaagtggaagctatacctgacttactttaa

SEQ ID NO: 119561 - protein, 340 aa, Bacillus anthracis str. A2012
  misc_feature (273)..(273): The Xaa at location 273 stands for Glu, or Val.
MTKITVVGAGSWGTALAMVLADNGHDVRIWGNRSELMDEINTKHENSRYLPGITLPSTIVAYSSLEEALVDVNVVLIVVPTKAYREVLQDMKKYVAGPTTWIHASKGIEPGTSKRISEVIEEEIPEDLIKDVVVLSGPSHAEEVGLRQATTVTSAAKRMEAAEEVQDLFMNSYFRVYTNPDIVGVELGGALKNIIALAAGITDGLGLGDNAKAALMTRGLTEIARLGRKMGGNPLTFAGLTGMGDLIVTCTSVHSRNWRAGNMLGKGHSLEEXLESMGMVVEGVRTTKAAHELAEKMEVEMPITAALYDVLFNGNNVKDAVGSLMGRVRKHEVEAIPDLL

SEQ ID NO: 119562 - DNA, 942 bp, Crocosphaera watsonii WH 8501; identical to SEQ ID NO: 58867
  CDS (1)..(942): transl_table=11

SEQ ID NO: 119563 - protein, 313 aa, Crocosphaera watsonii WH 8501; identical to SEQ ID NO: 58868

SEQ ID NO: 119564 - DNA, 1029 bp, Exiguobacterium sibiricum 255-15; identical to SEQ ID NO: 58869
  CDS (1)..(1029): transl_table=11

SEQ ID NO: 119565 - protein, 342 aa, Exiguobacterium sibiricum 255-15; identical to SEQ ID NO: 58870

SEQ ID NO: 119566 - DNA, 999 bp, Prosthecochloris aestuarii DSM 271
  CDS (1)..(999): transl_table=11
atgatcattactgttctgggggccggaagctggggtacgacacttgccgttttgctggcgaacaaaggatatgcggtgagcctctgggctcaccgtcctgattttgcacaggagcttgcccgtaccagggaaaatgtcaaatatctgcctggagttaccttccccgacgggctcgaaatagctcaggatatcaatgccgcagcgacagatgctgatgttatcgttgccgcggtaccttctcaggccgttcgtgaaactatggagctgctcgccggcatcaatcttgacggaaagctcatggtcaatgttgccaagggcatagagcttggcagcgggaaacggctttcagaggtcattcttgaaacgctttccggagttgatccgtccatggtttccgtgctctatggcccaagccatgccgaagaggtttcaggactgcagccgacaacagtcgttgcggcctcttcaaatctcgataccgccaagcgggttcaggagatttttcatacccgtatgttcagggtctatgtgaacactgacatcgttggtgtcgaaatcgccggatcggtgaaaaacattatcgctattgcagcggggattgccgatggtatcggcttcggcgataacgccaaggcggccatcattacccggggattagccgagatctcccgtctgagcgctgctatggggggagacccgatgacggtcagcggactttccggtatcggtgatcttgtggtgacctgcctgagtaagcatagcagaaaccgctatgtcggggagcagataggaaagggaagaagccttgatgatgtgatcagtcatatgaacatggttgccgagggcgtgctgacaacgaaagccgtggttgaactcagcaaccggctcggtgtcgatatgcctattaccaggaccgtctatgcgatgctttttgagcataagccggtggaggatgccattcttgatctcatgacccgcgaccctaaacccgagctgtag

SEQ ID NO: 119567 - protein, 332 aa, Prosthecochloris aestuarii DSM 271
MIITVLGAGSWGTTLAVLLANKGYAVSLWAHRPDFAQELARTRENVKYLPGVTFPDGLEIAQDINAAATDADVIVAAVPSQAVRETMELLAGINLDGKLMVNVAKGIELGSGKRLSEVILETLSGVDPSMVSVLYGPSHAEEVSGLQPTTVVAASSNLDTAKRVQEIFHTRMFRVYVNTDIVGVEIAGSVKNIIAIAAGIADGIGFGDNAKAAIITRGLAEISRLSAAMGGDPMTVSGLSGIGDLVVTCLSKHSRNRYVGEQIGKGRSLDDVISHMNMVAEGVLTTKAVVELSNRLGVDMPITRTVYAMLFEHKPVEDAILDLMTRDPKPEL

SEQ ID NO: 119568 - DNA, 1041 bp, Xylella fastidiosa Dixon; identical to SEQ ID NO: 58873
  CDS (1)..(1041): transl_table=11

SEQ ID NO: 119569 - protein, 346 aa, Xylella fastidiosa Dixon; identical to SEQ ID NO: 58874

SEQ ID NO: 119570 - DNA, 1005 bp, Croceibacter atlanticus HTCC2559
  CDS (1)..(1005): transl_table=11
atgaatgacgaaccaaaatttgccgtaattggcggcggaagctgggcaacagccattgtaaagatgctttgtgaaaatttaaatgaggtgcattggtatatgcgtagcgtttatgctatagagcatttaaagaaaatgcaacataaccccaattacttaagctctgtggagtttaatactgagcagctaaagttaagtaatgatattaatgaagtaattaatgcggcagataacctaatctttgctgtaccaagtgcttttatatatagtgaattacaagagctaacaatacccttaaaagacaagaaggtatttagtgccataaaaggaattgtaccagaaactggactaattgtaggcgaacacttaaatgaaacctacgaaatcccttttgataatataggtgtaattacaggaccttgtcatgcagaagaggttgccttagagcgtttatcctatttaacagtagcttgtgctaatgaggataacgcaaaattctttgctaaatatttaacgtgtgattacataaatgtaaaaacatctgaagatgttactggaacagagtatgctgccatgctaaaaaatatttatgctattgcagcaggaatagctcacggtttaggctacggagataattttcagagtgtcttaatgagtaatgctattcgcgaaatgaagcgctttattaaaaaagtgtacaaaatgaagcgaaatattaacgactcagcttatttgggagatttattagtaacaggttattctgtatttagtagaaacagaatgtttggtaatatgattggtaaaggttacacagtaaaaagtgctcaaatggaaatgagtatggttgctgaaggttattacgctgcaaaaagtgcttacactataaaccaagacaaaaagaagaaaagagctaaaactcctataatagacgctgtttacagcattttatatgaaaacaagaatcctaaaaaggtatttgataagttagccgaaaaattagactaa

SEQ ID NO: 119571 - protein, 334 aa, Croceibacter atlanticus HTCC2559
MNDEPKFAVIGGGSWATAIVKMLCENLNEVHWYMRSVYAIEHLKKMQHNPNYLSSVEFNTEQLKLSNDINEVINAADNLIFAVPSAFIYSELQELTIPLKDKKVFSAIKGIVPETGLIVGEHLNETYEIPFDNIGVITGPCHAEEVALERLSYLTVACANEDNAKFFAKYLTCDYINVKTSEDVTGTEYAAMLKNIYAIAAGIAHGLGYGDNFQSVLMSNAIREMKRFIKKVYKMKRNINDSAYLGDLLVTGYSVFSRNRMFGNMIGKGYTVKSAQMEMSMVAEGYYAAKSAYTINQDKKKKRAKTPIIDAVYSILYENKNPKKVFDKLAEKLD

SEQ ID NO: 119572 - DNA, 954 bp, Sulfitobacter sp. EE-36
  CDS (1)..(954): transl_table=11
atgagcattgccgttctgggggccggtgcctttggcactgcgttggcgatctctttggcgggtaagggcgcggtgacgctatgggcgcggcatgcgcagggcatggggcaaagccgtgaaaacaccgcccgcctgcccggttgcccgctgcccgaaggcctgttcgtgaccgaggatctggcagaggccgccaaggcgcagaccttgctcgccgctgtcccgatgcaaaagctgcgcgggtttctgcgcgatcacgctgccgcattggacggcaagaccatcgtcgcctgttgcaaggggatcgagctgaacaccggccttggccctgtcgccgtgatccgcgaggtgctgccccatgcgaccgcagcgatcctaacggggccaagctttgccgcggatattgcgcgggggcttcccacggcgctgacccttgcttgcgccgataaaaccacctgcgcgaccctacaacagagcctaacaacggcaaacctgcgtctttaccgcacctctgataccgtgggtgcggaactggggggcgcgctaaagaacgtcgtggcgatcgcctgcggtgccgcaatcggggccggtctaggcgaaagcgcccgcgctgccgtgatgacccgtggcttcgccgaaatgcagcggctcgccgcgcatcaccacgcggatccggtgaccttggcgggcctgtccggttttggcgatctgacgctgacctgcacctcgacccaatcgcggaactaccggctgggactggccctcggccggggggagccctttgacagcgccaccaccgtcgaaggtgccgccaccgcgcgggcggtcgatgcgctggcccatgacaacgggctggatctgccgatcaccgccgccgttgcaggtctggtcgagaaccgcttagatgtagcaagcgcgatgaaagcgcttttgacccgccctttaaaggaagaataa

SEQ ID NO: 119573 - protein, 317 aa, Sulfitobacter sp. EE-36
MSIAVLGAGAFGTALAISLAGKGAVTLWARHAQGMGQSRENTARLPGCPLPEGLFVTEDLAEAAKAQTLLAAVPMQKLRGFLRDHAAALDGKTIVACCKGIELNTGLGPVAVIREVLPHATAAILTGPSFAADIARGLPTALTLACADKTTCATLQQSLTTANLRLYRTSDTVGAELGGALKNVVAIACGAAIGAGLGESARAAVMTRGFAEMQRLAAHHHADPVTLAGLSGFGDLTLTCTSTQSRNYRLGLALGRGEPFDSATTVEGAATARAVDALAHDNGLDLPITAAVAGLVENRLDVASAMKALLTRPLKEE

SEQ ID NO: 119574 - DNA, 963 bp, Roseovarius nubinhibens ISM
  CDS (1)..(963): transl_table=11
atgatcggagtgatgggggccggtgcgttcggcacggcgctggcggtgtcgctggcggcgaaaggcccggtggtgctggcggcgcggaccgaggcgcaggcggaggacatccggcaagcgggcgaggtggcgcggctgcccggtgtgacattgcccgaggcggtgcaggtcggggcgggcgttgcggcgctggccggttgcgacatcatcttgctggcggtgccgacccagaagctgcgtgcgatgctcatggacgcgggcggggtgtttgacgccaagacgcttgtcgccacctgcaagggggtcgagcagggcagtcagaagagcccgtcgcaggtcattgccgaggtctgtcccgaggccatggtggcggtgctcaccgggccgagctttgccgccgatattgcgcgggggctgccgacggcgctgacgctcgcctgtgccgaccgggcggcgggcaaggcgttgcaagaggcgctcagcgtggcgcatcttcggctctatcggagcgaggatgtgaccggggccgagcttggcggggcgctcaagaatatcatcgcgattgcctgcggcgcggcggtgggcgcggggcttggcgagagtgcgcgggcagcgctcatgacgcggggctatgccgagatggcgcggatggccgaggcgatgggggcgcgggccgagacgcttgccgggctgtcgggctttggcgatctggcgctcacctgcacgtcggaacagtcgcgcaacctgcgctatgggctggcgcttggccgcggcgagacgttcgacagcggcgtcacggtggagggcgcggcgagcgcgccggcggtggtggcgcgggccgaggcgctcggcatcgagatgccgatcacgcgggtcgtcgtcggcctcgtgtcgggacaattgcgcgtcgccggtgcgatggatatgttgctctcacgaccattgaaggaagaaaaatgctga

SEQ ID NO: 119575 - protein, 320 aa, Roseovarius nubinhibens ISM
MIGVMGAGAFGTALAVSLAAKGPVVLAARTEAQAEDIRQAGEVARLPGVTLPEAVQVGAGVAALAGCDIILLAVPTQKLRAMLMDAGGVFDAKTLVATCKGVEQGSQKSPSQVIAEVCPEAMVAVLTGPSFAADIARGLPTALTLACADRAAGKALQEALSVAHLRLYRSEDVTGAELGGALKNIIAIACGAAVGAGLGESARAALMTRGYAEMARMAEAMGARAETLAGLSGFGDLALTCTSEQSRNLRYGLALGRGETFDSGVTVEGAASAPAVVARAEALGIEMPITRVVVGLVSGQLRVAGAMDMLLSRPLKEEKC

SEQ ID NO: 119576 - DNA, 957 bp, Oceanicola batsensis HTCC2597
  CDS (1)..(957): transl_table=11
atgacatccgttatcggcgcaggggcattcggtacggcgctggccatctcgctggcgcgggacgggtccgaggtcacgctctgggcccgcgacgcggcgcaggtcgccgccatgtcggcaacccgcgaaaacgcggcgagactgccggacctcggctttcccgacgcgctgaaggtcaccggggacgtagagtccctgcccgaggggccggtcctgctggcggttcctatgcagaagcttcgcgcggcgttgcaggatctgcccgatttcggcgcccgcccgctggtcgcctgctgcaaggggatcgaactgacctcgcggctcagcccggtccaggtgatcggcgatgtgcgccccggcgcccgcgccgcgatcctgaccggcccgtccttcgcgcaggatatcgccaagggcctgcccacggcgctgacgctcgcctgcgacgatgacgatacggggcgcgacctgcagacaaccctgaccaccgccaatatcaggctctatcgcacggtggatgtgccgggggccgagatcggcggcgcggtcaagaacgtcatggccatcgcctgtggcgccgccatcggggccgggctgggcgaaagcgcccgcgccgcgctgatgacccggggctatgccgagatgctgcgcatggccctggccatcggggcgcgggcggaaactctggccgggctgtcggggttcggcgatctgaccctgacctgcacctcgcggctgtcgcgcaactatcgctacggcctgtcgatcggcgaaggcgcacccttcgatccctcggtcacggtcgaaggcgcggcgacggcccgcgcgttgcaggcccgggcgcgggccatgcggcttgacatgcccatcacggatgctgtcgttgggctgatcgacgggtcgcggacggtgaaggaggcgatgaccgacctcctgtcgcggccgctgaaggaggaatag

SEQ ID NO: 119577 - protein, 318 aa, Oceanicola batsensis HTCC2597
MTSVIGAGAFGTALAISLARDGSEVTLWARDAAQVAAMSATRENAARLPDLGFPDALKVTGDVESLPEGPVLLAVPMQKLRAALQDLPDFGARPLVACCKGIELTSRLSPVQVIGDVRPGARAAILTGPSFAQDIAKGLPTALTLACDDDDTGRDLQTTLTTANIRLYRTVDVPGAEIGGAVKNVMAIACGAAIGAGLGESARAALMTRGYAEMLRMALAIGARAETLAGLSGFGDLTLTCTSRLSRNYRYGLSIGEGAPFDPSVTVEGAATARALQARARAMRLDMPITDAVVGLIDGSRTVKEAMTDLLSRPLKEE

SEQ ID NO: 119578 - DNA, 1008 bp, Erythrobacter sp. NAP1
  CDS (1)..(1008): transl_table=11
atgagcacatccatcggagtgatcggtgcaggcgcatggggaacagcccttgcccaaatgctcgcaagcgacggtcgcgaggtcctgctttgggcttacgagagcgaagtcgtggacgcgatcaactctgatcgccgcaacccgcaatatctgccgagcgcgcagcttgccaagacaattcgcgccaccggcgaccttgcggactttgccgagatcgagatcgctctggtcgtcaccccggcgcaactcttgggcaaggtgctttccgtcctcgacaaatcgccgcgcgatctagtcctttgctccaagggaattgaagcgggcaccggacgcctgatgaacgatgtcgcccgcgaggccgcgccggggagcgagatcgctgttctttccggtcccaccttcgcccatgaagtcgcctctggcctcccaaccgccgttacgctcgcctgcgaaggcggacgcgagcaatgggagcggctctcgcccgccatcgcacggccagcgttccggccctattattccgacgacgtcaccggcgcggaaatcggcgggtcgatcaagaacgtactcgccatagcctgcggcgtggtcgaaggcctgaaactcggccagaacgcgcgtgctgctctgatcgcgcgcggatatgccgaaatgctgcgttttggcgagacgatgggcgcgcaggcggagacgctcgctggcctatgcggcctaggcgatctggtactaacctgttcttcgacctccagccgcaatttctcgctcggcaaggcgctgggcgaaggcgagaaagccgccgacctgatggctgaccgcacaacggtcgccgaaggcgcacacactgcgcctgtgctcgcgagcctcgccaaggagcgcgacatcgccatgccgatcgtcatcgcggtcaacgcgatcctcgatggctccgcgcccgaagcagtcgttgccgaattgctctcacgtcccttgcgcgccgagacgccgtccgaccaaggcgacgtcgagtga

SEQ ID NO: 119579 - protein, 335 aa, Erythrobacter sp. NAP1
MSTSIGVIGAGAWGTALAQMLASDGREVLLWAYESEVVDAINSDRRNPQYLPSAQLAKTIRATGDLADFAEIEIALVVTPAQLLGKVLSVLDKSPRDLVLCSKGIEAGTGRLMNDVAREAAPGSEIAVLSGPTFAHEVASGLPTAVTLACEGGREQWERLSPAIARPAFRPYYSDDVTGAEIGGSIKNVLAIACGVVEGLKLGQNARAALIARGYAEMLRFGETMGAQAETLAGLCGLGDLVLTCSSTSSRNFSLGKALGEGEKAADLMADRTTVAEGAHTAPVLASLAKERDIAMPIVIAVNAILDGSAPEAVVAELLSRPLRAETPSDQGDVE

SEQ ID NO: 119580 - DNA, 1011 bp, Pseudoalteromonas tunicata D2
  CDS (1)..(1011): transl_table=11
atgacaacagctaaatacgctgtgtcagtcttaggggcgggctcgtatgggaccgcccttgctatttgtttggctagaaataaccatgcaataggcctttggggacgtgatgcaagccatatcgaaactttggcaaaagatcgtgcaaatgagcgttatttgccaggtgccgcttttcctgaatcattgtcattagaatcggatctacaaacagtggttagccaatctaatactattttggtggtagtgccaagccatgcttttgcacaagcactgattagtattaaaccttttttacagccaggtagtaaagttgcctgggcgacaaaaggacttgagcctaatactggtcgattattacaagatgttgccagagagattctgggggatgaaatttccctagctgttgtttcagggccaacctttgctaaagaaatggcgatgggcttacctacagcaatttctgtttcttcaactgatccgttatttgttaaacaactgtctgattatcttcattgcgggcgttcatttcgtgtttatagtaatgatgattttattggcgtacaactgggcggagcggtcaaaaacgtgattgccattggcgctggtatttctgatggatttggctttggtgctaatgcacgtaccgctttaatcacccgcggacttgcagaaatgtgccgtttaggctgtgccatgggggcaaaacctgacacctttatgggtatggccggtttaggtgatttaattttaacttgtactgataaccaatctcgcaatcgtcgttttggcctagcgttaggtcaggggtctgatgtcgaaaaagcgcaaactgaaattggccaagtcgttgaaggatatcgtaatactaaagaagtatatttacttgctaaacgtgttggagtagaaatgccaataaccgaacagatttatcaagttttgtacgaaggtaaaaatgttaaagaagcagcaatgtcgttattaggtagagaaaaaaaggctgagagttaa

SEQ ID NO: 119581 - protein, 336 aa, Pseudoalteromonas tunicata D2
MTTAKYAVSVLGAGSYGTALAICLARNNHAIGLWGRDASHIETLAKDRANERYLPGAAFPESLSLESDLQTVVSQSNTILVVVPSHAFAQALISIKPFLQPGSKVAWATKGLEPNTGRLLQDVAREILGDEISLAVVSGPTFAKEMAMGLPTAISVSSTDPLFVKQLSDYLHCGRSFRVYSNDDFIGVQLGGAVKNVIAIGAGISDGFGFGANARTALITRGLAEMCRLGCAMGAKPDTFMGMAGLGDLILTCTDNQSRNRRFGLALGQGSDVEKAQTEIGQVVEGYRNTKEVYLLAKRVGVEMPITEQIYQVLYEGKNVKEAAMSLLGREKKAES

SEQ ID NO: 119582 - DNA, 1017 bp, Photobacterium sp. SKA34; identical to SEQ ID NO: 58877
  CDS (1)..(1017): transl_table=11

SEQ ID NO: 119583 - protein, 338 aa, Photobacterium sp. SKA34; identical to SEQ ID NO: 58878

SEQ ID NO: 119584 - DNA, 1029 bp, Oceanospirillum sp. MED92
  CDS (1)..(1029): transl_table=11
atgactgttttgaaaaaggttgcggtacttggtggtggaagtttcggtactgtaattgcgaacctgatcgcggaaaatggatatgatgttcagttgtggatgcgcgatcagcagcgagcggatcaacttaactacgaacatgaaaacaagcgttacctgcctggttattcactttctgagaaagtggtagcgacatctgatttacaatcagttgtacaggatgctgagctagtatttgtttctattcccagccaatcttttagagatgttatcaagcaggcgaagccatttataaacgaagggcagatgtttgttagtacgactaagggaattgaggcaaaaacatttagcttaatgagcgagatcctcagtgaggaattacccggcgctcaagtgggtgttctaagtggtccaaacctggctaaggaggtggtggccaagcagctgactgctaccgttgtagctagtgagtcacagttacttcgttccagtgttcagacaatacttcactcatcatacttccgtgtttatgccagttctgacacttatggtgtggagttgggaggaacgcttaagaacatctacgctattgcggctggactcagtgctgcactaggtatgggcgagaatactcgggcgatgttaatgacgcgtagccttgcagaaatgagccgctttgctgtttgcatgggcgctaatccaatgacctttattgggttagcgggtgtcggagatctgattgttacctgtatgtcccccttgagccgcaactacagagtgggtcatgctctgggagagggtaaaacattagaggaagccgttgaagccttagggcaggttgctgaaggtgtgaataccattaagcaagttaaagagaaagcatcggaaatgcaggtatatatgcctctcgtgacgggtttgtatgaagttgtgtttaatcatgcgcctgttgctgaagtggttaaaatgctgatgatgaatgagcaaagcactgatgttgagttcgtgcttcctcgtggggatatatga

SEQ ID NO: 119585 - protein, 342 aa, Oceanospirillum sp. MED92
MTVLKKVAVLGGGSFGTVIANLIAENGYDVQLWMRDQQRADQLNYEHENKRYLPGYSLSEKVVATSDLQSVVQDAELVFVSIPSQSFRDVIKQAKPFINEGQMFVSTTKGIEAKTFSLMSEILSEELPGAQVGVLSGPNLAKEVVAKQLTATVVASESQLLRSSVQTILHSSYFRVYASSDTYGVELGGTLKNIYAIAAGLSAALGMGENTRAMLMTRSLAEMSRFAVCMGANPMTFIGLAGVGDLIVTCMSPLSRNYRVGHALGEGKTLEEAVEALGQVAEGVNTIKQVKEKASEMQVYMPLVTGLYEVVFNHAPVAEVVKMLMMNEQSTDVEFVLPRGDI

SEQ ID NO: 119586 - DNA, 996 bp, Flavobacteria bacterium BBFL7
  CDS (1)..(996): transl_table=11
atggagaagaacaaaaaatttgcggtaataggaggcggaagctgggctacagccatcgtgaaaatgctttgtgaaaatctagaccaagtaggatggtatatgcgcagtgtatatgctattgaacatataaaacgcaacgatcacaacccaagttacctgagctctgtagagtttgatgtgactcaattgaagttatccaacgacattaacgaaatcgttgcagaagccgatgtatgcatctttgcaattcctagcgcctttttatatacagaattacaaaaccttacggtagatttaaaaggtaaaatcatctttagtgcgattaaaggaattgttccagagacaggtctcatagtaggagagcactttaatgagcactataatattccttttgaagacattggagttttaactggaccatgtcatgctgaagaagttgctttagaacgtctatcctatttaaccatcgcctgtgcagatgaagaaaaagcaaactatgttgcctcaaagttaagcagtgattacatcaactgtaaaactacagacgatataataggtactgaatatgcagctgtacttaaaaacatttatgctattgctgccgggatagctcatggattgggttatggtgataacttccaaagtgtattgatgagtaactctatcagagaaatgaaacgattcattaagaaagtacacaaaatgaagcgtaatataaacgatagtgcctatttaggtgatctactggtaactggatattccgtgttttccagaaatagactttttggcaatatgctaggtaaaggttatacggtaagaagtgcacagttagaaatgagtatgattgccgaaggttactatgccacgaatagtgcttataaaattaacagcgaaaaaggagctcgtactcctatattagatgctgtatacagcatcctatacgataataaaaaccctaaaaaggtatttaaaaaactggctgataagctggactaa

SEQ ID NO: 119587 - protein, 331 aa, Flavobacteria bacterium BBFL7
MEKNKKFAVIGGGSWATAIVKMLCENLDQVGWYMRSVYAIEHIKRNDHNPSYLSSVEFDVTQLKLSNDINEIVAEADVCIFAIPSAFLYTELQNLTVDLKGKIIFSAIKGIVPETGLIVGEHFNEHYNIPFEDIGVLTGPCHAEEVALERLSYLTIACADEEKANYVASKLSSDYINCKTTDDIIGTEYAAVLKNIYAIAAGIAHGLGYGDNFQSVLMSNSIREMKRFIKKVHKMKRNINDSAYLGDLLVTGYSVFSRNRLFGNMLGKGYTVRSAQLEMSMIAEGYYATNSAYKINSEKGARTPILDAVYSILYDNKNPKKVFKKLADKLD

SEQ ID NO: 119588 - DNA, 1050 bp, gamma proteobacterium HTCC2207
  CDS (1)..(1050): transl_table=11
ttggagcagggttttttgacaacaaataataattataaaattgccgttttaggcgcaggcagctttggtaccgtgatcgccaatatgctcgcggtcaatggatttgccaccacattatggatgcgcagtgacaagcagttgcaggctattaatagtattggtgagaatgcagcctatcttcccggatatcaatttgatccaacactacgttttaccactgagttagagcaggccctagagggcgcggacacagtgtttttcgctgtgcccagcagcgcgctgcgacaggttgccaagttggccaaagcgtggattaatacagatgcactcttaatcagtactgccaaggggatagaggcagatagctttgcgctgcccagtcagattctcgaacaagagctaccggatgctaaggtgggtgtgctcagtggccccaatctggccaaagaaattgccagctatgaaattaccgccacggtgattgccagcgagcatgatgaggtctgtatccgtgcccaagagatattagcctcgaagtattttaggatttacgctaatcacgatcgctacggtgttgagttagccggcgcgctaaaaaatatttatgccattgtcgcgggtattgccgaggccatgaaagtcgggcagaacaccaagagtgtggtactaactcgcagtcttgctgaaatgagtcgctttgcttgtcagctgggtgccgacccattaacctttctgggcctcagtggtgttggcgacctctatgttacctgtagctcgcctctgagccgtaatttccgcattggtgtggcgctgggaagtggcaacagcctcgaccaggcgattattgatgttggccaagtggccgaaggcgtaaatacgactaaactagtcaaagagagggccgatgaattgggtatttatatgccattggcctcggctctgtatgccactatgtttgaacagcgaccgattgttgagtctctgcgcaccatgatggttgcagaacaaaatactgatgttgaatttatggtgaaaccaaatgaccgataa

SEQ ID NO: 119589 - protein, 349 aa, gamma proteobacterium HTCC2207
MEQGFLTTNNNYKIAVLGAGSFGTVIANMLAVNGFATTLWMRSDKQLQAINSIGENAAYLPGYQFDPTLRFTTELEQALEGADTVFFAVPSSALRQVAKLAKAWINTDALLISTAKGIEADSFALPSQILEQELPDAKVGVLSGPNLAKEIASYEITATVIASEHDEVCIRAQEILASKYFRIYANHDRYGVELAGALKNIYAIVAGIAEAMKVGQNTKSVVLTRSLAEMSRFACQLGADPLTFLGLSGVGDLYVTCSSPLSRNFRIGVALGSGNSLDQAIIDVGQVAEGVNTTKLVKERADELGIYMPLASALYATMFEQRPIVESLRTMMVAEQNTDVEFMVKPNDR

SEQ ID NO: 119590 - DNA, 1023 bp, delta proteobacterium MLMS-1; identical to SEQ ID NO: 58879
  CDS (1)..(1023): transl_table=11

SEQ ID NO: 119591 - protein, 340 aa, delta proteobacterium MLMS-1; identical to SEQ ID NO: 58880

SEQ ID NO: 119592 - DNA, 1023 bp, delta proteobacterium MLMS-1; identical to SEQ ID NO: 58881
  CDS (1)..(1023): transl_table=11

SEQ ID NO: 119593 - protein, 340 aa, delta proteobacterium MLMS-1; identical to SEQ ID NO: 58882

SEQ ID NO: 119594 - DNA, 1005 bp, Rickettsiella grylli
  CDS (1)..(1005): transl_table=11
atgaaaaaacataggtctttaaagtcatcagacgattgttcgcctatcgctattatcggcgcaggtgcttggggcagcgcccttgctatccatttagcacgtaacgatcaaaaagtccgtttatgggcgtatgaaaagcaacaaattacggaaataaatacgagaagaaccaatgaacgttacttgccggatgtacttttcccttctaatattacttgctcggatgattatcaaacgattttttcaggggtacaagatgttttaattgccgtaccgagtatcgcttttcgcgacaccctaagaaaaatccagccctacttacacgtgaatcaacgtttattatgggccagtaaaggattagattctgaaaagcatcaactattaaatgaaaccgctaaggagattttagaagatatcaatatggctgtgctttcaggtccgagttttgccaaagaagtagctaaaggattaccaacagcggtttgtattgcatcggaaaattatgattttgcccacgatttattactacgatttcagactaaaaattttcgtgtggaattgactcaagatattattggcgtagaacttggcggtgctatgaaaaacatattggctattgctgtgggcataaccgagggtttaggttttggtgcgaatgctaaagcagcagtaatgaccgcaggtttatccgaaatgcttgaattaggtttgattttgggtgcaaaacaagaaacttttttagggctctcagggttgggcgatctcgtattaacctgtacggataatcaatctcgtaatcgtcgtttaggtttagctttaggagcaggacaaagtatagaggaagctaaaaaattaattgggactacagaaggttatgaaactgcaaaaaatattttctttttaataaagaaatatcgaatgaaaaccttattttgtgaaggcgtttatcagattttgtatgagaaaaaacagccaaaaacactttttaaaaattatttttcataa

SEQ ID NO: 119595 - protein, 334 aa, Rickettsiella grylli
MKKHRSLKSSDDCSPIAIIGAGAWGSALAIHLARNDQKVRLWAYEKQQITEINTRRTNERYLPDVLFPSNITCSDDYQTIFSGVQDVLIAVPSIAFRDTLRKIQPYLHVNQRLLWASKGLDSEKHQLLNETAKEILEDINMAVLSGPSFAKEVAKGLPTAVCIASENYDFAHDLLLRFQTKNFRVELTQDIIGVELGGAMKNILAIAVGITEGLGFGANAKAAVMTAGLSEMLELGLILGAKQETFLGLSGLGDLVLTCTDNQSRNRRLGLALGAGQSIEEAKKLIGTTEGYETAKNIFFLIKKYRMKTLFCEGVYQILYEKKQPKTLFKNYFS

SEQ ID NO: 119596 - DNA, 1032 bp, Oceanobacter sp. RED65; identical to SEQ ID NO: 58883
  CDS (1)..(1032): transl_table=11

SEQ ID NO: 119597 - protein, 343 aa, Oceanobacter sp. RED65; identical to SEQ ID NO: 58884

SEQ ID NO: 119598 - DNA, 1059 bp, Desulfitobacterium hafniense DCB-2; identical to SEQ ID NO: 58885
  CDS (1)..(1059): transl_table=11

SEQ ID NO: 119599 - protein, 352 aa, Desulfitobacterium hafniense DCB-2; identical to SEQ ID NO: 58886

SEQ ID NO: 119600 - DNA, 1008 bp, Alteromonadales bacterium TW-7; identical to SEQ ID NO: 58887
  CDS (1)..(1008): transl_table=11

SEQ ID NO: 119601 - protein, 335 aa, Alteromonadales bacterium TW-7; identical to SEQ ID NO: 58888

SEQ ID NO: 119602 - DNA, 1017 bp, marine gamma proteobacterium HTCC2143; identical to SEQ ID NO: 58889
  CDS (1)..(1017): transl_table=11

SEQ ID NO: 119603 - protein, 338 aa, marine gamma proteobacterium HTCC2143; identical to SEQ ID NO: 58890

SEQ ID NO: 119604 - DNA, 1014 bp, marine gamma proteobacterium HTCC2080
  CDS (1)..(1014): transl_table=11
atggagcgcgcagtggcttataaaatagcagtaatgggtggaggcagttggggcactacggtagcctcactggtgtcacgcaatgccgacatcatgctttgggcgagagatgccgccaccgttgatgatattaatggcaaccataaaaacagccgctaccttggcgacgcccctctgaatccgaaattacaagcgactctcgacccggctgaggcgattgctggtgcagacgctgtggtcatgggcataccttctaataactttcgatctgtactcaccgacatcgctccagatttacccgacggcgcgcccctgattagcttaactaaaggtttagagcgcggttctcgcttgcgcatgaccgagatctgcagagaagtcgctccggggcgacccataggcgtactgacaggacccaatctagccagagagatcgtcgccggtcaggccgctgcaggtgtactcgcgctcgatgaccccagcccccaacattggctgcaaccggtgttaaatgtcgggctttttcgggtctatacaaacccagaccacataggctgcgaattaggcggggtattcaaaaatatcatcgcaattgccgtgggcatgggtgatggccttggcgcgggtgataatacccgtgcagcgttaatcacacgcggcctggcagaaatgacacgactgggtaccgcactcggggggcgggcggagaccttctcgggccttgcgggtatgggcgatatgatcgcgacctgcacaagccctcaaagccgaaaccgccatgtgggtattgagctcgccaaggggcgctcgattgaagatattattgccagcatgcatatggtggctgaaggggtaaagagtgcccccaccgtgatggagttagcagcggagcacggtgttgacatgcccatatcctctgacgttttcaaagtcgttacgggggcgtctaacgctcgcggcgtctaccgcggcttacttcggactcgagccgcagctgagtctgagcccggttga

SEQ ID NO: 119605 - protein, 337 aa, marine gamma proteobacterium HTCC2080
MERAVAYKIAVMGGGSWGTTVASLVSRNADIMLWARDAATVDDINGNHKNSRYLGDAPLNPKLQATLDPAEAIAGADAVVMGIPSNNFRSVLTDIAPDLPDGAPLISLTKGLERGSRLRMTEICREVAPGRPIGVLTGPNLAREIVAGQAAAGVLALDDPSPQHWLQPVLNVGLFRVYTNPDHIGCELGGVFKNIIAIAVGMGDGLGAGDNTRAALITRGLAEMTRLGTALGGRAETFSGLAGMGDMIATCTSPQSRNRHVGIELAKGRSIEDIIASMHMVAEGVKSAPTVMELAAEHGVDMPISSDVFKVVTGASNARGVYRGLLRTRAAAESEPG

SEQ ID NO: 119606 - DNA, 1041 bp, Candidatus Desulfococcus oleovorans Hxd3
  CDS (1)..(1041): transl_table=11
atgagtagcggccagacggatcttcgagtcgccgttgtgggcgcgggcagctggggcacggccattgcccacctgctggcatccaaggggctttttcccttgctctgggcctatgagccggagctgtgcgagcagatcgaaaagggccgggaaaacacgatctacctgcccggtattcagctggccgagggaatttccgtgtccaatgatcttggggccgtggtggccgacagggacatcgtggtcatggtggtgccttctcacctgacccgggacgtggcggcccgggcggcggaccacctggacggccgcaccattgtggtgaccgcctccaagggcattgagaacaagacccatctgaccatgaccggggtcctgtccgaggtgcttcccaacacgcctgctgaaaagattgccgtgctgtcgggccccagctttgcccgtgaagtggcggccaacctgcccacggtggtggccgtggcctccaccagcacggaaacggccctgtttctgcagcaggtgtttgccgcgcccctgttccgggtttataccaatgacgaccccgtgggcgtggaactcggcggggcggtcaagaatgtcattgccattgcctccggcgtttgcgacggcctgggcctgggcttgagcgcccgggccgccatgatcacccggggcctggccgagatgcggcgcctgggcatggccctgggcgccaacccccacaccttttccggcctggccggcatcggggacctgattctgacctgcaccggcagcctgagccggaactacacggtgggcaagaaactcggggaaggcatgaccattgatgagatcctggcctccatgcgcatggtggccgaaggggtaaaaaccgccaagtcggttttcaacctgtccaacaagcgcaacgtggagatgcccatctgccacgaggtgtatcgcatcctttacgaggggctggctccgggagacgcggtgctgcggctcatgacccggacattgaaacacgagatcgatgacgaggtgacggcttactga

SEQ ID NO: 119607 - protein, 346 aa, Candidatus Desulfococcus oleovorans Hxd3
MSSGQTDLRVAVVGAGSWGTAIAHLLASKGLFPLLWAYEPELCEQIEKGRENTIYLPGIQLAEGISVSNDLGAVVADRDIVVMVVPSHLTRDVAARAADHLDGRTIVVTASKGIENKTHLTMTGVLSEVLPNTPAEKIAVLSGPSFAREVAANLPTVVAVASTSTETALFLQQVFAAPLFRVYTNDDPVGVELGGAVKNVIAIASGVCDGLGLGLSARAAMITRGLAEMRRLGMALGANPHTFSGLAGIGDLILTCTGSLSRNYTVGKKLGEGMTIDEILASMRMVAEGVKTAKSVFNLSNKRNVEMPICHEVYRILYEGLAPGDAVLRLMTRTLKHEIDDEVTAY

SEQ ID NO: 119608 - DNA, 1020 bp, Escherichia coli B
  CDS (1)..(1020): transl_table=11
atgaaccaacgtaatgcttcaatgactgtgatcggtgccggctcgtacggcaccgctcttgccattaccctggcaagaaatggccacgaggttgtcctctggggccatgaccctgaacatatcgcaacgcttgaacgcgaccgctgtaacgccgcgtttctccccgatgtgccttttcccgatacgctccatcttgaaagcgatctcgccactgcgctggcagccagccgtaatattctcgtcgtcgtacccagccatgtctttggtgaagtgctgcgccagattaaaccgctgatgcgtcctgatgcgcgtctggtgtgggcgaccaaagggctggaagcggaaaccgggcgtctgttacaggacgtggcccgcgaggcgttaggcgatcaaattccgctggcggttatctctggcccaacgtttgcgaaagaactggcggcaggtttaccgacagctatttcgctggcctctaccgaccagacctttgccgatgatctccaacaattgctgcactgtggcaaaagtttccgcgtttacagcaacccggatttcattggcgtgcagcttggcggtgcggtgaaaaacgtcattgccattggcgcggggatgtccgacggtatcggttttggtgcgaatgcgcgtacggcactgatcacccgtgggctggctgaaatgtcgcgtcttggcgcggcgctgggtgccgatcctgccacctttatgggcatggcggggctgggcgatcttgtgcttacctgtaccgacaaccagtcgcgtaaccgccgttttggcatgatgctcggtcagggcatggatgtacaaagcgcgcaggagaagattggtcaggtggtggaaggctaccgcaatacgaaagaagtccgcgaactggcgtatcgcttcggcgtagaaatgccaataaccgaggaaatttatcaagtattatattgcggaaaaaacgcgcgcgaggcagcattgacgttattaggtcgtgcacgcaaggacgagcgcagcagccactaa

SEQ ID NO: 119609 - protein, 339 aa, Escherichia coli B
MNQRNASMTVIGAGSYGTALAITLARNGHEVVLWGHDPEHIATLERDRCNAAFLPDVPFPDTLHLESDLATALAASRNILVVVPSHVFGEVLRQIKPLMRPDARLVWATKGLEAETGRLLQDVAREALGDQIPLAVISGPTFAKELAAGLPTAISLASTDQTFADDLQQLLHCGKSFRVYSNPDFIGVQLGGAVKNVIAIGAGMSDGIGFGANARTALITRGLAEMSRLGAALGADPATFMGMAGLGDLVLTCTDNQSRNRRFGMMLGQGMDVQSAQEKIGQVVEGYRNTKEVRELAYRFGVEMPITEEIYQVLYCGKNAREAALTLLGRARKDERSSH

SEQ ID NO: 119610 - DNA, 1026 bp, Pseudomonas putida GB-1
  CDS (1)..(1026): transl_table=11
atgactgaacagcaacctgttgcagttctgggaggcggcagcttcggcaccgccgtggcgaacctgctggcggaaaacggtgtgccagtgcgccaatggatgcgcgacccggcgcaggccgaggccatgcgcgtcaatcgcgagaatccgcgctacctcaagggcatccgcctgcacgatggcgtcgaaccggtcaacgacctgctcgctaccctgcaggccagcgagttggtcttcgtggccctgccatcgagcgcgttgcgcagcgtgctggcaccgcatgccgagttgctgcgcggcaagggcctggtcagcctgaccaaaggcatcgaagcgcaaagcttcaaactgatgagccagatacttgaagaaatcgccccccaggcgcgtattggcgtgttgtcggggcccaacctgtcgcgcgagatcgccgaacacgcactgactgccacagtggtggccagtgaagacgaaaagctgtgccagcaggtgcaggccgtgctgcacgggcgtaccttccgcgtctacgccagtgccgaccgttttggcgtcgaactgggcggggcgctgaagaacgtctacgcgatcattgccggcatggccgtggccttggggatgggcgagaacaccaagagcatgctgattactcgggccttggctgaaatgacgcgctttgctgtcagccaaggtgccaaccccatgaccttcctcggcctggccggtgtcggtgacctgatcgtcacctgctcctcgcccaagagccgcaactatcaggttggctacgcgctgggcgaggggcacagcctggaagaggcggtcaaccgcctgggcgaagtggccgaaggggtcaacacgctaaaggtgctcaaggccaaggctcaggaagtgcaggtgtacatgccgctggtggctggcctgcatgccattctgttcgaagggcgcaccttgaaccaagtgatcgagcacctgatgcgtgccgagcccaaaaccgatgtcgacttcatttccatcagcggtttcaactga

SEQ ID NO: 119611 - protein, 341 aa, Pseudomonas putida GB-1
MTEQQPVAVLGGGSFGTAVANLLAENGVPVRQWMRDPAQAEAMRVNRENPRYLKGIRLHDGVEPVNDLLATLQASELVFVALPSSALRSVLAPHAELLRGKGLVSLTKGIEAQSFKLMSQILEEIAPQARIGVLSGPNLSREIAEHALTATVVASEDEKLCQQVQAVLHGRTFRVYASADRFGVELGGALKNVYAIIAGMAVALGMGENTKSMLITRALAEMTRFAVSQGANPMTFLGLAGVGDLIVTCSSPKSRNYQVGYALGEGHSLEEAVNRLGEVAEGVNTLKVLKAKAQEVQVYMPLVAGLHAILFEGRTLNQVIEHLMRAEPKTDVDFISISGFN

SEQ ID NO: 119612 - DNA, 1074 bp, Marinobacter sp. ELB17
  CDS (1)..(1074): transl_table=11
atgttcgaaaaaacagcagcgcccgcgcagggcaacgcttccaatgtgccagcccgccatgatgtagcggtgcttggcggcggcagttttggtacagccatggtcaaggtgctggctgaaaatggccatagggtgcatttttggatgcgtgaccaagctcaagccgacagcatccgcgaaaccggtcggaatgagcgctacatgcccggcattgcgctggccggcgatatcgaacccactacagatttgcccggcgcagttgccagcgctgagattgtctttgttgccattccatcaaaagccttccgtgacgtcattcaccagcacgccggtcgttttcgcgatggccagatagtcgttagtctgaccaaaggtattgaagcccagggtttcaagctaatgagcgagatactgcaggatgaaattcctcaatgccgtattggtgtgctcagcggccccaatttagcagcggagattgtaaatcgtgatctgaccgccaccgtcatagcgtcagaagacccagaggtgcgcgcctgcgttcaaaacctgctgggttgcgagtattttcgggtttacgccaacgtggatatgtacggcgtggagctggcgggtgcattgaaaaacatttatgccatcgtcgccggcctaggctcggctctggagatgggcgaaaacgccaaagccatgctgattacacgtggcatggcggaaatgagccgctttgcggtcagtttgggggccaatcctatgaccttcctggggctggccggcgttggtgatctgattgttacctgtacatcggccaaaagccggaatttccgtattggttacgcaattggcaaaggcaagccgcttgatgaagctgcggcggagctggggcaggttgcagagggcatttacactctgaaactggtgcgcgaaaaatccgaggccatgggtattcaaatgccgctggtgcacggcttacacgaaattctatatggcaatgcgtctgtaaaggctgttatcagcggcttgatgacggccgcgcaaaactccgatgtggagtttatcctgccgcgtaccattgtttga

SEQ ID NO: 119613 - protein, 357 aa, Marinobacter sp. ELB17
MFEKTAAPAQGNASNVPARHDVAVLGGGSFGTAMVKVLAENGHRVHFWMRDQAQADSIRETGRNERYMPGIALAGDIEPTTDLPGAVASAEIVFVAIPSKAFRDVIHQHAGRFRDGQIVVSLTKGIEAQGFKLMSEILQDEIPQCRIGVLSGPNLAAEIVNRDLTATVIASEDPEVRACVQNLLGCEYFRVYANVDMYGVELAGALKNIYAIVAGLGSALEMGENAKAMLITRGMAEMSRFAVSLGANPMTFLGLAGVGDLIVTCTSAKSRNFRIGYAIGKGKPLDEAAAELGQVAEGIYTLKLVREKSEAMGIQMPLVHGLHEILYGNASVKAVISGLMTAAQNSDVEFILPRTIV

SEQ ID NO: 119614 - DNA, 1083 bp, Candida magnoliae
  CDS (1)..(1083)
atgagttacgctaagaagttcaaggcctgcgtcgtcggcagcggcaactggggcactgccgtcgcgaagctcgttgctgagaacgcgcgcgagaagacggacctgtttgagccgaaggtgaacatgtgggtgttcgaggagatgcttgacggcaagaagttgacggagacgatcaacgagaagcacgagaacgtcaagtacttgccggacatcaagctgcccgagaaccttgtggcgaacccggacctgcgcaacgtggttgaggacgccgacatcgtcgtcatcaacatcccgcaccagttcctcggcaacatcatcaagcagctcgacggcatcgacttctcgaagaagtacgccgtgtcgtgcctgaagggcctgaacgtgtcgccgaagggccccgagctgctcagcgacgtcgtgcaggacaagctcggcatgcactgcggcgtgctgtctggcgcgaacatcgcgacggaggtcgccaaggagaagtggtgcgagacgacggttgcgttccccgtgccgaagaacttccagaagggcgaccccgacgcggcgctcatgcgccagctgttcgagcgcccgtacttccacgtgcaggtgtcggacgacacggccggtgtgtccattggcggcgcgctgaagaacgttgttgcgctcggcgccggcctcgtggagggcgccggctggggcgacaacgcgaaggccggcatcatgcgccacggcattatcgagatggtcaagttcggcaagacgttctaccccacgttcaaggccgagacgatctgctacgagtcggccggtgtggccgacctcattactacgtgctcgtccggccgcaacgtgcgtgttgcgcgcgaggcgatccgccagggcaagtctgtggaggtcattgagaaggagctcttgaacggccagagcgcccagggtgtcgtgacctgcaaggaggtctacgagttgctcagcgagcagaagatgctggacgactacccgctgttcaaggccatctacgacgtcctggagaacggcctcgccgttgagggcctcgtcgagagcgcctgctcgaggatagcttgtaaatag

SEQ ID NO: 119615 - protein, 360 aa, Candida magnoliae
MSYAKKFKACVVGSGNWGTAVAKLVAENAREKTDLFEPKVNMWVFEEMLDGKKLTETINEKHENVKYLPDIKLPENLVANPDLRNVVEDADIVVINIPHQFLGNIIKQLDGIDFSKKYAVSCLKGLNVSPKGPELLSDVVQDKLGMHCGVLSGANIATEVAKEKWCETTVAFPVPKNFQKGDPDAALMRQLFERPYFHVQVSDDTAGVSIGGALKNVVALGAGLVEGAGWGDNAKAGIMRHGIIEMVKFGKTFYPTFKAETICYESAGVADLITTCSSGRNVRVAREAIRQGKSVEVIEKELLNGQSAQGVVTCKEVYELLSEQKMLDDYPLFKAIYDVLENGLAVEGLVESACSRIACK

SEQ ID NO: 119616 - DNA, 1080 bp, Locusta migratoria; identical to SEQ ID NO: 58891
  CDS (1)..(1080)

SEQ ID NO: 119617 - protein, 359 aa, Locusta migratoria; identical to SEQ ID NO: 58892

SEQ ID NO: 119618 - DNA, 1083 bp, Drosophila flavomontana; identical to SEQ ID NO: 58893
  CDS (1)..(1083)

SEQ ID NO: 119619 - protein, 360 aa, Drosophila flavomontana; identical to SEQ ID NO: 58894

SEQ ID NO: 119620 - DNA, 1242 bp, Ostreococcus tauri
  CDS (1)..(1242)
atgggacggacgcgccgcgacggcgcggcggcgacgacggtatccgcgacgcgccggacgcgaggggaggacggacgcggacggcgaacgcgcacgcacgcgggcgcgtacgaggcgttcaaggctggcgtgagcgaggaagaccgcgcgtcgatcgtgggagagtgggataagatcatgcggtgggcggcgttcgtcgagagcgcgcacgcgagaaacgacgagagcgtcctgaaaagcgcgaaaaaagtggccatcatgggcggaggaagctttgggacggcgatggcgacgttgttggcgcgtaacaagggggatttggacgtggtgatcctgatgcggagcgataaagacgcggcgtcgctgaacgcggagcacagaaacttgaagtacttgccaaagtacgacttgccggtgaacattcgggcgacgacggacgcgcgggaggcgctttcggggagcgatttcatcattcacgccgtgccagtgcagcaatcgcgagcgttcttgtcgggggttaaggattttatcgatccaaagacgccgctgctgtgcctgagcaaggggttggagacggggacgtgcgagatgatgagcgagattatacccgcgggtttagggcgcgatcaaccgttagcggtgctctccgggccgacgtttgcggtggagctcatgcaagggcttcccacgaccatcgtcgccgcgagtgaagacgagggtttggccatccgagtacaacaactctttggctcttcgtgcctgcgcgtgaacacgagcacggacgtcacgggcgtcgagctctcgggcgcgatgaaaaacgtcctggcaatcgcggccgggatcgtagaggggctggagctcgggaacaatgccatggcctcgctcgtcgcgcagggtgtcactgaaattcgctggcttgcggggaaattgggcgctcgtccggagacgctcgcaggcgtgagcggaaccggggacatcatgctaacgtgcttcgtcaatctcagccgaaaccgcacggtcggtgttcgtctcggatccggtgaatcattagaggaaatattagggtcgatgagccaggttgctgagggggtagcgacggctggcgcggtggtccgattggcgaggaggcatcgcgtgaatctgcccgtgctcaccgcggtcgcgtgcatcttggatggagacatggacgcaaagacggccgtagataaaattataaatctgcctcaggttccagaggtgtag

SEQ ID NO: 119621 - protein, 413 aa, Ostreococcus tauri
MGRTRRDGAAATTVSATRRTRGEDGRGRRTRTHAGAYEAFKAGVSEEDRASIVGEWDKIMRWAAFVESAHARNDESVLKSAKKVAIMGGGSFGTAMATLLARNKGDLDVVILMRSDKDAASLNAEHRNLKYLPKYDLPVNIRATTDAREALSGSDFIIHAVPVQQSRAFLSGVKDFIDPKTPLLCLSKGLETGTCEMMSEIIPAGLGRDQPLAVLSGPTFAVELMQGLPTTIVAASEDEGLAIRVQQLFGSSCLRVNTSTDVTGVELSGAMKNVLAIAAGIVEGLELGNNAMASLVAQGVTEIRWLAGKLGARPETLAGVSGTGDIMLTCFVNLSRNRTVGVRLGSGESLEEILGSMSQVAEGVATAGAVVRLARRHRVNLPVLTAVACILDGDMDAKTAVDKIINLPQVPEV

SEQ ID NO: 119622 - DNA, 1398 bp, Ostreococcus tauri
  CDS (1)..(1398)
atgcgcttcgccgccgcctccagcgctccgtccagcgcccgcgccccctttaacctctctccctccctcttccgcgttcgactcgtccctggacgcgacgacgtgttcgacgtgcgcgtcgatcgcgatcgccctcgacgggcgcgcgtccgcgggcatgttctgacgacggcgtcggcgcgcctcgaccgttatcgattggtgaaaacgtcacatccgacgccgcagcgcgcgacgcgcggggtccatcgggcgtcggtgacgacgacgatgaagatcgctgtttttggaagcggctcgttcggcaccgccatggcgtccgtcgtcgcgaggaacggacacgacgtaatcatcttgacgagaagagaagatgtcgcgacgtgcatcaacgaaaatggacgaaacccgcaacatctgaccgcgtacgagcttccgaagaacgtgcgggcgacgatggacgccgaggaagcgatatcgaacgcgggagcgatcgtgcacgcgatacctatgcagagcacggaggaattcttggacggtgtgaaagatttggtgaaacgcagcggcgcgttattcgtgaacacgtccaagggattgcacggcgagacgttggagctcatgcacgacgtgttgaagcgatcgttagggagtaatcacccgtgcgcgtttttcggtgggcccacgttcgcggagcagttgatgaacgggacgccgagcggcggggtgatggcggctcgggacatggcgacggcggaacgcgctagcgcgttattcgcgggtccgaagatgcgggtgtatccgagcacggacgtcgtcggggtcgagatcggtggggcactgaaaaatgtgatcgccatcctcgctggcgggttggaggggatgggattaggggtgaacgcgcaaacgttgttgatcacgcgcggatgtcgagagatgacacgtctgggcgtcgccatgggagcgaaggagcacacgatggcgggattgtcgggaatcggtgatcttatgctcacgtgtttgggcgatgcatctcgcaacaaagcggtcgggatcgcgttcggacgagggcagaaggttgaagatattttgagtgaacgcgcgcagtcgctcaagggcgtcgccgagggagtcgccaccgctcccgcggcggaacgattggcacgaaagctcggtgttgcggctcccatgataacgacgtgcgcgcagtgtcttcgcggcgaattggacgccaaggcggctcttatgcagtgcatgacattgcccattcgaccggatgaaccgctggatgataacaaaggcgtcgccgcgagagtaatatcatttgtcacacatgggacttgcgcgctcttgggtgcgttcaccgcgagttggatacgatcacggtcgcgagacagggcgtag

SEQ ID NO: 119623 - protein, 465 aa, Ostreococcus tauri
MRFAAASSAPSSARAPFNLSPSLFRVRLVPGRDDVFDVRVDRDRPRRARVRGHVLTTASARLDRYRLVKTSHPTPQRATRGVHRASVTTTMKIAVFGSGSFGTAMASVVARNGHDVIILTRREDVATCINENGRNPQHLTAYELPKNVRATMDAEEAISNAGAIVHAIPMQSTEEFLDGVKDLVKRSGALFVNTSKGLHGETLELMHDVLKRSLGSNHPCAFFGGPTFAEQLMNGTPSGGVMAARDMATAERASALFAGPKMRVYPSTDVVGVEIGGALKNVIAILAGGLEGMGLGVNAQTLLITRGCREMTRLGVAMGAKEHTMAGLSGIGDLMLTCLGDASRNKAVGIAFGRGQKVEDILSERAQSLKGVAEGVATAPAAERLARKLGVAAPMITTCAQCLRGELDAKAALMQCMTLPIRPDEPLDDNKGVAARVISFVTHGTCALLGAFTASWIRSRSRDRA

SEQ ID NO: 119624 - DNA, 1011 bp, Spiroplasma citri
  CDS (1)..(1011): transl_table=4
atgatgaaaaaaacacaaaaaaatattactattattggaacaggagcatatgggacagttttagcaaatgttttgacagataatgatcataacgttattatgtatggaattaataataaagaagttgatgatattaataatgcacatttaaatcgtcatttttttggtaatttaaaaattaataaagaaattaaagctacaacaaattttgctgaagcagttgaagatgctgaatatattattttaggaatccctgttgttgctattaaattaattattgaaaagattaataaaacagtaactaaaccagttgttatcattaatgttgctaaaggattagaccctgacacgcatgaagttttatcaaaatcaattataaaattaatgaatccaaaaattttaaaagaatatgctggtatttatggtccaagtattgcaaaagaagttttacaacgaaaaccaacatgtattatggcggtttcacaggattttgcaattgcacaagaagttcgtgaattatttaacaatgaatattttgttacttttgctaatacggatgttattggtactgaatatgctgttgctttgaaaaatgcattagcaattgcctcaggaatatttaatggtctttatgaatcagataacgctaaagcatcattaattacgatgggattaaatgagattcaactttttgccaaaacaaaaggagctcaaattgaaactttttttaactttgcgggattagctgatttaattttaacagctacctcaagcaaatcaagaaattattctcttggttttgaaattgctcaagttgataatgctcaaaaagttttatcagagcaggtaaaaacagtagaaggcgttttaacttgtaaaacaattgtgttagatgcgcgagcaaataatattactctacctctatttgaagctttatatgatattttatatcataataaacggccaagtgtaattattaataatgtttttacaaaagcaatattgtcctaa

SEQ ID NO: 119625 - protein, 336 aa, Spiroplasma citri
MMKKTQKNITIIGTGAYGTVLANVLTDNDHNVIMYGINNKEVDDINNAHLNRHFFGNLKINKEIKATTNFAEAVEDAEYIILGIPVVAIKLIIEKINKTVTKPVVIINVAKGLDPDTHEVLSKSIIKLMNPKILKEYAGIYGPSIAKEVLQRKPTCIMAVSQDFAIAQEVRELFNNEYFVTFANTDVIGTEYAVALKNALAIASGIFNGLYESDNAKASLITMGLNEIQLFAKTKGAQIETFFNFAGLADLILTATSSKSRNYSLGFEIAQVDNAQKVLSEQVKTVEGVLTCKTIVLDARANNITLPLFEALYDILYHNKRPSVIINNVFTKAILS

SEQ ID NO: 119626 - DNA, 1164 bp, Saccharomycopsis fibuligera
  CDS (1)..(1164)
atgtctggtgctgctaaacgcctttctcaagttagtggaattttgaacccaggtgccacttctgaagatacaaccttgattgttcctgtgaaaccattcaagatcagtgttattggctctggcaattggggtaccactattgccaaagtggttgctgaatctactggcgaaaatcctgaccttttccaaaaagatgttcacatgtgggtatttcaagaaaaaatcgatggcgaaaacttgactgatattatcaacacaaagcatgaaaatgtcaagtacttacccgatgtcaaattgccagagaatgtgattgctgaaccggatattactaaaactgttatcaattcagacttgattattttcaatattccccaccagtttttgggtaatgtgtgcaagcaattgaaaggccatgttccaacaaccgctagagccgtttcttgtttgaaaggtcttgatgttacccctcaaggctgtaacttgttgtcttcttacatcactgaaaatttgggcatctactgtggcgctttatctggcgctaacttggctccagaagtcgctaatcaaaaatggtcagaaaccactattgcttacaatgagccagatgatttcagaggccaaggtaaagatattgacaaggctattcttaaaaaacttttccacagaccatacttccatgttagagttattgctgatgtgccaggtgtttcagtggctggtgctttgaaaaacgttgttgctatggctgctggttttgttgaaggtatgggatggggcgataatgccaaatctgccattatgagaattggtttggttgaaattgtcaaatttgctgacaaatattatccagaatcagattcaaaaacttttactgaggaaagcgctggcgttgctgacttgattactacttgctctggcggtagaaacgtcagagttggtaaatacatggctgaaaccggtaaggatgccactgaagcagaaaaagttttgttgaatggtcaatcttctcaaggtattgtcactactaaggaagtgcacgatttgttggaaaatgacaacgctactcatgaattcccattgtttgaagctacttatcaaatcatctataatggtttgccaatggataagttgccatctttgatagaatctattggtgataactga

SEQ ID NO: 119627 - protein, 387 aa, Saccharomycopsis fibuligera
MSGAAKRLSQVSGILNPGATSEDTTLIVPVKPFKISVIGSGNWGTTIAKVVAESTGENPDLFQKDVHMWVFQEKIDGENLTDIINTKHENVKYLPDVKLPENVIAEPDITKTVINSDLIIFNIPHQFLGNVCKQLKGHVPTTARAVSCLKGLDVTPQGCNLLSSYITENLGIYCGALSGANLAPEVANQKWSETTIAYNEPDDFRGQGKDIDKAILKKLFHRPYFHVRVIADVPGVSVAGALKNVVAMAAGFVEGMGWGDNAKSAIMRIGLVEIVKFADKYYPESDSKTFTEESAGVADLITTCSGGRNVRVGKYMAETGKDATEAEKVLLNGQSSQGIVTTKEVHDLLENDNATHEFPLFEATYQIIYNGLPMDKLPSLIESIGDN

SEQ ID NO: 119628 - DNA, 1164 bp, Saccharomycopsis fibuligera
  CDS (1)..(1164)
atgtctggtgctgctcaacgtctttctcaaattagtggtattttgaacccaggcactacttctgaaaacaccattttgattgttccagaaaagccattcaagatcagtgtcattggctctggtaactggggtactactattgctaaagtcattgctgaatctactggcgaaaacccagaacttttccaaaaagatgttcatatgtgggtcttccaagaaaaaattgatggtagaaacttaactgacattatcaatactgaacacgaaaatgtcgagtatttgccagaagtcaaattgccagaaaatgttattgctgaaccagatatcaccaaaaccgttgaaggttctgacttgattgtcttcaacattcctcatcaattcttgggtaatgtgtgcagacaattgaaaggtcatgttccaaccactgctagagctgtttcttgtttgaagggtctcgatgttactcctcaaggctgcaaattgttgtcttcttacatcactgaaaacttgggcatctactgtggtgctttatctggtgctaacttagctccagaagttgctagacaaaaatggtctgaaactactgttgcttataatgagccagctgatttcagaggtcaaggtaaagacattgacaaggctattcttaagaaagttttccacagaccatacttccacgtcagagttgttggtgatgtgccaggtgtttctttagctggtgctttgaagaatgttgttgccatggctgctggtttcgtggaaggtttaggttggggtgacaatgctaaatctgccattatgagaattggtttggtcgaaatcatcaaatttgctcaaaaatacttcccagaatctgacccaaagacttttactgaagaatccgctggtgttgccgacttgattaccacttgttctggcggtagaaatgttagagttggtaaatacatggctgaaacaggtaaagatgccgctgaagctgaaaaagttttgttgaatggtcaatcctctcaaggtattgttactactaaggaagtccatgacttgttggctaatgacaatgctactcaagattttccattgtttgaggctacttaccaaatcatctacaatggcttgccaatgggtaagttgccatctttgttggaatctgctggtgacaactaa

SEQ ID NO: 119629 - protein, 387 aa, Saccharomycopsis fibuligera
MSGAAQRLSQISGILNPGTTSENTILIVPEKPFKISVIGSGNWGTTIAKVIAESTGENPELFQKDVHMWVFQEKIDGRNLTDIINTEHENVEYLPEVKLPENVIAEPDITKTVEGSDLIVFNIPHQFLGNVCRQLKGHVPTTARAVSCLKGLDVTPQGCKLLSSYITENLGIYCGALSGANLAPEVARQKWSETTVAYNEPADFRGQGKDIDKAILKKVFHRPYFHVRVVGDVPGVSLAGALKNVVAMAAGFVEGLGWGDNAKSAIMRIGLVEIIKFAQKYFPESDPKTFTEESAGVADLITTCSGGRNVRVGKYMAETGKDAAEAEKVLLNGQSSQGIVTTKEVHDLLANDNATQDFPLFEATYQIIYNGLPMGKLPSLLESAGDN

SEQ ID NO: 119630 - DNA, 1053 bp, Drosophila americana; identical to SEQ ID NO: 58895
  CDS (1)..(1053)

SEQ ID NO: 119631 - protein, 350 aa, Drosophila americana; identical to SEQ ID NO: 58896

SEQ ID NO: 119632 - DNA, 1083 bp, Drosophila novamexicana; identical to SEQ ID NO: 58897
  CDS (1)..(1083)

SEQ ID NO: 119633 - protein, 360 aa, Drosophila novamexicana; identical to SEQ ID NO: 58898

SEQ ID NO: 119634 - DNA, 1230 bp, Aspergillus oryzae
  CDS (1)..(1230)
atgccacagcaaaagaaacaacacaccgtagccgttatcggctccggaaactggggctcaacaattgccaaaatcctcgccgaaaatacagcctcacaccccgaactcttcaccccgaaggtccaaatgtgggtattcgaagaacagattcagatcccgtccgactccccccaccactctaaatacggcgacaagccccagaaccttaccgaggtgatcaacgccgtacacgagaacgtgaagtacctaccggggatccgactcccagagaacgtggttgcgaacccgaacctcgaggacgtggtgaaagatgcaacgatcctggtcttcaacctcccgcatcagtttatcgagaagacactggatcagattaaggggaagcacttgccgtacgcgagggcgatatcgtgcgtgaagggcgtagatgtgacggatgggatggtgacgttgttttcagagctgattatggagaagctggcgatttattgtgggtcgttgtctggggcaaatattgcgccggaggttgcggcggagaagttcagtgagacgactattggatatgatacgccgccgatggatgtcaaagccgaggatggaagtccggaggacaataagattaagattgatgagcagaggcaggtgaaaacgaggccgacgcatacaaagttgacgcgggtgccgcaggagcttgtgacggttgatgcggagctgtggcggacgttgtttggacgaccgtatttccatgtcaatgtggtggatgatgtcgcgggcgttgcgctgagcggtgcgctgaaaaatatcgtggcattggcggcaggtttcgtcgccgggaaaggatggggagaaaatggcaaagcggcagtcattcgggttggggtggtggagatggtgaagtttggacggacttggttcccacagtctgtcaatgagaggacgtttacggaggaaagtgcgggcattgctgatctggtcgcatcttgttctgctggaaggaacttccggtctgcgaagcatgccgtggagaagggggtgaatgtagatgagattgaaaagactgagatgaacgggcagaagttgcagggaacgtcaacggcgaagtccgttcacgaattccttgagaagcatgggaaagtgcaggacttccccttgttcgatgctgtatatggcattctcgaaggcaagaccagcgtggacagtttgccaaagttgctggacaagaggttcggttag

SEQ ID NO: 119635 - protein, 409 aa, Aspergillus oryzae
MPQQKKQHTVAVIGSGNWGSTIAKILAENTASHPELFTPKVQMWVFEEQIQIPSDSPHHSKYGDKPQNLTEVINAVHENVKYLPGIRLPENVVANPNLEDVVKDATILVFNLPHQFIEKTLDQIKGKHLPYARAISCVKGVDVTDGMVTLFSELIMEKLAIYCGSLSGANIAPEVAAEKFSETTIGYDTPPMDVKAEDGSPEDNKIKIDEQRQVKTRPTHTKLTRVPQELVTVDAELWRTLFGRPYFHVNVVDDVAGVALSGALKNIVALAAGFVAGKGWGENGKAAVIRVGVVEMVKFGRTWFPQSVNERTFTEESAGIADLVASCSAGRNFRSAKHAVEKGVNVDEIEKTEMNGQKLQGTSTAKSVHEFLEKHGKVQDFPLFDAVYGILEGKTSVDSLPKLLDKRFG

SEQ ID NO: 119636 - DNA, 1482 bp, Aspergillus oryzae
  CDS (1)..(1482)
atgctgtccccaatacatcttctatctcgccggacttgccttcgttcaattgccactgcgattgatcaacctcggttcccggttttcctccagcaacagtcactctccactccattttcgtcgtctctagtctactcaaaggctttaaagttccccagaccaacctcaactcgactcatttcttgttcattttcacgtctatatacaacatctgtgaacgaccttgccaaaatgagttcccttaccccctaccagcgcaaacacaaggtcacggtgatcggctcaggaaactggggcaccgctattgccaagattgtcgctgaaaataccgctagcaaccctgccatcttcgaaaaggatgttcaaatgtgggtttttgaagagaacgtggaagttccaaagacctcccctcactataacccatcttcgcccttatgccagggtccccagaagttaacagagataatcaataagacacatgagaatgtcaagtatttgccaggaatcaaccttcctacaaatttgcacgccaatccctcattggaggactccgttaaggacagcactatccttgttttcaatttgcctcatcagttcattatcaagacttgtgagcagatcaagggcaagattctgccatatgcgcgtggtatttcttgcatcaagggtgtcgatgtgcgggaagatggaatcagtcttttctcagaaaccatcggcaagattcttgggatctactgtggcgccctctccggtgcaaacatcgccagcgaggttgcccaggagaagtggtctgagtcaagcattgcttacgatcctccccatctagattcgaaagccccctcgcccaatcgctcgccttcctcatcgacggtggatgtggttcacttcacgcataaggacgtttcgggacaactatctcgggttaaactgcaggcgttgccctccgagtatcctcccattgaccatgctgtcctgaagacgcttttccatcgtccctacttccatatcagtgtggtgagtgatgttgcaggcgtttcccttggcggtgcgctcaaaaatgtcgtcgctattgccgcaggttgggttgaaggcatgggatggggtgacaacgccaaagctgccgtcatgcgagtcgggctgttggagatggtcaagttcggtgaaatgttcttcggtgcgaccatcaacactcggacgttcacagaggaaagtgccggtgttgccgacttgatcactagctgcagtggtggtcgcaacttccgttgtgccaagctgagcattgaaagaaagcagccgatcggaaaggtcgaagagacggagctcaatggtcagaagctccagggcactttgactgcgattgaagtaaacaaattcttgaagaaccaaggcgttgaagaagaataccccttgttgacggccgtctataaaatcctagaaggcactatgtctgttgaggatatcccttcttatattgagcggtaa

SEQ ID NO: 119637 - protein, 493 aa, Aspergillus oryzae
MLSPIHLLSRRTCLRSIATAIDQPRFPVFLQQQSLSTPFSSSLVYSKALKFPRPTSTRLISCSFSRLYTTSVNDLAKMSSLTPYQRKHKVTVIGSGNWGTAIAKIVAENTASNPAIFEKDVQMWVFEENVEVPKTSPHYNPSSPLCQGPQKLTEIINKTHENVKYLPGINLPTNLHANPSLEDSVKDSTILVFNLPHQFIIKTCEQIKGKILPYARGISCIKGVDVREDGISLFSETIGKILGIYCGALSGANIASEVAQEKWSESSIAYDPPHLDSKAPSPNRSPSSSTVDVVHFTHKDVSGQLSRVKLQALPSEYPPIDHAVLKTLFHRPYFHISVVSDVAGVSLGGALKNVVAIAAGWVEGMGWGDNAKAAVMRVGLLEMVKFGEMFFGATINTRTFTEESAGVADLITSCSGGRNFRCAKLSIERKQPIGKVEETELNGQKLQGTLTAIEVNKFLKNQGVEEEYPLLTAVYKILEGTMSVEDIPSYIER

SEQ ID NO: 119638 - DNA, 1065 bp, Lysiphlebus testaceipes
  CDS (1)..(1065)
atgagtacaaagaaaaaagtttgcatcgttggtagcggcaattggggttcagcaattgcaaaaattgttggtgttaatacagccaagtttaatgataaatttgaagaacgtgtaaccatgtatgtttatgaagagatgattaatggtaaaaaattgactgaaattattaatgaacagcatgaaaacgtcaaatatcttcctggacataaactccctgttaacatagttgcagttccagatattgttgaggcagcaaaagatgctgatatattaatttttgttattcctcatcaatttatcagaggtttagcagctgctatgttaggaaaaattaaaccaactgctgttggactttcacttattaagggttttgattctggagctgacaagagcatacagttgatatcaaaagttgtagaagatcatctcaaaattccatgcaatgttttaatgggtgcaaatcttgcaaatgaagttgcagaggaaaagttttgtgaaacaacaattggatgcaaagataaagctttgacttcagttttgagagatttaattcaaactccaaactttagagttgttgttgttgaagattgtgcagctgttgaagtttgtggagctttaaaaaatattgtagcttgtgcagctggttttgttgatggtttggctttgggtgacaacacaaaagcagctgttatcagattaggtctaatggaaatgatcaaatttgttgacacattttatggaggatcaaaactttcaacattttttgaaagttgtggtgttgctgatctaatcactacttgctatggtggtagaaaccgtcgtgtttgtgaacaatttattaagactggaaagacaattaaagaacttgaagatgaacttttaaatggacaaaaacttcaaggacctgctacagcagatgaagttcatgaaatgttaaaatctaaaaatttaactgacaaatttccactgtttactgcagtacatcgtatttgcacaaaagaactcaaaggaactgatcttattgatcaaattagaaatcatcctgagcatgcattgaaaatttaa

SEQ ID NO: 119639 - protein, 354 aa, Lysiphlebus testaceipes
MSTKKKVCIVGSGNWGSAIAKIVGVNTAKFNDKFEERVTMYVYEEMINGKKLTEIINEQHENVKYLPGHKLPVNIVAVPDIVEAAKDADILIFVIPHQFIRGLAAAMLGKIKPTAVGLSLIKGFDSGADKSIQLISKVVEDHLKIPCNVLMGANLANEVAEEKFCETTIGCKDKALTSVLRDLIQTPNFRVVVVEDCAAVEVCGALKNIVACAAGFVDGLALGDNTKAAVIRLGLMEMIKFVDTFYGGSKLSTFFESCGVADLITTCYGGRNRRVCEQFIKTGKTIKELEDELLNGQKLQGPATADEVHEMLKSKNLTDKFPLFTAVHRICTKELKGTDLIDQIRNHPEHALKI

SEQ ID NO: 119640 - DNA, 2106 bp, Dunaliella salina
  CDS (1)..(2106)
atgcttctccagaaaggaaacattggcaaggggatcgcccagcctgtgcagcgccgaggagtgccctcagccttgcgccacgccccgcttgcgaacaaggtcgccaccccagcggtcgctccccaaggcctcttgaggcctatcctgagtgaaaggggcagcccagcgttgctgaagcgccaacgggcgctggatgtcgtgttgcgcgctgcggagaccgagcaggaggcggagaatgccggcacggtggtgcccggggatgggtgggagagcttccccccgcccccgtacgagccctctgagcaggtcctcgacctgtggcagcaggcggatgccgtgtgtttcgatgtggaccgcaccgtgacaactgacgcctcagttggcctgctggccaagttcatgggcatcgaggatgaggcacagtccctgacggagcaggccaacaggggcgagatcaacctcaccaaggcctttgaggatcgcctggccaaactgaacttcacccccacagacattgaccgattccttgaggagcaccctgctcacacccgcctggttccgggtgtggagaacctcattgcagccctgaaggctcgtggagtggaggtgttcctcatctctggcggcttcagggagatggccctgcccattgcttcccacctcaagatccctgcaaagaacgtgttctgcaacaccatgtcctggcagctggacgaccatggtgagcccgtccgcctgcagggcctggacatgacccgcgccgcagagagccacttcaaatcgcgcgctattgagcgcattaggaggaagtacccctacaacaacatcatcatggttggagatggcttcagtgacctggaggccatgcagggctcccccgatggagcagatgccttcatctgcttcggtggcgtcatgcaacgacctgccgtggccagccaggccgactggtttgtgcgctcatacgatgagctgatggccaagctgaagcgctacaaggtgaccatggtgggctccggggcctgggcctgcacagccgtgcgcatggtggcccagagcacagcagaggccgcccagctgccaggctccgtgttcgagaaggaggtgaccatgtgggtgcacgaggagaagcactccggccgcaacctgatcgagtacatcaacgagaaccatgagaaccccatctacttgcctggcattgacctgggcgagaacgtcaaggccacctccgatttgatcgaggcggtccgtggcgctgatgccctcatcttctgcgcaccccatcaattcatgcatggcatttgcaagcagctggctgctgcgcgcgtcgtcggccgcggcgtgaaggccatcagcttgaccaagggcatgcgtgtgcgtgctgagggcccgcagctcattagccagatggtgtcccgtatcctgggcatcgactgctcagtgctcatgggtgctaacattgctggcgacattgccaaggaggagctgtctgaggctgtgattgcctatgccaaccgcgagtctggcagcctgtggcagcagctgttccagcgcccctacttcgccattaacctgcttgcggatgtgccgggcgctgagatgtgcggtaccctgaagaacatcgtggctgtgggcgcaggcattggtgacggcctgggcgtaggccccaacagtaaagcctccatcctgcgacaaggcctgagtgagatgaggaagttctgcaagttcatctccccctcagtgcgcgatgacaccttcttcgagtcctgcggtgtagctgatttgattgccagcagctatggcggccgcaacaggcgcgtggctgaggcctgggcccagaagaggatcgctggtgatgaccaggtcacgttcgagaagcttgagaaggagatgctgaacggccagaagctgcagggtgtgctaacaagcgacgaggtccaagaaatcctgcacgcacgtggctgggagctggaattccccttgttcaccaccatcaacagaatcatccatggcgaggtcccaccaaccatgatcttgaggtaccgcgtggcctgctccatgcccagcatgcctccagctcgccgtgtagtgaacgactactactaa

SEQ ID NO: 119641 - protein, 701 aa, Dunaliella salina
MLLQKGNIGKGIAQPVQRRGVPSALRHAPLANKVATPAVAPQGLLRPILSERGSPALLKRQRALDVVLRAAETEQEAENAGTVVPGDGWESFPPPPYEPSEQVLDLWQQADAVCFDVDRTVTTDASVGLLAKFMGIEDEAQSLTEQANRGEINLTKAFEDRLAKLNFTPTDIDRFLEEHPAHTRLVPGVENLIAALKARGVEVFLISGGFREMALPIASHLKIPAKNVFCNTMSWQLDDHGEPVRLQGLDMTRAAESHFKSRAIERIRRKYPYNNIIMVGDGFSDLEAMQGSPDGADAFICFGGVMQRPAVASQADWFVRSYDELMAKLKRYKVTMVGSGAWACTAVRMVAQSTAEAAQLPGSVFEKEVTMWVHEEKHSGRNLIEYINENHENPIYLPGIDLGENVKATSDLIEAVRGADALIFCAPHQFMHGICKQLAAARVVGRGVKAISLTKGMRVRAEGPQLISQMVSRILGIDCSVLMGANIAGDIAKEELSEAVIAYANRESGSLWQQLFQRPYFAINLLADVPGAEMCGTLKNIVAVGAGIGDGLGVGPNSKASILRQGLSEMRKFCKFISPSVRDDTFFESCGVADLIASSYGGRNRRVAEAWAQKRIAGDDQVTFEKLEKEMLNGQKLQGVLTSDEVQEILHARGWELEFPLFTTINRIIHGEVPPTMILRYRVACSMPSMPPARRVVNDYY

SEQ ID NO: 119642 - DNA, 1041 bp, Leuconostoc mesenteroides
  CDS (1)..(1041): transl_table=11
atgaaaaaattgatgcaggggacgaaaaaaatgactaaaatagccgtattgggcggtggctcttggggcactgcgttggcaaacgttgctgcagaaaataataatgatgtgcgtctgtggacacgtactgcgacacaagcggatgaaataaacagtcaacataccaaccaaaagtatttgccagacgcaaagttatcatctgagttaatggcaaccagtaacatggccttggcagtgatggatgctgaaattgttttgacagttgttcctactaaagttgtacgagaagttgcacgtcagctagctgacgtgttaaataagcaagatcaccaggtgattttggcgcatgctactaaaggactagagcaagtaacctataagcgtgtgtcggaaatgcttgccgaagaagtacctgcaaagtaccgttccacgttggcaatgatttctggcccatcgcatgcagaagatgttatcaagcatgacttgacatctgtatcgattgcttctgaaaatgaagaggctgccaaattactacagcaggtatttgccaatagttcatttagaccttatacgaatcatgatttgttaggatcagaattggcagcggctttaaagaatattatcgccatcggatcaggtgcgttaataggattaggttatggcgctaatgcacaggctgctttgctgacacgtggtttatcggaaatgcgctccctaggtcaagcaatgggcgcccaaccagaaacgtttttaggacttgcagtcattggtgatttgatttttactggcatgtcaccaaactccagaaattaccgtgctgggaaacagttaggtgaaggaaagagtttgcaagagattcaagatgacatgggcatggttattgagggtgttagcactacaaaagcagtatatgaattttcgcaacatcatcatgtggaaatgcctataacagccggtatttatcgcatattatatgaaaatgagccattacgcgatgtaattagcgacctaatgagtcgtccgttgcgcagtgaagattag

SEQ ID NO: 119643 - protein, 346 aa, Leuconostoc mesenteroides
MKKLMQGTKKMTKIAVLGGGSWGTALANVAAENNNDVRLWTRTATQADEINSQHTNQKYLPDAKLSSELMATSNMALAVMDAEIVLTVVPTKVVREVARQLADVLNKQDHQVILAHATKGLEQVTYKRVSEMLAEEVPAKYRSTLAMISGPSHAEDVIKHDLTSVSIASENEEAAKLLQQVFANSSFRPYTNHDLLGSELAAALKNIIAIGSGALIGLGYGANAQAALLTRGLSEMRSLGQAMGAQPETFLGLAVIGDLIFTGMSPNSRNYRAGKQLGEGKSLQEIQDDMGMVIEGVSTTKAVYEFSQHHHVEMPITAGIYRILYENEPLRDVISDLMSRPLRSED

SEQ ID NO: 119644 - DNA, 1062 bp, Bombyx mori
  CDS (1)..(1062)
atggcagataaacagccaaagaacaaagtttgcatcgttggatcgggaaactggggttctgctattgcgaaaattgttggtcgaaatgctgcgagtctatcaaattttgaggatagagttacaatgtgggtgtatgaagaaataattgaaggaaagaagttaactgaaataatcaatgaaactcatgaaaatgttaaatacctgcctggccacaaattgccttctaatgttgttgctgttccagatgtagttgaagctgcaaaagatgctgatcttttaatatttgtggtgcctcatcaatttgtcagaactatctgctctactttgcttggaaaaataaagccaactgcagctgctctgtctttgattaagggatttgatatagccgaaggtggtggcatcgatcttatatcacatattattacaagatgcctaaaaattccctgtgctgtattaatgggagccaatattgcatcggaggttgctgaggaaaaattctgcgaaacgaccattggttgtcgggacgtaatgctggctccgttaatgcgggatatcatacagacagactacttcagggtcgtggtggtggacgatgaggacgcagtcgaaatatgtggagcgttaaagaacattgtggcagtgggtgcgggtttcgtggatggcctcggctacggtgataacacaaaggctgctgtcatcagactcggtctcatggagatgatcaaattcgttgatgtgttctacccgggaagtaagctgagcacgttcttcgagtcatgcggtgtcgcagatttaataacgacctgctacgggggcagaaacagacgagttgccgaagcgtttgttaaaacgggacggtcaataaaagagctggaagacgaaatgcttaacggtcagaaactacaaggtcctatcaccgcggaggaagtaaaccatatgctcgctaataaaaatatggaaaacaagttccctttgttcactgcggtgttccgcatctgtcgcggagaactcaaaccgaacgactttattgattgcattcgcagtcacccggaacacatgtaa

SEQ ID NO: 119645 - protein, 353 aa, Bombyx mori
MADKQPKNKVCIVGSGNWGSAIAKIVGRNAASLSNFEDRVTMWVYEEIIEGKKLTEIINETHENVKYLPGHKLPSNVVAVPDVVEAAKDADLLIFVVPHQFVRTICSTLLGKIKPTAAALSLIKGFDIAEGGGIDLISHIITRCLKIPCAVLMGANIASEVAEEKFCETTIGCRDVMLAPLMRDIIQTDYFRVVVVDDEDAVEICGALKNIVAVGAGFVDGLGYGDNTKAAVIRLGLMEMIKFVDVFYPGSKLSTFFESCGVADLITTCYGGRNRRVAEAFVKTGRSIKELEDEMLNGQKLQGPITAEEVNHMLANKNMENKFPLFTAVFRICRGELKPNDFIDCIRSHPEHM

SEQ ID NO: 119646 - DNA, 1065 bp, Ctenolepisma longicaudata
  CDS (1)..(1065)
atggccgagagtaaacgagtttgtatcgtaggatccggcaattggggttccgccatcgctaaaatagtggggaaaaatgcgaaagagtttcctcatttcgaagaacgtgttaccatgtatgtttatgaggaaatggtagatggtaaaaaactaacagaaattatcaatgaaacacatgaaaatgtaaggtatttaccaggtcacaagttgccacctaatgtggtggctgtacctgatgtggtggaggcagctaaagacgcggatatccttatatttgttgttcctcatcaatttattaaaactctttgtaagcagatggcagggaaaattaaagcaactgctgttggtatttcacttatcaagggatttgacatagcagaaggaggcggaatagaactaatttctcatataattaacaaactacttaatattcctgttagtgttttaatgggtgccaacctcgcacatgaggtcgcggatgaaaaattctgtgaaactacgatagggtgtcgagacaaggctctgggtcctatatttcgagatctcatccagactgactattttcgtgtagttgtggttgacgatgtggaagctgtagaaatgtgtggtgcacttaagaatatagtagcctgtggtgctggctttgtagatggcatggacagtggagacaatactaaggcagctgtaattcgcttggggcttatggagatgataaagtttggtcaagtattttatcctggtacaaagcttagcacgttctttgaaagttgtggtgttgcagatctcatcacgtcctgttatggtggtaggaacagaagagtctcagaagcattcgttaaggcaaataagacaattaaagaattagaagccgaaatgctaaatgggcagaaacttcagggaccaatcacagctgaagaagtgaaccacatgctcaaagccaaaggaatggaagatagatttcctttattcactgccattcacaagatctgcacaggcgaaattcaaccgaagaaccttgtggattgtattcgccatcatccagaacacattaagtgtaagctctga

SEQ ID NO: 119647 - protein, 354 aa, Ctenolepisma longicaudata
MAESKRVCIVGSGNWGSAIAKIVGKNAKEFPHFEERVTMYVYEEMVDGKKLTEIINETHENVRYLPGHKLPPNVVAVPDVVEAAKDADILIFVVPHQFIKTLCKQMAGKIKATAVGISLIKGFDIAEGGGIELISHIINKLLNIPVSVLMGANLAHEVADEKFCETTIGCRDKALGPIFRDLIQTDYFRVVVVDDVEAVEMCGALKNIVACGAGFVDGMDSGDNTKAAVIRLGLMEMIKFGQVFYPGTKLSTFFESCGVADLITSCYGGRNRRVSEAFVKANKTIKELEAEMLNGQKLQGPITAEEVNHMLKAKGMEDRFPLFTAIHKICTGEIQPKNLVDCIRHHPEHIKCKL

SEQ ID NO: 119648 - DNA, 1110 bp, Debaryomyces hansenii
  CDS (1)..(1110)
atgacttctacaccatttaatattgaaaaaccattcagagttgccatcattggatccggtaactggggtactgctgttgctaagatcgtatctgaaaacacggctgaaaaaccagaagtgttcgaaaagcaagtgaacatgtgggtttttgaagaagaagttgacggacaaaagttgactgaaatcatcaacaccaaacacgaaaacgttaagtacttgccagaagtcaagttgccggaaaacttggttgcaaacccagacgttgttgacactgtcaaggatgcagacttattaattttcaacattccacatcaattcttaccaagagtgtgtaagcaattggttggccatgtcaagccatctgccagagccatctcctgtttgaagggtttggaagttggcccagaaggttgtaagttgttatcgcaatctatcaacgatactttaggtgtccactgtggtgtcttatctggtgccaacattgccaacgaagttgccagagaaagatggtctgaaaccaccattgcctacaacattccagaagatttcagaggtaagggtagagatatcgacgaatacgtcttaaagcaattattccacagaacctacttccatgtcagagtcatcaatgacatcataggtgcttctttcgctggtgctttgaagaatgttgttgcctgtgctgttggtttcgttatcggtgccggctggggtgacaacgctaaggccgctatcatgagaatcggtatcagagaaatcatccactttgcctcttactaccaaaagttcggtgtcaagggtccagctccagaatccactactttcactgaggaatctgccggtgtcgctgacttaatcaccacttgttccggtggtagaaatgtcaaggttgctagatacatgattgaaaacaacgttgacgcttgggaagccgaaaagattgtcttaaagggtcaatcttctcaaggtatcttaactgccaaggaagtccacgaattgttaaccaactacaacttatcgaatgaattcccattattcgaagctacatacagaatcatttatgaaaatgccgatgtcaacgaattcccagtcatcttagaaagagattag

SEQ ID NO: 119649 - protein, 369 aa, Debaryomyces hansenii
MTSTPFNIEKPFRVAIIGSGNWGTAVAKIVSENTAEKPEVFEKQVNMWVFEEEVDGQKLTEIINTKHENVKYLPEVKLPENLVANPDVVDTVKDADLLIFNIPHQFLPRVCKQLVGHVKPSARAISCLKGLEVGPEGCKLLSQSINDTLGVHCGVLSGANIANEVARERWSETTIAYNIPEDFRGKGRDIDEYVLKQLFHRTYFHVRVINDIIGASFAGALKNVVACAVGFVIGAGWGDNAKAAIMRIGIREIIHFASYYQKFGVKGPAPESTTFTEESAGVADLITTCSGGRNVKVARYMIENNVDAWEAEKIVLKGQSSQGILTAKEVHELLTNYNLSNEFPLFEATYRIIYENADVNEFPVILERD

SEQ ID NO: 119650 - DNA, 1062 bp, Drosophila novamexicana
  CDS (1)..(1062)
atggcggaaaaagtaaatgtttgcatcgtgggctctggcaactggggttcggccatagcgaaaatcgtgggcgccaatgcggccgcgctgcccgagtttgaggagcgcgtcacaatgtttgtctacgaggagatgattgatggcaagaagttaacggaaattatcaatgaaacgcacgagaatgttaaatacctgaagggacacaaactgccaacaaatgtggctgccgtacctgatctggttgaggctgccaagaatgccgatatactgatctttgtggtgccacatcagttcataccaaatttctgcaaacaattgctgggcaagatcaagccaaatgccattgccatatccctgatcaagggcttcgataaggccgagggcggcggcattgatctgatatcgcacattattacccgccatttgaagataccatgcgccgtgctgatgggcgctaatctggccaacgaggtggccgagggcaacttttgcgagacgacaatcggctgcacggacaaaaagtacggcaaggtgctgcgtgatctcttccaggccaatcattttcgtgtcgtggtcgttgaggatgccgatgccgttgaggtttgcggtgccctgaagaacattgttgcctgtggtgcgggctttgtcgatggtctcaagctgggcgataatactaaggcagcggtcattcgtttgggtcttatggaaatgatacgctttgtcgatgtcttctatccgggcagcaaactgtccacattctttgagagctgcggtgttgcggatctcatcacgacgtgttacggtggccgcaatcgtcgtgtctccgaggcttttgtcacatctggcaagacaattgaggatctggagaaggagatgctcaatggccagaaattgcagggcccgcccactgccgaggaggttaactatatgttgaaaaacaaaggcctggaggataaattcccattgttcaccgccatacacaaaatttgcacaaatcagcttaagcctaaagatttaatcgattgcatacgcaatcatcccgagcatatgcaaactttgtaa

SEQ ID NO: 119651 - protein, 353 aa, Drosophila novamexicana
MAEKVNVCIVGSGNWGSAIAKIVGANAAALPEFEERVTMFVYEEMIDGKKLTEIINETHENVKYLKGHKLPTNVAAVPDLVEAAKNADILIFVVPHQFIPNFCKQLLGKIKPNAIAISLIKGFDKAEGGGIDLISHIITRHLKIPCAVLMGANLANEVAEGNFCETTIGCTDKKYGKVLRDLFQANHFRVVVVEDADAVEVCGALKNIVACGAGFVDGLKLGDNTKAAVIRLGLMEMIRFVDVFYPGSKLSTFFESCGVADLITTCYGGRNRRVSEAFVTSGKTIEDLEKEMLNGQKLQGPPTAEEVNYMLKNKGLEDKFPLFTAIHKICTNQLKPKDLIDCIRNHPEHMQTL

SEQ ID NO: 119652 - DNA, 1053 bp, Drosophila novamexicana
  CDS (1)..(1053)
atggcggaaaaagtaaatgtttgcatcgtgggctctggcaactggggttcggccatagcgaaaatcgtgggcgccaatgcggccgcgctgcccgagtttgaggagcgcgtcacaatgtttgtctacgaggagatgattgatggcaagaagttaacggaaattatcaatgaaacgcacgagaatgttaaatacctgaagggacacaaactgccaacaaatgtggctgccgtacctgatctggttgaggctgccaagaatgccgatatactgatctttgtggtgccacatcagttcataccaaatttctgcaaacaattgctgggcaagatcaagccaaatgccattgccatatccctgatcaagggcttcgataaggccgagggcggcggcattgatctgatatcgcacattattacccgccatttgaagataccatgcgccgtgctgatgggcgctaatctggccaacgaggtggccgagggcaacttttgcgagacgacaatcggctgcacggacaaaaagtacggcaaggtgctgcgtgatctcttccaggccaatcattttcgtgtcgtggtcgttgaggatgccgatgccgttgaggtttgcggtgccctgaagaacattgttgcctgtggtgcgggctttgtcgatggtctcaagctgggcgataatactaaggcagcggtcattcgtttgggtcttatggaaatgatacgctttgtcgatgtcttctatccgggcagcaaactgtccacattctttgagagctgcggtgttgcggatctcatcacgacgtgttacggtggccgcaatcgtcgtgtctccgaggcttttgtcacatctggcaagacaattgaggatctggagaaggagatgctcaatggccagaaattgcagggcccgcccactgccgaggaggttaactatatgttgaaaaacaaaggcctggaggataaattcccattgttcaccgccatacacaaaatttgcacaaatcagcttaagcctaaagatttaatcgattgcatacgcaatcatcccgagcatatgtaa

SEQ ID NO: 119653 - protein, 350 aa, Drosophila novamexicana
MAEKVNVCIVGSGNWGSAIAKIVGANAAALPEFEERVTMFVYEEMIDGKKLTEIINETHENVKYLKGHKLPTNVAAVPDLVEAAKNADILIFVVPHQFIPNFCKQLLGKIKPNAIAISLIKGFDKAEGGGIDLISHIITRHLKIPCAVLMGANLANEVAEGNFCETTIGCTDKKYGKVLRDLFQANHFRVVVVEDADAVEVCGALKNIVACGAGFVDGLKLGDNTKAAVIRLGLMEMIRFVDVFYPGSKLSTFFESCGVADLITTCYGGRNRRVSEAFVTSGKTIEDLEKEMLNGQKLQGPPTAEEVNYMLKNKGLEDKFPLFTAIHKICTNQLKPKDLIDCIRNHPEHM

SEQ ID NO: 119654 - DNA, 1053 bp, Locusta migratoria; identical to SEQ ID NO: 58899
  CDS (1)..(1053)

SEQ ID NO: 119655 - protein, 350 aa, Locusta migratoria; identical to SEQ ID NO: 58900

SEQ ID NO: 119656 - DNA, 1062 bp, Drosophila borealis; identical to SEQ ID NO: 58901
  CDS (1)..(1062)

SEQ ID NO: 119657 - protein, 353 aa, Drosophila borealis; identical to SEQ ID NO: 58902

SEQ ID NO: 119658 - DNA, 1101 bp, Candida albicans
  CDS (1)..(1101): transl_table=12
atgactacatccccatatccaattgaaactccatttaaagtttgtattgtcggttccggtaactggggtactgcagttgcaaaattagttgctgaaaactgtgctgaaaaaccaaatattttccaaagagacgttaaaatgtgggttttcgaagaagaaattgaaggtagaaaattgacagaaataattaacaccgaacatgaaaatgttaaatacttgccagaaattaaattgccaactaacttggttgccaacccagacattgttgacactgttcaagatgccgacttgattgttttcaatattccacatcaattcttgggtagaattgtcaaacaaatcgaaggtaaagtgaaaccaactgctagagccatttcatgtttgaaaggtttggatgtgagtccagaaggttgcaaattgttgtcaacctctatcactgatactttgaagatttactgtggtgtcttatctggtgctaatattgccaacgaagttgccaaaggtaactggtcagaaacttccattgcctacactgttccagaagatttcagaggtgccggtaaagatattgatccatttattttgaaagaagctttccacagaccatacttccatgtcagagttattgaagatgttgttggtgcctctattgctggtgccttaaagaatgtcattgcctgttctgttggtttcgttgaaggtgctggctggggtgacaatgctaaagctgctattatgagaatcggtatcaaagaaaccatccgttttgcttcttactgggaattgttcaagatcaaggctttgtctccaccaaacccaaaaactttcaccgaagaaagtgctggtgttgctgatttgatcactacttgctcaggtggtagaaatgttaaagtcgccagatacatgattaaaaacaatgtcgatgcatttgaagctgaaaaaattgttttgaaaggacaaagttctcaaggtatcttgactgctaaagaagttcacgaattgttaacaaatttcaaccttcaagacgaattcccattactcgaagccacctataaagttatctacgagaatggtagtgttgatgatttccccaattattag

SEQ ID NO: 119659 - protein, 366 aa, Candida albicans
MTTSPYPIETPFKVCIVGSGNWGTAVAKLVAENCAEKPNIFQRDVKMWVFEEEIEGRKLTEIINTEHENVKYLPEIKLPTNLVANPDIVDTVQDADLIVFNIPHQFLGRIVKQIEGKVKPTARAISCLKGLDVSPEGCKLLSTSITDTLKIYCGVLSGANIANEVAKGNWSETSIAYTVPEDFRGAGKDIDPFILKEAFHRPYFHVRVIEDVVGASIAGALKNVIACSVGFVEGAGWGDNAKAAIMRIGIKETIRFASYWELFKIKALSPPNPKTFTEESAGVADLITTCSGGRNVKVARYMIKNNVDAFEAEKIVLKGQSSQGILTAKEVHELLTNFNLQDEFPLLEATYKVIYENGSVDDFPNY

SEQ ID NO: 119660 - DNA, 1077 bp, Drosophila melanogaster
  CDS (1)..(1077)
atggacaagataatgatttgcatcattgggtcgggaaactgggccactaccatagcccgcaatgtgggcagaaacgtgctgaattcgcagacactggacgaaaaggtgaccatgtacgtttatgaggaaattgttgaaggtcgcaagctcacggaaatcatcaacaccacccacataaattccaagtacatgccgaactttgaactgccgccaaatattgtggccgtggatgatatcgtgactacggctcgagatgcggacattataatattcgccattccgccgactttcgtgagtagctgctgcaagacgctgctcggaaaagtcaagcccacggcccacgccgtttccctgatcaaaggattcgagcgcggcgacgatggccagttcgtcctgatttcgcagattataatgcggcagctaaagattccctgctccgtcctggtcggctgtaacttggcccatgagctggcccacgaccactttgccgagggcacagttggctgtcgggatcagaagtattacagggtgctccacgacatattcaagtcgcccactttccgcgtggtggtcaccgaggatgccgactgtgtggagatctgttccactctaaggaacatcattgcctttgcggctggctgttccgacgggatggagctgaatgagaacaccaagggaggcatcatcaggagaggatttctggagatgcttcagttcgtcgatgtgttctatcccggctgccgcatgggaaccttttttgagtcgtgcggaatatccgatttggttactagttgttatgcaaaccgcaatcgcaagttggccgaagcttttgtgaagacgggcaaacccttgagcgaactggagcacattctcattccaggacacgagccactgggtccggtgacagcggagctggtgcatcatatgctcaagaagaagggcttggaggacaaattccccctctttacaactgtgtacagaatctgcactggagactatccactgcagcgtctggtcgaaactctgattaaggcacgcgaggatatatttcacccgctccatactttccaattgtga

SEQ ID NO: 119661 - protein, 358 aa, Drosophila melanogaster
MDKIMICIIGSGNWATTIARNVGRNVLNSQTLDEKVTMYVYEEIVEGRKLTEIINTTHINSKYMPNFELPPNIVAVDDIVTTARDADIIIFAIPPTFVSSCCKTLLGKVKPTAHAVSLIKGFERGDDGQFVLISQIIMRQLKIPCSVLVGCNLAHELAHDHFAEGTVGCRDQKYYRVLHDIFKSPTFRVVVTEDADCVEICSTLRNIIAFAAGCSDGMELNENTKGGIIRRGFLEMLQFVDVFYPGCRMGTFFESCGISDLVTSCYANRNRKLAEAFVKTGKPLSELEHILIPGHEPLGPVTAELVHHMLKKKGLEDKFPLFTTVYRICTGDYPLQRLVETLIKAREDIFHPLHTFQL

SEQ ID NO: 119662 - DNA, 1053 bp, Drosophila flavomontana; identical to SEQ ID NO: 58903
  CDS (1)..(1053)

SEQ ID NO: 119663 - protein, 350 aa, Drosophila flavomontana; identical to SEQ ID NO: 58904

SEQ ID NO: 119664 - DNA, 1062 bp, Drosophila ezoana; identical to SEQ ID NO: 58907
  CDS (1)..(1062)

SEQ ID NO: 119665 - protein, 353 aa, Drosophila ezoana; identical to SEQ ID NO: 58908

SEQ ID NO: 119666 - DNA, 1083 bp, Drosophila americana
  CDS (1)..(1083)
atggcggaaaaggtaaatgtttgcatcgtgggctctggcaactggggttcggccatagcgaaaatcgtgggcgccaatgcggccgcgctgcccgagtttgaggagcgcgtcacaatgtttgtctacgaggagatgattgatggcaagaagttaacggaaattatcaatgaaacgcacgagaatgttaaatacctgaagggacacaaactgccaacaaatgtggttgccgtacctgatctggttgaggctgccaagaatgccgatatactgatctttgtggtgccacatcagttcataccaaatttctgcaaacaattgctgggcaagatcaagccaaatgccattgccatatccctgatcaagggcttcgataaggccgagggcggcggcattgatctgatatcgcacattattacccgccatttgaagataccatgcgccgtgctgatgggcgctaatctggccaacgaggtggccgagggcaacttttgcgagacgacaatcggctgcacggacaaaaagtacggcaaggtgctgcgtgatctcttccaggccaatcattttcgtgtcgtggtcgttgaggatgccgaagccgttgaggtttgcggtgccctgaagaacattgttgcctgtggtgcgggctttgtcgatggtctcaagctgggcgataatactaaggcagcggtcattcgtttgggtcttatggaaatgatacgctttgtcgatgtcttctatccgggcagcaaattgtccacattctttgagagctgcggtgttgcggatctcatcacgacgtgttacggtggccgcaatcgtcgtgtctccgaggcttttgtcacatctggcaagacaattgaggatctggagaaggagatgctcaatggccagaaattgcagggcccgcccactgccgaggaggttaactatatgttgaaaaacaaaggcctggaggataaattcccattgttcaccgccatacacaaaatttgcacaaatcagcttaagcctaaagatttaatcgattgcatacgcaatcatcccgagcatatggatacgttcatcatgccgtcgccaaaactctaa

SEQ ID NO: 119667 - protein, 360 aa, Drosophila americana
MAEKVNVCIVGSGNWGSAIAKIVGANAAALPEFEERVTMFVYEEMIDGKKLTEIINETHENVKYLKGHKLPTNVVAVPDLVEAAKNADILIFVVPHQFIPNFCKQLLGKIKPNAIAISLIKGFDKAEGGGIDLISHIITRHLKIPCAVLMGANLANEVAEGNFCETTIGCTDKKYGKVLRDLFQANHFRVVVVEDAEAVEVCGALKNIVACGAGFVDGLKLGDNTKAAVIRLGLMEMIRFVDVFYPGSKLSTFFESCGVADLITTCYGGRNRRVSEAFVTSGKTIEDLEKEMLNGQKLQGPPTAEEVNYMLKNKGLEDKFPLFTAIHKICTNQLKPKDLIDCIRNHPEHMDTFIMPSPKL

SEQ ID NO: 119668 - DNA, 1062 bp, Drosophila americana; identical to SEQ ID NO: 58909
  CDS (1)..(1062)

SEQ ID NO: 119669 - protein, 353 aa, Drosophila americana; identical to SEQ ID NO: 58910

SEQ ID NO: 119670 - DNA, 1083 bp, Drosophila lummei; identical to SEQ ID NO: 58911
  CDS (1)..(1083)

SEQ ID NO: 119671 - protein, 360 aa, Drosophila lummei; identical to SEQ ID NO: 58912

SEQ ID NO: 119672 - DNA, 1203 bp, Candida glabrata; identical to SEQ ID NO: 58913
  CDS (1)..(1203)

SEQ ID NO: 119673 - protein, 400 aa, Candida glabrata; identical to SEQ ID NO: 58914

SEQ ID NO: 119674 - DNA, 1182 bp, Pichia jadinii; identical to SEQ ID NO: 58915
  CDS (1)..(1182)

SEQ ID NO: 119675 - protein, 393 aa, Pichia jadinii; identical to SEQ ID NO: 58916

SEQ ID NO: 119676 - DNA, 1158 bp, Schizosaccharomyces pombe
  CDS (1)..(1158)
atgtctggatatggtcaacaaggtgtttctgctgccaacatcgacagcatccgccccaagaaacgtttgtcaattggtgtagttggctccggtaactggggtactgccattgccaagatttgcggtgaaaatgcccgtgcccacggtcaccatttcagaagtaaggtccgcatgtgggtctttgaggaggagattgagtacaagggtgagaagagaaagctcaccgaagtattcaacgaagctcacgagaatgtcaaatacttacccggcatcgaatgccctcccaacgttattgccgtccccgatgttcgtgaggtcgctagacgtgccgacatccttgtctttgtcgttcctcatcaatttattgaacgcgtttgcgaccaaatggtcggtctcattcgccctggtgccgttggtatttcctgtatcaagggtgttgctgtcagcaaggaaggcgtccgcctttactctgaggttatcagcgagaaactcggtatttactgtggtgttctttctggtgctaacgttgcaaacgaagttgcccgtgagcaattctgtgagactactattggtttcaaccctcctaatgaagttgatatccctcgcgagcaaatcgccgccgtctttgatcgcccttacttctcagttgtctccgttgacgacgttgccggtgtcgccttgggtggtgctttgaagaacgtagttgccatggccgttggtttcgctgatggtttggaatggggcggtaataccaaggccgctattatgcgtcgtggtttgttggagatgcaaaagtttgctactaccttcttcgactctgatcctcgtaccatggttgagcaatcttgcggtatcgctgacttggtcacttcttgtttgggtggccgtaacaatcgttgtgctgaagcatttgtcaagactggtaaatctttagagacgcttgaaaaagagctcttaggtggtcaacttcttcaaggagctgccacttccaaggatgttcatgaattccttctcaccaaggatatggtcaaggatttccccttgttcactgccgtttataacatttcctatgaagacatggatcccaaggatttgatcatcgtccttcaaccccttaaggaggactctgagaacgagggcggtactgaaaccgagtaa

SEQ ID NO: 119677 - protein, 385 aa, Schizosaccharomyces pombe
MSGYGQQGVSAANIDSIRPKKRLSIGVVGSGNWGTAIAKICGENARAHGHHFRSKVRMWVFEEEIEYKGEKRKLTEVFNEAHENVKYLPGIECPPNVIAVPDVREVARRADILVFVVPHQFIERVCDQMVGLIRPGAVGISCIKGVAVSKEGVRLYSEVISEKLGIYCGVLSGANVANEVAREQFCETTIGFNPPNEVDIPREQIAAVFDRPYFSVVSVDDVAGVALGGALKNVVAMAVGFADGLEWGGNTKAAIMRRGLLEMQKFATTFFDSDPRTMVEQSCGIADLVTSCLGGRNNRCAEAFVKTGKSLETLEKELLGGQLLQGAATSKDVHEFLLTKDMVKDFPLFTAVYNISYEDMDPKDLIIVLQPLKEDSENEGGTETE

SEQ ID NO: 119678 - DNA, 1197 bp, Yarrowia lipolytica; identical to SEQ ID NO: 58917
  CDS (1)..(1197)

SEQ ID NO: 119679 - protein, 398 aa, Yarrowia lipolytica; identical to SEQ ID NO: 58918

SEQ ID NO: 119680 - DNA, 1206 bp, Zygosaccharomyces rouxii; identical to SEQ ID NO: 58919
  CDS (1)..(1206)

SEQ ID NO: 119681 - protein, 401 aa, Zygosaccharomyces rouxii; identical to SEQ ID NO: 58920

SEQ ID NO: 119682 - DNA, 1269 bp, Candida glabrata; identical to SEQ ID NO: 58921
  CDS (1)..(1269)

SEQ ID NO: 119683 - protein, 422 aa, Candida glabrata; identical to SEQ ID NO: 58922

SEQ ID NO: 119684 - DNA, 1185 bp, Pichia jadinii; identical to SEQ ID NO: 58923
  CDS (1)..(1185)

SEQ ID NO: 119685 - protein, 394 aa, Pichia jadinii; identical to SEQ ID NO: 58924

SEQ ID NO: 119686 - DNA, 1122 bp, Schizosaccharomyces pombe
  CDS (1)..(1122)
atgactgtggctgctttgaacaaactcagcgctctctccggaagtattcaaaaatctttttcacctaaacttatttctgttggtatcatcggatcaggaaattggggaaccgctattgctaaaatatgtggtgaaaatgccaaggctcatcctgatattttccatcctcaagtacacatgtggatgtatgaagagaagattcaacatgagggaaaagagtgcaatctcacggaagtttttaacactactcatgaaaacgttaaatatctcaaaggtatcaaatgcccttctaacgtcttcgcaaacccggacattcgtgatgtaggttcacgtagcgacattctggtatgggttctccctcaccagttcgttgtgcgtatttgcaatcaattgaagggatgcctaaagaaggatgctgttgcaatttcatgcatcaaaggtgtatctgtcaccaaggaccgtgttcgcctcttttctgatattatcgaagaaaacacgggaatgtattgtggcgttctctctggcgccaacattgccagcgaagttgctcaagagaagttttgcgaaactactatcggatatttgcctaatagttctgttaatccccgctatactcctaagactatccaagctttgtttaaccgtccctacttccgtgtcaacattgttgaggatgttcctggtgttgctttgggcggtgcactcaagaatatcgtcgctgtcgctgccggtattattgatggacttgaattgggagataataccaaatctgctgttatgcgcattggccttctggaaatgcagaaattcggcaggatgtttttcgattgtaagcctcttactatgagcgaggaatcttgtggcatagccgatttaattacaacttgcttaggcggccgtaaccacaaatgcgctgtggcatttgtcaagacaggaaagcccatgcatgttgttgaacaagaacttcttgatggtcagaagttgcaaggtgcagctaccgcgaaggaggtttatgagttccttgataaccagaataaggtaagcgaattcccattgtttacagctgtttatcgcattgtttatgagggacttccacctaataagcttctggaggctatttaa

SEQ ID NO: 119687 - protein, 373 aa, Schizosaccharomyces pombe
MTVAALNKLSALSGSIQKSFSPKLISVGIIGSGNWGTAIAKICGENAKAHPDIFHPQVHMWMYEEKIQHEGKECNLTEVFNTTHENVKYLKGIKCPSNVFANPDIRDVGSRSDILVWVLPHQFVVRICNQLKGCLKKDAVAISCIKGVSVTKDRVRLFSDIIEENTGMYCGVLSGANIASEVAQEKFCETTIGYLPNSSVNPRYTPKTIQALFNRPYFRVNIVEDVPGVALGGALKNIVAVAAGIIDGLELGDNTKSAVMRIGLLEMQKFGRMFFDCKPLTMSEESCGIADLITTCLGGRNHKCAVAFVKTGKPMHVVEQELLDGQKLQGAATAKEVYEFLDNQNKVSEFPLFTAVYRIVYEGLPPNKLLEAI

SEQ ID NO: 119688 - DNA, 1323 bp, Saccharomyces cerevisiae
  CDS (1)..(1323)
atgcttgctgtcagaagattaacaagatacacattccttaagcgaacgcatccggtgttatatactcgtcgtgcatataaaattttgccttcaagatctactttcctaagaagatcattattacaaacacaactgcactcaaagatgactgctcatactaatatcaaacagcacaaacactgtcatgaggaccatcctatcagaagatcggactctgccgtgtcaattgtacatttgaaacgtgcgcccttcaaggttacagtgattggttctggtaactgggggaccaccatcgccaaagtcattgcggaaaacacagaattgcattcccatatcttcgagccagaggtgagaatgtgggtttttgatgaaaagatcggcgacgaaaatctgacggatatcataaatacaagacaccagaacgttaaatatctacccaatattgacctgccccataatctagtggccgatcctgatcttttacactccatcaagggtgctgacatccttgttttcaacatccctcatcaatttttaccaaacatagtcaaacaattgcaaggccacgtggcccctcatgtaagggccatctcgtgtctaaaagggttcgagttgggctccaagggtgtgcaattgctatcctcctatgttactgatgagttaggaatccaatgtggcgcactatctggtgcaaacttggcaccggaagtggccaaggagcattggtccgaaaccaccgtggcttaccaactaccaaaggattatcaaggtgatggcaaggatgtagatcataagattttgaaattgctgttccacagaccttacttccacgtcaatgtcatcgatgatgttgctggtatatccattgccggtgccttgaagaacgtcgtggcacttgcatgtggtttcgtagaaggtatgggatggggtaacaatgcctccgcagccattcaaaggctgggtttaggtgaaattatcaagttcggtagaatgtttttcccagaatccaaagtcgagacctactatcaagaatccgctggtgttgcagatctgatcaccacctgctcaggcggtagaaacgtcaaggttgccacatacatggccaagaccggtaagtcagccttggaagcagaaaaggaattgcttaacggtcaatccgcccaagggataatcacatgcagagaagttcacgagtggctacaaacatgtgagttgacccaagaattcccattattcgaggcagtctaccagatagtctacaacaacgtccgcatggaagacctaccggagatgattgaagagctagacatcgatgacgaatag

SEQ ID NO: 119689 - protein, 440 aa, Saccharomyces cerevisiae
MLAVRRLTRYTFLKRTHPVLYTRRAYKILPSRSTFLRRSLLQTQLHSKMTAHTNIKQHKHCHEDHPIRRSDSAVSIVHLKRAPFKVTVIGSGNWGTTIAKVIAENTELHSHIFEPEVRMWVFDEKIGDENLTDIINTRHQNVKYLPNIDLPHNLVADPDLLHSIKGADILVFNIPHQFLPNIVKQLQGHVAPHVRAISCLKGFELGSKGVQLLSSYVTDELGIQCGALSGANLAPEVAKEHWSETTVAYQLPKDYQGDGKDVDHKILKLLFHRPYFHVNVIDDVAGISIAGALKNVVALACGFVEGMGWGNNASAAIQRLGLGEIIKFGRMFFPESKVETYYQESAGVADLITTCSGGRNVKVATYMAKTGKSALEAEKELLNGQSAQGIITCREVHEWLQTCELTQEFPLFEAVYQIVYNNVRMEDLPEMIEELDIDDE

SEQ ID NO: 119690 - DNA, 1170 bp, Zygosaccharomyces rouxii; identical to SEQ ID NO: 58925
  CDS (1)..(1170)

SEQ ID NO: 119691 - protein, 389 aa, Zygosaccharomyces rouxii; identical to SEQ ID NO: 58926

SEQ ID NO: 119692 - DNA, 1002 bp, Mycobacterium paratuberculosis; identical to SEQ ID NO: 58927
  CDS (1)..(1002): transl_table=11

SEQ ID NO: 119693 - protein, 333 aa, Mycobacterium paratuberculosis; identical to SEQ ID NO: 58928

SEQ ID NO: 119694 - DNA, 1008 bp, Rhodococcus sp
  CDS (1)..(1008): transl_table=11
atggcccgcccggtacgcgtcgtcgtgctcggcgccggctcgtgggggacaacggtggcaggtctcgccgcccacaacacaccgactctgctgtgggcgcggaactcggatacggccgacgagatcaacaacgagcaccgcaactcccgctacctcggcgaccgcccgctccccgactccatgcgctccacagccgacctggtcgaagcggcccacgaggccgacgttctcgtggtcggggtgccgtcgcacgcggtccgcagcaccctcgcccagatcgccaacgaggtgcgggcgtgggtgccggtgctgtctctggcgaaggggctggagccgggaacacggctgcgacccaccgaggtgatcgccgagtgcctgcccgggcatccggtcgggcttctcgcgggcccgaatattgcgcgggagatcgtggacggactggcggccgcgtcggtcgttgccacccaggacgtccgggtggccaccgccttgcagccgttgttcgcgtccgccgtgttccgggtgtaccggaacaccgatgtgctgggctgcgaactcggcggcgtgctgaagaacatcgtggccatcgcctcgggcatggccgacggactggacgtcggcgacaacacgcgcgcgatggtcctggcgcgagggttggccgagatgacccggctgggtgaggcgatgggcgcgaacccgcggacgttcgcgggactcaccggggtcggagacctgatcgccacctgtatgagcccgagttcgcgtaaccggcgggtgggcgagtacatcgcccgcggcatgacggtcgacgaggcggtcgccaagttggggcaggtggccgagggcgtgaagacggcccccaccgtgatggaactggcccgcgactacaacgtggagatgcccattgccgccgaggtcgaggcggtggtcgcgggtcggcagacgccggaaggcgcctatcgtggcctgcggaaagtcgctgccggcggagagcacgaggtggcgtga

SEQ ID NO: 119695 - protein, 335 aa, Rhodococcus sp
MARPVRVVVLGAGSWGTTVAGLAAHNTPTLLWARNSDTADEINNEHRNSRYLGDRPLPDSMRSTADLVEAAHEADVLVVGVPSHAVRSTLAQIANEVRAWVPVLSLAKGLEPGTRLRPTEVIAECLPGHPVGLLAGPNIAREIVDGLAAASVVATQDVRVATALQPLFASAVFRVYRNTDVLGCELGGVLKNIVAIASGMADGLDVGDNTRAMVLARGLAEMTRLGEAMGANPRTFAGLTGVGDLIATCMSPSSRNRRVGEYIARGMTVDEAVAKLGQVAEGVKTAPTVMELARDYNVEMPIAAEVEAVVAGRQTPEGAYRGLRKVAAGGEHEVA

SEQ ID NO: 119696 - DNA, 993 bp, Sphingopyxis alaskensis
  CDS (1)..(993): transl_table=11
atgacgtcgtatcgcaatttcggcattgtcggcggcggagcgtggggcaccgcgctggcgcagctcctcgccgccgatggcgcgccggtgcgcctgtgggcgcgcgaggccgatgtggtcgccgcgatcaatgccgagcatcgcaatccggtcttccttcccggcgcgccgctctcctcgtcgctcaccgccaccaccgatctggcggcgatgaccgatctcgacgcgctgctggtcgtcgtccccgtgccctatctgcgcgccgtgctcaccgaactgccgccgggcgacgcgccgctggtcttttgcagcaaggggatggaggcgggcagtttcgccttcccggtcgacatggcgcgcgacctggcgcccggtcgcccgcacgcggtgctgtcgggcccgacctttgcgcatgaagtcgccgccggcctgccgaccgcgatcacgctcgccgccgccgaccccgcgctcgccaccgagcttgcgcaggcgctcgcgcgcccgcatttccgcccctatgtgtcgaccgacgtgatcggcgccgaaatcggcggggcggtcaagaacatcctcgcgatcgcgtgcggcatcgtcgaaggggcgggactcgggctcaacgcgcgcgcggcgctgatcagccggggctttgccgaaatgacgcgcttcggcctgtcgcgcggggcaaaggccgaaacgctcgcgggtctcgccgggctcggcgacctcgtgctcacctgcacctccgccaattcgcgcaatttcgcgcttggtcagggactgggacgcggcgaggcgatcgagacgctgatggccgaccggcgcacgatcgccgagggcgcattcagcgccccggtcgtcgccgctgcggcgcgtgccgacggggtcgacatgccgatcaccgacaccgtcgcgcgcctcgtcgcgggcgagatgcgcgtcgccgacgccattcaggccctgctcagccgcccgctgcgacccgaagggcaatga

SEQ ID NO: 119697 - protein, 330 aa, Sphingopyxis alaskensis
MTSYRNFGIVGGGAWGTALAQLLAADGAPVRLWAREADVVAAINAEHRNPVFLPGAPLSSSLTATTDLAAMTDLDALLVVVPVPYLRAVLTELPPGDAPLVFCSKGMEAGSFAFPVDMARDLAPGRPHAVLSGPTFAHEVAAGLPTAITLAAADPALATELAQALARPHFRPYVSTDVIGAEIGGAVKNILAIACGIVEGAGLGLNARAALISRGFAEMTRFGLSRGAKAETLAGLAGLGDLVLTCTSANSRNFALGQGLGRGEAIETLMADRRTIAEGAFSAPVVAAAARADGVDMPITDTVARLVAGEMRVADAIQALLSRPLRPEGQ

SEQ ID NO: 119698 - DNA, 1026 bp, Mycobacterium bovis
  CDS (1)..(1026): transl_table=11
atggcagccaacaagcgcgaacccaaagtcgttgtcctcggcggcggttcctggggcaccaccgtcgcctccatctgtgcgcgccgcggaccaaccttgcagtgggtgcgctcggcggtcaccgcgcaggacatcaacgacaaccaccgcaatagccgatacctcggcaacgacgtggtgctcagcgacaccctgcgcgccaccacagacttcaccgaggccgccaactgcgccgacgtcgtcgtcatgggggtgccctcgcacggtttccgcggagtgcttgtcgagctgagcaaagagctgcgaccctgggtgccagtggtgtccctggtcaaggggctcgaacagggcaccaatatgcggatgtcgcagatcatcgaggaggtactgcccggtcatccggcaggcatcctggccggcccgaacatcgcccgcgaggtggccgagggctacgcggccgcggcggtgctggccatgcccgaccagcacctggcgacccggctatcagcaatgtttcgcacccggcgcttccgcgtgtacacaactgacgacgtcgtcggtgtcgagacggcgggcgccctcaagaacgtcttcgccatcgcggtcgggatgggctattcgctgggtatcggcgaaaacacccgcgccctggtgatcgcccgcgcgctgcgcgagatgacgaagctgggtgtggcaatgggtgggaaaagcgaaacgttccccggactggccggtctcggcgacctgatcgtcacctgcaccagccaacgcagccgcaaccggcatgtgggcgaacaactcggcgcaggcaagccgatcgacgaaatcatcgcatcgatgagccaggtcgccgagggcgtcaaagctgccggtgtggtgatggagttcgccaacgagttcgggctgaacatgccgatcgcccgcgaggtcgacgccgtcatcaaccatggttcgacggtggagcaggcgtatagaggcttgatcgccgaggtccccggacacgaggtgcacggctcggggttttag

SEQ ID NO: 119699 - protein, 341 aa, Mycobacterium bovis
MAANKREPKVVVLGGGSWGTTVASICARRGPTLQWVRSAVTAQDINDNHRNSRYLGNDVVLSDTLRATTDFTEAANCADVVVMGVPSHGFRGVLVELSKELRPWVPVVSLVKGLEQGTNMRMSQIIEEVLPGHPAGILAGPNIAREVAEGYAAAAVLAMPDQHLATRLSAMFRTRRFRVYTTDDVVGVETAGALKNVFAIAVGMGYSLGIGENTRALVIARALREMTKLGVAMGGKSETFPGLAGLGDLIVTCTSQRSRNRHVGEQLGAGKPIDEIIASMSQVAEGVKAAGVVMEFANEFGLNMPIAREVDAVINHGSTVEQAYRGLIAEVPGHEVHGSGF

SEQ ID NO: 119700 - DNA, 999 bp, Mycobacterium paratuberculosis
  CDS (1)..(999): transl_table=11
atggcagctcagatgcgtgaacccaaagtcgttgtgctcggaggcggctcctggggcaccaccgtggcgtcgatctgtgcgcgccgcgggccgacgctgcagtgggtgcgctcgcgggagaccgccgacgacatcaacgagaaccaccgcaacagccgctatctgggcaacgacgtggtgctgagcgacacgctgcgcgccaccaccgatttctgcgaggcggccaacaccgccgacgtggtggtgacgggagtcccctcgcacggctttcgcggggtgctcaccgaactggcgcgggaattgcggccgtgggtgccggtggtgtccttggtcaaagggctcgagcagggcaccaacatgcggatgtcgcagatcgtcgaggaggtgctgcccggtcatccggcgggcatcctggccgggccgaacatcgcgcgcgaggtggccgagggctacgccgccgcggcggtgctggcgatgcccgaccagcatctggcgacccggctgtccgggctgttccgcacccggcggttccgcgtctacaccaccgacgacgtcgtcggggcggagatggccggggcgctgaagaacgtgttcgccatcgccgtgggcatggggtattcgctgggcatcgcgctggtgatcgcccgcgcgctgcgcgagatgaccaagctgggggtggcgatgggcggcagccccgacaccttcccgggactggccggactcggcgacctcatcgtcacctgcaccagccagcgcagccgcaaccggcacgtcggcgaacaactgggcgccggcaaaccgatcgacgagatcatcgcgtcgatgaaccaggtcgccgagggcgtcaaagcggccagcgtgatcatggagttcggcctgaccatgccgatcgcccgcgaagtcgatgcggtgatcaaccacggctcgacggtcgagcaggcctatcgggggctgatcgccgaggttcccggccacgaggtgcacggctccggcttctga

SEQ ID NO: 119701 - protein, 332 aa, Mycobacterium paratuberculosis
MAAQMREPKVVVLGGGSWGTTVASICARRGPTLQWVRSRETADDINENHRNSRYLGNDVVLSDTLRATTDFCEAANTADVVVTGVPSHGFRGVLTELARELRPWVPVVSLVKGLEQGTNMRMSQIVEEVLPGHPAGILAGPNIAREVAEGYAAAAVLAMPDQHLATRLSGLFRTRRFRVYTTDDVVGAEMAGALKNVFAIAVGMGYSLGIALVIARALREMTKLGVAMGGSPDTFPGLAGLGDLIVTCTSQRSRNRHVGEQLGAGKPIDEIIASMNQVAEGVKAASVIMEFGLTMPIAREVDAVINHGSTVEQAYRGLIAEVPGHEVHGSGF

SEQ ID NO: 119702 - DNA, 1002 bp, Sphingopyxis alaskensis; identical to SEQ ID NO: 58929
  CDS (1)..(1002): transl_table=11

SEQ ID NO: 119703 - protein, 333 aa, Sphingopyxis alaskensis; identical to SEQ ID NO: 58930

SEQ ID NO: 119704 - DNA, 1074 bp, Acinetobacter sp
  CDS (1)..(1074): transl_table=11
atgaccgatttaaaatttactgatctcgttgaacctgtcgtaattgataaaaagacagcattgcgtgttactgtgctgggcggtggtagttttggcactgctatggctaatctggcaacacgtaatggttgtaataccatgatctggatacgtgatcagaaaatggcagacgaaattaatcaaacgcattttaatcagcgctatttacccgattttaatttagagccagaattaaaggcggtgagtgatctcgaattggctgtacgtgatcgcgatattatttttgtggctattccgagtcattcatttcgtgaggtggtgaaacagatttcaccttatatcacggcacaggctattgtttcactgactaaaggtattgaggcaaatacgtttagttttatgagcgatattattcgcgaagaattgcctgaagtgccttacggtgtgctgtctggcccaaatttggctaaggaaattgtggcaggtatgccttcgggtacggttattgcaagtgattctgagctggttcgttatgctgttcagcatgcgctacacagtgctttattccgtgtatttggcagtgatgatgtacatggtgttgagctgggtggagcgcttaaaaatatctacgcgatcgcgatgggcatggcagccgcttataatattggtgaaaataccaaaagtatgattattacacgggctttggcagaaatgagccgtttcgcagttaagttgggtgctaacccattgacctttttaggtttgtcaggtgtcggtgatctgtttgcaacctgtaatagtcctttgagtcgtaactatcaaattggatatgcattgggttctggcaaaacacttgatcaggccattaaagctttaggtcaaacggctgaggggattaataccattgttcaagtacggacgagagcaatcgaactagatgtgtatatgccaattaccaatgcattgtatgaagttatttttgagggcgcaccaccgctcaatattgcactggcattgatgaaaaatgggcatcgcagtgatgtggaatttgtattgccacatcatcaagtttga

SEQ ID NO: 119705 - protein, 357 aa, Acinetobacter sp
MTDLKFTDLVEPVVIDKKTALRVTVLGGGSFGTAMANLATRNGCNTMIWIRDQKMADEINQTHFNQRYLPDFNLEPELKAVSDLELAVRDRDIIFVAIPSHSFREVVKQISPYITAQAIVSLTKGIEANTFSFMSDIIREELPEVPYGVLSGPNLAKEIVAGMPSGTVIASDSELVRYAVQHALHSALFRVFGSDDVHGVELGGALKNIYAIAMGMAAAYNIGENTKSMIITRALAEMSRFAVKLGANPLTFLGLSGVGDLFATCNSPLSRNYQIGYALGSGKTLDQAIKALGQTAEGINTIVQVRTRAIELDVYMPITNALYEVIFEGAPPLNIALALMKNGHRSDVEFVLPHHQV

SEQ ID NO: 119706 - DNA, 1014 bp, Acidobacteria bacterium
  CDS (1)..(1014): transl_table=11
gtgagccgcattgcggtgattggcgcgggagcgtggggcacagcgctggcgattgtgctcggccgtcgtggcggtcacgccgtgcgactctgggcttacgagcaggaagtcgtcgcttccattctggcgcgacgcacgaatgacctttttcttcccgaggcatccatcccagcgacggttactgttacggattcgcttacggacgcactaaacggcgcagagatcgtcctgagcgtgatgccttcacaccacgtccgtcggcttttcacgcagatgctcccgcacctcagcgacgacatggttttcgtgagcgctacgaaaggcgtcgaagaccagacctatctccgcatgacggaagtgatcgaggaagtcgtgactccgaggttttctcctcgcttggttgcggtgagcggtccgaccttcgcgaaagaagttgcgaagggagatccgaccgcgatcaccgccgcgtcttccgacgaggatctggcgcgcacggttcagcacgagtttagcgatccgcgcttccgtgtctacaccaatcgcgacgtggttggcgtggaactgggcggcgcgctgaagaacgtcatcgccatagcggcgggcatttgcgacggtctcgaacttgggcataacagtgttgcagcgctggtcacgcgcggactcgcggagatcacgcgcctctcgcttgcctgtggcgggcacatcgaaactatggccggtctggcggggcttggtgacctcgttctcacctgtaccggcgggctctcgcgtaatcgcacggtcggtgtcgaactcggtaaaggccgcaaacttgccgacatcattgcaggcatgcgcggcatggtggccgaaggagtactaacgacaaatgccgccattggcctggcgaacaagcatggggtcgagatgccgatcacgcagcagatgcacgccatccttcaccaaggtaaatctcccagtgacgcgattcgcgagctgatgtcgcggccttccaccacggaagtttggctgtaa

SEQ ID NO: 119707 - protein, 337 aa, Acidobacteria bacterium
MSRIAVIGAGAWGTALAIVLGRRGGHAVRLWAYEQEVVASILARRTNDLFLPEASIPATVTVTDSLTDALNGAEIVLSVMPSHHVRRLFTQMLPHLSDDMVFVSATKGVEDQTYLRMTEVIEEVVTPRFSPRLVAVSGPTFAKEVAKGDPTAITAASSDEDLARTVQHEFSDPRFRVYTNRDVVGVELGGALKNVIAIAAGICDGLELGHNSVAALVTRGLAEITRLSLACGGHIETMAGLAGLGDLVLTCTGGLSRNRTVGVELGKGRKLADIIAGMRGMVAEGVLTTNAAIGLANKHGVEMPITQQMHAILHQGKSPSDAIRELMSRPSTTEVWL

SEQ ID NO: 119708 - DNA, 984 bp, Agrobacterium tumefaciens; identical to SEQ ID NO: 58931
  CDS (1)..(984): transl_table=11

SEQ ID NO: 119709 - protein, 327 aa, Agrobacterium tumefaciens; identical to SEQ ID NO: 58932

SEQ ID NO: 119710 - DNA, 975 bp, Anaplasma phagocytophilum
  CDS (1)..(975): transl_table=11
gtgcgggtcacagttttaggagcgggcgcgtttgggacagccttgtctgttgcgctttataattcatgctgtagcgttgctctttggagcaggaataaacgtgtactggaagagttgcgcaatactggcatgaacagcctatatttaccaggctgtcttgtgccaaaagaaatagagcttatacccgatgttgagagtgcgctgaagtgtgcttctgtgctgttgctgtgtgttccaacacaggagttacgcaacttgtgtaatgacgtgagaaatactgctgcactggatgcttctgtgccggtgctcgtgtgtagtaagggcattgagaataagtctttgaaatttgctggagaagtgatagaggaacttttacctgataatccagtgtttgttttgtcaggtcctgcacttgcgaaagagatggttcgtgggctcccctgcgcaatggtgcttgcaggacgggatgaatctcttgcagcatcgctcgctgaaaaactaagcagtgctgtcatgtccatagctcctagtaccgactatgtaggagtgcagattggttcagtactaaaaaatattattgccatcgcatgtggcatagtcataggaaaagggctagggtacaacgctagcgccatggtagtagtgcggggcattgccgaaatacaggctgtaagcacggcgaaatctgagagtgtcgacctatctaccataataggtcttgcgtgtttgggagatttagttctcacctgcacatctgcaagttcccgcaacatgtcctttggtcttgccatcggaaaaggacaggatattgcctcacgtaatgatagcctggtcgaaggcgcagaaagcgcgcaatctatagatcgcttgagtaatacactaggtattcatcttccagtatgctctgcaatagcaaaacttctaagaggtgagttggatactgatcaagtaattaaccaattactgttcgcataa

SEQ ID NO: 119711 - protein, 324 aa, Anaplasma phagocytophilum
MRVTVLGAGAFGTALSVALYNSCCSVALWSRNKRVLEELRNTGMNSLYLPGCLVPKEIELIPDVESALKCASVLLLCVPTQELRNLCNDVRNTAALDASVPVLVCSKGIENKSLKFAGEVIEELLPDNPVFVLSGPALAKEMVRGLPCAMVLAGRDESLAASLAEKLSSAVMSIAPSTDYVGVQIGSVLKNIIAIACGIVIGKGLGYNASAMVVVRGIAEIQAVSTAKSESVDLSTIIGLACLGDLVLTCTSASSRNMSFGLAIGKGQDIASRNDSLVEGAESAQSIDRLSNTLGIHLPVCSAIAKLLRGELDTDQVINQLLFA

SEQ ID NO: 119712 - DNA, 924 bp, Anabaena sp
  CDS (1)..(924): transl_table=11
gtgcaagaaactactatatcgattttgggtgcaggtgcttggggtgcatctctagcaaatctagcaatagccaatggtaacagggtgcgtgtatggtcacgacgaggatctgaaacattgtcagcagttttgcagggtgcggatatagttctatctgccatttccatgaaaggagtgagagaagttgcttcacaaattcaatctctcactccttcaccagaaactatttttgtcacggctaccaaaggtctagaaccagaaacgatttataccccgtcgcaaatttggcaatcgtgtttcccccatcatccagtagttgtcctatctgggccaaatttatctaaagaaatcgaccaatccctaccagccgccacggtagtagctagtcgtgtagctaccgccgccgctacagtgcagctggcattttcttcgtctcgtttccgcgtctatacaaatcctgaccccgtaggtgtggagttggggggtacactcaagaatgtaattgcgatcgcctctggtgtatgtgacggtctacatttaggaactaatgccaaagccgctttagtcacgcgcggactcacagaaatggttcgcattggcaattgttggggtgcaaagacggaaacattttatggtttatctggtctaggggatttgttagctacctgtaacagtcctttaagtcgcaattaccaagttggctatcaattagccggtggtgaaacactggcacaaattctagcaaaattaccaggaaccgccgaaggagtaaacacttgtcaggtattagtccaactagctaggcaacaaaatatagttatccctattaccgagcaagtttaccgattactacaaggcgaagttacaccacagcaagcccttgatgaactcatgctccgagatattaagccggaatacaactaa

SEQ ID NO: 119713 - protein, 307 aa, Anabaena sp
MQETTISILGAGAWGASLANLAIANGNRVRVWSRRGSETLSAVLQGADIVLSAISMKGVREVASQIQSLTPSPETIFVTATKGLEPETIYTPSQIWQSCFPHHPVVVLSGPNLSKEIDQSLPAATVVASRVATAAATVQLAFSSSRFRVYTNPDPVGVELGGTLKNVIAIASGVCDGLHLGTNAKAALVTRGLTEMVRIGNCWGAKTETFYGLSGLGDLLATCNSPLSRNYQVGYQLAGGETLAQILAKLPGTAEGVNTCQVLVQLARQQNIVIPITEQVYRLLQGEVTPQQALDELMLRDIKPEYN

SEQ ID NO: 119714 - DNA, 924 bp, Anabaena variabilis
  CDS (1)..(924): transl_table=11
gtgcaagaaactaccatattaattttaggtgcaggtgcttggggtgcatctctagcaaacttagcactagccaacggccatagggtgcgtgtatggtcacggcgaggaactgaaacactagcagcactcttagaagatgttgatataattctctcggcgatttccatgaaaggagtgagagaagttgcttcccaaattcaatctctcactccttcaccagaaactatttttgtcacggctaccaaaggtttagaaccagagactatttatacgccatcccaaatttggcaatcatgcttccccaatcatccagtagttgtcctctctgggccaaatttatctaaagaaattgaccaatccctaccagcagccacggtagtagctagtcgtatagctactgccgccgctacagtgcagctggcattttcttcatctcgttttcgcgtctatacaaatcctgaccccataggtgtggaattggggggtacactcaagaatgtaattgcgatcgcatctggtgtatgtgacggtctacatttaggaactaatgccaaagccgctttagtcacgcgcggactcacagaaatggttcgcattggcaattgttggggtgcaaagacggaaacattttatggtttatctggtctaggggatctgttagctacctgtaacagtcccttaagtcgcaattaccaagttggttatcaattagccggtggtcaaacactggcacaaattctagcaaaattaccaggaaccgccgaaggagtaaacacttgtcaggtattagtccaactagctaggcaacaaaatatagttatccctattaccgagcaagtctaccgattactacaaggcgaagttacaccacagcaagcccttgatgaactcatgctccgagacattaagccggaatataactga

SEQ ID NO: 119715 - protein, 307 aa, Anabaena variabilis
MQETTILILGAGAWGASLANLALANGHRVRVWSRRGTETLAALLEDVDIILSAISMKGVREVASQIQSLTPSPETIFVTATKGLEPETIYTPSQIWQSCFPNHPVVVLSGPNLSKEIDQSLPAATVVASRIATAAATVQLAFSSSRFRVYTNPDPIGVELGGTLKNVIAIASGVCDGLHLGTNAKAALVTRGLTEMVRIGNCWGAKTETFYGLSGLGDLLATCNSPLSRNYQVGYQLAGGQTLAQILAKLPGTAEGVNTCQVLVQLARQQNIVIPITEQVYRLLQGEVTPQQALDELMLRDIKPEYN

SEQ ID NO: 119716 - DNA, 1203 bp, Arabidopsis thaliana
  CDS (1)..(1203)
atgcgcttccgatcattcttcttctcctcctctatcttctccctttcacattctcgctctccttctctttcttcctctcgtttctcctctctctccgccgctatgtctcctgctctcgagaaatcccgacaaggcaatggtggatgtaatgatgattcgaaatctaaggtcacggtcgttggtagtggcaattggggaagtgttgctgctaagctcattgcttctaatgccctcaagcttccttctttccatgatgaagtgaggatgtgggtgtttgaggaggttctaccaaatggtgagaagctcaatgatgttatcaacaagaccaatgaaaatgtcaagtacctccctgggattaagctaggaagaaatgttgttgcggatcctgaccttgaaaatgcagtgaaggacgcgaacatgttggtttttgttacaccgcatcagtttatggatggtatatgcaagaagttagatggaaagatcacaggagatgttgaggctatatctcttgttaaaggaatggaagtgaagaaggaaggtccttgtatgatctcaagtctcatttccaagcaacttggtatcaattgttgtgttcttatgggcgcaaacattgcaaacgagatagctgtggagaagtttagtgaagcaacggttggatatagagggagtagagaaatagcggacacatgggttcagttgtttagtactccgtattttatggtcacaccggtccatgatgtggaaggagtagagttatgtgggactttgaagaatgtagttgctattgcagcgggtttcgtggacggtttggaaatgggtaataacacaaaggctgcaatcatgaggattggtctaagagagatgaaagcactctcaaagcttttgtttccatctgttaaagatagtactttcttcgagagctgcggtgtagcagatgtcattacaacttgcttaggaggaagaaaccggagagttgcggaagcatttgcaaaaagcagaggaaaaaggtcttttgatgagcttgaagcagagatgctacaagggcaaaagctacagggggtatcgacggcaagagaggtctacgaggtgttgaaacattgtggatggttggagatgtttccgctcttttcaacggttcaccaaatctgcactggtcgtcttcaacctgaagccatcgtccaataccgcgagaacaaactataa

SEQ ID NO: 119717 - protein, 400 aa, Arabidopsis thaliana
MRFRSFFFSSSIFSLSHSRSPSLSSSRFSSLSAAMSPALEKSRQGNGGCNDDSKSKVTVVGSGNWGSVAAKLIASNALKLPSFHDEVRMWVFEEVLPNGEKLNDVINKTNENVKYLPGIKLGRNVVADPDLENAVKDANMLVFVTPHQFMDGICKKLDGKITGDVEAISLVKGMEVKKEGPCMISSLISKQLGINCCVLMGANIANEIAVEKFSEATVGYRGSREIADTWVQLFSTPYFMVTPVHDVEGVELCGTLKNVVAIAAGFVDGLEMGNNTKAAIMRIGLREMKALSKLLFPSVKDSTFFESCGVADVITTCLGGRNRRVAEAFAKSRGKRSFDELEAEMLQGQKLQGVSTAREVYEVLKHCGWLEMFPLFSTVHQICTGRLQPEAIVQYRENKL

SEQ ID NO: 119718 - DNA, 987 bp, Azoarcus sp
  CDS (1)..(987): transl_table=11
atgcgcatcgccgtcttcggcgccggtgcctggggcaccgccttggcgctcgcgttcagcgcgcgccacgacgtcgtgctgtggggtcgcgatgcaggccacatcgacaccctcgccgcgacgcggcacaacgagcgttacctgcccggcgtgccctttccggaagaactggccctgacggccgacttcgccgccgctgcccgcgccgccgacctgcacctcgtcgtcacgccgctcgctggccttcgcgccgccgtgggcgaactcaacacactgcagcccgacacgccgttgatctgggcatgcaagggtctcgaagcggggaccggcaagctgccgcatgaaatcgtcgccgaggagctcgggcccgcagcccgctgcggcgtattgaccggccccagcttcgccgccgaagtcgcccgcgcaatgccgaccgcggtgacgctggcagcgaccgatccggctttcgcccgtcgctgggttcctgcactgcaccagccgcgcttgcgcatttacgcgaactccgacctcgtcggcgccgagatcggcggcgcgatcaagaacgtgctcgcgatcgccgcaggtgtctccgacggcatgggattcggcctcaatgcgcgcgcagcactgatcacccgcggactcgccgaaatcgcgcggctcgccgaagcccttggcgggcgccccgaaaccctgatgggcctcgccggcatgggggacctgatcctgacctgcaccggcgacctgtcgcgcaaccgacgcgtcggactcgcactcgcccaaggcaagaccctcgccgagatcctcggcgaactcggccatgtcgccgaaggcgtgtccaccgcccgcgaagtcgtcaagctcgctgcccgccacgacgtcgagatgccgctgtgcgaagccgtcgacaccctgctccacgacgcccgcctcggcccgcgcgaagttgtcgagcaactgctgtcgcgcgagccgcgccgcgagtga

SEQ ID NO: 119719 - protein, 328 aa, Azoarcus sp
MRIAVFGAGAWGTALALAFSARHDVVLWGRDAGHIDTLAATRHNERYLPGVPFPEELALTADFAAAARAADLHLVVTPLAGLRAAVGELNTLQPDTPLIWACKGLEAGTGKLPHEIVAEELGPAARCGVLTGPSFAAEVARAMPTAVTLAATDPAFARRWVPALHQPRLRIYANSDLVGAEIGGAIKNVLAIAAGVSDGMGFGLNARAALITRGLAEIARLAEALGGRPETLMGLAGMGDLILTCTGDLSRNRRVGLALAQGKTLAEILGELGHVAEGVSTAREVVKLAARHDVEMPLCEAVDTLLHDARLGPREVVEQLLSREPRRE

SEQ ID NO: 119720 - DNA, 1023 bp, Bacillus anthracis; identical to SEQ ID NO: 58933
  CDS (1)..(1023): transl_table=11

SEQ ID NO: 119721 - protein, 340 aa, Bacillus anthracis; identical to SEQ ID NO: 58934

SEQ ID NO: 119722 - DNA, 1023 bp, Bacillus cereus
  CDS (1)..(1023): transl_table=11
atgacaaaaatcacagtagttggagcaggtagctggggaacagcgttagcgatggtattagctgacaatgggcatgatgtacgtatttggggaaatcgttctgaacttatggatgagattaatacaaaacatgagaatagtcgatatcttccgggaattacattgccaagcacaatcgtagcctactcttctttagaagaagcattagtagatgtaaatgtagtactgcttgtagtaccaacgaaagcgtatagagaagtactacaagatatgaagaaatatgtagcgggtccgactacttggattcatgcaagtaaaggaattgaacctggtacgtcaaaacgtatttcggaagtgattgaggaagaaattccagaggacttaattaaagatgttgttgtactatctggaccgagtcatgctgaagaagttgggttacgtcaggcgacaactgttacgtctgcagcaaagcgtatggaagcggctgaggaagtacaagatttgtttatgaatagttatttccgtgtatacacaaatccagatatcgttggagttgaacttggtggtgcgttaaaaaatattatcgcattagctgctgggataactgatggtcttggattaggtgataatgcgaaagcggcattaatgacgcgtggtttaacggagattgctcgtttaggaagaaaaatgggtggaaatccgttaacgtttgctggtctaactggtatgggggacttaattgtaacttgtacaagtgtccatagccgaaattggcgtgctgggaatttgcttggaaaaggacactctttagaagaagtgttagaaagcatgggtatggttgtggaaggtgtaagaacaacgaaagctgcgcatgagttggcagagaaaatggaagtggaaatgccgattacagctgctttatatgacgtcttattcaatgggaataatgtaaaagatgcagtaggctcattaatggggcgtgttcgaaaacatgaagtggaagctatacctgacttactttaa

SEQ ID NO: 119723 - protein, 340 aa, Bacillus cereus
MTKITVVGAGSWGTALAMVLADNGHDVRIWGNRSELMDEINTKHENSRYLPGITLPSTIVAYSSLEEALVDVNVVLLVVPTKAYREVLQDMKKYVAGPTTWIHASKGIEPGTSKRISEVIEEEIPEDLIKDVVVLSGPSHAEEVGLRQATTVTSAAKRMEAAEEVQDLFMNSYFRVYTNPDIVGVELGGALKNIIALAAGITDGLGLGDNAKAALMTRGLTEIARLGRKMGGNPLTFAGLTGMGDLIVTCTSVHSRNWRAGNLLGKGHSLEEVLESMGMVVEGVRTTKAAHELAEKMEVEMPITAALYDVLFNGNNVKDAVGSLMGRVRKHEVEAIPDLL

SEQ ID NO: 119724 - DNA, 1023 bp, Bacillus cereus; identical to SEQ ID NO: 58935
  CDS (1)..(1023): transl_table=11

SEQ ID NO: 119725 - protein, 340 aa, Bacillus cereus; identical to SEQ ID NO: 58936

SEQ ID NO: 119726 - DNA, 1023 bp, Bacillus cereus; identical to SEQ ID NO: 58937
  CDS (1)..(1023): transl_table=11

SEQ ID NO: 119727 - protein, 340 aa, Bacillus cereus; identical to SEQ ID NO: 58938

SEQ ID NO: 119728 - DNA, 1038 bp, Bacillus halodurans
  CDS (1)..(1038): transl_table=11
gtgaaaaacgtagctgtcattggagctgggagctggggaaccgccctttcccttgtattggcggacaatggacatcatgtaacccttgtggcaaggagagaggaaatcgcacgagaaatcaacgaacgtcatacaaatgagacgtatttgccttccattgagatcccgagttcgatcgtcgccacctgctcaatggaggagatcatcgacgttgagattatcgttctcgtcgtgccgacaaaagcgatccgtcaagcggttcgttcattgaatgatgtattgaaatggccagtgacaatcgtacatgcaagcaaagggattgaacctggctctcatttacgaatttctgagatgatcgaagaagaattagagccaacattgttaaaagaggtggtcgtgttgtcagggccctctcatgcggaggaagtgagcttacgacagccgacgacagtgaccgtttcatcaaagtctctttccacgacaaaacaaattcaagatttgtttatgaatcaacagtttcgcgtctatacgaatgaggatctgatcggagtggagatcggcggagcattaaaaaatattatcgctctcgcttgtggtttaacgaatggtcttgggtatggtgataatacgaaagccgcgattatgacgagaggacttgcggaaatcggacggcttggagtgaagttaggggcaagcccgctcacatttgcaggattatcaggtttaggtgatttgatcgtgacgtgcacgagcatacatagtcgaaattggcgcgctggacaaatgctaggaaaaggaaaatctccagctgaagtagaagaaagtatgggcatggtcgtcgaaggaattcggacgacgcaagctgcccatgaattagcgcaaaagctccaaatcgaaatgccgatcacctcagctctctattctgttctttttgaagggaagaagccagagcacgcagcagatgaattaatgggacgggtgaagaaacatgaaatggaaaatcttcacgatgtcgtaagtgatcagaagaacgattga

SEQ ID NO: 119729 - protein, 345 aa, Bacillus halodurans
MKNVAVIGAGSWGTALSLVLADNGHHVTLVARREEIAREINERHTNETYLPSIEIPSSIVATCSMEEIIDVEIIVLVVPTKAIRQAVRSLNDVLKWPVTIVHASKGIEPGSHLRISEMIEEELEPTLLKEVVVLSGPSHAEEVSLRQPTTVTVSSKSLSTTKQIQDLFMNQQFRVYTNEDLIGVEIGGALKNIIALACGLTNGLGYGDNTKAAIMTRGLAEIGRLGVKLGASPLTFAGLSGLGDLIVTCTSIHSRNWRAGQMLGKGKSPAEVEESMGMVVEGIRTTQAAHELAQKLQIEMPITSALYSVLFEGKKPEHAADELMGRVKKHEMENLHDVVSDQKND

SEQ ID NO: 119730 - DNA, 1041 bp, Bacillus licheniformis; identical to SEQ ID NO: 58939
  CDS (1)..(1041): transl_table=11

SEQ ID NO: 119731 - protein, 346 aa, Bacillus licheniformis; identical to SEQ ID NO: 58940

SEQ ID NO: 119732 - DNA, 1023 bp, Bacillus clausii; identical to SEQ ID NO: 58941
  CDS (1)..(1023): transl_table=11

SEQ ID NO: 119733 - protein, 340 aa, Bacillus clausii; identical to SEQ ID NO: 58942

SEQ ID NO: 119734 - DNA, 1038 bp, Bacillus subtilis; identical to SEQ ID NO: 58943
  CDS (1)..(1038): transl_table=11

SEQ ID NO: 119735 - protein, 345 aa, Bacillus subtilis; identical to SEQ ID NO: 58944

SEQ ID NO: 119736 - DNA, 1023 bp, Bartonella henselae
  CDS (1)..(1023): transl_table=11
atgcatgcggtttcaatgacaattattggtgccggttcttatggtactgcattagccattgtgcttgctcgtaatggccatcatgttcttctatggggatataatcctcagcatatcagggaattacaggaatatcgttgtaaccaagcatttttacccgatgttcaatttcctgataatttatgccctgaagattcgcttgaaactgcaataaaggcaagccgcaatatattaatcgctgttccaagccatgtatttcatcaggtattgtacaatattcgaccttacttggatcaacattcacggattatttgggcaacgaaaggtttggagcatggtactggacgtctcctacaagaagttgctcgcgaaattctaggtgataaaatccctttagctgttttttctggaccaacttttgctaaggagcttgctattggcttgcctacagcaattacgatagcagcttctgatactgaatttagtgaagaactacagcaactttttcattttgataaaagctttagagtttataaaaattcagatatgatcggtgttcaattaggcggagcagtcaaaaatgtcattgctattggtgcaggaatatcagatggtatgggatttggagcaaatgcgcgaatagctctcatcacgcgaggattagctgaaattagtcgcttaggcattgctatgggtgctgagctttcaacatttatgggaatgacaggtttaggtgatctggttttgacatgtactgataatcagtcgcgcaaccgccgttttggaatgctgcttggtcaaggagtggatatagaagaagcgaaaaaacagattgatcaaattgttgaaggttacttaaatactaaagaagttcatatgctagcacaacgtatcagggtagaaatgccaattacagagcaaatttaccacgtgctctattgtggtaaaagtgtatccgaagcggccaatgcattactaagccgtcaactcaaagatgagatgtatgatacagtacgcttttaa

SEQ ID NO: 119737 - protein, 340 aa, Bartonella henselae
MHAVSMTIIGAGSYGTALAIVLARNGHHVLLWGYNPQHIRELQEYRCNQAFLPDVQFPDNLCPEDSLETAIKASRNILIAVPSHVFHQVLYNIRPYLDQHSRIIWATKGLEHGTGRLLQEVAREILGDKIPLAVFSGPTFAKELAIGLPTAITIAASDTEFSEELQQLFHFDKSFRVYKNSDMIGVQLGGAVKNVIAIGAGISDGMGFGANARIALITRGLAEISRLGIAMGAELSTFMGMTGLGDLVLTCTDNQSRNRRFGMLLGQGVDIEEAKKQIDQIVEGYLNTKEVHMLAQRIRVEMPITEQIYHVLYCGKSVSEAANALLSRQLKDEMYDTVRF

SEQ ID NO: 119738 - DNA, 1023 bp, Bartonella quintana
  CDS (1)..(1023): transl_table=11
atgaatgcggtttcgatgacagttattggtgctggttcttatggcactgcattagccattgcctttgctcgtaacggccatcatgttttattgtggggatataatcctcaacatgttagagaattacagatacatcgctgcaatcaagcatttttacctgatgttcagtttcctgataatctatcgcctgaagcttcgcttgagactgcaataacagcaagtcgtaatatattaattgctgttccaagccatgtatttcatcaggtgttatacaatattcaaccttatttgaatcaacattcacgcattatttgggcaacgaaaggcttagaacatggtacagggcgccttctacaagaagttgctcgcgagattctaggtgataaaatccctttagctatcttttctggaccaacttttgctaaagaacttgctatcggtttgcctactgcaattacggtagcagcttctaatgctgaatttagtgaagaactacagcaacttttccattgtgataaaagttttagagtttataaaaaccccgatatgatcggtgttcagttaggtggagtaattaaaaatgtcattgctattggtgcaggaatatcagatggtatgggatttggagcaaatgctagaatagctcttattacacgaggattagctgaaattagtcgtttaggcattgctatgggcgcggagctttccacatttatgggaatgacaggtttaggtgatctggttttgacctgtactgataaccagtcacgcaaccgtcgttttggaattctgcttggccaaggaatggatatagaagaagcagaaaaacagattggtcagattgttgaagggtatttaaataccaaagaagtacgtatgttagcacgacgtatcggggtggaaatgccaattacagagcaaatttatcacgttctctatagtggtaaaagtgtagtcgaagcggccaatacattactgagccgtacactcaaagatgagatacatgataaagtatgcttttaa

SEQ ID NO: 119739 - protein, 340 aa, Bartonella quintana
MNAVSMTVIGAGSYGTALAIAFARNGHHVLLWGYNPQHVRELQIHRCNQAFLPDVQFPDNLSPEASLETAITASRNILIAVPSHVFHQVLYNIQPYLNQHSRIIWATKGLEHGTGRLLQEVAREILGDKIPLAIFSGPTFAKELAIGLPTAITVAASNAEFSEELQQLFHCDKSFRVYKNPDMIGVQLGGVIKNVIAIGAGISDGMGFGANARIALITRGLAEISRLGIAMGAELSTFMGMTGLGDLVLTCTDNQSRNRRFGILLGQGMDIEEAEKQIGQIVEGYLNTKEVRMLARRIGVEMPITEQIYHVLYSGKSVVEAANTLLSRTLKDEIHDKVCF

SEQ ID NO: 119740 - DNA, 1002 bp, Bifidobacterium longum
  CDS (1)..(1002): transl_table=11
atgggtaaaaatataacggttctcggtgcaggagcatggggtactgctttcggccaagtgctggcggacgcaggcaacacggtgaccatgtgggccaaggagcagcagattgtcgagggcattcgcgatcaccaccacaacgccgtgcgcctgccgtccgtcgaaaagttgccggacaacatgaccgccactggggatcgcgccgaagccgtcaagaacgcggacatcgtagtcgtggccatcgccgcgcagttcgcgcgagtggcactcgtcgaattcaagggactgattcccgatcacgccatcgtcgtcagcctgatgaagggcatcgagcgtggcaccaacaagcgtatggacgaagtcgtccgcgaatcccttgacttgccggccgaccggttcgccgccatttccggaccgaacctgtccaaggaaatcgccgatcgtcatcccgccgccaccgtggtggcttgcacgaacctcgataatgccacgaaggtggccgaggcatgcaccacctcctatttcaagccgttcgtgaccaccgacgtcatcggcctggaaatgtgcggcagcctgaagaacgtgaccgcgctggccgtgggcatggcccgtggtgccggctacggtgagaacaccgcagccatgatcgaaactcgtggactggccgaactgaccgcgctgggcgtagccgctggcgccgatcccaagaccttcttcggcttggccggtgtgggcgatctcatcgccacctgtggctcttcgctgtctcgtaactatacgttcggcgcgaatctcggcaagggattgacggtcgaagaggccaccaaggtcagcaacggtgtggccgaaggcgtgcccaccacggatgcggtggtggctcttggcgatcagcttgatgtgccgaccccgttggcgtatcagatgagccgcgtgctgaacgaaggcatttcctgctcggagatgcttgccggactgttcggtcacgaggttaccggcgaataa

SEQ ID NO: 119741 - protein, 333 aa, Bifidobacterium longum
MGKNITVLGAGAWGTAFGQVLADAGNTVTMWAKEQQIVEGIRDHHHNAVRLPSVEKLPDNMTATGDRAEAVKNADIVVVAIAAQFARVALVEFKGLIPDHAIVVSLMKGIERGTNKRMDEVVRESLDLPADRFAAISGPNLSKEIADRHPAATVVACTNLDNATKVAEACTTSYFKPFVTTDVIGLEMCGSLKNVTALAVGMARGAGYGENTAAMIETRGLAELTALGVAAGADPKTFFGLAGVGDLIATCGSSLSRNYTFGANLGKGLTVEEATKVSNGVAEGVPTTDAVVALGDQLDVPTPLAYQMSRVLNEGISCSEMLAGLFGHEVTGE

SEQ ID NO: 119742 - DNA, 1002 bp, Blochmannia floridanus
  CDS (1)..(1002): transl_table=11
atggaaaaatttagtgttactgttattggagcaggggtatatggtacagctatagctgttgctatagcgaagcatggtaatatggttttattatggggtcataattctcaacatataaaaattcttaaaattgatcgatctaatcaagtagatttaccaggtgttttttttcctgattcattatatgtggaagaatctttatcggtggctgctgatttttctcaaaatattttgattgctgtaccgagtcatgtgtttcgttgtgtgttattgaaattacgattgaatttaaaaaataattttcgtattattattgcatctaagggattagagccgaaaactggttggttattgcaggatgtagtgtatgatgttttgggtaaggaggtgccttgtgcagtaatatctggtccaacttttgctcatgagcttgctatagggttacctgcagcaatagaattagcatctgctgatataaaatttcgatatgatatagaacatttattgtattctgttaagaatttacgagtatataaaactactgatgttataggagtgcaaatagcaggagcagtaaagaatgttattgctattggagtaggtatttctgatggtatgggatttggagcaaatgcacgagctgctttaattactcgtggcttgtcggagatgattcgattaggtaaatcaattggcgcgatttctgttgatgtatttgttggtttagctggattaggagatttagtattaacttgtactgatgatcaatctcgtaatcgtcgttttggtatgttgttggggcaaggaatgcatgtagattatgcacagaaaagtattgggcaattaatagaaggaataagtaatactaaagaagtatatatgttatctgtaaaatataaggtaattatgcctattacggaacaaatatataaaatattatatgaaaataaaaatgttcatgaagcagtgtattctttaataaggcgttcatatattttataa

SEQ ID NO: 119743 - protein, 333 aa, Blochmannia floridanus
MEKFSVTVIGAGVYGTAIAVAIAKHGNMVLLWGHNSQHIKILKIDRSNQVDLPGVFFPDSLYVEESLSVAADFSQNILIAVPSHVFRCVLLKLRLNLKNNFRIIIASKGLEPKTGWLLQDVVYDVLGKEVPCAVISGPTFAHELAIGLPAAIELASADIKFRYDIEHLLYSVKNLRVYKTTDVIGVQIAGAVKNVIAIGVGISDGMGFGANARAALITRGLSEMIRLGKSIGAISVDVFVGLAGLGDLVLTCTDDQSRNRRFGMLLGQGMHVDYAQKSIGQLIEGISNTKEVYMLSVKYKVIMPITEQIYKILYENKNVHEAVYSLIRRSYIL

SEQ ID NO: 119744 - DNA, 1056 bp, Bordetella bronchiseptica; identical to SEQ ID NO: 58945
  CDS (1)..(1056): transl_table=11

SEQ ID NO: 119745 - protein, 351 aa, Bordetella bronchiseptica; identical to SEQ ID NO: 58946

SEQ ID NO: 119746 - DNA, 1056 bp, Bordetella parapertussis; identical to SEQ ID NO: 58947
  CDS (1)..(1056): transl_table=11

SEQ ID NO: 119747 - protein, 351 aa, Bordetella parapertussis; identical to SEQ ID NO: 58948

SEQ ID NO: 119748 - DNA, 1056 bp, Bordetella pertussis; identical to SEQ ID NO: 58949
  CDS (1)..(1056): transl_table=11

SEQ ID NO: 119749 - protein, 351 aa, Bordetella pertussis; identical to SEQ ID NO: 58950

SEQ ID NO: 119750 - DNA, 981 bp, Bradyrhizobium japonicum; identical to SEQ ID NO: 58951
  CDS (1)..(981): transl_table=11

SEQ ID NO: 119751 - protein, 326 aa, Bradyrhizobium japonicum; identical to SEQ ID NO: 58952

SEQ ID NO: 119752 - DNA, 999 bp, Burkholderia mallei; identical to SEQ ID NO: 58953
  CDS (1)..(999): transl_table=11

SEQ ID NO: 119753 - protein, 332 aa, Burkholderia mallei; identical to SEQ ID NO: 58954

SEQ ID NO: 119754 - DNA, 999 bp, Burkholderia sp
  CDS (1)..(999): transl_table=11
atgaaagtagccgttctcggcgccggtgcctggggcaccgcgctcgcgggccatctggccgcgcggcacgatacgcttctgtgggcgcgcgacgccgcgctcatcgccgggctgcaagcccggcacgaaaattcccgctatctggacggcatcgcgctgcctgacgcattgcgctacgacgccgatctcggcgccgcgctcgcgcatggcgccgcggacgacgcactgtgcgtgatcgccgcgcccgtggccgggctgcgcacgctgtgccacgcgatgcgcgacgcaggctgcgtgcccgcgcacgtcgtctgggtctgcaagggcttcgaggccgacacgcatctgctgccgcatcaggtgatcgcggccgagctgcccgaacagcacagcaacggcgtgctgtcggggccgagcttcgcccgcgaggtcgggcagtcgctgcccgtcgcgctgacggtggcgagcacgtccgccgaatgccgcgagcgcacgctcgccgcgttccatcacggcgcgatgcggatctatacgggcgacgacgtggtcggcgtcgaggtcggcggcgcggtgaagaacgtgctcgcgatcgcgaccggcatcgccgacggcctcggtctcgggctgaacgcacgcgccgcgctgattacgcgcggcctcgccgaaatgtcgcgcctcggcgtcgcgctcggcggccgtgcggaaaccttcacgggcctcacgggcctgggcgacctgatcctcaccgccacgggcgacctgtcgcgcaaccgcacggtcggcctgcaactggcggccggccgcacgctgaacgacatcctcggcgcgctcggccacgtggccgaaggcgtgcgctgcgcgcaggccgtgctggccatcgcgcgcgcgcagtcgatcgaaatgccgatcaccgaagccgtgtgcggcgtgctgttcgacggcatcgcgccgcgcgacgccgtcagcggcctgctgcggcgcgacgcgcgcgccgagtag

SEQ ID NO: 119755 - protein, 332 aa, Burkholderia sp
MKVAVLGAGAWGTALAGHLAARHDTLLWARDAALIAGLQARHENSRYLDGIALPDALRYDADLGAALAHGAADDALCVIAAPVAGLRTLCHAMRDAGCVPAHVVWVCKGFEADTHLLPHQVIAAELPEQHSNGVLSGPSFAREVGQSLPVALTVASTSAECRERTLAAFHHGAMRIYTGDDVVGVEVGGAVKNVLAIATGIADGLGLGLNARAALITRGLAEMSRLGVALGGRAETFTGLTGLGDLILTATGDLSRNRTVGLQLAAGRTLNDILGALGHVAEGVRCAQAVLAIARAQSIEMPITEAVCGVLFDGIAPRDAVSGLLRRDARAE

SEQ ID NO: 119756 - DNA, 1008 bp, Burkholderia thailandensis; identical to SEQ ID NO: 58839
  CDS (10)..(1008): transl_table=11

SEQ ID NO: 119757 - protein, 332 aa, Burkholderia thailandensis
MKVAVLGAGAWGTALAAHLAARHDTLLWARDAALVAELAARRENVRYLDGVALPPALRYEADLTAALSHAQADDALCVIAAPVAGLRALCRAMRDAGRVPAHFVWVCKGFEADTRLLPHQMVAEELPDHASYGVLSGPSFAREVAQGLPVALTVASASAACRGRTLAAFHHGAMRIYTGDDVVGVEVGGAVKNVLAIATGIADGLGLGLNARAALVTRGLAEMSRLGVALGGRAETFTGLTGLGDLILTATGDLSRNRTVGLQLAAGRSLDDILAALGHVAEGVRCARAVLSIARERGVDMPITEAVCAVLFDGVAPRDAVSGLLRRDAKAE

SEQ ID NO: 119758 - DNA, 1008 bp, Burkholderia xenovorans
  CDS (1)..(1008): transl_table=11
gtgccggctatgaaggttgccgtcctcggcgccggcgcatggggcaccgcgctcgccggccatctggccgtacggcacgacacagtgttgtgggcgcgccagcccgcgctcattgccgatctccgcgcttcacacgaaaacgcccgctatctggcgggcgttgcgttgccgccggcgcttcgctatgaaacggatctgaacgcagcgctcgaccacgcgctcgccgacaacgcgttatgcgtcgtggcaacccccgtggccggactgcgcggtctgttccgggccatgcgcgatgcaggcaaagtgccggcgcatgtggtgtggctgtgcaaaggttttgaagccgactcgcagttgatgccacatcaggtggtcgcggccgaactgccggagcacggcagcaacggcgtgctgtcgggtccgagttttgcgcgtgaagtcgggcagggcttgccggtcgcgttgaccatcgccagcgcttcggcggcgtgccgcgagcgcacggtggccgcgttccatcacggcgccatgcgcatctataccggcgacgacgtcgtcggcgtggaagtgggcggcgcggtgaaaaacgtgcttgccattgccacgggcattgccgatggactcgggctcggtctgaacgcgcgtgcggcattgatcacgcgcggcctcgctgaaatgtcgcgcctcggcgtgacgctcggcggccgtgcggaaaccttcaccggtttgaccggcctgggcgatctgatcctgaccgccaccggcgatctgtcgcgcaatcgcacggtcggcctgcaactcgctgcgggccgcacgctcgacgatattctcggcggcctcggtcacgtggccgaaggcgtgcgttgcgcgcaagcggttcttgcgatcgcccgcgcacatgcaatcgagatgcctatcacgcaggcggtgtgtgccgttctgttcgacggcgtggctccgcgcgacgccgtcagcgccctgctgcggcgcgactccaaagccgaataa

SEQ ID NO: 119759 - protein, 335 aa, Burkholderia xenovorans
MPAMKVAVLGAGAWGTALAGHLAVRHDTVLWARQPALIADLRASHENARYLAGVALPPALRYETDLNAALDHALADNALCVVATPVAGLRGLFRAMRDAGKVPAHVVWLCKGFEADSQLMPHQVVAAELPEHGSNGVLSGPSFAREVGQGLPVALTIASASAACRERTVAAFHHGAMRIYTGDDVVGVEVGGAVKNVLAIATGIADGLGLGLNARAALITRGLAEMSRLGVTLGGRAETFTGLTGLGDLILTATGDLSRNRTVGLQLAAGRTLDDILGGLGHVAEGVRCAQAVLAIARAHAIEMPITQAVCAVLFDGVAPRDAVSALLRRDSKAE

SEQ ID NO: 119760 - DNA, 894 bp, Campylobacter jejuni
  CDS (1)..(894): transl_table=11
atgcgtatagcggttattggtgcgggaaaatggggcagtgctttacatctagccttaaaagaaaatcacaattgttttatcagttctttgcatcagcgtgatttagaagattttgttagcataaaagaagctttagaatgtgaatatcttgtttttgctttaagttctcaagggatgcgtgcttggcttaaagaaaatttcatcaacaagggacaaaaaattttaattgcttcaaaaggcatagaagatcaaagttgtcaatttttagatgaaatttttttagattttgtaccaaaagaaaatttttgtgttttaagcggtccttcttttgctgctgaagtgatgcaaaaacttcctactgctttgatgattagtgggataaatcaagagctttgtaaaaaatttgcaagttttttccctgattttattaaaacttatattgataatgatgttcgtggtgctgaaatttgtggtgcttataagaatgttttagcaattgcaagtgggattagtgatgggttaaaacttggtaataatgcaagagcagcactgatttcaagaggacttatagaaatgcatcgttttggtaaattttttggcactaaagaagaaacttttttaggattgagtggggcaggggatttgtttttaactgcaacgagtgttttatcaagaaattatagagtgggtttaaaactggcgcaaaatcaaaaattagatagtattttagccgaacttaatgaagtagcagaaggtgtaaaaactgcttatgctatagaaaaactagcaaaaatgaaaggaatttatacacctattgtaaatgaagtagtggcaatttttaagggtaaaagcgtgcaagaagcaacgcagaatttattaaagcaaaatgattaa

SEQ ID NO: 119761 - protein, 297 aa, Campylobacter jejuni
MRIAVIGAGKWGSALHLALKENHNCFISSLHQRDLEDFVSIKEALECEYLVFALSSQGMRAWLKENFINKGQKILIASKGIEDQSCQFLDEIFLDFVPKENFCVLSGPSFAAEVMQKLPTALMISGINQELCKKFASFFPDFIKTYIDNDVRGAEICGAYKNVLAIASGISDGLKLGNNARAALISRGLIEMHRFGKFFGTKEETFLGLSGAGDLFLTATSVLSRNYRVGLKLAQNQKLDSILAELNEVAEGVKTAYAIEKLAKMKGIYTPIVNEVVAIFKGKSVQEATQNLLKQND

SEQ ID NO: 119762 - DNA, 1011 bp, Carboxydothermus hydrogenoformans
  CDS (1)..(1011): transl_table=11
atgggtagtattaaagttactgtgctgggggccggaagctgggggacggccctttccaatcttttagcccaaaaaggcgtaaatacggtgctctggggacgggattcggcggtaattgaagaaataaacagggagcgggaaaataaaagatatcttccaggggtaaaaatttctcaagaactaattgctaccgctgacttagaatttgcacttaaagatgctaattttcttgtcgcggcggtaccttcccaggcgtttcgagaccttttacaaaaaataaaaccctattttaaacctgagcagattcttgtcaatactgccaaagggattgaagaaggaagtcttttaagaatgtctgcggtgtttaccgaagtgttaccggaataccgcgacaactatacgattttatccggtcccagccacgccgaagaagtcgggcggggaattccgacggcgattgtagtttccgggtattctccggaaaaactttataaagtacaggagcttttttctacagaatacttccgcgtttataccaacgatgatttaacgggagtggaactgggcggaagtttaaaaaatattatcgccattgcttcgggaatttgtaccggactgggtcttggagataatacccgggcggctttggtgaccaggggacttattgaaattacccgcctgggaattaagcttggagccaaaaaggaaacgtttatgggtttatccggtttgggggacctttttgtgactgcgggcagccggcatagtaggaattataaggccgggattttaatcggggaaggcaaatcccttgaagaaacccagaaagaaataaatatggtggtggaagggattagaacaacccgggcggcatatcagttagcccaacggttagaagtggagatgccaattaccgaggcgttatataaggtgctgtttgccggtttgcctccccgagaaggactttttggtttaatgacgcgagctaaaaaagaagaattaaatttttaa

SEQ ID NO: 119763 - protein, 336 aa, Carboxydothermus hydrogenoformans
MGSIKVTVLGAGSWGTALSNLLAQKGVNTVLWGRDSAVIEEINRERENKRYLPGVKISQELIATADLEFALKDANFLVAAVPSQAFRDLLQKIKPYFKPEQILVNTAKGIEEGSLLRMSAVFTEVLPEYRDNYTILSGPSHAEEVGRGIPTAIVVSGYSPEKLYKVQELFSTEYFRVYTNDDLTGVELGGSLKNIIAIASGICTGLGLGDNTRAALVTRGLIEITRLGIKLGAKKETFMGLSGLGDLFVTAGSRHSRNYKAGILIGEGKSLEETQKEINMVVEGIRTTRAAYQLAQRLEVEMPITEALYKVLFAGLPPREGLFGLMTRAKKEELNF

SEQ ID NO: 119764 - DNA, 996 bp, Caulobacter crescentus
  CDS (1)..(996): transl_table=11
atgacctttgagaaggttggcgtgatcggcgccggcgcctggggcacggccctggcgcaggtggcggcgcgggcgggccttgcggtgacgctgcaggcgcgcgagcccgagatcgtggccgcgatcaatgacacgcacgagaatgcggtcttcctgccgggcatagcgctggagccggggatcaaggcggtcgccgacctggcggacctggccgactgcgacctgatcctggccgtcgcccccgcccagcacctgcgcgcggccctgaccgccttcgccccgcatcggaaggcgggcgcgcccgtcgtcctgtgctccaagggcgtcgagcagggctcgttgaagctgatgaccgacgtggcggccgaagccctgccgggcgcgccgatcgcggtgctgtcgggccccagcttcgccggcgaggtcgcccgcaacctgcccgccgccgtcaccctggcctgcgaggacgaggccctgggtcgcgccatcgccgaggccatcgccatcccgaccttccgcccctacaccgccaacgacctgatcggcgccgaggccggcggggcggtgaagaacgtgctggccatcgcctgcggcatcgtcgagggcaagggcctgggccgcaacgcccacgccacggtgatcacccgcggcttcgccgagctgacccgcctggccgtcgccctgggcgcgcgtccggagaccgtcgccggcctttgtggcctgggcgatctggtgctgacctgctccagcccccaatcgcgcaacatgagcgtgggtctggcgctgggccagggcctgaccctggagcaggcgctggccggcaaggtctcggtcgctgaaggcgtggcctcggcccccgccgtgcgcgccctggcccgcaaggtcggcgtcgaggccccgatctgtgaggccgtcgccgccatcctggcgggcgaggtcgcggtcgacgccgcgatcgccggtctgctctcgcgccccctgaaacccgaagcctga

SEQ ID NO: 119765 - protein, 331 aa, Caulobacter crescentus
MTFEKVGVIGAGAWGTALAQVAARAGLAVTLQAREPEIVAAINDTHENAVFLPGIALEPGIKAVADLADLADCDLILAVAPAQHLRAALTAFAPHRKAGAPVVLCSKGVEQGSLKLMTDVAAEALPGAPIAVLSGPSFAGEVARNLPAAVTLACEDEALGRAIAEAIAIPTFRPYTANDLIGAEAGGAVKNVLAIACGIVEGKGLGRNAHATVITRGFAELTRLAVALGARPETVAGLCGLGDLVLTCSSPQSRNMSVGLALGQGLTLEQALAGKVSVAEGVASAPAVRALARKVGVEAPICEAVAAILAGEVAVDAAIAGLLSRPLKPEA

SEQ ID NO: 119766 - DNA, 1005 bp, Chlamydophila abortus
  CDS (1)..(1005): transl_table=11
atgaaagagaaaattgcctacttaggtatgggcatttggggattttgccttgcttccttattagcgcataagggttatcgtgtagtaggatgggctcgtaatcctgaattagttgcgcaactacaaactgagcaccggcatccccaagctcctgatatgccaatccatccgaatttgtcattcactacagatatggtggaggcggtggacggtgcttccatgattgtggaggcggtctcttccgcaggaatacgcccagtatctaaacagctaaaaacaattaccgacctcaaggtgccttttgtcattacctctaaaggtattgagcagcataccggactcctcctcagtgaaatcgttgtggagattttcggcagccaggcttcccgatatctcggttatctcagcgggccttctatagcaagagaagtccttaaaggctgtccttgttctgttgtcatcagtgcgtatgaccctgacaccttgaaaaaaatacatcatgcttttctcaccccgaagtttcgtgtgtatcccaacagtgatcttaaaggcgtagctctcggtggtgctctaaaaaatatcatcgctattgcctgtgggatttctgatggattccaatttggagataacgctaagtcaggattagtcactcgtggtcttcatgaaatacgcaaatttgccacgatcatggactgccgccccgatacgctctatggcttagccggccttggagatctttgtacaacctgtttttcttcactaagtagaaacacgaggtttgggaagctcatagctcagggattcactctcgaacaagcaaaagcagaaatcggcatggttgtagaaggtgcgtatacagccctttccgcatatcaaattgctaaacatcataaaatcgatatgccgatcactacaggcatctaccgcgttttatatgaaaatctcgatatcaaagaaggtatcgctgcactcttacaaagaaatactaaggaagaatatctttaa

SEQ ID NO: 119767 - protein, 334 aa, Chlamydophila abortus
MKEKIAYLGMGIWGFCLASLLAHKGYRVVGWARNPELVAQLQTEHRHPQAPDMPIHPNLSFTTDMVEAVDGASMIVEAVSSAGIRPVSKQLKTITDLKVPFVITSKGIEQHTGLLLSEIVVEIFGSQASRYLGYLSGPSIAREVLKGCPCSVVISAYDPDTLKKIHHAFLTPKFRVYPNSDLKGVALGGALKNIIAIACGISDGFQFGDNAKSGLVTRGLHEIRKFATIMDCRPDTLYGLAGLGDLCTTCFSSLSRNTRFGKLIAQGFTLEQAKAEIGMVVEGAYTALSAYQIAKHHKIDMPITTGIYRVLYENLDIKEGIAALLQRNTKEEYL

SEQ ID NO: 119768 - DNA, 1005 bp, Chlamydophila caviae
  CDS (1)..(1005): transl_table=11
atgaaagagaaaattgcctacttaggcatgggcatttggggattttgtctcgcatccttattagcgaataaggggtatcacgttgttggatgggcccgcaatgctgaattgattgctcaactacaaacagagaagcgtcatccgcaagttcctgatgttcccattcatccgaatctatcctttactacagatatggcagaagctgtagaaaatgcttctatgattgttgaaggtgtctcctcagcagggatacgccctgtatctgaacagctaaaaacaattacgaatctcaatgttccttttgtcattacttcaaaaggtatcgagcagcatacaggactattacttagtgaaattgtcgtagaaattttcggtaacgacgcttcgcaatatcttggttatcttagtggcccctccatagctagagaggtgcttaaaggctgtccatgttctgtagtgatcagcgcgtataatccagataccttaaagaaaatacacaatgcctttctcacgccgacatttcgtgtgtatcctaatagcgatcttaaaggtgtggctctcggtggagctttaaagaatattatagctatcgcctgtgggatttctgatggatttcgttttggagataatgccaaatcaggattagtcactcgaggacttcatgaaatacggaaatttgccacgattatgaactgccgtcccgatactctcaacggtttggcaggtcttggagacctttgtaccacgtgtttttcttcgttaagtaggaatacgaaatttgggaaattaatcgctcaaggaatgactgttgcgcaagcaaaagcagaaatcggtatggttgtggaaggggtctatacagctctctcagcataccaaattgccaaacatcataaaatcgatatgccgataactacaggaatctatcgcgttttatatgaaaatctcgacatccaagaaggtatcgctgcacttttacaaagaaatactaaggaagaatatctttaa

SEQ ID NO: 119769 - protein, 334 aa, Chlamydophila caviae
MKEKIAYLGMGIWGFCLASLLANKGYHVVGWARNAELIAQLQTEKRHPQVPDVPIHPNLSFTTDMAEAVENASMIVEGVSSAGIRPVSEQLKTITNLNVPFVITSKGIEQHTGLLLSEIVVEIFGNDASQYLGYLSGPSIAREVLKGCPCSVVISAYNPDTLKKIHNAFLTPTFRVYPNSDLKGVALGGALKNIIAIACGISDGFRFGDNAKSGLVTRGLHEIRKFATIMNCRPDTLNGLAGLGDLCTTCFSSLSRNTKFGKLIAQGMTVAQAKAEIGMVVEGVYTALSAYQIAKHHKIDMPITTGIYRVLYENLDIQEGIAALLQRNTKEEYL

SEQ ID NO: 119770 - DNA, 1005 bp, Chlamydia muridarum
  CDS (1)..(1005): transl_table=11
atgaaagagactatagcctaccttggaatgggcatgtggggattttctttagccaaccttttggctaacaatggacatcgcgtagtgggatgggcaaggaatccttctttgattgaacagctatctactcaacgccagcaccccgcagctcctcatgttactatcccttcaaacctttctttcacatccagtatggaagaagctttagatggggcgaccatgatcgttgaaggagtcacttctgcaggaatgagaccagttctcaatcagctcaaatctatcacagatttgcagattcctttagtcattacatcaaaaggcattgagcaaaatacaggattgcttctaagcgaaattgctttagaaatttttgggaaaccagccgcgaaatatttgggatatctcagcggtccatctattgctagcgaagttcttcgtggttgtccatgctctgttgtcattagtgcgtatgatcctgctaccctaaaacaaatccaccaagcttttcttactcctacgttccgggtctatcccaatagtgaccttaaaggggttgctttaggcggagcattaaaaaatgtcattgctattgcctgtggaatttctgatggattccggttcggagacaatgctaaatctggactcgtgactcgcgggctacatgagatccgcaaatttgccacgattatgggatgtcgtccagataccttgaatggacttgcaggtctaggagatctctgtaccacttgcttttccgctttcagcagaaacaccctttttggaaaaatgcttgctgaaggcttaacccctgaacaggcaaaaacaaaaattggcatggtggttgaaggagtttacacagctctatccgctcatcaaattgccacacatcacaagatagacatgcccatcactactggtgtctatcgtgttctttatgaaaatctagatattcaaaagggaattgcccagcttcttcaacggaatacaaaagaagaatatttataa

SEQ ID NO: 119771 - protein, 334 aa, Chlamydia muridarum
MKETIAYLGMGMWGFSLANLLANNGHRVVGWARNPSLIEQLSTQRQHPAAPHVTIPSNLSFTSSMEEALDGATMIVEGVTSAGMRPVLNQLKSITDLQIPLVITSKGIEQNTGLLLSEIALEIFGKPAAKYLGYLSGPSIASEVLRGCPCSVVISAYDPATLKQIHQAFLTPTFRVYPNSDLKGVALGGALKNVIAIACGISDGFRFGDNAKSGLVTRGLHEIRKFATIMGCRPDTLNGLAGLGDLCTTCFSAFSRNTLFGKMLAEGLTPEQAKTKIGMVVEGVYTALSAHQIATHHKIDMPITTGVYRVLYENLDIQKGIAQLLQRNTKEEYL

SEQ ID NO: 119772 - DNA, 1005 bp, Chlamydia pneumoniae
  CDS (1)..(1005): transl_table=11
atgaaacaacacatcggctacttaggtatgggaatttgggggttttgtctagcctccctacttgcgaataagggatatcctgttgtggcatggtcccggaaccctgacctaatcaagcaattacaagaagaacgacgtcatcctttagctcccaatgttgtcatctctccaaacctttcattcactacagacatgaaagaagcgatccacaatgctttcatgattgtagaaggagtgacctccgcaggaatccgtcccgtagcagagcaattaaaacaaatcactgacctctcggtcccctttgtaattacctctaagggaatcgagcaaaatacaggactcctcctcagtgaaatcatgctcgaagtgcttggagattccgtgactccatatttagggtatctcagtggtccttccatcgctaaagaggtcctaaacggttctccctgttctgtcgtagtcagcgcttacgattcacaaactctcaaacaaatccacgaagctttttccctccccaccttccgagtctaccctaataccgatattaaaggtgctgctctcggaggagctttgaaaaatgtgattgctattgcctgtgggattgctgagggattatcgtttggaaacaatgcaaaagcaggccttgtgacccggggattgcatgaaatgcgtaaactcgccgctatcatggattgtaaaccagaaactctaaatggccttgcaggtcttggagatctttgtgttacctgcttctcagagtcgagtcggaatttacggttcgggcaccttcttgctcaaggtcttactttcgaacaagcaaaagcaaaaattgggatggtagtcgaaggagcctacacagcactttctgcataccaagtcgccaaacatcataaaatcgatatgcccatcactacgggaatctatcgcgttctctatgaaaatcttgatctcaaagagggcattgctctcctcttacagagaaatacaaaagaagagttcctataa

SEQ ID NO: 119773 - protein, 334 aa, Chlamydia pneumoniae
MKQHIGYLGMGIWGFCLASLLANKGYPVVAWSRNPDLIKQLQEERRHPLAPNVVISPNLSFTTDMKEAIHNAFMIVEGVTSAGIRPVAEQLKQITDLSVPFVITSKGIEQNTGLLLSEIMLEVLGDSVTPYLGYLSGPSIAKEVLNGSPCSVVVSAYDSQTLKQIHEAFSLPTFRVYPNTDIKGAALGGALKNVIAIACGIAEGLSFGNNAKAGLVTRGLHEMRKLAAIMDCKPETLNGLAGLGDLCVTCFSESSRNLRFGHLLAQGLTFEQAKAKIGMVVEGAYTALSAYQVAKHHKIDMPITTGIYRVLYENLDLKEGIALLLQRNTKEEFL

SEQ ID NO: 119774 - DNA, 1002 bp, Chlorobium tepidum; identical to SEQ ID NO: 58955
  CDS (1)..(1002): transl_table=11

SEQ ID NO: 119775 - protein, 333 aa, Chlorobium tepidum; identical to SEQ ID NO: 58956

SEQ ID NO: 119776 - DNA, 1005 bp, Chromobacterium violaceum
  CDS (1)..(1005): transl_table=11
atgaaactggcgattctcggcgccggcgcctggggcagcgcgctggcgatagcttttgcccgtcaccaccaggtgacgctgtgggcgcgcgacgccgaacagatccggcaactgggcgaggagcgggtcaaccgccgctatctgccggattgtccgtttccggagcagctgaagctgtcgtccgatctggccgaggccgcgcatgacgccgagctggtgctgatcgtcacgccgatggcggggctgcggccgacgctgaaggcgttgaccgcgctggatgcgccgctgccgcccatcctgtgggcgtgcaagggcttcgaggctggctccagcctgctgccgcaccaggtggcggaggaggagctgccggccgatcatctgtacggcgcgctgtccggccccagtttcgcccgcgaggtggcgcagggcctgccggcggcggtgaccatcgcttccgatcacgccgagttcgccgccagcgtcgcgcgcgagctgcacagtccgctgctgcggctgtacgccaacgacgacctggtgggcgtcgaggtcggcggcgcggtgaagaacgtgatggcgatcgccaccggcgtcgccgacgggctggatttcggcatgaacgcgcgcgcggcgctgatcacccgcgggctggccgagatcacccggctcgcgatggcgctgggcgccagcccgcagaccatgatgggcctgtccggcatgggcgatctgatcctcacctgcaccggcgcgctgtcgcgcaaccgccaggtgggcctgaagctggccgagggcaagcccctgcagcaggtgctggaggagctgggccacgtggccgagggcgtggccaccgcgcgcgaggtgctgaccatggccgagcggctgcaggtggacatgccgatcaccgccgcggtgtgcggcctgctgtaccagggccacgatccgcaacaagtggtggacggcctgctcaggcgttcgcccaagtccgaatccggcggcttgctggattag

SEQ ID NO: 119777 - protein, 334 aa, Chromobacterium violaceum
MKLAILGAGAWGSALAIAFARHHQVTLWARDAEQIRQLGEERVNRRYLPDCPFPEQLKLSSDLAEAAHDAELVLIVTPMAGLRPTLKALTALDAPLPPILWACKGFEAGSSLLPHQVAEEELPADHLYGALSGPSFAREVAQGLPAAVTIASDHAEFAASVARELHSPLLRLYANDDLVGVEVGGAVKNVMAIATGVADGLDFGMNARAALITRGLAEITRLAMALGASPQTMMGLSGMGDLILTCTGALSRNRQVGLKLAEGKPLQQVLEELGHVAEGVATAREVLTMAERLQVDMPITAAVCGLLYQGHDPQQVVDGLLRRSPKSESGGLLD

SEQ ID NO: 119778 - DNA, 999 bp, Clostridium acetobutylicum
  CDS (1)..(999): transl_table=11
atggggggagtaacattcataggaggaggaagctttggtacagcacttgcaataatgcttgctaaaaaaggtcataatgttgtgatttgggatagaaataaagaaattcttgaagatataaatacattaagaactaatacaagatatcttccaaacaacataataccctgctgcgttaaagcagtagatgatattgagaaggcagctaaggaaagcaaatatattgttcttgctgtcccatcttttgctataagggaagtatgcaggaaaataaagggctttttaagagaagaccaaataattataagtattgcaaaaggcatggaagaagagaccaagaagaggctgtctgaagtagttaaagaagaactttataaaaatcctgttgtagtactttctggtcctagtcatgcagaagaagttgcaaatgatattccaactacagtagtggttacttccacagatatgaaatatgcagaagaagttcaagatgtttttatgactaacagttttagggtgtacacaaatagtgatattgtaggcgttgaaataggaggagcagttaaaaatataattgctctagcatctggaataggtgatggaataggttatggtgacaacacaaaagcggcgcttatgacaagaggtatgagtgaaataatgagaataggcgtaaagcttggaggtaagccagaaactttttttggacttacaggcatgggtgaccttatagttacatgtactagtatgcacagtagaaatagaaaggctggtatactaataggtagggggatgtcatgtagggaagcatgtgataaaataggaatggtagtagaaggcgttaaagcgtgtcacaccttttatgaattaaaagaatccttaggtgtatctatgccaattaccacttcactttataaggttctatttgagaatggagatcctaaaaaagaagtgtatgagcttatggcaagagataaaaagaacgagtactatttttaa

SEQ ID NO: 119779 - protein, 332 aa, Clostridium acetobutylicum
MGGVTFIGGGSFGTALAIMLAKKGHNVVIWDRNKEILEDINTLRTNTRYLPNNIIPCCVKAVDDIEKAAKESKYIVLAVPSFAIREVCRKIKGFLREDQIIISIAKGMEEETKKRLSEVVKEELYKNPVVVLSGPSHAEEVANDIPTTVVVTSTDMKYAEEVQDVFMTNSFRVYTNSDIVGVEIGGAVKNIIALASGIGDGIGYGDNTKAALMTRGMSEIMRIGVKLGGKPETFFGLTGMGDLIVTCTSMHSRNRKAGILIGRGMSCREACDKIGMVVEGVKACHTFYELKESLGVSMPITTSLYKVLFENGDPKKEVYELMARDKKNEYYF

SEQ ID NO: 119780 - DNA, 996 bp, Clostridium perfringens
  CDS (1)..(996): transl_table=11
atgagtaaagtggcttttttaggagcaggaagttttggaacttctttaggtatattattggggaataaaggtgttacggtttctctgtgggatagagatgaaaatgtaataaatgacattaacgtaaacagaaagaatgacaaatatataaaagatttaactattcctactaatgtcactgcttataaagacttagatgaagctttaaatggggctgaatatgtagttcttgcagtaccttctcatgttataagaacagcttgtaaaaacctaaagggtaaaattaatgatgatgtaataattattaatattgctaaaggaatagaagagggtactaatttgagactatctcaagttataaatcaagaattaccaaataataaggtcgtagttttatctgggccaagtcatgcagaagaggtttcaaaaggaattccaacaactttagttgcaagttcagaatgtatggaatgtgcagagaaagttcaagacctatttatggataaaaactttagaatatatactaatgatgatatcataggtgttgaaattggaggagccgttaaaaacattatagccttagcggcaggtgtttgtgacggtataggatatggagacaattctaaggccgcattaatgactagaggaatggctgaaatagctagaataggaattaaaatgggtggaaaagctgaaactttctttggattaactggtatgggagatttaatagttacttgtacaagtatgcattcaagaaacagaagagctggaatacttataggtcaaggaaaaactgctgaagaagctatagaagaagtaggaatggttgttgaaggtataaaagcttgtaaagccttctatgagttaaaagaaaaagaaggagtaacaatgcctataactgatatagcatacaaagttctttttgaaggggcaaaggcagaaaatgctgtaagccttttaatggaaagagataagaaaaaagaagaaatataa

SEQ ID NO: 119781 - protein, 331 aa, Clostridium perfringens
MSKVAFLGAGSFGTSLGILLGNKGVTVSLWDRDENVINDINVNRKNDKYIKDLTIPTNVTAYKDLDEALNGAEYVVLAVPSHVIRTACKNLKGKINDDVIIINIAKGIEEGTNLRLSQVINQELPNNKVVVLSGPSHAEEVSKGIPTTLVASSECMECAEKVQDLFMDKNFRIYTNDDIIGVEIGGAVKNIIALAAGVCDGIGYGDNSKAALMTRGMAEIARIGIKMGGKAETFFGLTGMGDLIVTCTSMHSRNRRAGILIGQGKTAEEAIEEVGMVVEGIKACKAFYELKEKEGVTMPITDIAYKVLFEGAKAENAVSLLMERDKKKEEI

SEQ ID NO: 119782 - DNA, 1050 bp, Clostridium tetani
  CDS (1)..(1050): transl_table=11
ttgattttacaggaacaggaattaaaatggagtttagagaaaggaaagagtaatatgacaattaaaggtataacttttattggaggaggaagttttggtactgctttaggtattatgttagccaaaaagggttataacataaatatatgggatagaaaaccccatgtgatagcagatataaacgaaaaaaaagaaaatataaaatatcttcccaatgtggttattccatcaaatgtaaaagcctataaaggtatgaaagaggctttagtgggaattaaatatgtagttatttctgtaccatctcatgctataagagaaatatgcagaaatatgaaagattacttaaaagaagatgctattataataagtgtggcaaagggtatagaagaacatagtggaaaaaggttatctcaaattataaaagaagaattacctaaaaatcctgtggtaatactttcaggaccaagtcatgcagaagaagtagcacaagatataccaactactgtagtagttacatcagaagatgttaaggcatctttagaagtacagaatttatttagtacaaataaatttagagtatacactaatgatgatataataggtgttgaaataggaggggcagtgaagaatataattgctttagctgctggtatctccgatggaataggatatggagataatacaaaagctgctcttatgactagaggaataaatgagataataagaattggagaaaagttaggaggacaaagggaaaccttttgggggctaacaggtatgggggatatgatagtaacctgtactagtatgcatagtagaaatagaagagctggtcttttaataggaaaaggtttatctatggaagaggctatagaagaagtaggcatggtggtagaaggtataaaagcttgtaaagccttttatgaattaaaggaaaagttaaaagtatctatgcccataacggatgctttatatagagttctatttcaaggggaagatgctaaatactgtgtatatgaattgatgactagagacaaaaaagatgaataa

SEQ ID NO: 119783 - protein, 349 aa, Clostridium tetani
MILQEQELKWSLEKGKSNMTIKGITFIGGGSFGTALGIMLAKKGYNINIWDRKPHVIADINEKKENIKYLPNVVIPSNVKAYKGMKEALVGIKYVVISVPSHAIREICRNMKDYLKEDAIIISVAKGIEEHSGKRLSQIIKEELPKNPVVILSGPSHAEEVAQDIPTTVVVTSEDVKASLEVQNLFSTNKFRVYTNDDIIGVEIGGAVKNIIALAAGISDGIGYGDNTKAALMTRGINEIIRIGEKLGGQRETFWGLTGMGDMIVTCTSMHSRNRRAGLLIGKGLSMEEAIEEVGMVVEGIKACKAFYELKEKLKVSMPITDALYRVLFQGEDAKYCVYELMTRDKKDE

SEQ ID NO: 119784 - DNA, 1005 bp, Colwellia psychrerythraea
  CDS (1)..(1005): transl_table=11
atgtctttagctgcaaaaattacagtgttaggtgcagggtcttatggcactgcgctagcaatttgtttagccagaaatggtcataaaaccttgttatggggacgtgatgataatcatgtcgctgcaatggagcaagatagagaaaataataagtatcttgctgattgcccgttccctgaaaatttagcactagaagcagatttagaaaaagcagtgcaagcgagtgataacctgttagtggtagtgccaagccatgcttttgcagatatgctaaagcaaattaaacctatgttaaccgagaatgcaaaaattgcttgggcaactaaggggcttgacccacaaaccggtgatttattgcaaaacgttgctagaacagtacttggcgatagagtgtctttagctgttttatctggcccaacgtttgctaaagaaatggcctcaggcttaccaacggctatttcgttgtcttctgaggacgatgagtttgttgctgaattatctgacttactgcattgtgaaaaacgttttcgagtctactctaataaagactttattggcgtgcagctcggcggagcggttaaaaatgttatcgctattgccgcaggtatagctgatggtattggctttggtgcaaatgcacgtacagcgttaatcactcgtggattggctgaaatgactcgtttaggtttagcattaaacgctgagcccgctacttttatgggcatggcaggtttaggtgacttggtactgacttgtacggataatcaatcgcgtaatcgtcgatttggtttagcgttaggtcaaggcaaagaagttgaacaagcgataactgatatcggtcaagtcgttgaaggttaccgaaataccaaagaagtttatatgcttgcccagcgacatgatgttgaaatgcctattgttgagcaagtatatcaggtactttatcgcggaaaagatgctaagttggcagcggctgatttactttctcgtgataagaaatttgagtaa

SEQ ID NO: 119785 - protein, 334 aa, Colwellia psychrerythraea
MSLAAKITVLGAGSYGTALAICLARNGHKTLLWGRDDNHVAAMEQDRENNKYLADCPFPENLALEADLEKAVQASDNLLVVVPSHAFADMLKQIKPMLTENAKIAWATKGLDPQTGDLLQNVARTVLGDRVSLAVLSGPTFAKEMASGLPTAISLSSEDDEFVAELSDLLHCEKRFRVYSNKDFIGVQLGGAVKNVIAIAAGIADGIGFGANARTALITRGLAEMTRLGLALNAEPATFMGMAGLGDLVLTCTDNQSRNRRFGLALGQGKEVEQAITDIGQVVEGYRNTKEVYMLAQRHDVEMPIVEQVYQVLYRGKDAKLAAADLLSRDKKFE

SEQ ID NO: 119786 - DNA, 996 bp, Corynebacterium diphtheriae; identical to SEQ ID NO: 58957
  CDS (1)..(996): transl_table=11

SEQ ID NO: 119787 - protein, 331 aa, Corynebacterium diphtheriae; identical to SEQ ID NO: 58958

SEQ ID NO: 119788 - DNA, 1020 bp, Corynebacterium efficiens
  CDS (1)..(1020): transl_table=11
gtgatcgaaagggtgtggcagttggtttccgtagcggtgatgggtgcgggttcctggggaaccaccctggccaaggtctttgccgatgccggcaacaccgtccaactgtgggcccggcgcgagagtctcgccgagacgatccgcaccagccgggagaatcccgactacctgccggggatcaccctgccggactcggtcatcgtcacctccgatgctcaggccgcactcgacgggtgttccatcgtggtgctcggtatcccctcgcaggcgctgcgcaccaccctggtggagtggagggatctcatttcccccgatgccacactcgtctcgctggccaagggtatcgagaaggacacccacctgcggatgagccaggtgatcgcggaggtcaccggtgctgatccttcgcggatcgcggtgttgtccggcccgaacctggcccgtgagatcgcggagggccagccggcggccacggtgatcgcctgtgaggacgagaaccgggccaagctggtgcaggctgcggtcgcagcaccgtatttccgcccctacaccaacaccgatgtcatcggcacggaactgggtggtgcatgtaagaacgtcatcgccctggcctgcggtatcgcccacgggttcggcctgggggagaactccaatgcctccctgatcacccgggggctcgcggagatcgcgcgtctgggcgaggccatgggggcggatccccgcaccttcgccgggctcgccggtatgggggacctggtggccacctgttcctcgccgctgtcacgtaaccgcaccttcggtgaccgtctcggccggggtgaatcattggagcaggcccgcgaggccacccatggtcaggtggccgagggtgtgatctcctcccagtccatccatgacctggcggtcgggttgggcgtcgagatgcccatcacccaggccgtctacgcggtgtgccatcaggggatggcggtgcgggagatggtcgacgcgctgatgggcaggtcgaagaaggcggagtga

SEQ ID NO: 119789 - protein, 339 aa, Corynebacterium efficiens
MIERVWQLVSVAVMGAGSWGTTLAKVFADAGNTVQLWARRESLAETIRTSRENPDYLPGITLPDSVIVTSDAQAALDGCSIVVLGIPSQALRTTLVEWRDLISPDATLVSLAKGIEKDTHLRMSQVIAEVTGADPSRIAVLSGPNLAREIAEGQPAATVIACEDENRAKLVQAAVAAPYFRPYTNTDVIGTELGGACKNVIALACGIAHGFGLGENSNASLITRGLAEIARLGEAMGADPRTFAGLAGMGDLVATCSSPLSRNRTFGDRLGRGESLEQAREATHGQVAEGVISSQSIHDLAVGLGVEMPITQAVYAVCHQGMAVREMVDALMGRSKKAE

SEQ ID NO: 119790 - DNA, 999 bp, Corynebacterium glutamicum
  CDS (1)..(999): transl_table=11
gtggtttctgtaagcgtgatgggtgcaggttcctggggaaccacgttggccaaggtcttctctgatgctggcaacgctgtgacgttgtgggcgaggcgggaagagttggcaagcaccatccgtgacagccatgaaaaccgtgattaccttccggggattacgttgccggagtcgctgcaggtcacatcatcggcaacggaggctttagagggcgcagccattgtggtgttggcgattccttcgcaggcgttgcgtggcaatttggcggagtggaaagagacgatcccgcaggatgcgaccttggtgtccttggctaaaggtattgaaaagggcacgcacctgcggatgagtgaagtgatcgcggaggtgacggaagcggatccttcacgcatcgcggtgttgtcggggccaaaccttgctcgtgagatcgcggaggggcagcctgcagctacggtgattgcttgccctgatgaaaaccgagcgaaacttgtgcaggctgcagtggctgcgccgtatttccgcccgtacaccaacactgatgtggtgggcactgaaatcggtggtgcgtgtaagaacgtcatcgcgctggcctgtggtatttcccatggttacggcctgggtgagaacaccaatgcatcgttgattactcgtggccttgcagagatcgcacgcctcggtgccacattgggtgcggatgcgaagactttttctggccttgcgggaatgggcgacttggtggctacgtgttcatcaccgctgtcgcgtaaccgcagcttcggtgagcgtttgggtcagggtgaatccctagagaaggctcgcgaggcaaccaatggtcaggttgcggagggtgttatttcctcgcagtcgatttttgatcttgccaccaagcttggtgtggagatgccgatcacccaggctgtctacggtgtgtgccaccgagatatgaaagtaactgacatgattgtggctctcatgggcaggtctaagaaggctgagtag

SEQ ID NO: 119791 - protein, 332 aa, Corynebacterium glutamicum
MVSVSVMGAGSWGTTLAKVFSDAGNAVTLWARREELASTIRDSHENRDYLPGITLPESLQVTSSATEALEGAAIVVLAIPSQALRGNLAEWKETIPQDATLVSLAKGIEKGTHLRMSEVIAEVTEADPSRIAVLSGPNLAREIAEGQPAATVIACPDENRAKLVQAAVAAPYFRPYTNTDVVGTEIGGACKNVIALACGISHGYGLGENTNASLITRGLAEIARLGATLGADAKTFSGLAGMGDLVATCSSPLSRNRSFGERLGQGESLEKAREATNGQVAEGVISSQSIFDLATKLGVEMPITQAVYGVCHRDMKVTDMIVALMGRSKKAE

SEQ ID NO: 119792 - DNA, 999 bp, Coxiella burnetii
  CDS (1)..(999): transl_table=11
atggaaccctttaaacatcctattgctattcttggggccggttcgtgggggaccgcccttgctttagtattagcacgcaaaggccagaaagtccgcttatggtcgtatgaaagcgatcacgttgatgaaatgcaagcggagggcgtgaataatcgttatttgcccaattatccttttcctgaaacgcttaaagcgtattgcgatttgaaagccagtctggaaggcgttacggatattttaatcgtggtgcctagttttgcttttcatgaagttattacccgaatgaaaccgctcatcgatgccaaaacccgcattgcctgggggactaaaggcttggccaaagggagtcgtttattgcacgaggtggttgcaacggaattaggtcaagtgccgatggcagtaatatccggccccagtttagccaccgaagtcgctgcaaatcttcccaccgcggtgagtttagccagcaataacagccaattttcaaaagatttaatcgagcggctgcacggccagcgttttcgcgtttacaaaaacgatgacatgatcggcgttgaattatgcgggagcgtgaaaaatatattagccattgcgaccggaatcagcgacggcttaaaattaggctccaatgcacgggctgcgttaatcactcgtgggctaacagaaatgggacgtctggtttccgtctttggcggtaaacaagaaaccctcacgggtctcgctggcttaggggatcttgtcctgacttgcaccgataatcaatcccgcaaccgccgtttcggcttagccttaggcgagggcgtcgataaaaaagaagcccaacaggccatcggtcaagcgatcgaaggcctttataatactgatcaagtgcatgcccttgctcaaaaacacgctatcgaaatgccactcaccttccaagtccatcgtatcctgcacgaggatttagaccctcaacaggccgtccaagaattgttggagcgttcgccaaaggcggagtga

SEQ ID NO: 119793 - protein, 332 aa, Coxiella burnetii
MEPFKHPIAILGAGSWGTALALVLARKGQKVRLWSYESDHVDEMQAEGVNNRYLPNYPFPETLKAYCDLKASLEGVTDILIVVPSFAFHEVITRMKPLIDAKTRIAWGTKGLAKGSRLLHEVVATELGQVPMAVISGPSLATEVAANLPTAVSLASNNSQFSKDLIERLHGQRFRVYKNDDMIGVELCGSVKNILAIATGISDGLKLGSNARAALITRGLTEMGRLVSVFGGKQETLTGLAGLGDLVLTCTDNQSRNRRFGLALGEGVDKKEAQQAIGQAIEGLYNTDQVHALAQKHAIEMPLTFQVHRILHEDLDPQQAVQELLERSPKAE

SEQ ID NO: 119794 - DNA, 1331 bp, Cuphea lanceolata
  CDS (3)..(1121)
caatggctccctctgagctcaactgcacccaccagaaccagcattcaagcggttacgacggacccagatcgagggtcaccgttgtcggtagtggaaactggggtagtgttgctgccaagctcattgctaccaataccctcaagcttccatcttttcatgatgaagtgagaatgtgggtatttgaggagacgctaccgagcggcgagaagcttactgatgtcatcaaccagaccaatgaaaatgttaagtatctccccggaattaagctcggtaggaatgttgttgcagatccagacctcgaaaacgcagttaaggatgcaaatatgctcgtgtttgtgacaccgcatcagttcatggagggcatctgcaaaagactcgaagggaaaatacaagaaggagcacaggctctctcccttataaagggcatggaggtcaaaatggaggggccttgcatgatctcgagcttaatctctgatcttctcgggattaactgctgtgtcctaatgggggcaaacatcgctaatgagattgctgttgagaaattcagtgaagcgacagtcgggttcagagaaaatagagatattgcagagaaatgggttcagctctttagcactccgtacttcatggtctcagctgttgaagatgttgaaggagtagaactttgtggaacactgaagaatatcgtggccatagcagccggttttgtggatggattggagatgggaaacaacacaaaagcagcaattatgaggatcgggttacgggagatgaaggcattctccaagcttttgtttccatctgttaaggacactactttcttcgagagctgtggagtcgctgacctcatcacaacttgtttgggcgggagaaacagaaaagttgctgaggcttttgcaaagaatggcgggaaaaggtcattcgatgatctcgaagcagagatgctccgggggcaaaaattacagggtgtctcaacagcaaaggaggtctatgaagtcttggggcaccgaggctggctcgagctgttcccgctcttctcaaccgtgcacgagatatccactggccgtctgcctccttcagccatcgtcgaatacagcgaacaaaaaaccatcttctcttggtagagcaagaggctgcccttgaaagactaagagccaccctgccctgtttaaagggctaaaagtttaatatttctctgcagcctaaacagtcggaaacattgaaaatctaggatgtataagaaaaaaaaaagaaggtttgaaggaagtatggatgggcatgaatgtatttattttcggtatactctttttctgcaaaaataatttcttcagaaa

SEQ ID NO: 119795 - protein, 372 aa, Cuphea lanceolata
MAPSELNCTHQNQHSSGYDGPRSRVTVVGSGNWGSVAAKLIATNTLKLPSFHDEVRMWVFEETLPSGEKLTDVINQTNENVKYLPGIKLGRNVVADPDLENAVKDANMLVFVTPHQFMEGICKRLEGKIQEGAQALSLIKGMEVKMEGPCMISSLISDLLGINCCVLMGANIANEIAVEKFSEATVGFRENRDIAEKWVQLFSTPYFMVSAVEDVEGVELCGTLKNIVAIAAGFVDGLEMGNNTKAAIMRIGLREMKAFSKLLFPSVKDTTFFESCGVADLITTCLGGRNRKVAEAFAKNGGKRSFDDLEAEMLRGQKLQGVSTAKEVYEVLGHRGWLELFPLFSTVHEISTGRLPPSAIVEYSEQKTIFSW

SEQ ID NO: 119796 - DNA, 990 bp, Dechloromonas aromatica; identical to SEQ ID NO: 58959
  CDS (1)..(990): transl_table=11

SEQ ID NO: 119797 - protein, 329 aa, Dechloromonas aromatica; identical to SEQ ID NO: 58960

SEQ ID NO: 119798 - DNA, 1080 bp, Dehalococcoides ethenogenes; identical to SEQ ID NO: 58961
  CDS (1)..(1080): transl_table=11

SEQ ID NO: 119799 - protein, 359 aa, Dehalococcoides ethenogenes; identical to SEQ ID NO: 58962

SEQ ID NO: 119800 - DNA, 1080 bp, Dehalococcoides sp
  CDS (1)..(1080): transl_table=11
atgtctaaagtttgtattataggcactactacctggggtattactctgggtacaattatagcccacaaagggcgtgaagtaatgctctgggcacgcaccgaggacgaagctatgcttctttccactcagcgccgtccggctgactttttgccggaaaactatcatttccccgaattcatgaatgtaactgcctgtttggaagaagctgtagccggggcagacatggtcttgctagctgtaccttcccagcggatgcgccccaatatacggctggttgcacccctgctgactaaaagcatgctgatttgcagtgccgccaaggggctggaaataggcactgccaaacgtatgagccaagtaattaccgacgagatttcccctgatttcgcaaagaatatctgcgttctttcaggcccgaatttggctatggagatattaaaagggttgccggctgtaactgtgctggctgccgatactgaaaagacagctaaaaaagccgccaaactgataaccgctgccaatttttctgcctataccaatacagatattataggggtggaactgggcggctcactcaaaaacattatcgctctgggggcaggcatagtagacgggctgaatttgggcaacaacgccaagagcgcccttattacccgtggcctgactgaaatttccgcacttggggcagctttgggggctaaccccctgaccctatccggtctggctggtctgggtgatttgattgccacctgctcaagcaatctctcacgcaaccattttgtgggagtggaactgaccaaaggccgaagcctgaatgatatcatgtacaatatgagcaatgtagccgaaggtgtatctactactgcggtagcttatgaaatggcccgctccatggatttggaaatgccggtaactgaaaacatctataatgtgctttacaataatgcagacccgaaagaagccgccagaatacttatggatgcccaagctacccatgagctggcagggcgtaaatggaatctgtttaaaatgttcagaaaacgcaaagcccgcaaaacacccgaacttaaccctgattaa

SEQ ID NO: 119801 - protein, 359 aa, Dehalococcoides sp
MSKVCIIGTTTWGITLGTIIAHKGREVMLWARTEDEAMLLSTQRRPADFLPENYHFPEFMNVTACLEEAVAGADMVLLAVPSQRMRPNIRLVAPLLTKSMLICSAAKGLEIGTAKRMSQVITDEISPDFAKNICVLSGPNLAMEILKGLPAVTVLAADTEKTAKKAAKLITAANFSAYTNTDIIGVELGGSLKNIIALGAGIVDGLNLGNNAKSALITRGLTEISALGAALGANPLTLSGLAGLGDLIATCSSNLSRNHFVGVELTKGRSLNDIMYNMSNVAEGVSTTAVAYEMARSMDLEMPVTENIYNVLYNNADPKEAARILMDAQATHELAGRKWNLFKMFRKRKARKTPELNPD

SEQ ID NO: 119802 - DNA, 987 bp, Deinococcus radiodurans; identical to SEQ ID NO: 58963
  CDS (1)..(987): transl_table=11

SEQ ID NO: 119803 - protein, 328 aa, Deinococcus radiodurans; identical to SEQ ID NO: 58964

SEQ ID NO: 119804 - DNA, 993 bp, Desulfovibrio desulfuricans; identical to SEQ ID NO: 58965
  CDS (1)..(993): transl_table=11

SEQ ID NO: 119805 - protein, 330 aa, Desulfovibrio desulfuricans; identical to SEQ ID NO: 58966

SEQ ID NO: 119806 - DNA, 1059 bp, Desulfitobacterium hafniense
  CDS (1)..(1059): transl_table=11
ttggctaaaatagctgtctatggcgcaggcagttggggaacagccctggccgtttccatgggtaaagcaggtcatgaggttgccttagtagggcgaaacctcagcgagatggatctcatggagcagagacgcgaaaaccgtccttatctgccgggggtggtgctgcccccaacagtgcgccccacaggggacgcaggggtgcttgaggaagcggaaatgctggtgctcagtgtgccctcccatagcgtacgggagacggcccaaaagatcagggcctatctccaaccgggaaccatcgttgtgaacacggccaaagggctggaggagggaagtcacaagcggctttctcaggtcttgactgaagaacttccccatcatcccatcgtggttttgtccggtcccagccacgctgaggaagtaggcaaggatatgccgaccacggttgtggtggcttctcaaaacagtcaggctgcggaagctgttcaggatatgctgatgactcctaaattccgcgtctacaccaatccggataccatcggtgtagaattgggaggagcttttaaaaatattattgctctgtgtgccggctttgccgacggcttaggctttggggataataccaaggctgccctgatgacccgtgggattgctgagattactcgcttaggtgcggccatgggagggaacccgctgacctttgccggcctggccggagtgggggatcttattgtaacctgcaccagccggcatagccgcaatcaccgggctggggttgctttgggcgagggtaaacctttggagcaagtcctcaaagaggtgggtatggtggtcgagggcgttcgcaccacccgcgttgcctacgagctgagccgtcagtatgaaatctccatgcccatcacagaacaggcttaccaggttctttttcagggtgccgatcccagggcggcagtatccgctctgatgatgagaggcaaaaagcacgagattgaggaagtggctctgattgccatggaacagggttcttatcaggagaatggcccggatgatcatggtgagtaa

SEQ ID NO: 119807 - protein, 352 aa, Desulfitobacterium hafniense
MAKIAVYGAGSWGTALAVSMGKAGHEVALVGRNLSEMDLMEQRRENRPYLPGVVLPPTVRPTGDAGVLEEAEMLVLSVPSHSVRETAQKIRAYLQPGTIVVNTAKGLEEGSHKRLSQVLTEELPHHPIVVLSGPSHAEEVGKDMPTTVVVASQNSQAAEAVQDMLMTPKFRVYTNPDTIGVELGGAFKNIIALCAGFADGLGFGDNTKAALMTRGIAEITRLGAAMGGNPLTFAGLAGVGDLIVTCTSRHSRNHRAGVALGEGKPLEQVLKEVGMVVEGVRTTRVAYELSRQYEISMPITEQAYQVLFQGADPRAAVSALMMRGKKHEIEEVALIAMEQGSYQENGPDDHGE

SEQ ID NO: 119808 - DNA, 1020 bp, Desulfotalea psychrophila; identical to SEQ ID NO: 58967
  CDS (1)..(1020): transl_table=11

SEQ ID NO: 119809 - protein, 339 aa, Desulfotalea psychrophila; identical to SEQ ID NO: 58968

SEQ ID NO: 119810 - DNA, 993 bp, Desulfovibrio vulgaris
  CDS (1)..(993): transl_table=11
atgaagatagctgtactgggcggtggtagctggggcacggcccttgcgcatctactggcgggaaagggcgaggacgtgcgcctgtgggtgcgcgaccccgctgtggtcgaaggcgtgaaccgcgaccatgagaatcctcgctatctcaaggggctgcacctgcatgaggcgctacgggccacctgtgacgcgggtgaggctcttgagggggcggacatcctgctttccgtcgtgccctgccagcagacccgcacagtgctgcgcagtcttcgcccacggctgaagaccggcatggtggtggtcagcgccagcaagggcatagagacggacggtctgcgcaccgtgggcgagatggtcgaagacgagcttgcggggttggcaccccgctacgctgtcatctccggcccttcgttcgccgcggaggtcgttgccggaatgcccaccgccgtggtgctcggctgtgcagaccgcgaccttggcggcaccttgcgtgaggtgttctccaccccgacgttccgcacctactcgtgcaccgatgttcgcggtgtcgaactcggcggggcggtcaagaacgtcatcgccatcgccgcaggcctttccgacggcctcggcttcggcagcaacgcgcgcgccggactcatcacccgaggacttgcggagatgggacggcttggcgtcgcactcggggcgcgggggtcgacgttcatggggctttcggggcttggtgacctcgtgctcacctgtacgggtgacctgtcgcgcaaccggcaggtggggcttcgtcttgccgaagggcaggggctcgatgccatcgtcgcgggcatgggcatggtggccgaaggcgtgaagacaaccgaggctgtgtacgagttggcgcagcgtgaaggtgtcgacctgcccatcacacaggccatgtacgccgtgctgcatgacgggcgcgaccctcgtgacatggtgcaggaactcatgacacgcgagcttcgcgaagagtaa

SEQ ID NO: 119811 - protein, 330 aa, Desulfovibrio vulgaris
MKIAVLGGGSWGTALAHLLAGKGEDVRLWVRDPAVVEGVNRDHENPRYLKGLHLHEALRATCDAGEALEGADILLSVVPCQQTRTVLRSLRPRLKTGMVVVSASKGIETDGLRTVGEMVEDELAGLAPRYAVISGPSFAAEVVAGMPTAVVLGCADRDLGGTLREVFSTPTFRTYSCTDVRGVELGGAVKNVIAIAAGLSDGLGFGSNARAGLITRGLAEMGRLGVALGARGSTFMGLSGLGDLVLTCTGDLSRNRQVGLRLAEGQGLDAIVAGMGMVAEGVKTTEAVYELAQREGVDLPITQAMYAVLHDGRDPRDMVQELMTRELREE

SEQ ID NO: 119812 - DNA, 1053 bp, Drosophila americana; identical to SEQ ID NO: 58969
  CDS (1)..(1053)

SEQ ID NO: 119813 - protein, 350 aa, Drosophila americana; identical to SEQ ID NO: 58970

SEQ ID NO: 119814 - DNA, 1053 bp, Drosophila ezoana
  CDS (1)..(1053)
atggcggaaaaagtaaatgtttgcatcgtgggctctggcaactggggttcggccatagcgaaaatcgtgggcgccaatgcttccgcgctgcccgagtttgaggagcgcgtcacaatgtttgtctacgaggagatgattgatggcaagaagttaacggaaatcatcaatgaaacgcacgagaatgttaaatacctgaagggacacaaactgccaacaaatgtggttgctgtacctgatctggttgaggctgccaagaatgccgatatactaatctttgtggtgccacatcagtttataccaaatttctgcaaacaattgctgggcaagatcaagccaaatgccattgccatatccctgatcaagggcttcgataaggccgagggcggcggcattgatctgatatcacacattattacccgccatttgaagataccgtgcgccgtgctgatgggcgctaatctcgccaacgaggtggccgagggcaacttttgcgagacgacaatcggctgcacggacaaaaagtacggcaaggtgctgcgtgatctcttccaggccaatcactttcgtgtcgtggtcgtcgaggatgccgatgccgttgaggtgtgcggtgccctaaagaacattgttgcctgtggtgcgggctttgtcgatggactcaagctgggcgataataccaaggcagcggtcattcgtttgggtcttatggaaatgatacgctttgtcgatgtcttctatccgggcagcaaattgtccacattcttcgagagctgcggtgttgcggatctcatcacgacgtgttacggtggtcgcaatcgtcgtgtctcagaggcttttgtcacgtctggcaagacaattgaggaactggaaaaggagatgctcaatggccagaaattgcagggcccgcccactgccgaggaggttaactatatgttgaaaaacaaaggcctggaggataaattcccattgttcaccgccatacacaaaatttgcacaaatcagcttaagcctaaagatttaatcgattgcatacgcaatcatcccgagcatatgtaa

SEQ ID NO: 119815 - protein, 350 aa, Drosophila ezoana
MAEKVNVCIVGSGNWGSAIAKIVGANASALPEFEERVTMFVYEEMIDGKKLTEIINETHENVKYLKGHKLPTNVVAVPDLVEAAKNADILIFVVPHQFIPNFCKQLLGKIKPNAIAISLIKGFDKAEGGGIDLISHIITRHLKIPCAVLMGANLANEVAEGNFCETTIGCTDKKYGKVLRDLFQANHFRVVVVEDADAVEVCGALKNIVACGAGFVDGLKLGDNTKAAVIRLGLMEMIRFVDVFYPGSKLSTFFESCGVADLITTCYGGRNRRVSEAFVTSGKTIEELEKEMLNGQKLQGPPTAEEVNYMLKNKGLEDKFPLFTAIHKICTNQLKPKDLIDCIRNHPEHM

SEQ ID NO: 119816 - DNA, 1020 bp, Escherichia coli O157
  CDS (1)..(1020): transl_table=11
atgaaccaacgtaatgcttcaatgactgtgatcggtgccggctcgtacggcaccgctcttgccatcaccctggcaagaaatggccacgaggttgtcctctggggccatgaccctgaacatatcgcaacgcttgaacgcgaccgctgtaacgccgcgtttctccccgatgtgccttttcccgatacgctccatcttgaaagcgatctcgccactgcgctggcagccagccgtaatattctcgtcgtcgtacccagccatgtctttggtgaagtgctgcgccagattaaaccgctgatgcgtcctgatgcgcgtctggtgtgggcgaccaaagggctggaagcggaaaccggacgtctgttacaggacgtggcgcgtgaggccttaggcgatcaaattccgctggcggttatctctggcccaacgtttgcgaaagaactggcggcaggtttaccgacagctatttcgctggcctcgaccgatcagacctttgccgatgatctccagcagctgctgcactgcggcaaaagtttccgcgtttacagcaatccggatttcattggcgtgcagcttggcggtgcggtgaaaaacgtcattgccattggcgcggggatgtccgacggtatcggttttggtgcgaatgcgcgtacggcactgatcacccgtgggctggctgaaatgtcgcgtcttggcgcggcgctgggtgccgatcctgccacctttatgggcatggcggggctgggcgatcttgtgcttacttgtaccgacaaccagtcgcgtaaccgccgttttggcatgatgctcggtcagggcatggatgtacaaagcgcgcaggagaagattggtcaggtggtggaaggctaccgcaatacgaaagaagtccgcgaactggcgcatcgcttcggcgtagaaatgccaataaccgaggaaatttatcaagtattatattgcggaaaaaacgcgcgcgaggcagcattgacgttattaggtcgtgcacgcaaggacgagcgcagcagccactaa

SEQ ID NO: 119817 - protein, 339 aa, Escherichia coli O157
MNQRNASMTVIGAGSYGTALAITLARNGHEVVLWGHDPEHIATLERDRCNAAFLPDVPFPDTLHLESDLATALAASRNILVVVPSHVFGEVLRQIKPLMRPDARLVWATKGLEAETGRLLQDVAREALGDQIPLAVISGPTFAKELAAGLPTAISLASTDQTFADDLQQLLHCGKSFRVYSNPDFIGVQLGGAVKNVIAIGAGMSDGIGFGANARTALITRGLAEMSRLGAALGADPATFMGMAGLGDLVLTCTDNQSRNRRFGMMLGQGMDVQSAQEKIGQVVEGYRNTKEVRELAHRFGVEMPITEEIYQVLYCGKNAREAALTLLGRARKDERSSH

SEQ ID NO: 119818 - DNA, 975 bp, Ehrlichia canis
  CDS (1)..(975): transl_table=11
atgaaaataactattttgggtgcaggatcatttgggacagcaatcgcaattgcattatcttcaatcagcacttcaattaatctatggggacgcaatcacacagatatgcaatctataacaattaatagaaaaaatcttaaatacttaccaacatatgaattaccagataatatcattccaagcagcagtatagatgaagtattatcagatcataatacttgtattatccttgcagtacctacacaacaactacgcacactatgtctttacgtacaacaacatattttcgaacaaacacctctactaatttgtagcaagggcattgaaaacatatcactcaaatttccaagtgaaatagtaaaagaaattctaccaaacaatccaacatatatattatcaggaccaagcttcgcaaaagaaattgcagcaaatctgccttgtactatagtacttgcaggagaaaatgaagttttaggtacatcactaattaataaaatgagtaataaaactttcaaaatcgtctatagcaaagacacactaggagtacagattggagctgcattaaagaatataattgcaattgcttgcggaataataacaggaaaaaatttgggaaataatgctgtagcaagtgtaattgctaaaggaatggaagaaataaaaaccttatataccgcaaaaaatgagactattaatctttcaaccttaattggtccatcatgccttggagatctaatattaacttgcactactacacattcacgtaacatgtcttttggagtagcgataggtcaaggagaagacataaacaaaatgctgaataaaaaatcagaaattatagaaggtgttagtaccgtaaaaccactaatttccttagcagaaaaactcaatatagaactaccaatttgtacgtctatatacaacttactttataaaaatgtatcactagataaaacaatatcagagatattatag

SEQ ID NO: 119819 - protein, 324 aa, Ehrlichia canis
MKITILGAGSFGTAIAIALSSISTSINLWGRNHTDMQSITINRKNLKYLPTYELPDNIIPSSSIDEVLSDHNTCIILAVPTQQLRTLCLYVQQHIFEQTPLLICSKGIENISLKFPSEIVKEILPNNPTYILSGPSFAKEIAANLPCTIVLAGENEVLGTSLINKMSNKTFKIVYSKDTLGVQIGAALKNIIAIACGIITGKNLGNNAVASVIAKGMEEIKTLYTAKNETINLSTLIGPSCLGDLILTCTTTHSRNMSFGVAIGQGEDINKMLNKKSEIIEGVSTVKPLISLAEKLNIELPICTSIYNLLYKNVSLDKTISEIL

SEQ ID NO: 119820 - DNA, 981 bp, Ehrlichia chaffeensis
  CDS (1)..(981): transl_table=11
atgaaaaccactattttaggtgcaggatcatttggtacagcaatagcatttgcattatcttctaatagtacatcagtcaacctatgggggcgcaatcatacagatatgcaatctatagcaattaatcgtaaaaatcttaaatacttgccaacgtgcaaattaccagaaaatataattgtaagcagtaacatagatgaagtactatcagattatagcacttgtattattttagcagtacctacacaacaattacgtacattatgtctgtctatacaagacaaacaacatatatttgaaaaaacacctctactaatttgcagtaaaggaatcgaaaatatatctctcaaattcccaagtgaaatagtgaaagaaatcttaccaaacaatccagcattcatactatctggaccaagcttcgcaaaagaaattgcagaagatcttccatgcaccatagtgcttgcaggagaaaatgaatctttaggtacatcaatagcacaaaagataagcaacaagacgtttaaaataatctatagccaagacatattaggggtacaaattggagccgcattgaaaaacatcatcgcaattgcctgcgggatagtaacaggcaagaacctaggaaacaatgctatagccactgttataactaaaggaatggaagaaataaagactttgtatgctgcaaaaaaccagaacattaacctctcaactttaattggtccatcgtgcctaggtgatttgatattaacttgtacaacagcacattcccggaatatgtcttttggaataacaataggccagggtgcagatataaataaaatgttaaataataactcaaaaattatagaaggtgttagtactgtaaaaccattaatatcactagcaaaagaacttaatatagaattacctatttgtacatctatatataacttactttataaaaatataccgttagagaaaacaatatcagacatattataa

SEQ ID NO: 119821 - protein, 326 aa, Ehrlichia chaffeensis
MKTTILGAGSFGTAIAFALSSNSTSVNLWGRNHTDMQSIAINRKNLKYLPTCKLPENIIVSSNIDEVLSDYSTCIILAVPTQQLRTLCLSIQDKQHIFEKTPLLICSKGIENISLKFPSEIVKEILPNNPAFILSGPSFAKEIAEDLPCTIVLAGENESLGTSIAQKISNKTFKIIYSQDILGVQIGAALKNIIAIACGIVTGKNLGNNAIATVITKGMEEIKTLYAAKNQNINLSTLIGPSCLGDLILTCTTAHSRNMSFGITIGQGADINKMLNNNSKIIEGVSTVKPLISLAKELNIELPICTSIYNLLYKNIPLEKTISDIL

SEQ ID NO: 119822 - DNA, 984 bp, Ehrlichia ruminantium
  CDS (1)..(984): transl_table=11
atgaaaatcagtattttaggtgcaggatcatttggcacagcaatagcaattgcactgtcagcacatggtatatcagttaacttatggggacgtgatcatagaaatattacacatataaacacttaccgaaaaaatttaaaatatttacccacatatcatctaccagacaacatatatgcaaccagcaatatagacgaagtattatctgacaacaatacatgtattatcttaactattcctacacaacaattacgcaccatatgtacacaaatacaacacaaacagcatatgtgtaaaaatactccaatattaatttgtagtaaaggtatcgaaattacatcactcaaatttcccagtgaaatagcagaagaaattttacaatataatccaatttttatactctctggtccaagttttgctaaagaaattgcagaacatcttccttgtagtatagtacttgctggtgataataaagaacttggtgaatcattgatagaaacaataagtaatgatgttctaaaaataatataccatcaagatattataggtgtacagattggagctgcattaaagaacataattgcaattgcatgtggaataatcgctggaaaaaatttaggtaataatgctgttgctactgttataactaaaggcatgaatgaaattaaaacactatatatagcaaaaaatcattcaatagatcttcatacattaattggtccatcatgtcttggagatctaatattaacatgtacaacagaacattcacgcaatatggcttttggactagaaataggaaaaggtagaaatataaatacattaatagatcacaacctaaagcttgttgaaggaaccagtactgtaaaaccactgatatcattagcaaaaaaacttaatgtagaactaccaatttgcatatctatttacaatttattacatgagaatatatcactagataaagccatatcaaacatattatcttag

SEQ ID NO: 119823 - protein, 327 aa, Ehrlichia ruminantium
MKISILGAGSFGTAIAIALSAHGISVNLWGRDHRNITHINTYRKNLKYLPTYHLPDNIYATSNIDEVLSDNNTCIILTIPTQQLRTICTQIQHKQHMCKNTPILICSKGIEITSLKFPSEIAEEILQYNPIFILSGPSFAKEIAEHLPCSIVLAGDNKELGESLIETISNDVLKIIYHQDIIGVQIGAALKNIIAIACGIIAGKNLGNNAVATVITKGMNEIKTLYIAKNHSIDLHTLIGPSCLGDLILTCTTEHSRNMAFGLEIGKGRNINTLIDHNLKLVEGTSTVKPLISLAKKLNVELPICISIYNLLHENISLDKAISNILS

SEQ ID NO: 119824 - DNA, 984 bp, Ehrlichia ruminantium
  CDS (1)..(984): transl_table=11
atgaaaatcagtattttaggtgcaggatcatttggcacagcaatagcaattgcactgtcagcacatggtatatcagttaacttatggggacgtgatcatagaaatactacacatataaacacctaccgaaaaaatttaaaatatttacctacatatcatctaccagacaacatatatgcaaccagcaatatagatgaagtattatctgacaacaatacatgtattatcttaactattcctacacaacaattacgcaccatatgtacacaaatacaacacaaacagcatatgtgtaaaaatactccaatattaatttgtagtaaaggtatcgaaattacatcactcaaatttcccagtgaaatagcagaagaaattttacaatataacccaatttttatactatctggtccaagttttgctaaagaaattgcagaacatcttccttgtagtatagtacttgctggcgataataaagaacttggtgaatcactgatagaaaaaataagtaatgatgttctaaaaataatataccatcaagatattataggtgtacagattggagctgcattaaagaacataattgcaattgcatgtggaataatcgctggaaaaaatttaggtaataacgctgttgctactgttataactaaaggcatgaatgaaattaaaacactatatatagcaaaaaatcattcaatagatcttcatacattaattggtccatcatgtcttggagatctaatattaacatgtacaacagaacattcacgcaatatggcttttggactagaaataggaaaaggtagaaacataaatacattaatagatcacaacctaaagcttgttgaaggaaccagcactgtaaaaccactgatatcattagcaaaaaaacttaatgtagaactaccaatttgtatatctatttacaatttattacatgagaatatatcactagataaagccatatcaaatatattatcttag

SEQ ID NO: 119825 - protein, 327 aa, Ehrlichia ruminantium
MKISILGAGSFGTAIAIALSAHGISVNLWGRDHRNTTHINTYRKNLKYLPTYHLPDNIYATSNIDEVLSDNNTCIILTIPTQQLRTICTQIQHKQHMCKNTPILICSKGIEITSLKFPSEIAEEILQYNPIFILSGPSFAKEIAEHLPCSIVLAGDNKELGESLIEKISNDVLKIIYHQDIIGVQIGAALKNIIAIACGIIAGKNLGNNAVATVITKGMNEIKTLYIAKNHSIDLHTLIGPSCLGDLILTCTTEHSRNMAFGLEIGKGRNINTLIDHNLKLVEGTSTVKPLISLAKKLNVELPICISIYNLLHENISLDKAISNILS

SEQ ID NO: 119826 - DNA, 1023 bp, Enterococcus faecalis; identical to SEQ ID NO: 58973
  CDS (1)..(1023): transl_table=11

SEQ ID NO: 119827 - protein, 340 aa, Enterococcus faecalis; identical to SEQ ID NO: 58974

SEQ ID NO: 119828 - DNA, 1020 bp, Erwinia carotovora subsp
  CDS (1)..(1020): transl_table=11
atgaacgcgtctgacgcttccatgaccgtcatcggtgccggttcatacggcaccgcattagccattacgctggcgcgtaatggccatcgagtcgtgctgtggggtcacaaccctacgcacattcaggccttacaggccgctcgttgtaatcaggcattcctgccggatgtccctttccccgattcgctacagttggaaactaatctggctcatgcgctcgctgccagtagaaacgtgctggttgtcgtgccgagccatgtattcggcgatgttttgcgtcagttgaaacctcatttgcgtgccgatgcacgtatcgtgtgggcgaccaaagggctggaagcagaaacggggcgtctgttgcaggatgtcgcacgcgaagcgttgggtgaaaccatcccgcttgcggtggtatctggcccgacatttgccaaagaattagcggccggcatgccgacggctattgctctggcatcaccggacagtgaatttgctgacgacctgcaacagctactgcattgcgggaagagcttccgtgtttacagcaacccagattttatcggcgtgcagttgggcggagcggtgaaaaacgtcattgctatcggtgctgggatgtctgacggcattgggtttggtgctaatgcacgtactgcattgatcacccgcgggctggcagaaatgacccggcttggtgcagcactgggcgcggatcctactaccttcatggggatggctgggcttggcgatttggtgctgacctgtactgataatcagtcccgtaaccgacgctttggcatgatgctggggcagggaatggacgtgcagagcgcacaggatagcattggtcaggttgttgaaggataccgcaatacgaaagaagtattggcattagcacagcgctacggcgttgaaatgccgattacggagcaactctggcaggttctgtattgtgggaaagacgcccgcgaggcggcgttaagcctattggggcgaacgcgtaaagacgaaaccgccaaattataa

SEQ ID NO: 119829 - protein, 339 aa, Erwinia carotovora subsp
MNASDASMTVIGAGSYGTALAITLARNGHRVVLWGHNPTHIQALQAARCNQAFLPDVPFPDSLQLETNLAHALAASRNVLVVVPSHVFGDVLRQLKPHLRADARIVWATKGLEAETGRLLQDVAREALGETIPLAVVSGPTFAKELAAGMPTAIALASPDSEFADDLQQLLHCGKSFRVYSNPDFIGVQLGGAVKNVIAIGAGMSDGIGFGANARTALITRGLAEMTRLGAALGADPTTFMGMAGLGDLVLTCTDNQSRNRRFGMMLGQGMDVQSAQDSIGQVVEGYRNTKEVLALAQRYGVEMPITEQLWQVLYCGKDAREAALSLLGRTRKDETAKL

SEQ ID NO: 119830 - DNA, 1011 bp, Frankia sp
  CDS (1)..(1011): transl_table=11
gtgagacgggccgcggtgcttacggccgggtcctggggaagtgtgttcgcgaaggtcctcgcggatgccggagcacgggtcaacctggtcgcccgtgaccctgagatcgtccgggcggtcaacacccgccaggtcaatccgcgctatctgccggcgatccagctgccggaccgggtgcgcgcgatgtccgacgcgggggaggcgctggccggcgcggagttcgtggtgctggccgtaccgtctcaggcgctgcgctccgtcctcgccggatgggcgcccctgattgggcccgacgccgtctacgtcagcctgatgaagggggtggaggtgggcagccagttgcggatgagcgaggtcatcacgcaggtcacaggcgtgtcgccggaccggatcgcggtggtgagcggtccgaatctggcgcccgagatcgccgccgagcagccggcggcgactgtggtcgccagtacctcgacgagcacggcggaggccgtccaggcggcgtgctggacgccctatttccgcccctacaccaacaccgacgtgatcggctgcgagctgggcggagcgatcaagaacgtcatcgcactggctgccggcatgctggagggaatgggcttcggcaccaacagcctcgcctcgttgatgacgcgcggcctggccgagaccctccgactcggggtcgcgctgggtgccgatccgatgacattcgcgggactggcgggactgggggatctcgtggcgacctgcggctccccgctctcgcgcaaccgcaccttcggcgagaaactcgggcgtggcctcacgctcgcgcaggtggaggccgaacagcagcaggtcgccgagggggtgcgctcctgccgccccctgctcgccatggccgatgacctgggcgtcgccatgccgatcacccgccaggtcgaacgggtcctctatgagggtcttcccccgatggaggccgtcaaggatctgatgagtcgggagccgggcccggagtaccggctccgtccctga

SEQ ID NO: 119831 - protein, 336 aa, Frankia sp
MRRAAVLTAGSWGSVFAKVLADAGARVNLVARDPEIVRAVNTRQVNPRYLPAIQLPDRVRAMSDAGEALAGAEFVVLAVPSQALRSVLAGWAPLIGPDAVYVSLMKGVEVGSQLRMSEVITQVTGVSPDRIAVVSGPNLAPEIAAEQPAATVVASTSTSTAEAVQAACWTPYFRPYTNTDVIGCELGGAIKNVIALAAGMLEGMGFGTNSLASLMTRGLAETLRLGVALGADPMTFAGLAGLGDLVATCGSPLSRNRTFGEKLGRGLTLAQVEAEQQQVAEGVRSCRPLLAMADDLGVAMPITRQVERVLYEGLPPMEAVKDLMSREPGPEYRLRP

SEQ ID NO: 119832 - DNA, 999 bp, Francisella tularensis subsp
  CDS (1)..(999): transl_table=11
atgcaaaaaaatatacttgttttaggggcaggagcttggggtacggcactagcattacagcttgcttatagaggacataatgtcagaattaactcatggaaagctgagcataatgaacaaatgctaaaggataataacaatcataaatacctaccgagtatagagaaatttccttctagattaaaagctattcaagattggcaagctaatatcattgagtttgatagtatactagttgcaactccaagctctggttttaagaatactattttagagctaaaagaatgtatcttaccgcagcaaaacattattagtgcaacaaaaggtttttgtcatgatagttatgcgttattaagtgaaatagctgaagatattttgccaactacaaaatttgcgttattaacaggaccaagctttgctaaagagttagctaatcagctcccaacagctgtagtagtagcctcaaaagatattaattatgcacgttatgtccaagagcttttcagtaatgagaattttagatgctacacaacaactgatatcatcggtgctcaagttggcggtgctgtcaaaaatgttctagcaatcacagctgggattgctgcaggtatggagtttggtgttaatgctcatgccgctcttattactcgtggtctagcagagataaagaaacttgggcttaaactaggtgcaaactcagaaacttttattggacttagctgtttaggggatttattgttgacatgttcggacaatcagtcgcgcaatcgtagatttggactatatttggggcagggtatgactatacaacaagcattaaaagaggtaaataatgttgttgaaggctatttcactgcaaaagctgtttataaccttgctaaaaaacataatgttgagatgcctttagtatttgctacttatagaattttgtatgaagccgctgatcctagagatatcgtcaaagaacttatgactcgtcagctaaaaaatgaaaattaa

SEQ ID NO: 119833 - protein, 332 aa, Francisella tularensis subsp
MQKNILVLGAGAWGTALALQLAYRGHNVRINSWKAEHNEQMLKDNNNHKYLPSIEKFPSRLKAIQDWQANIIEFDSILVATPSSGFKNTILELKECILPQQNIISATKGFCHDSYALLSEIAEDILPTTKFALLTGPSFAKELANQLPTAVVVASKDINYARYVQELFSNENFRCYTTTDIIGAQVGGAVKNVLAITAGIAAGMEFGVNAHAALITRGLAEIKKLGLKLGANSETFIGLSCLGDLLLTCSDNQSRNRRFGLYLGQGMTIQQALKEVNNVVEGYFTAKAVYNLAKKHNVEMPLVFATYRILYEAADPRDIVKELMTRQLKNEN

SEQ ID NO: 119834 - DNA, 1008 bp, Fusobacterium nucleatum subsp
  CDS (1)..(1008): transl_table=11
atggtaaaaatatcagttattggttcaggaggatggggaatagcattagctattttattacataaaaatggacataacttaacaatatggtcttttgataaaaaggaagctgaagaattaaaaataaatagacaaaataaaactaagttacctaatatattacttccagaagatataaaagtaactgataatttaaaagaagcagttgataataaagatattttggtgcttgcagttccttcaaaagcaataagatcagtgtcaaaatctttaaaagatattatcaaagataatcaaattattgttaatgttgcaaaaggcttagaagaggatacattaaaaactatgacagatattattgaggaagagttaaaggaaaaaaatcctcaggtagcagttttatcaggtcctagccatgcagaagaagttggcaaaggaataccaactacctgtgttgtatcagcccataataaagaacttacattatatttacaaaatatttttatgaatcctagttttagagtttatacaagccctgatatgataggtgtagaaattggtggagctttaaaaaatgttattgctcttgctgctggaatagctgatggtctaaattatggagataacacaaaagctgctcttataactcgtggaataaaagaaatttcttcactgggtgttgctatgggtggagaacaatctacattttatggactaactggtttaggagatttaatcgttacatgtgcaagtatgcacagtagaaatagaagagcaggtatcttattaggacaaggaaaaacactagatgaagcgataaaagaagttaatatggtagttgaaggtatttacagtgctaagtctgctttaatggctgcaaaaaaatataatgtagaaatcccaattattgaacaagttaatgctgttttatttgaaaataaaaatgcagcagaagctgttaatgaacttatgataagagataaaaaattagaaatacaatcttggtag

SEQ ID NO: 119835 - protein, 335 aa, Fusobacterium nucleatum subsp
MVKISVIGSGGWGIALAILLHKNGHNLTIWSFDKKEAEELKINRQNKTKLPNILLPEDIKVTDNLKEAVDNKDILVLAVPSKAIRSVSKSLKDIIKDNQIIVNVAKGLEEDTLKTMTDIIEEELKEKNPQVAVLSGPSHAEEVGKGIPTTCVVSAHNKELTLYLQNIFMNPSFRVYTSPDMIGVEIGGALKNVIALAAGIADGLNYGDNTKAALITRGIKEISSLGVAMGGEQSTFYGLTGLGDLIVTCASMHSRNRRAGILLGQGKTLDEAIKEVNMVVEGIYSAKSALMAAKKYNVEIPIIEQVNAVLFENKNAAEAVNELMIRDKKLEIQSW

SEQ ID NO: 119836 - DNA, 1035 bp, Geobacillus kaustophilus; identical to SEQ ID NO: 58975
  CDS (1)..(1035): transl_table=11

SEQ ID NO: 119837 - protein, 344 aa, Geobacillus kaustophilus; identical to SEQ ID NO: 58976

SEQ ID NO: 119838 - DNA, 1008 bp, Geobacter metallireducens; identical to SEQ ID NO: 58977
  CDS (1)..(1008): transl_table=11

SEQ ID NO: 119839 - protein, 335 aa, Geobacter metallireducens; identical to SEQ ID NO: 58978

SEQ ID NO: 119840 - DNA, 1008 bp, Geobacter sulfurreducens; identical to SEQ ID NO: 58979
  CDS (1)..(1008): transl_table=11

SEQ ID NO: 119841 - protein, 335 aa, Geobacter sulfurreducens; identical to SEQ ID NO: 58980

SEQ ID NO: 119842 - DNA, 918 bp, Gloeobacter violaceus; identical to SEQ ID NO: 58981
  CDS (1)..(918): transl_table=11

SEQ ID NO: 119843 - protein, 305 aa, Gloeobacter violaceus; identical to SEQ ID NO: 58982

SEQ ID NO: 119844 - DNA, 975 bp, Gluconobacter oxydans
  CDS (1)..(975): transl_table=11
atgaccacacgtccgcacatcgccgtcatcggcgccggagcctggggcacggcgctggcctgcgccacagcagcgacaggcgcggacgtgacactctggatgcgcaacccggtcccaccccgaacccgtaccctcccgcgtctgccggacataaccctgcctgaaaacgtcaccatcaccggtgatttcccccgcaccgcaaacgtcgtcctgctcgtcaccccggtccagaccgcccgtgacgtctccacgcgccttcagaccgtcctcgatcccgcagttcccgtcgtgacctgctgcaaggggctggaacaggccacatccctcctgccgctcgatgttctggcggaaaccatgcccggccgcccgaccggcgtcctctccggccccaacttcgccatcgaagtcgcaaaaggcctccccgccgccgcaacgctggcctgcgcagacctcgctctcgcgcagaaacttacggcgcttctcaacacgtccagcttccgcctctatgccagcgatgacgctgccggtgtccagcttgcaggcgctgccaagaacgtcatcgccatcggcgcaggcatcaccatcggcgcgggcctgggcgaaaatgcccgcgccgccctcatcacccgcgccgtcgccgaaatcggccgtctcgccgaagccacgggcggccgcgccagcacgctcgcaggcctcgcaggcatgggcgacctcatcctgacctgcacgggacgcggctcgcgcaattacagcgtcggtctggaactcggcgaaggccgcccgctcgcagacatcctcgcctcacgcaccacagtcgcagaaggcgtgctgacggcaccggccatgctcgccctggcccggaagcacaacgtacgggtgccgatcatcgaaaccgtcacccgcctcctcaatgacggcgtctcgatcgaggaagcgcgccaccttctgctggaccgccccccgacccgggaataa

SEQ ID NO: 119845 - protein, 324 aa, Gluconobacter oxydans
MTTRPHIAVIGAGAWGTALACATAATGADVTLWMRNPVPPRTRTLPRLPDITLPENVTITGDFPRTANVVLLVTPVQTARDVSTRLQTVLDPAVPVVTCCKGLEQATSLLPLDVLAETMPGRPTGVLSGPNFAIEVAKGLPAAATLACADLALAQKLTALLNTSSFRLYASDDAAGVQLAGAAKNVIAIGAGITIGAGLGENARAALITRAVAEIGRLAEATGGRASTLAGLAGMGDLILTCTGRGSRNYSVGLELGEGRPLADILASRTTVAEGVLTAPAMLALARKHNVRVPIIETVTRLLNDGVSIEEARHLLLDRPPTRE

SEQ ID NO: 119846 - DNA, 1011 bp, Haemophilus ducreyi; identical to SEQ ID NO: 58983
  CDS (1)..(1011): transl_table=11

SEQ ID NO: 119847 - protein, 336 aa, Haemophilus ducreyi; identical to SEQ ID NO: 58984

SEQ ID NO: 119848 - DNA, 1008 bp, Haemophilus influenzae
  CDS (1)..(1008): transl_table=11
atgataacttcgcaaacaccaatcactgtgctaggtgcgggatcttatggaactgcgctggcaattaccttttctcgcaatggttctcccactcacttatgggggcacaatcccgcccatatcgcacaaatgcagacagaacgacaaaattatcgttttttgccggatgtcatctttcctgaggatcttcatttagaaagtaatcttgcacaagcaatggaatattctcaagatattttaatcgtggtgccaagccatgctttcggtgaaattcttataaaaatcaaaccgcacttaaaagcccatcaccgattaatttgggcaacaaaaggtttggaacgtaacacagggcgtttactacaaaccgtagttgaagaacaactcggaacgcaatatccactagctgtactttctggcccaacttttgcaaaagaattagcgcaaggtctaccatcagctattacgcttgctgccaataacgagcaattcgcacgggaatttcagtctcgtattcattgtagtaaaggtttccgagtttatataaattcggatatgactggcgttcaacttggtggagcaattaaaaatgtgatcgcaattggtgcgggtatttcagacggtatgggatttggcgcaaatgctcgcacagcactgattactcgaggtattgcagaaattacccgcttaggtatctcgctcggtgcaaataccaatacatttatgggaatgtctggattgggcgatttagtgctaacttgcaccgataatcaatcgcgcaatcgacgttttggattaatgctaggtaaaggattagatgcccaaatggctatggaaaatatcgggcaagtcgtagaaggtttttataatacaaaagaagcctatttgcttgcacaaagacaaggtgtggaaatgccgattacagaacaaatttatcaaatgctgttttgtggcaaaagcgcacaagatgtagcaatcagccttttggggcgagcatgtaaaggcgaataa

SEQ ID NO: 119849 - protein, 335 aa, Haemophilus influenzae
MITSQTPITVLGAGSYGTALAITFSRNGSPTHLWGHNPAHIAQMQTERQNYRFLPDVIFPEDLHLESNLAQAMEYSQDILIVVPSHAFGEILIKIKPHLKAHHRLIWATKGLERNTGRLLQTVVEEQLGTQYPLAVLSGPTFAKELAQGLPSAITLAANNEQFAREFQSRIHCSKGFRVYINSDMTGVQLGGAIKNVIAIGAGISDGMGFGANARTALITRGIAEITRLGISLGANTNTFMGMSGLGDLVLTCTDNQSRNRRFGLMLGKGLDAQMAMENIGQVVEGFYNTKEAYLLAQRQGVEMPITEQIYQMLFCGKSAQDVAISLLGRACKGE

SEQ ID NO: 119850 - DNA, 936 bp, Helicobacter hepaticus
  CDS (1)..(936): transl_table=11
atgagcaaggtaagtgtatttggtggaggagcttggggtagggcactagcttttgcattagccgaaaaaaatgaggtaagaattatctcacgtagagatattagctctttgcttgagcctttaaatcaaaaattgaaaacattaaattgcacatcaattatacaagtttcgcataaagaagcattagatgcgcagtattttgttatggcaatagctacgagtgcattacgagaatggttagcagtagctgatttgccacaaaagataaagattctctgcgcaagcaaagggatagaatctggcagtggcgcatttgtaagtgatattatggaggagcgcattgctcataaaagcattgcctatttatgtggtcctagttttgcttctgaagtagtgcattctttgccttgcgcacttgttattcattcgcgcaatcttgagttaagtcgtgaatttggcactttgatgccacattttattaaaacttatgcaagtcccgatgttgttggtggagaagtggctggagcatataaaaatgtcatcgctattgcaggtggaatttgcgatgggttagcatttggtatgaatgcgaaagcctctcttcttgcacgaggacttgtagaaatgagtcgattcggagagcattttggcgcaaaaatggaaacattcttggggctctcaggtgctggagatttatttttaacctcaaactctacaatgtcgcgcaattatcgtgttggacttggattggcgaaaggaaaagcaattaatgagattctcaaagagcttggtgaagtagcagaaggcgtgattactgcaaaagcaattacagaaataggacaaagggaaaatatttatacgcctattgcgagagagattaatctgattataaatggaaaaaatgtaagagaaagttcaaaagcactaatggcatag

SEQ ID NO: 119851 - protein, 311 aa, Helicobacter hepaticus
MSKVSVFGGGAWGRALAFALAEKNEVRIISRRDISSLLEPLNQKLKTLNCTSIIQVSHKEALDAQYFVMAIATSALREWLAVADLPQKIKILCASKGIESGSGAFVSDIMEERIAHKSIAYLCGPSFASEVVHSLPCALVIHSRNLELSREFGTLMPHFIKTYASPDVVGGEVAGAYKNVIAIAGGICDGLAFGMNAKASLLARGLVEMSRFGEHFGAKMETFLGLSGAGDLFLTSNSTMSRNYRVGLGLAKGKAINEILKELGEVAEGVITAKAITEIGQRENIYTPIAREINLIINGKNVRESSKALMA

SEQ ID NO: 119852 - DNA, 1002 bp, Idiomarina loihiensis; identical to SEQ ID NO: 58985
  CDS (1)..(1002): transl_table=11

SEQ ID NO: 119853 - protein, 333 aa, Idiomarina loihiensis; identical to SEQ ID NO: 58986

SEQ ID NO: 119854 - DNA, 1020 bp, Lactobacillus acidophilus
  CDS (1)..(1020): transl_table=11
atgacaaaaatcgcagttttaggtaatggttcatggggctcagtattaggatcaatgttagctgataatggtaatgatgtggttctttacggtaacattgaaagcgttaatgatgaaattaatgctactcataccaatagtcattatatgaaagattggaaattaaacgaaaatactagagcaactggtgatttagaagatgcacttgatggtgcagaagtggttttgtttgttttaccaaccaaagctgttagaattgttgcaaaaaatgttcgtgaaatcttagataaaagcggtgctaaaccacttttggttactgcaacaaaaggtattgaaccaggtactaaaaaacttatttcagaaattttaactgatgaaatttatcctaatgatgaagataaaattgtggctatttctggtccaagccatgcagaaaatgttgctcaaaaagatttaactgcaattgcatgtgcttcaactaatgaagaaaatgccaagaaagttcaaaaactattttcaaacgattatgttcgtttctatactaatgatgatttagtaggtgtagaagtaggtggtgcagttaaaaacgttattgcgattgctgctggtattttagttgggcaaggatatggtgatgatgctaaagctgcattaatgactagaggattggctgaaattactcgtttaggtgttaattactttggtgctaagccaatgacctttagtggtttatcgggtataggtgatttaattgtaacttgtacttccgttaactcacgtaattggcgtgcgggtaaacaaattggtgaaggcaagagtttggactatgttttaaagaacatgggacaagtggtcgaaggcgcaactactgttaaggcagtacacgagctttgcgaagaaaagaatatcgatatgccaataagtgaagcaatttatcgtgttctttatgaaggtaccgatgtagaaactgaaattaaaaagatgatgggcagagcaccaaaaccagaaattcgtctttaa

SEQ ID NO: 119855 - protein, 339 aa, Lactobacillus acidophilus
MTKIAVLGNGSWGSVLGSMLADNGNDVVLYGNIESVNDEINATHTNSHYMKDWKLNENTRATGDLEDALDGAEVVLFVLPTKAVRIVAKNVREILDKSGAKPLLVTATKGIEPGTKKLISEILTDEIYPNDEDKIVAISGPSHAENVAQKDLTAIACASTNEENAKKVQKLFSNDYVRFYTNDDLVGVEVGGAVKNVIAIAAGILVGQGYGDDAKAALMTRGLAEITRLGVNYFGAKPMTFSGLSGIGDLIVTCTSVNSRNWRAGKQIGEGKSLDYVLKNMGQVVEGATTVKAVHELCEEKNIDMPISEAIYRVLYEGTDVETEIKKMMGRAPKPEIRL

SEQ ID NO: 119856 - DNA, 1020 bp, Lactobacillus johnsonii
  CDS (1)..(1020): transl_table=11
atggcaaagattgcagttttaggtaatggttcatggggttctgttcttggttcaatgttagctgataacggaaatgatgtagtattgtatggaaacattgacagtgttaaccaagaaattaatgaacatcatactaatactcactacatgaaaaattggaaacttaatcctaatgtacccgctactggagatttagaaaaagcattggatggtgctgaaattattttatttgttttaccaactaaagcagttcgtattgttgctaaaaatgcacgtaaaatattagataaaactggcgctactcctttattggtaactgcaactaaaggaattgaaccaggaagtaaaaaactaatttcagatattttaactgaggaagtttatccaaatgatagtgaaaaaatagtagctatttcaggccctagtcatgctgaaaatgttgctcaaaaggatttaactgcaattgcttgtgcatctactagtgaagaaaatgctaagagagtacaaaagatattttcaaataactatgtccgtttctacactaatgatgatttagtgggagttgaagtaggtggagcagtgaaaaatgttattgcaatcgctgcaggtatcctagttggtaaaggatatggtgatgatgcaaaagctgctttaatgactagaggcttagctgaaattactcgtttaggagttaaatacttcggcgcaaaaccaatgactttttcaggtctttcaggaattggtgatttaattgtaacagcaacttctcaaaattctcgtaattggcgtgcaggtaagcaaattggagaaggaaagagtcttgattatgttttagaccatatgggccaagttgttgaaggtgctacgactgttaaagctgtacatgaattagcagaagaaaagaatattgatatgccaattagtgaagctatttaccgtgttttatatgaaaatgccgatgtagatcaagaaattaagacaatgatgggaagaaatcctaagccagaaattcaactataa

SEQ ID NO: 119857 - protein, 339 aa, Lactobacillus johnsonii
MAKIAVLGNGSWGSVLGSMLADNGNDVVLYGNIDSVNQEINEHHTNTHYMKNWKLNPNVPATGDLEKALDGAEIILFVLPTKAVRIVAKNARKILDKTGATPLLVTATKGIEPGSKKLISDILTEEVYPNDSEKIVAISGPSHAENVAQKDLTAIACASTSEENAKRVQKIFSNNYVRFYTNDDLVGVEVGGAVKNVIAIAAGILVGKGYGDDAKAALMTRGLAEITRLGVKYFGAKPMTFSGLSGIGDLIVTATSQNSRNWRAGKQIGEGKSLDYVLDHMGQVVEGATTVKAVHELAEEKNIDMPISEAIYRVLYENADVDQEIKTMMGRNPKPEIQL

SEQ ID NO: 119858 - DNA, 1026 bp, Lactococcus lactis subsp
  CDS (1)..(1026): transl_table=11
atgaatccacaaaaaattgcagttttaggaccaggttcgtggggaactgcactttcacaagttcttaatgataatggtcatgaagttcgtatctggggaaataacccagaacagatggctgaaattaatgaaaagcatacaaatacacgctattttaaagatgttgttttggatgaaaaaataaaagcatttgatcgtttagatttagctttagaagacgttgatgctattttatttgttgtaccaactaaagtgacacgtttggtcgcaaaacaagtagccgaagtccttaaacacaaagtacacattcttcacgcttctaaagggcttgaacaagggacacatgagcgaatttctactattcttgaagaagaaatccccgctcaattgcgaggagaaatcgtggtagtttctggcccttctcatgctgaagaaacaattgttcgtgatattactttaatttctgcagcttctaaagaccatgatgaagcgaaatacgctcaagcaatctttagcaacgactacttccgtctgtatactaatactgatgttattggtgttgaaacagctggcgcccttaaaaatattattgctgtaggtgcgggtgctctgcacggtcttggttttggtgataatgctaaagcagcaattattacacgtggccttgccgaaattactcgtttaggtgtggctatgggagctgaacctttaacttatagcggtttgtctggtgttggtgacttaattgtaacaggtacttcaattcactcacgaaactggcgcgcgggtgatgctcttggtcgcggcgaaaagctagctgatattgaaaaaaatatgggaatggttattgaaggtgtttcaaccactaaagctgcttttgagctcgctcaacagctaggtatcgatatgccaattaccgagacaatctacaaagttctctatgaaaatctagatgcaaaaactggaattcttgatatcatgcgccgcgaaactcgtgccgaaaatgaattcattaataataaataa

SEQ ID NO: 119859 - protein, 341 aa, Lactococcus lactis subsp
MNPQKIAVLGPGSWGTALSQVLNDNGHEVRIWGNNPEQMAEINEKHTNTRYFKDVVLDEKIKAFDRLDLALEDVDAILFVVPTKVTRLVAKQVAEVLKHKVHILHASKGLEQGTHERISTILEEEIPAQLRGEIVVVSGPSHAEETIVRDITLISAASKDHDEAKYAQAIFSNDYFRLYTNTDVIGVETAGALKNIIAVGAGALHGLGFGDNAKAAIITRGLAEITRLGVAMGAEPLTYSGLSGVGDLIVTGTSIHSRNWRAGDALGRGEKLADIEKNMGMVIEGVSTTKAAFELAQQLGIDMPITETIYKVLYENLDAKTGILDIMRRETRAENEFINNK

SEQ ID NO: 119860 - DNA, 1017 bp, Lactobacillus plantarum; identical to SEQ ID NO: 58987
  CDS (1)..(1017): transl_table=11

SEQ ID NO: 119861 - protein, 338 aa, Lactobacillus plantarum; identical to SEQ ID NO: 58988

SEQ ID NO: 119862 - DNA, 1110 bp, Leifsonia xyli subsp
  CDS (1)..(1110): transl_table=11
gtgatcggcgccggaagctggggaaccacgtttgcgaagatcctcgcagacgggggcaacgacgtcgtcgtctgggcgcgccggcccgagctggcgcgcgagatcgacgaggggaagcgcaacagcgactatttgcagggcatcaacctcccgcgcagcttgcgcgcgacctcgcacctcggtgaggcgatgcgcggtgcggagcaggttttcgtctctctgccgagccagacgctgcgctcgaatctcgacgcgatgatcccgtacctcggcccggcgacggtcgtcatcagcctcatgaagggtgtggagaagggcacgggcctgcgcatgagcgaggtcatcgcccagggtctgccgatcgatccggagcagatcgccgtggtgtcagggccgaatctggctctcgagatcgctcgtgagcagccgacggccgctgtcgtctcctcggtgagcccggcgacagcggtggccgtggcgacctcagccaccaaccggtacttccgcagcttcgtgaacaccgatgtcatcggcaccgagttcggcggcgtgctcaagaacctcatcgcggtcgcgatcggcatcgtggatggcgtcggctacggcgagaacacgaaagcttcgatcatcacgcgcggtctggtcgagatgaccgatttcgcggtcgcctacggagcggatccccagacgctctccgggctggccggcctcggcgatctgatcgcgacctgcgagtcgccgctcagccgcaacaacacggccggacggctgctcggccagggctacagcttcaccgacgtggtgaagcagatggatcaggcggcggaggggctggcctcggtgacgcccatcctgagcctcgcggaggctcgcggtgtcgagatgccgatcgtgcgtcaggtgagccaggtgctcgcgggcacactcgctccgaaggatatcgcgccgcacctcaccaccgatgacgagccgcagggcgaaagaacacggggcgaaaggactacggatgacggacaaggtcagggtcgcacttctgtttgggggtcgctcaagcgagcattcgatcagctgcgcgacggcggcgggagttctcgccgcgatcgaccgtga

SEQ ID NO: 119863 - protein, 369 aa, Leifsonia xyli subsp
MIGAGSWGTTFAKILADGGNDVVVWARRPELAREIDEGKRNSDYLQGINLPRSLRATSHLGEAMRGAEQVFVSLPSQTLRSNLDAMIPYLGPATVVISLMKGVEKGTGLRMSEVIAQGLPIDPEQIAVVSGPNLALEIAREQPTAAVVSSVSPATAVAVATSATNRYFRSFVNTDVIGTEFGGVLKNLIAVAIGIVDGVGYGENTKASIITRGLVEMTDFAVAYGADPQTLSGLAGLGDLIATCESPLSRNNTAGRLLGQGYSFTDVVKQMDQAAEGLASVTPILSLAEARGVEMPIVRQVSQVLAGTLAPKDIAPHLTTDDEPQGERTRGERTTDDGQGQGRTSVWGSLKRAFDQLRDGGGSSRRDRP

SEQ ID NO: 119864 - DNA, 1008 bp, Leptospira interrogans serogroup Icterohaemorrhagiae serovar
  CDS (1)..(1008): transl_table=11
atgaaaattggagtgatcggatcgggaagttttggaaccgcgttgggaagtcttcttgcggataaaggttatgaagttactctctggtgtagaaatgattctcaagttgaaagtatcaatcgcaatcatatcaataacaaacatcttcctaattttactctaccggaaaaactcacagcaagtaaggatctgagaaacgtagttcaaggaaaagatatgatcgtatcttctccaccttctcatgcgctaagtgaagttttaagagaaatcaaagaatatttaccagaaaaagtccctatcgtttccgcgagtaagggaattgaaaatggaacgttacgtcttgtttccgaaatttttgaatcggaacttcccgaaaaatatcattcttatctttcgtatttatctggaccttcttttgcaaaagagattatccaaaaagtaccgaccattgtaagtattgcttctaaaaacgaaacgaccgcacgtaaggttcaggaaatattcagttttttgtattttcgaacgtattggactccggacgtgatcggagtagaagtgggaggttctctgaagaatgtgatcgctttggctgcgggcgtaagtgatggattaggttttggacaaaatacaagagctgctttgattacaagaggtttgaatgaaattacaaaaataggtttgaagttgggagctgatccgatgacttttctaggaccttctggaatgggagatttgattttgacttgttgtggagaacaatctagaaatcgtaccgtagggtttcgattaggtaagggagaaaccttggaacaaattctttctagcatgaacgaagttgccgaaggggtaaagactactcaaagcgcgtatgagttatcacagaagttgggaatagaaatggcgattacaaatgaagtttataaaatgctttacgaaggtaagaatccaagagaagttgtgaaagaccttatgaagcgcgatcttaaaagagagggcgtttcagtctga

SEQ ID NO: 119865 - protein, 335 aa, Leptospira interrogans serogroup Icterohaemorrhagiae serovar
MKIGVIGSGSFGTALGSLLADKGYEVTLWCRNDSQVESINRNHINNKHLPNFTLPEKLTASKDLRNVVQGKDMIVSSPPSHALSEVLREIKEYLPEKVPIVSASKGIENGTLRLVSEIFESELPEKYHSYLSYLSGPSFAKEIIQKVPTIVSIASKNETTARKVQEIFSFLYFRTYWTPDVIGVEVGGSLKNVIALAAGVSDGLGFGQNTRAALITRGLNEITKIGLKLGADPMTFLGPSGMGDLILTCCGEQSRNRTVGFRLGKGETLEQILSSMNEVAEGVKTTQSAYELSQKLGIEMAITNEVYKMLYEGKNPREVVKDLMKRDLKREGVSV

SEQ ID NO: 119866 - DNA, 1008 bp, Leptospira interrogans
  CDS (1)..(1008): transl_table=11
atgaaaattggagtgatcggatcgggaagttttggaaccgcgttgggaagtcttcttgcggataaaggttatgaagttattctctggtgtagaaatgattctcaagttgaaagtatcaatcgcaatcatatcaataacaaacatcttcctaattttactctaccggaaaaactcacagcaagtaaggatctgagaaacgtagttcaaggaaaagatatgatcgtatcttctccaccttctcatgcgctaagtgaagttttaagagaaatcaaagaatatttaccagaaaaagtccctatcgtttccgcgagtaagggaattgaaaatggaacgttacgtcttgtttccgaaatttttgaatcggaacttcccgaaaaatatcattcttatctttcgtatttatctggaccttcttttgcaaaagagattatccaaaaagtaccgaccattgtaagtattgcttctaaaaacgaaacgaccgcacgtaaggttcaggaaatattcagttttttgtattttcgaacgtattggactccggacgtgatcggagtagaagtgggaggttctctgaagaatgtgatcgctttggctgcgggcgtaagtgatggattaggttttggacaaaatacaagagctgctttgattacaagaggtttgaatgaaattacaaaaataggtttgaagttgggagctgatccgatgacttttctaggaccttctggaatgggagatttgattttgacttgttgtggagaacaatctagaaatcgtaccgtagggtttcgattaggtaagggagaaaccttggaacaaattctttctagcatgaacgaagttgccgaaggggtaaagactactcaaagcgcgtatgagttatcacagaagttgggaatagaaatggcgattacaaatgaagtttataaaatgctttacgaaggtaagaatccaagagaagttgtgaaagaccttatgaagcgcgatcttaaaagagagggcgtttcagtctga

SEQ ID NO: 119867 - protein, 335 aa, Leptospira interrogans
MKIGVIGSGSFGTALGSLLADKGYEVILWCRNDSQVESINRNHINNKHLPNFTLPEKLTASKDLRNVVQGKDMIVSSPPSHALSEVLREIKEYLPEKVPIVSASKGIENGTLRLVSEIFESELPEKYHSYLSYLSGPSFAKEIIQKVPTIVSIASKNETTARKVQEIFSFLYFRTYWTPDVIGVEVGGSLKNVIALAAGVSDGLGFGQNTRAALITRGLNEITKIGLKLGADPMTFLGPSGMGDLILTCCGEQSRNRTVGFRLGKGETLEQILSSMNEVAEGVKTTQSAYELSQKLGIEMAITNEVYKMLYEGKNPREVVKDLMKRDLKREGVSV

SEQ ID NO: 119868 - DNA, 1017 bp, Listeria innocua; identical to SEQ ID NO: 58989
  CDS (1)..(1017): transl_table=11

SEQ ID NO: 119869 - protein, 338 aa, Listeria innocua; identical to SEQ ID NO: 58990

SEQ ID NO: 119870 - DNA, 1017 bp, Listeria monocytogenes serotype 4b
  CDS (1)..(1017): transl_table=11
atgacacagaaaaaagtagctattcttggcgctggaagttggggaacaggtcttgcacttgtcctagctgataataatcatcaaccagttatttggggaaacttagataaaattgtgaatgaaattaacgaatcgcacacgaatagtcactatttgccagatattattttaccaactgaggtaaaagcgacattgtcacttgatgaagctattgatggtgcagaaattgtcgtaattgctattccaacaaatgcgatgcgaatcgtttgtaagcagttaaatgaagcgctaaaagaaccaaccattttagtgcatgtgagtaaaggtattgaaccagaaacaaatcttcgaatgtccgaagtgattgaagacgaaatagatgcgtccaaacgtaaagcgcttgttgttctttctggaccaagtcatgcggaagaagttgcgcttcgtcatccgacaacactttgtgcgagctgtaaagatttatcagctgcagaaattgttcaagatcgtttcatcaataataatttgcgtatttatacgaatgatgatgtgattggtgcagaaattggtggcgcgctgaaaaatattatcgcactaggtgcaggaatttctgacggccttggttatggcgataatgctaaagcggcactaatgactcgcgggatggcagaaatcactcgtctcggtgttgctgttggctctaatccgcaaacattttacggattgacaggtattggtgacttaatcgttacttgtactagtgtgcattcacgtaattggcgtgctggtaatatgctaggtaaaggcgagaatttagatgaagtattagaaaaaatgggcatggtcgttgaaggtgttcgaacagctaaagcagtacatggttgggcgaaaaaactagatattgatatgccaattaccgaatcgatttacgcgattttattcgaaaataaagatgctcgcgaagcagttgatttattaatgggtcgcgaaaaaaagatcgaaaaagaatcattttaa

SEQ ID NO: 119871 - protein, 338 aa, Listeria monocytogenes serotype 4b
MTQKKVAILGAGSWGTGLALVLADNNHQPVIWGNLDKIVNEINESHTNSHYLPDIILPTEVKATLSLDEAIDGAEIVVIAIPTNAMRIVCKQLNEALKEPTILVHVSKGIEPETNLRMSEVIEDEIDASKRKALVVLSGPSHAEEVALRHPTTLCASCKDLSAAEIVQDRFINNNLRIYTNDDVIGAEIGGALKNIIALGAGISDGLGYGDNAKAALMTRGMAEITRLGVAVGSNPQTFYGLTGIGDLIVTCTSVHSRNWRAGNMLGKGENLDEVLEKMGMVVEGVRTAKAVHGWAKKLDIDMPITESIYAILFENKDAREAVDLLMGREKKIEKESF

SEQ ID NO: 119872 - DNA, 1017 bp, Listeria monocytogenes; identical to SEQ ID NO: 58991
  CDS (1)..(1017): transl_table=11

SEQ ID NO: 119873 - protein, 338 aa, Listeria monocytogenes; identical to SEQ ID NO: 58992

SEQ ID NO: 119874 - DNA, 1008 bp, Mannheimia succiniciproducens
  CDS (1)..(1008): transl_table=11
atgagtattcaggcttctcccgtgacaattctgggcgccggttcttacggaacagccctggcaattgccctatcccgcaacggctatcccacttatttatggggacataacccgacggcttgcgctcaaatggcgcaagaacgtcaaaatgcccgttttttgcccgatatttcctttcccgaagccttacgggttgaatccgatcttaaaagtgcggtggaaaaatccaaagatttgttaattgtggtgccaagccatgtattcggtgaagtgattcaacaaattaagccgtttctgcataaccggcaccgtattatttgggcgactaaagggttggaacgaggcacgggacgattattgcaaaatctggtggagcaggaattgggttcgcaatatcctttagccgtgttatctgggccgacttttgccaaagaacttgcggcaggtttaccaacggcgattaccctggcggcggaaaacgaacaatttgccaaagaattccaagcaagaattcattgcagcaagcattttcgcgtgtacatcaataatgatatggtaggtgtgcaactgggcggcgcaattaaaaatgtgattgccattagcgcgggtatgtcggacggcatgggattcggcgccaacgcccgtaccgcattaattacccgcggtattgcggaaatcagccgtttaggcgtatccttgggggcgaatgtaaatacgtttatgggtatgtccggccttggagatttggtattaacctgcacggataatcaatcaagaaaccgtcgcttcggtatgatgctcggtcaaggtgtggatgcgcgaacggcaatggatgaaatcggccaggtggtagaaggctattacaacaccaaagaagcctatatgctggcacagaagcaaggcattgaaatgccgataacggaacaaatttatcaggtcctattttgcggtaaagatgccaaggaggcggcaaccgcattattaggacgtaaaagcaaagttgaataa

SEQ ID NO: 119875 - protein, 335 aa, Mannheimia succiniciproducens
MSIQASPVTILGAGSYGTALAIALSRNGYPTYLWGHNPTACAQMAQERQNARFLPDISFPEALRVESDLKSAVEKSKDLLIVVPSHVFGEVIQQIKPFLHNRHRIIWATKGLERGTGRLLQNLVEQELGSQYPLAVLSGPTFAKELAAGLPTAITLAAENEQFAKEFQARIHCSKHFRVYINNDMVGVQLGGAIKNVIAISAGMSDGMGFGANARTALITRGIAEISRLGVSLGANVNTFMGMSGLGDLVLTCTDNQSRNRRFGMMLGQGVDARTAMDEIGQVVEGYYNTKEAYMLAQKQGIEMPITEQIYQVLFCGKDAKEAATALLGRKSKVE

SEQ ID NO: 119876 - DNA, 1005 bp, Mesoplasma florum
  CDS (1)..(1005): transl_table=4
atgagtaaaaaaaatataacaattataggaactggagcttacggaacagcattagcgaatgtattagcagataatgataacaatgttattatgtatggaattgttgaacaacaagttgatgatattaatatttatcaccaaaactcagttttctttgacaataaaaaaataaacaaaacaattagagcaactaattctatggcagcggctttagaaaatacagatatattaattttaggagttcctacagcagctattaagcacgtggttaatgacattattaaatatgctaaaaaaccaatggatataatcaatactgcaaaaggtttagatgaagaaaatctaggattactttctgataaaataaaaaaatattttgaaggttcaaatgtaatatcaacttattcagctttatatggtccttcaattgcaattgaagtagttgatcgtcaacctacagctattatgatagcttcagaaacaattgaaaaagctaaagaattatgtaatgtattttctaatgaatatttctacatgtatccaacaacagatattgcaggatgtgagatttcagctgcattaaaaaatgccattgctattggtggtggaattcttaaggcatataatgctggagataatgctcatgcaacattattaacactaggtttaaatgaaatgtatgaatttggaaaacactttggtgctaaacttgaaacattcttaaactttgctggattaggtgatttaatacttactgcatcaagtaaaaaatcaagaaatttcagattaggtgaaagaattgtagaactaaatgatgctaaaaaagctttagaatcattcaatttaactgttgaaggtgtggaaacagccagaatagcccatgaaataggggttaaataccaaattagcatgaatttttttgaaataatatataatattttatataataatgttaagcctatttcacttttaaataatgtctttagagacgtgaaattagtttaa

SEQ ID NO: 119877 - protein, 334 aa, Mesoplasma florum
MSKKNITIIGTGAYGTALANVLADNDNNVIMYGIVEQQVDDINIYHQNSVFFDNKKINKTIRATNSMAAALENTDILILGVPTAAIKHVVNDIIKYAKKPMDIINTAKGLDEENLGLLSDKIKKYFEGSNVISTYSALYGPSIAIEVVDRQPTAIMIASETIEKAKELCNVFSNEYFYMYPTTDIAGCEISAALKNAIAIGGGILKAYNAGDNAHATLLTLGLNEMYEFGKHFGAKLETFLNFAGLGDLILTASSKKSRNFRLGERIVELNDAKKALESFNLTVEGVETARIAHEIGVKYQISMNFFEIIYNILYNNVKPISLLNNVFRDVKLV

SEQ ID NO: 119878 - DNA, 984 bp, Mesorhizobium sp
  CDS (1)..(984): transl_table=11
atgagccgccactggacaatcgccgtgctcggcgctggcgcatggggaacggcactggctctcacaatgcagcgcgcgggccacggtgcgaggctgtgggcacgcgatcaaaaccttgtgcgcgagatcaataatgcccgcagcaacagccggtacctgcccggcgtaaagattgatccggcggttttggccaccgatgacatggccgctgcacttgagggggccgactgcgtgcttgccgctattcccgcacaaagccttcgctccgtgcttgccgtggccggcacagccctaaaggctcatatccccgttgtgctctgcgccaagggcatcgagcgggaaacgggacagctgatgtcggaggctgcgcgtcaggcgctgcccgagaatccgcttgcagcgctgtcgggcccgagcttcgccgccgatctggcgcgcggacttccgactgcagtcacggtcgcagcgcaggacggggcgctggcggctgatctcgccaagaagctctcggcgcccaatctgcgctgttattcgagcgatgatctgatgggggtcgagcttggcggagcgctgaagaacgttttggccattgcggccggcgccaccagcggcgccgggctcggcgcaagcgcggtggccgccatcacgacacgtggcttcgtcgagctgcggcgcatcggcgcagccttcggcgcacgcgcggaaacgctgatgggtctttccggtcttggcgacctgatcctcacctgcaattccccgcaatcgcgcaacttcgcctatggcgcggcgctgggccgtggcgaacgcctcgataacctgccgcttgccgaaggtgttttcacagcgagcattgccgcgcgcatggtgagcgagcgggggctggaggcgccgatcatagaaaccgtgaacggaatgctgaatggcgggcttaccgtgcatgcagccatgcaggcgctgctcgcgcggccgttgaagagtgagtag

SEQ ID NO: 119879 - protein, 327 aa, Mesorhizobium sp
MSRHWTIAVLGAGAWGTALALTMQRAGHGARLWARDQNLVREINNARSNSRYLPGVKIDPAVLATDDMAAALEGADCVLAAIPAQSLRSVLAVAGTALKAHIPVVLCAKGIERETGQLMSEAARQALPENPLAALSGPSFAADLARGLPTAVTVAAQDGALAADLAKKLSAPNLRCYSSDDLMGVELGGALKNVLAIAAGATSGAGLGASAVAAITTRGFVELRRIGAAFGARAETLMGLSGLGDLILTCNSPQSRNFAYGAALGRGERLDNLPLAEGVFTASIAARMVSERGLEAPIIETVNGMLNGGLTVHAAMQALLARPLKSE

SEQ ID NO: 119880 - DNA, 1008 bp, Methylococcus capsulatus; identical to SEQ ID NO: 58993
  CDS (1)..(1008): transl_table=11

SEQ ID NO: 119881 - protein, 335 aa, Methylococcus capsulatus; identical to SEQ ID NO: 58994

SEQ ID NO: 119882 - DNA, 990 bp, Methylobacillus flagellatus; identical to SEQ ID NO: 58995
  CDS (1)..(990): transl_table=11

SEQ ID NO: 119883 - protein, 329 aa, Methylobacillus flagellatus; identical to SEQ ID NO: 58996

SEQ ID NO: 119884 - DNA, 966 bp, Methanobacterium thermoautotrophicum
  CDS (1)..(966): transl_table=11
atgatggtcacggtcattggagcagggagcttcggaacagcgatagcacaggtcctatcatggaatgctgagatggtccgcctcatggcccggagatccgaagttgtggagaacatcaacaggacgcgcgaaaacagcgcttatcatcctggagtgaaactgagggataacatagaggcgacactcatggacggttccgtgctggaggaatccgagtacgtattcatggccgtgccatcagggaacctcaggagcatcgtaaggtcaatgaacagcagccttgaggataagaagatagtatcctgtataaagggaatagagcacccaggcctcaaaaccatgagctctgttataagggaggaaacagggtccaggacagtattcagcatatccggtcccaacttcgccgacgaactcataaggggcatgacgtccgggataacagtgggtgccagcaccagatatgcgagggaaattgcagggcttctgaagtctccccgcataatcctcgaccactcagagaacgttgagggtgttgaattctgcgggatactcaagaacgtctacgccgtggccatgggtatactcgacggacagataacaggcgagaatcaccgccactccctcctgaccctatgcttcagggagatgaacctgatactcaatgagatggggtacggtgaactccatgacaggttctgtggatttggagactttctcctcacatcaacaaccgataagagccgtaaccgcaccctggggctcatgctgggtaagaagatgagactcagcgaggactccaccataaccatagagagcctcaggtccataagggccataagggagctgacagagggtcttgagctgccggtccttgaaatggtataccagaccatgcaggaacctgaaaacgtcaacctctacataagggaattccaggagaggatatccagacccgaattttag

SEQ ID NO: 119885 - protein, 321 aa, Methanobacterium thermoautotrophicum
MMVTVIGAGSFGTAIAQVLSWNAEMVRLMARRSEVVENINRTRENSAYHPGVKLRDNIEATLMDGSVLEESEYVFMAVPSGNLRSIVRSMNSSLEDKKIVSCIKGIEHPGLKTMSSVIREETGSRTVFSISGPNFADELIRGMTSGITVGASTRYAREIAGLLKSPRIILDHSENVEGVEFCGILKNVYAVAMGILDGQITGENHRHSLLTLCFREMNLILNEMGYGELHDRFCGFGDFLLTSTTDKSRNRTLGLMLGKKMRLSEDSTITIESLRSIRAIRELTEGLELPVLEMVYQTMQEPENVNLYIREFQERISRPEF

SEQ ID NO: 119886 - DNA, 1008 bp, Moorella thermoacetica
  CDS (1)..(1008): transl_table=11
gtgaaggaaagtatagccgttcttggcgccggcagctgggggacggccctggccgtactactggcccataagggcttcagggtcaacctctgggcccggcggccggaactggcgacggctttaagggaaactggagaaaacaaaacctatctaccgggagtgagattaactgggacgattattcccacggccgatctgcctgcggctgtcaaaggcgcagggctggtggtcttgagcgtaccctcccatgccgtccgttcgacggcccggcttctcaaaccctttttgcctaagggaaccgttgttgtcaatacagccaagggcctggagttggagacgaaaaaacgtttatcccaggttctggttgaagaaggcctggaccgggtagccgttctatccggccccagtcatgctgaggaagtcgggcgtggcctgccgactacggttgtggttgctgctgctgaccgggagacggccgaatatgtccaggacgtttttatggacccgaccttccgggtctataccaaccctgacattataggtgtagaattcgggggagctttaaagaatatcattgccctggccaccggcatggccgacggcctgggcctgggtgataatacccgggccgccctgatgaccaggggtatggcggagattgcccgcctgggtgtcgccctggggggcaaagtcttgacctttgccggtttgagcggtatcggcgatttgattgtaacctgcacctccatgtacagtcgcaatcgccgcgccggcatcctcctgggcaagggtcaatccctggaagaggtcctggacgcggtgggcatggtggtggagggtgtccggaccacggccgcggctcgggaactggcctgccagcatggcatcaaaatgcccatcaccgaagagatctaccaggtgctttataagggtaaacccgtgggcgattgtgtcgccgccctgatggaacggccccggacccatgaagtggagtcaggcgactggtaa

SEQ ID NO: 119887 - protein, 335 aa, Moorella thermoacetica
MKESIAVLGAGSWGTALAVLLAHKGFRVNLWARRPELATALRETGENKTYLPGVRLTGTIIPTADLPAAVKGAGLVVLSVPSHAVRSTARLLKPFLPKGTVVVNTAKGLELETKKRLSQVLVEEGLDRVAVLSGPSHAEEVGRGLPTTVVVAAADRETAEYVQDVFMDPTFRVYTNPDIIGVEFGGALKNIIALATGMADGLGLGDNTRAALMTRGMAEIARLGVALGGKVLTFAGLSGIGDLIVTCTSMYSRNRRAGILLGKGQSLEEVLDAVGMVVEGVRTTAAARELACQHGIKMPITEEIYQVLYKGKPVGDCVAALMERPRTHEVESGDW

SEQ ID NO: 119888 - DNA, 1005 bp, Mycobacterium bovis
  CDS (1)..(1005): transl_table=11
atggccggaatagcaagcaccgtcgcggtgatgggcgccggtgcatggggcacggccctggctaaggtgctggccgacgcgggcggagaggtcacgctgtgggcgcggcgagctgaggtggccgatcagatcaataccacccgatataaccccgactatctgcccggtgcgctgttaccaccgagcattcatgccaccgcagatgccgaggaggcacttgggggcgcatccacggtgctgttgggagtgcccgcgcagaccatgcgggccaatctcgagcggtgggctcccctgttgcccgagggtgcgaccttggtcagtctggccaagggcatcgagttgggcaccctgatgcggatgagccaggtcatcatctcggtgaccggtgccgagccggcgcaggtcgcggtgatctctggacccaacctggccagcgagatcgccgaatgccagcccgccgctaccgtcgtcgcgtgcagcgactccggccgcgcggttgccttgcagcgcgcgctgaacagcgggtacttccgcccctacaccaacgccgatgtcgtcggcaccgagatcggcggggcgtgcaagaacatcatcgcgcttgcgtgcggaatggcggtgggcatcgggctgggcgaaaacaccgcggccgcgatcatcacccggggcctggcggagatcatccggctcgggacggcgctcggcgccaacggcgcgacgttggccggtctggcaggggtcggtgatctggtggccacctgcacctcaccgcgttcgcgcaaccgatcgtttggcgaacgcctgggccggggcgaaacgttgcagtcggcgggcaaggcttgtcatgtcgtcgaaggcgtgacgtcgtgcgaatccgtgctcgcgctggcgtccagctacgacgtcgaaatgccactcaccgacgcggtgcatcgggtctgtcataaagggctgtcggtggacgaggcgataacgctgctgctgggtcgccgcaccaagcccgaatga

SEQ ID NO: 119889 - protein, 334 aa, Mycobacterium bovis
MAGIASTVAVMGAGAWGTALAKVLADAGGEVTLWARRAEVADQINTTRYNPDYLPGALLPPSIHATADAEEALGGASTVLLGVPAQTMRANLERWAPLLPEGATLVSLAKGIELGTLMRMSQVIISVTGAEPAQVAVISGPNLASEIAECQPAATVVACSDSGRAVALQRALNSGYFRPYTNADVVGTEIGGACKNIIALACGMAVGIGLGENTAAAIITRGLAEIIRLGTALGANGATLAGLAGVGDLVATCTSPRSRNRSFGERLGRGETLQSAGKACHVVEGVTSCESVLALASSYDVEMPLTDAVHRVCHKGLSVDEAITLLLGRRTKPE

SEQ ID NO: 119890 - DNA, 1050 bp, Mycobacterium leprae
  CDS (1)..(1050): transl_table=11
atggccggcatagtggtccgttcagagagtgctgtcgcggtgatgggcgctggtgcatggggcactgcactggccaaggtgcttatcgatgccggcggaccggaggccggagtcgtattgtgggctcggcgaccggatgtcgctgagcggatcaataccacccgatgtaaccgcgcctatctaccgggaacactgcttccgccaggtatccgcgctaccgccgatccagcagatgcgctgcgcggtgcgtcgacggtgctattgggggtgccggcgcagcggatgcgggccaacctcgagcggtggggtggtttggtggccgacggcgcgaccctggtgagtctggcaaaaggcatcgagctgggcacgctgatgcggatgagtcaggtcattgtctcggtaactggcgtggacccggcgcaggtcgcggtgctttcgggacccaacctggctagcgagattgctcaatgccagcccgcagccaccgtcatcgcgtgcagcgacttgggccgagccgtcgctttgcagcgcatgctaagcagtggctactttcggccgtacaccaacagcgatgtcgtcggcaccgagatcggcggggtatgcaagaacgtcatagcgctggcgtgcgggatggctgcgggtgtcgggttcggcgaaaacaccgcggcgacgatcattactcggggcctggcggagatcatccggctggggatggcgctaggcgcccaggttactacgttggccggtctggcgggggtaggtgatttggtggccacctgcacatcgccgcattcgcgtaaccggtcactcggcgaacgcttgggccggggcgagatcatgcagtcgatcttgcacggtatggatggttccgatggcggagacggctacgtcgtcgagggtgtgacgtcgtgcgcgtcggtactcgcgctagcgtccagttatgacgtcgagatgccgctaactgacgccgtccaccgagtttgtcacaagggactctcggtcgagaaggcgatggctctgctgttgggccgcagtactaagtctgagtaa

SEQ ID NO: 119891 - protein, 349 aa, Mycobacterium leprae
MAGIVVRSESAVAVMGAGAWGTALAKVLIDAGGPEAGVVLWARRPDVAERINTTRCNRAYLPGTLLPPGIRATADPADALRGASTVLLGVPAQRMRANLERWGGLVADGATLVSLAKGIELGTLMRMSQVIVSVTGVDPAQVAVLSGPNLASEIAQCQPAATVIACSDLGRAVALQRMLSSGYFRPYTNSDVVGTEIGGVCKNVIALACGMAAGVGFGENTAATIITRGLAEIIRLGMALGAQVTTLAGLAGVGDLVATCTSPHSRNRSLGERLGRGEIMQSILHGMDGSDGGDGYVVEGVTSCASVLALASSYDVEMPLTDAVHRVCHKGLSVEKAMALLLGRSTKSE

SEQ ID NO: 119892 - DNA, 1017 bp, Mycoplasma penetrans
  CDS (1)..(1017): transl_table=4
atgataaataatagaatttgtatattagggaccggagcttgagcaactgcacttggttctagattatctttaaatggtaatactgtttttctttgaggaattgataacaatgaagtaaatgatattaatagtggatacaataaaaaatattttggaaacactaaatttagttcatcattatcagctactacagatttaaaaacagcaattggggattctaaatatattatttttgcaattccttcaactgcactagattcagtattagataaagtaaaagaatttttgtctgataaaaaatctcaagttattttaattaatgttgttaaaggaatagatgcagaaactagtcaaatcctaagtaacaaaattaaatctaaattaggaagtcattattattctagacttgtaactttatgtggtccatcatttgctactgaagtttttgaagagaaacctactgttatcaatggaactggaaaaaaccttaaaattgtaaaacaagtatgtgagttatttaacagtgatgttttcaaagttattccaattaatgatattgttggtttacaagtattttctagtttaaaaaatttattagcaattgcagttggattatcacaagcagaatatacttctgtaaatacaatgtcagcaatcttaacaatggggatagaagagattcaaaaaatagcttgtaaaatgaaagcaaaaaaatgaacaattatgtcattttgcgggattggtgatatcttcttaacatgtagttctactcaatctagaaattatagttttggacaagacttattaaaaaaaggtgttgaaaaaactattaaggaaaataaaaagacagttgaaggatttgaagtttataaaactgctaaaaatattattactaaatataatatcaatgcaccaatctttagttctattatagaagtattagaaggaaaactagaccctaaagaattttctaaaaagtgtttagaattattctgaaaccaaaaaattaataaataa

SEQ ID NO: 119893 - protein, 338 aa, Mycoplasma penetrans
MINNRICILGTGAWATALGSRLSLNGNTVFLWGIDNNEVNDINSGYNKKYFGNTKFSSSLSATTDLKTAIGDSKYIIFAIPSTALDSVLDKVKEFLSDKKSQVILINVVKGIDAETSQILSNKIKSKLGSHYYSRLVTLCGPSFATEVFEEKPTVINGTGKNLKIVKQVCELFNSDVFKVIPINDIVGLQVFSSLKNLLAIAVGLSQAEYTSVNTMSAILTMGIEEIQKIACKMKAKKWTIMSFCGIGDIFLTCSSTQSRNYSFGQDLLKKGVEKTIKENKKTVEGFEVYKTAKNIITKYNINAPIFSSIIEVLEGKLDPKEFSKKCLELFWNQKINK

SEQ ID NO: 119894 - DNA, 1005 bp, Mycobacterium tuberculosis; identical to SEQ ID NO: 58997
  CDS (1)..(1005): transl_table=11

SEQ ID NO: 119895 - protein, 334 aa, Mycobacterium tuberculosis; identical to SEQ ID NO: 58998

SEQ ID NO: 119896 - DNA, 1008 bp, Myxococcus xanthus
  CDS (1)..(1008): transl_table=11
atgcgtggcagtgtcatcggctccggctccttcggtaccgccctggcgaacgtgctcgcggtcaattgcgaggaggttcgtctgtggggtcgtgagtcctccgtggtggaggccatcaacacccagcacgaaaaccccacctacctgaagggcatccccatctcggagcgcgtgcgcgccacgaatgacctccaggaggcgctcgtgggctcggagttggtggtgctggccacgcccagccacgccacgcgcgaggtggtggcgaaggcccaggcgtacctgccgcgccatgtccccatcgttacggtgtcgaagggcatcgagaacgggacgctgctgacgatgacggagctcctggaggactgcctgccggaggagttccacccgtacctcgcggtgctgtccggccccagcttcgccaaggagctggcgcggcgcatgcccacggtggtgaccatcgcctcccactgggacaaggtggcgctgcgctgccagaaggcgctgcagacggagacgttccgcagctacacctccacggacgtggtgggcgtgcagtacggcggcgcgctgaagaacgtcatcgcgattgccgctggcatggcggacggcctaggcatgggccacaacgcgcgcgcggccatcatcacccgcggcctggcggagattacgcgcctggcggtgcgcaagggcgccaacccgctgacgctctccggtctgtccggcatgggcgacctggtgctgacgtgcaccggcgagctgagccgcaaccggcacgtggggatggagctgggcaagggccgcaagctgccggacatcctcgcggacatgaaggaagtggccgaaggtgtgaagacggcccgcagtgcgcacgaactggagctcaagacgggcgtggagctgcccatctgccaccaggtgtacctgattgcccacgagggcaagagcgcgcgcacggcggtggtggacctgatgacgcgccagccgaagtcggagctggcgggcgtctga

SEQ ID NO: 119897 - protein, 335 aa, Myxococcus xanthus
MRGSVIGSGSFGTALANVLAVNCEEVRLWGRESSVVEAINTQHENPTYLKGIPISERVRATNDLQEALVGSELVVLATPSHATREVVAKAQAYLPRHVPIVTVSKGIENGTLLTMTELLEDCLPEEFHPYLAVLSGPSFAKELARRMPTVVTIASHWDKVALRCQKALQTETFRSYTSTDVVGVQYGGALKNVIAIAAGMADGLGMGHNARAAIITRGLAEITRLAVRKGANPLTLSGLSGMGDLVLTCTGELSRNRHVGMELGKGRKLPDILADMKEVAEGVKTARSAHELELKTGVELPICHQVYLIAHEGKSARTAVVDLMTRQPKSELAGV

SEQ ID NO: 119898 - DNA, 990 bp, Neisseria gonorrhoeae
  CDS (1)..(990): transl_table=11
atgaaaattaccgttatcggcgcaggttcgtggggtacggcgctcgccctgcatttttcccaacacggcaaccgcgtatccctgtggacgcgcaacgcagaccaagtccgccaaatgcaggaagcgcgtgaaaacaaacgcggactgcccggcttttcctttcccgaaaccttggaagtgtgtgcggatttggcagaggcgctcaaagacagcggacttgtccttatcgtaacctccgttgccggattgagaagcagcgcagagctgctcaaacagtacggcgcgggacacctccccgtcctcgccgcctgcaaaggcttcgagcaggatacagggctgctgaccttccaagtcttgaaagaagtattgcccgacaataagaaaatcggcgtactttccggtccgagttttgcacaggaactcgccaaacaactgccctgcgccgtcgtcctcgcctccgaaaaccaagagtggattgaagaactcgtaccgcagctcaacacgaccgtcatgaggctttacggcagtaccgacgttatcggcgtggcagtaggcggttcagtcaaaaacgtcatggcaatcgctaccggactctccgacggactcgaatacggactcaacgcccgtgccgcactggttacgcgcggactggccgaaatcacccgccttgcctccgcaatgggcgcgcagcccaaaaccatgatggggcttgccggcatcggcgatctcatcttgacctgtaccggtgcactttcgcgcaaccgccgcgtcggcttgggtttggcagaaggcaaggaactgcatcaggtgctggtcgaaatcgggcacgtttccgaaggggtcagcaccatagaagaagtcttcaataccgcctgcaaataccaaatcgatatgccgattacccaaaccctgctgcaactcatccgcaaagaaatgacccctcagcaggtcgtcgaaaggctgatggaacgcagcgcgcgtttcgaataa

SEQ ID NO: 119899 - protein, 329 aa, Neisseria gonorrhoeae
MKITVIGAGSWGTALALHFSQHGNRVSLWTRNADQVRQMQEARENKRGLPGFSFPETLEVCADLAEALKDSGLVLIVTSVAGLRSSAELLKQYGAGHLPVLAACKGFEQDTGLLTFQVLKEVLPDNKKIGVLSGPSFAQELAKQLPCAVVLASENQEWIEELVPQLNTTVMRLYGSTDVIGVAVGGSVKNVMAIATGLSDGLEYGLNARAALVTRGLAEITRLASAMGAQPKTMMGLAGIGDLILTCTGALSRNRRVGLGLAEGKELHQVLVEIGHVSEGVSTIEEVFNTACKYQIDMPITQTLLQLIRKEMTPQQVVERLMERSARFE

SEQ ID NO: 119900 - DNA, 990 bp, Neisseria meningitidis serogroup A
  CDS (1)..(990): transl_table=11
atgaaaattaccgttatcggcgcaggttcgtggggtacggcgctcgccctgcacttttcccaacacggcaaccgcgtatccctgtggacgcgcaacgcagaccaagtccgccaaatgcaggaagcgcgtgaaaacaaacgcggactgcccggcttttcctttcccgaaaccttggaagtgtgtgcggatttggcagacgcgctcaaagacagcggacttgtccttatcgtaacctccgttgccggattgagaagcagcgcagagctgctcaaacagtacggcgcgggacacctccccgtcctcgccgcctgcaaaggattcgagcaggatacagggctgctgacctttcaagtattgaaagaagtattgcccgacaataaaaaaatcggcgtactctccggcccgagttttgcacaggaactcgccaaacaactgccctgtgccgtcgtcctcgcttccgaaaaccaagaatgggtcgaggaacttgtcccacaactcaacacttcggtcatgcggctttacggcagcacggatgtcatcggcgtggcggttggcggcgcggtaaaaaatgttatggcgattgccaccggattgtccgacggtctagagtacgggcttaacgcccgtgccgcactggttacgcgcggattagctgaaatcacccgccttgcctccgcaatgggcgcacagcccaaaaccatgatggggctggcaggcatcggcgacctcatcttgacctgcactggcgcactctcacgcaaccgccgcgtcggcttgggtttggcagaaggcaaggaactgcatcaggtgctggtcgaaatcggacacgtttccgaaggggtcagcacgatagaagaagtcttcaatactgcctgtaagtaccaaatcgatatgccgattacccaaaccctgctgcaactcatccgtaaggaaatgacccctcagcaggtcgtcgaaaggctgatggaacgtagcgcgcgttttgaataa

SEQ ID NO: 119901 - protein, 329 aa, Neisseria meningitidis serogroup A
MKITVIGAGSWGTALALHFSQHGNRVSLWTRNADQVRQMQEARENKRGLPGFSFPETLEVCADLADALKDSGLVLIVTSVAGLRSSAELLKQYGAGHLPVLAACKGFEQDTGLLTFQVLKEVLPDNKKIGVLSGPSFAQELAKQLPCAVVLASENQEWVEELVPQLNTSVMRLYGSTDVIGVAVGGAVKNVMAIATGLSDGLEYGLNARAALVTRGLAEITRLASAMGAQPKTMMGLAGIGDLILTCTGALSRNRRVGLGLAEGKELHQVLVEIGHVSEGVSTIEEVFNTACKYQIDMPITQTLLQLIRKEMTPQQVVERLMERSARFE

SEQ ID NO: 119902 - DNA, 990 bp, Neisseria meningitidis serogroup B
  CDS (1)..(990): transl_table=11
atgaaaattaccgttatcggcgcaggttcgtggggtacggcgctcgccctgcatttttcccaacacggcaaccgcgtatccctgtggacgcgcaacgcagaccaagtccgtcaaatgcaggaagcgcgtgaaaacaaacgcggactgcccggcttttcctttcccgaaaccttggaagtgtgtgcggatttggcagacgcgctcaaagacagcggacttgtccttatcgtaacctccgttgccggattgagaagcagcgcagagctgctcaaacagtacggcgcgggacacctccccgtcctcgccgcctgcaaaggattcgagcaggataccgggctgctgacctttcaagtcttgaaagaagtattgcccgacaataagaaaatcggcgtactttccggcccgagttttgcacaggaactcgccaaacaactgccctgcgccgtcgtccttgcctccgaaaaccaagagtggattgaagaactcgtaccgcagctcaacacgaccgtcatgaggctttacggcagtaccgatgttatcggcgtggcggttggcggcgcggtaaaaaatgttatggcgattgccaccggattgtccgacggcctagagtacgggcttaacgcccgtgccgcactggttacgcgcggattagctgaaatcacccgccttgcctccgcaatgggcgcacagcccaaaaccatgatggggctggcaggcatcggcgacctcatcctcacctgcaccggcgcactttcgcgcaaccgccgcgtcggcttgggtttggcagaaggcaaggaactgcatcaggtgctggtcgaaatcggacacgtttccgaaggggtcagcacgatagaagaagtcttcaatactgcctgtaagtaccaaatcgacatgccgattacccaaactctgctgcaactcatccgcaaagaaatgaccccgcaacaggttgtcgaaagactgatggaacgcagcgcgcgttttgaataa

SEQ ID NO: 119903 - protein, 329 aa, Neisseria meningitidis serogroup B
MKITVIGAGSWGTALALHFSQHGNRVSLWTRNADQVRQMQEARENKRGLPGFSFPETLEVCADLADALKDSGLVLIVTSVAGLRSSAELLKQYGAGHLPVLAACKGFEQDTGLLTFQVLKEVLPDNKKIGVLSGPSFAQELAKQLPCAVVLASENQEWIEELVPQLNTTVMRLYGSTDVIGVAVGGAVKNVMAIATGLSDGLEYGLNARAALVTRGLAEITRLASAMGAQPKTMMGLAGIGDLILTCTGALSRNRRVGLGLAEGKELHQVLVEIGHVSEGVSTIEEVFNTACKYQIDMPITQTLLQLIRKEMTPQQVVERLMERSARFE

SEQ ID NO: 119904 - DNA, 1005 bp, Neorickettsia sennetsu
  CDS (1)..(1005): transl_table=11
atggtgctcatggactcagtcgttattggtgggggagcatggggaactgcaatcgcaaaccttctcgcgttcaacacccaacgcgtgacaattttttgcaggaatacaacggttatcgatagtataaacaagagacatattaacactaaatacctacctactttcccgctcaacaaaaacatttccgctacgagcaggatggacgtcttaaaaaatgcggagttgatcttcgtagccgttccatctcagagcatgcgagaactcctccaaaaagtcaaagaaaatatcaaagagagtgtccaaatcatactgtgtaataagggaatagagagagaatctttgcttttgatgagtgaagtcgttcatgaagaacttcctaaaaatgatatcttcgtcctttctggaccaaattttgcacatgaagtacttagcaagaaaccttcttttagtaacttagctgggcgtaacaaaaccagttatgacaagatagcgaatgcgctctcgacggaaacattttttacaaaatatatcactgatattaacggcacacagatactcggggctttcaagaacgttatagcaataatttgtggcctactggttcgtatggatgcaggttcgaatactctgtcagcgcttatgagcttagcattggaggaagctcgctctttcataacaataaagaatggaaatccagatactataatggaattttgtgggataggtgatctcgttctcacatgcttttcaaataaatcacgcaattttagatatggttacagacttgtcgatggctacagtgaaaacgcgttagttgaaggaaaatcaaccttggaatcattacacgaattggctcgtatacataacataaactgtgtactaacaaatacgttatacactgtaactcaatttaattcatatggcacgagctcttttgagcaagatatcaaacgggagctcaactcagcttttatgagcttgttaggttgcgcgaaaaatccataa

SEQ ID NO: 119905 - protein, 334 aa, Neorickettsia sennetsu
MVLMDSVVIGGGAWGTAIANLLAFNTQRVTIFCRNTTVIDSINKRHINTKYLPTFPLNKNISATSRMDVLKNAELIFVAVPSQSMRELLQKVKENIKESVQIILCNKGIERESLLLMSEVVHEELPKNDIFVLSGPNFAHEVLSKKPSFSNLAGRNKTSYDKIANALSTETFFTKYITDINGTQILGAFKNVIAIICGLLVRMDAGSNTLSALMSLALEEARSFITIKNGNPDTIMEFCGIGDLVLTCFSNKSRNFRYGYRLVDGYSENALVEGKSTLESLHELARIHNINCVLTNTLYTVTQFNSYGTSSFEQDIKRELNSAFMSLLGCAKNP

SEQ ID NO: 119906 - DNA, 990 bp, Nitrosomonas europaea
  CDS (1)..(990): transl_table=11
atgaatatcgcagtactcggtgcgggcgcctggggaactgcgctggcaatttgtctgtctgcgcgtcaccgtgtgacgctatggacccgtaatgtggaacatctggctgaactggcggcgttacgcaccaatcagcgttatctgcccaggcaacctttgccggattccattcatcttgtctctgcgttgagtgaggcactggaacgagccgaactggtttttgtcgtcgtacccgttgcaggattacgcaccactttgcagcagatggtggcattgaacccatcattgccccttattctggcctgcaagggatttgaaacaggttccgcaaaacttccctgtcaggtggttgaggaagtttatccagcgagtatcacttgtggtgtgctatccggcccgagtttcgcccgggaagtggcacaaggccttcctgccgcgctgacacttgcttctcacgacgaaatttttgccagaagcgttgccggtgagattcgtacagcaagcctgcgggtttattcaggcaacgacgtgatcggggtggaggtcggtggagcactcaaaaatgtgattgcgattgctgccgggatttctgatggaattgcgtttggcaataatgccagagcagcgctgattacccgcgggctggcggaaattacccgattgggcatggcacttggcggatgccgggaaacctttaccgggctgacgggtatcggtgacctgattttgacttgtaccgggaatctttcaagaaatcgtcgggttgggatgatgcttgctgccgggcggcaattggcagagatcctgcctgaaatagggcatgtcactgaaggcgtctatacggttcgggaagcgtatggattgggacagcggctgcaaatcgatatgcccgtgactcaggcggtttacagtattctgtatgagcaggttccggttgagatagcgattcaggatatgcttgatcgtgagcctggagctgaaacagactga

SEQ ID NO: 119907 - protein, 329 aa, Nitrosomonas europaea
MNIAVLGAGAWGTALAICLSARHRVTLWTRNVEHLAELAALRTNQRYLPRQPLPDSIHLVSALSEALERAELVFVVVPVAGLRTTLQQMVALNPSLPLILACKGFETGSAKLPCQVVEEVYPASITCGVLSGPSFAREVAQGLPAALTLASHDEIFARSVAGEIRTASLRVYSGNDVIGVEVGGALKNVIAIAAGISDGIAFGNNARAALITRGLAEITRLGMALGGCRETFTGLTGIGDLILTCTGNLSRNRRVGMMLAAGRQLAEILPEIGHVTEGVYTVREAYGLGQRLQIDMPVTQAVYSILYEQVPVEIAIQDMLDREPGAETD

SEQ ID NO: 119908 - DNA, 1011 bp, Nocardia farcinica; identical to SEQ ID NO: 58999
  CDS (1)..(1011): transl_table=11

SEQ ID NO: 119909 - protein, 336 aa, Nocardia farcinica; identical to SEQ ID NO: 59000

SEQ ID NO: 119910 - DNA, 996 bp, Novosphingobium aromaticivorans
  CDS (1)..(996): transl_table=11
atgaccttcgaggtgggcgtcgtcggcgcgggcgcatggggcacggcgctggcgcagatgctatccagcgacgggcgcgaggtcctgctgtgggcgcgcgagagcgaagtggtccgcgaaatcaacgaggaccggcgcaatggaccgttcctgccttccgcctgtctcaatccgacgatcaccgccaccgcagaccttgccgacatggcgcgcatcccggtcctgctgctggtgacgccggcccagcatcttgcgtccgttcttggcgggatcgggcgtgacggtggggacgtggtcctgtgctcaaaggggatcgaggccggaaccgggcggttgatggccgacgtcgcccgcgacgcggcaccggacgcgagcatcgccgtgctttccggcccgacctttgcgcatgaagtggcggacgggttgccgacggcggttaccctcgcctgtgccgggggagaggaacagtggctgcggctttcgaccgccatcgcccgcccgacgttccgtccctattattcggacgacgtgaccggggccgagatcggcggcgcggtgaagaacgtgctggccattgcctgcggcgtggtcgagggactgcgtctcggccagaacgcccgggcggcgctgatcagccggggtttcgccgaaatgcagcgtttcgggcttgcgctgggggcgcggccgaaaacattgtcggggctctcgggtttgggagacctggtgttgacatgttcttccacttcgagccgcaatttctcgctcggcaaggcgctgggcgagggagcaagcgcaacggccgtcatggccgaccgcgcgacggtggccgagggggcgttcaccgccccggtgcttgccgaccttgcgcgcggccgcgggatttccatgccgatcgtcgaggccgtggtcacgctgctcgaaggcgcggcaccggcgcgcgaggtggtcgcgggcctgctctcgcgtccgttgaccgcggaaaatccgcttgtctga

SEQ ID NO: 119911 - protein, 331 aa, Novosphingobium aromaticivorans
MTFEVGVVGAGAWGTALAQMLSSDGREVLLWARESEVVREINEDRRNGPFLPSACLNPTITATADLADMARIPVLLLVTPAQHLASVLGGIGRDGGDVVLCSKGIEAGTGRLMADVARDAAPDASIAVLSGPTFAHEVADGLPTAVTLACAGGEEQWLRLSTAIARPTFRPYYSDDVTGAEIGGAVKNVLAIACGVVEGLRLGQNARAALISRGFAEMQRFGLALGARPKTLSGLSGLGDLVLTCSSTSSRNFSLGKALGEGASATAVMADRATVAEGAFTAPVLADLARGRGISMPIVEAVVTLLEGAAPAREVVAGLLSRPLTAENPLV

SEQ ID NO: 119912 - DNA, 1035 bp, Oceanobacillus iheyensis; identical to SEQ ID NO: 59001
  CDS (1)..(1035): transl_table=11

SEQ ID NO: 119913 - protein, 344 aa, Oceanobacillus iheyensis; identical to SEQ ID NO: 59002

SEQ ID NO: 119914 - DNA, 1152 bp, Onion yellows phytoplasma; identical to SEQ ID NO: 119450
  CDS (163)..(1152): transl_table=11

SEQ ID NO: 119915 - protein, 329 aa, Onion yellows phytoplasma
MKITIIGSGAWGSTLAQVLTDNNNQVLLYDINLSYVEKINQGKHPIFNAPLVNVKAVSCLKQALDYSDLIVLSVPMKFMRHLLKQIALMLTTPKSFVNVSKGIEPLTFLRVSEIVKQVIPAPLLANFASLMGPSHAEEVILRKLTLLTAASSNPAFALEIQKLFSCPNYLKVYTSSDLVGNEICSAFKNVLAFINGILVAKNFGINSQAALMSRGILEMSVLVTFYQGNPQTVLGLPGLGDLIVTAFSKYSRNFNAGAKIAAGITYQQIIDSSLQTIEGFQTLNAFYQLQLKHNLDLPIIQASYQLIFESKPFETVFATLMQRPFKSEF

SEQ ID NO: 119916 - DNA, 1002 bp, Protochlamydia amoebophila
  CDS (1)..(1002): transl_table=11
atgaaaaaaattggctaccttggattaggggcttggggttattgcctagcttctttactagcttcaaaggggcataaagttgtctgttggacaacaaaacctgaattagcaaaacatctaacggatacgagagaacatcctcttttagcaggtcatctatcaaaaggagaaatgactttcacaacagatatgtctgaagctttaaaagatgtggatatgattgttgaatcagtcacctctgcaggtttacgctctgtatttgaacaagtacgctctttaggattacctaattgccctattgtcattacttccaaagggattgagcaagatacaggaatgatcctaccagaagtcgttattgaagttttaggtgaagagtttagatcattgataggttttttaagcggtcctagttttgcacaagaagtcattcgtgaactcccaacttctgtcgttggaacgggttacacggtcgaagtcatccaagagatttgtgaaacatttatgacccctacttttcgagtctatcctaacactgatattttaggagtcgcatttggaggagctttaaaaaatattattggcattgcttgtgggatttccgatggcctagcattgggatgcagctccaaagcagctttaatgacgcgaggtctgcacgaaattcgaaaattatccgttgcatgtggttgtaaagcagaaacattaaatgggctagcaggaatgggtgatttatgtgtgacttgtagttcgcctattagtcgcaattttcgttttggtacacttttagcccaagggctatccacagaacaagcaagaaatcgaattggtatggttgtagaaggagcttatacgtgtgtttcagcattgcaattaagtaaacaacataaaattatcatgccaatttctgaagccgtttataatattattcaagggactattaaacctattgaagctgtgagtgcattaatgaaaagaacgatcaaagaagagcatttataa

SEQ ID NO: 119917 - protein, 333 aa, Protochlamydia amoebophila
MKKIGYLGLGAWGYCLASLLASKGHKVVCWTTKPELAKHLTDTREHPLLAGHLSKGEMTFTTDMSEALKDVDMIVESVTSAGLRSVFEQVRSLGLPNCPIVITSKGIEQDTGMILPEVVIEVLGEEFRSLIGFLSGPSFAQEVIRELPTSVVGTGYTVEVIQEICETFMTPTFRVYPNTDILGVAFGGALKNIIGIACGISDGLALGCSSKAALMTRGLHEIRKLSVACGCKAETLNGLAGMGDLCVTCSSPISRNFRFGTLLAQGLSTEQARNRIGMVVEGAYTCVSALQLSKQHKIIMPISEAVYNIIQGTIKPIEAVSALMKRTIKEEHL

SEQ ID NO: 119918 - DNA, 1014 bp, Pasteurella multocida
  CDS (1)..(1014): transl_table=11
atgaatacgactgtagccacttctccaattacggtacttggtgcaggttcttatggtaccgcattagcgattgcgttttctcgaaatggtttccctacttatctttggggacatgatcctgttcacatgcaacgcttaagtgaagaacgtcagaataacgcctttttgccgaatattgcttttccagatgccttgcatattgaatttgatttagccagtgccttaagccaatcacgtgatctgttaattgtggtgccaagtcatgtatttggggaagtgattgataaaattaagccttatttacgccctgatcatcgcattgcttgggcgacgaaagggttagagcgcaatacgggacgtttattgcaagaagtgattgaggaaaagctcggtacacaacacccgttagcggtattatctggaccgacatttgcgaaagagcttgctgccggtttaccgaccgcaattgccctagcctccaataatgaacaatttgctttggaattccaagcacgtatccattgcagtaaacatttcagagtttatattaatcaagatatgatcggtgtgcagctaggtggtgcgattaaaaatgtgattgcgatcagtgctgggatgtcggatggtatgggctttggtgctaatgcacgaacagccttgattactcgtggtattgcggaaattagccgtttaggcgcctcattaggcgcgaatccaaatacttttatgggcatgtctggcttaggtgatttagtgttaacctgtactgacgatcaatcgcgtaaccgccgatttggtattatgctcggtcagggcttttcagcccaaacagcaatggacaatatcgggcaagtggtagaaggcttttataacgcgaaagaagcctatttattagcgcaacgtcaagggatagaaatgccgatcacagagcaagtttatcaagttttattctgtggtaaaaatgcacaagacgtggcggcaagcctactcggacgtgagcgtaaaggggaataa

SEQ ID NO: 119919 - protein, 337 aa, Pasteurella multocida
MNTTVATSPITVLGAGSYGTALAIAFSRNGFPTYLWGHDPVHMQRLSEERQNNAFLPNIAFPDALHIEFDLASALSQSRDLLIVVPSHVFGEVIDKIKPYLRPDHRIAWATKGLERNTGRLLQEVIEEKLGTQHPLAVLSGPTFAKELAAGLPTAIALASNNEQFALEFQARIHCSKHFRVYINQDMIGVQLGGAIKNVIAISAGMSDGMGFGANARTALITRGIAEISRLGASLGANPNTFMGMSGLGDLVLTCTDDQSRNRRFGIMLGQGFSAQTAMDNIGQVVEGFYNAKEAYLLAQRQGIEMPITEQVYQVLFCGKNAQDVAASLLGRERKGE

SEQ ID NO: 119920 - DNA, 1023 bp, Photorhabdus luminescens subsp
  CDS (1)..(1023): transl_table=11
atgaatagtactgtttctatgacagtgattggtgccggctcatacggcacctcattagccattacgctggctcgtaatggtcataatgttgtactttgggggcataatccagagcatgttggggcattgcaacgggtgcgttgtaatcaaaaatttctgccggatgtttcctttcctgatagtttattgcttgaaacggacctaataaaagcactaacagcgagccgcgatattcttgttgtggtacctagccatgtgtttggtgaagtgttaaagcagataaaaccacatttacggcctgattcacgtatcgtatgggcaactaaaggcttggaagcggataccggtcggttattgcaggatgtggcccgtgagatattaggcaatgaaataccgctagcggtgctctctgggccaacatttgctaaagagttagcggctggtttgcctaccgcgattgctatttccgcgacggaatctgcttttggcgatggacttcaacaattattccactgtggcaaaagtttccgggtttataaaaatcctgattttattggtgttcaactcggtggtgccgtaaaaaacgtgatcgccattggcgcgggaatatctgatggcatgggatttggtgctaatgctcgtaccgcattgattactcgtggattggcggaaatgagtcgccttggtgcagcgcttggtgctgatccttctacctttatgggcatggcgggattgggcgatttggtcttaacttgtactgataaccaatcacgtaaccgtcgttttggcatgatgctggggcagggaatcagtgttgaagaagcgcagtatcagattgggcaggttgttgaaggttatcgcaataccaaagaagtacgtgcattggctaatcgcgccaatgtagaaatgccgattgcagaacaaatctaccagatactctattgcaataaaaatgtgatagaagctgctcaggcattattaggaagagccagaaaggatgagagcgataatgtgcgctcttaa

SEQ ID NO: 119921 - protein, 340 aa, Photorhabdus luminescens subsp
MNSTVSMTVIGAGSYGTSLAITLARNGHNVVLWGHNPEHVGALQRVRCNQKFLPDVSFPDSLLLETDLIKALTASRDILVVVPSHVFGEVLKQIKPHLRPDSRIVWATKGLEADTGRLLQDVAREILGNEIPLAVLSGPTFAKELAAGLPTAIAISATESAFGDGLQQLFHCGKSFRVYKNPDFIGVQLGGAVKNVIAIGAGISDGMGFGANARTALITRGLAEMSRLGAALGADPSTFMGMAGLGDLVLTCTDNQSRNRRFGMMLGQGISVEEAQYQIGQVVEGYRNTKEVRALANRANVEMPIAEQIYQILYCNKNVIEAAQALLGRARKDESDNVRS

SEQ ID NO: 119922 - DNA, 1017 bp, Photobacterium profundum
  CDS (1)..(1017): transl_table=11
atgaatcaaaacgtaaataatgcgatcacaatgacagtgttaggtgccggctcttatggtacctcgctggcaatttctttagcgcgttatggtgcaaatgtcatcctttgggggcatgatgccgaacatattgctcagcttgaaatcgaccgtgccaatgaagcctttttgccaggtgttgcttttcctgagtcgctgattctttctgcggatttagaaatggccgtgcaggcaagccgcgatttattggtggtagtaccaagccatgtgtttggtttggtattaagcgatgtgaagccatttttacgtgaagactcacgcatttgttgggcaacgaaaggcttagaaccagaaacggggcgcttattaaaagaagtcgccgttgacgctgtgggcgcagaggtgcctttggctgttttatctggtccaacatttgcgaaagagctcgcggcgggtatgccaacggccattgctgtttcttctcctgatgatgcatttgttgaagaccttcaagagaaaattcactgtagtaaaacattccgtgtgtacagcaatagtgattttattggtatgcaattgggtggcgcagtgaaaaacgtgattgcgattggtgctggtatgtctgatggtatcggttttggtgccaatgcacgaactgcattgattacacgtggtcttgctgaaatgtgtcgtcttggcgcggcattaggtgctcaaaaagaaacattcatgggcatggcaggtttaggtgatctagtactaacatgtaccgataaccaatcacgtaaccgtcgttttggtttagcgttagggcagggcaaatcggttgatcaggcgcagatagatatcggtcaggttgtcgaaggttaccgtaataccaaagaagtctgggctcttgctcagcgctatggtgttgaaatgcctatttcagagcaaatttatcaggtgttatatcagggtaaagatgcaagagaagccgcgaaagacttattagcgcgtgacaaaaaatatgagtag

SEQ ID NO: 119923 - protein, 338 aa, Photobacterium profundum
MNQNVNNAITMTVLGAGSYGTSLAISLARYGANVILWGHDAEHIAQLEIDRANEAFLPGVAFPESLILSADLEMAVQASRDLLVVVPSHVFGLVLSDVKPFLREDSRICWATKGLEPETGRLLKEVAVDAVGAEVPLAVLSGPTFAKELAAGMPTAIAVSSPDDAFVEDLQEKIHCSKTFRVYSNSDFIGMQLGGAVKNVIAIGAGMSDGIGFGANARTALITRGLAEMCRLGAALGAQKETFMGMAGLGDLVLTCTDNQSRNRRFGLALGQGKSVDQAQIDIGQVVEGYRNTKEVWALAQRYGVEMPISEQIYQVLYQGKDAREAAKDLLARDKKYE

SEQ ID NO: 119924 - DNA, 1026 bp, Pseudomonas syringae pv
  CDS (1)..(1026): transl_table=11
atgaccacacagcaaccagtcgcggttcttggtggtggcagcttcggcactgccattgcaaatctgctggccgagaacggccatcaggttctccagtggatgcgtgatccggagcaggcgcaggcgattcgcgtcaaccgtgagaacccccgttacctcaagggcatcaaggttcggcccgaagtcgagccggtaaccgacatcaccgccacgcttgaggcctgcgagctgattttcgtcgctctgccttcaagcgcactgcgcgcggtactctcgccccatgtcgagcgcctgaacggcaagatgctggtcagcctgaccaaaggtattgaagcgcagagcttcaaattgatgagccagatcctcgaagagatcgttccccaggcgcgtatcggcgtattgtccgggcccaacctggcccgggagatcgccgagcatgcgttgaccgccaccgtggttgccagcgaagacgaggcgctgtgtcagcaggtccaggccgcgctgcatggtcgtacttttcgggtctatgccagcaacgaccggtttggtgtagagctgggtggggcattgaagaacgtctacgcaattatcgctggcatggccgtagcgctggacatgggcgaaaacaccaagagcatgctgatcacccgggcgctggccgaaatgacccgttttgcggtcagtcagggtgccaacccgatgacctttctcggcctggccggggtgggcgatctgatcgtcacctgttcctcacccaaaagtcgcaattatcaggtcgggtttgcgctgggccaggggctgacgctggaggcggcggtcactcgtctgggcgaagtagccgagggcgtgaacacgctcaaggtgctcaaggtcaaagcgcaggaggttcaggtctatatgccgttggtcgccgggctgcatgcgattctttttgaaggccgtacgctcagtcaggtcatcgaggcgttgatgcgtgccgagcccaagacggacgtcgatttcatttcgattaccggctttaattga

SEQ ID NO: 119925 - protein, 341 aa, Pseudomonas syringae pv
MTTQQPVAVLGGGSFGTAIANLLAENGHQVLQWMRDPEQAQAIRVNRENPRYLKGIKVRPEVEPVTDITATLEACELIFVALPSSALRAVLSPHVERLNGKMLVSLTKGIEAQSFKLMSQILEEIVPQARIGVLSGPNLAREIAEHALTATVVASEDEALCQQVQAALHGRTFRVYASNDRFGVELGGALKNVYAIIAGMAVALDMGENTKSMLITRALAEMTRFAVSQGANPMTFLGLAGVGDLIVTCSSPKSRNYQVGFALGQGLTLEAAVTRLGEVAEGVNTLKVLKVKAQEVQVYMPLVAGLHAILFEGRTLSQVIEALMRAEPKTDVDFISITGFN

SEQ ID NO: 119926 - DNA, 1023 bp, Pseudomonas aeruginosa; identical to SEQ ID NO: 59003
  CDS (1)..(1023): transl_table=11

SEQ ID NO: 119927 - protein, 340 aa, Pseudomonas aeruginosa; identical to SEQ ID NO: 59004

SEQ ID NO: 119928 - DNA, 1026 bp, Pseudomonas fluorescens; identical to SEQ ID NO: 59005
  CDS (1)..(1026): transl_table=11

SEQ ID NO: 119929 - protein, 341 aa, Pseudomonas fluorescens; identical to SEQ ID NO: 59006

SEQ ID NO: 119930 - DNA, 1065 bp, Pseudomonas fluorescens; identical to SEQ ID NO: 59007
  CDS (1)..(1065): transl_table=11

SEQ ID NO: 119931 - protein, 354 aa, Pseudomonas fluorescens; identical to SEQ ID NO: 59008

SEQ ID NO: 119932 - DNA, 1026 bp, Pseudomonas putida; identical to SEQ ID NO: 59009
  CDS (1)..(1026): transl_table=11

SEQ ID NO: 119933 - protein, 341 aa, Pseudomonas putida; identical to SEQ ID NO: 59010

SEQ ID NO: 119934 - DNA, 1026 bp, Pseudomonas syringae pv
  CDS (1)..(1026): transl_table=11
atgaccacacagcaacccgtcgcggtgcttggcggtggcagcttcggtacggccattgccaatctgctggccgagaacggccatcaggttcgtcagtggatgcgcgatccggagcaggctgaggccattcgcgtcaatcgtgaaaacccccgctacctcaagggcatcaggattcgtcctgaagtcgagccggtcaccgacctgacggcggtgctcgacgccagcgaactgatcttcgtcgccttgccatcgagtgccttgcgctcggtgttgtcgcctcatgtcgcgcgcctgaatggcaagatgctggtgagcctgaccaagggtatcgaagcgcagagcttcaagctcatgagtcagatcctcgaagagatcgtcccgcaggcgcgtatcggcgtgttgtccgggcccaatctggcgcgggaaatcgccgaacatgcgctgaccgcaacagtggttgccagcgaagacgaggcactgtgtcaggaggttcaggctgcattgcacgggcgaacctttcgcgtctatgccagcaatgaccggtttggtgtcgaactgggcggggccctgaagaacgtctacgcgattattgccggcatggcggtggcgctggacatgggcgaaaacaccaaaagcatgctgatcacccgggcgctggcggaaatgacccggtttgcggtcagccagggcgccaacccgatgacctttctgggcctggccggggtgggcgatctcatcgtcacctgttcctcgccgaaaagccgcaactatcaggtcggttttgcgctgggccaggggctgacgctggatgaagcggtcacgcgtttgggcgaggtggccgagggtgtgaacaccctcaaggtgcttaaggtcaaagcgcaggaagtgcaggtctatatgccattggtcgcggggctgcatgcgattctttttgaaggccgtacgctcagccaggtcattgaggcgctgatgcgggccgagcccaagacggacgtcgatttcatttcgattaccggctttaattga

SEQ ID NO: 119935 - protein, 341 aa, Pseudomonas syringae pv
MTTQQPVAVLGGGSFGTAIANLLAENGHQVRQWMRDPEQAEAIRVNRENPRYLKGIRIRPEVEPVTDLTAVLDASELIFVALPSSALRSVLSPHVARLNGKMLVSLTKGIEAQSFKLMSQILEEIVPQARIGVLSGPNLAREIAEHALTATVVASEDEALCQEVQAALHGRTFRVYASNDRFGVELGGALKNVYAIIAGMAVALDMGENTKSMLITRALAEMTRFAVSQGANPMTFLGLAGVGDLIVTCSSPKSRNYQVGFALGQGLTLDEAVTRLGEVAEGVNTLKVLKVKAQEVQVYMPLVAGLHAILFEGRTLSQVIEALMRAEPKTDVDFISITGFN

SEQ ID NO: 119936 - DNA, 1044 bp, Ralstonia eutropha
  CDS (1)..(1044): transl_table=11
ttgcgccgatccaccgttcgagccgccatgaaactgaccttcctcggtgcaggtgcctggggcaccgcacttgcgagccatgccgccgccaaccatgacgtggtgctgtggggacgcgatcccgcccagcttgccgcgatcgcggcgaccggcagcaacgaggcctatctgccgggcgtgccactgtctccgcggctgcgcgtggaagcggacttcgagcaggcagtcggtcatgccgccgacgatcccgatggcctcgtagtcgtagccacgcccgtgtcgggcctgcgcgaaatgacgcgccggctcgccgggcgcggcaatggccatgtgcgcatgctgtggctctgcaagggcttcgaggccggcacgcacgcgctgccgcaccagatggtgcgcgaagaactcgacgccgcgggccgcaccagcggattcgactatggcgtcctgaccggccccagctttgcgcgcgaggtggcgctgggcctgccgtgcgcgctgacagtcgcgggcagcgtgccaacgctggcggattgcgcgcaggcggcattccatcatcacgccatgcgcatctacggcagcgacgacctgaccggtgtcgaggtcggcggcgcagtgaagaacgtgctggcgatcgccaccggtgcgagcgatggcctgggtctggggctcaacgcgcgcgccgcgctggtgacgcgtgggctggccgaaatgacgcgccttggcctggcgcttggtggacgcgcggaaacgttcatgggcctcgccggcgtgggcgacctgatcctgacggctaccggtgacctgtcgcgtaatcgcaaggtcggacagcagctcgcggccggacaaagcctcgatcagatcctcgcgagccttgggcatgtcgccgagggcgtgcgttgcgcgcaggccgtggccgcactggccgaggcctgcaagatcgagatgccgatcacgcgcgccgtgtgcgcggtgttgttcgaaggcctgagcgccgcggatgccgtggcgcaactcctgcagcgcgacgcgcgcgacgaatag

SEQ ID NO: 119937 - protein, 347 aa, Ralstonia eutropha
MRRSTVRAAMKLTFLGAGAWGTALASHAAANHDVVLWGRDPAQLAAIAATGSNEAYLPGVPLSPRLRVEADFEQAVGHAADDPDGLVVVATPVSGLREMTRRLAGRGNGHVRMLWLCKGFEAGTHALPHQMVREELDAAGRTSGFDYGVLTGPSFAREVALGLPCALTVAGSVPTLADCAQAAFHHHAMRIYGSDDLTGVEVGGAVKNVLAIATGASDGLGLGLNARAALVTRGLAEMTRLGLALGGRAETFMGLAGVGDLILTATGDLSRNRKVGQQLAAGQSLDQILASLGHVAEGVRCAQAVAALAEACKIEMPITRAVCAVLFEGLSAADAVAQLLQRDARDE

SEQ ID NO: 119938 - DNA, 1029 bp, Ralstonia metallidurans
  CDS (1)..(1029): transl_table=11
atgaaactgaccattctcggcgccggcgcatggggtaccgcgcttgcaagccacgcggccacggccgccgccgatcatgacgtggtgctctgggggcgcgatccggctcagcttgccggcatcgccgcaactggcgtcaacgccacctatctgccgggcgtgagcctgtcgccccggcttgtctgcgagcccgatttcgatcgcgccgtcgatcacgccctgaccgatccggaggggctgctgatcatcggcacgccggtatccggcctgcgcgagatgacgcgcaggttggccgcgcgtcgcaaagggccgctggcgatgctctggctctgcaagggcttcgaggccgagacccatgcgatgccgcaccagatggtgcacgatgaattgaacgcgctcggcgtggcgccgggcgagatcgaatatggcgtgctgacggggccgagctttgccaaggaagtggcgcagggtctgccgtgcgcgctgaccgtggccggcaccgcgcacgtgctgatcgatcgcgcgcaggcggcattccatcaccatgccatgcgcatctatggcagcgacgacctgatcggcgtcgaagtcggtggcgcggtgaagaacgtgctggcgatcgccaccggtgccagcgatggcctggggcttgggctcaatgcgcgcgcggcgctgatcacgcgcgggctggccgagatgacccgcctgggccttgcgctcggcggtcgcgtcgagaccttcatgggtctggccggcatgggtgacctgatcctgaccgccaccggcgatttgtctcgtaaccgtaaggtcggccagcaactggcgggcgggaagacgctcgaccagatcctggcagaccttggccatgtggccgaaggcgtgcgttgcgcgcaggccgttgccgcgctggcggcgcgcgtcggtgtggaaatgccgatcacgcgcgcggtatgcgcggtgctgttcgaagggttgcctgttgccgatgcggtctcgcagttgctgcagcgtgacgcgcgcgacgagtaa

SEQ ID NO: 119939 - protein, 342 aa, Ralstonia metallidurans
MKLTILGAGAWGTALASHAATAAADHDVVLWGRDPAQLAGIAATGVNATYLPGVSLSPRLVCEPDFDRAVDHALTDPEGLLIIGTPVSGLREMTRRLAARRKGPLAMLWLCKGFEAETHAMPHQMVHDELNALGVAPGEIEYGVLTGPSFAKEVAQGLPCALTVAGTAHVLIDRAQAAFHHHAMRIYGSDDLIGVEVGGAVKNVLAIATGASDGLGLGLNARAALITRGLAEMTRLGLALGGRVETFMGLAGMGDLILTATGDLSRNRKVGQQLAGGKTLDQILADLGHVAEGVRCAQAVAALAARVGVEMPITRAVCAVLFEGLPVADAVSQLLQRDARDE

SEQ ID NO: 119940 - DNA, 1017 bp, Ralstonia solanacearum; identical to SEQ ID NO: 59011
  CDS (1)..(1017): transl_table=11

SEQ ID NO: 119941 - protein, 338 aa, Ralstonia solanacearum; identical to SEQ ID NO: 59012

SEQ ID NO: 119942 - DNA, 984 bp, Rhizobium leguminosarum bv
  CDS (1)..(984): transl_table=11
atgagcgaaaacatcgccgtcgtcggatcgggggctttcggcacggcgcttgccgccgtcatcgcgcttgccggccgcagcgccgtgaccctcgtcgggcgtgacccgtcactgattgccgatctgaaggccgaacggctgcatgatgcggtactgcccggcattctcctgcccgatacgctggaattttccgccgaggcggatgcgatcaccggcgcctccatcgtgctttttgcgatgccgtcgcaggcgcaggccgatgcggcgcggcaatacggaccttatctttgcaaggatgccgtggtcgttacctgtgccaagggtatcgaacgggcgacgggcaatcttctgaccgacatgctggaacgggaactgccggatcattccatcgccgtgctctccggcccgggttttgccgccgatatcgccaagggcctgccgacggcgatggcgattgcggcagccgacatggagaccgcggagcggctcgctcaggccatatcgggccgaaccttccggctctacgcctccaacgaccggatcggcgtgcagcttggcggcgcactgaagaatgtgctggcgatcgcctgcggcatcgtcgaaggccgtggcatcggcgattccgcccgtgcggcgctgattgcacgcggtcttgctgaaatgtcgcgtttcgtcgttgccaagggcgggcaggcggatacggtgcgcgggctttccggcctcggcgatctggtgctgacggcgacgagccatcagtcgcgaaacctgcgcttcggcattgcgctcgggcgcggcgaaaagaccgatcccctgcagggtgcgctggtggaaggtgcgtttgccgcctccgtcgcctcgcggcttgcggcggagttgaaggtcagcatgccgatcaccgatgccgtttccgccatcatcgacggcaagctcgatatatcagaggcgatagagcagctgatgacgcgtccgatcaccaccgaatag

SEQ ID NO: 119943 - protein, 327 aa, Rhizobium leguminosarum bv
MSENIAVVGSGAFGTALAAVIALAGRSAVTLVGRDPSLIADLKAERLHDAVLPGILLPDTLEFSAEADAITGASIVLFAMPSQAQADAARQYGPYLCKDAVVVTCAKGIERATGNLLTDMLERELPDHSIAVLSGPGFAADIAKGLPTAMAIAAADMETAERLAQAISGRTFRLYASNDRIGVQLGGALKNVLAIACGIVEGRGIGDSARAALIARGLAEMSRFVVAKGGQADTVRGLSGLGDLVLTATSHQSRNLRFGIALGRGEKTDPLQGALVEGAFAASVASRLAAELKVSMPITDAVSAIIDGKLDISEAIEQLMTRPITTE

SEQ ID NO: 119944 - DNA, 1032 bp, Rhizobium loti; identical to SEQ ID NO: 59013
  CDS (1)..(1032): transl_table=11

SEQ ID NO: 119945 - protein, 343 aa, Rhizobium loti; identical to SEQ ID NO: 59014

SEQ ID NO: 119946 - DNA, 1002 bp, Rhizobium meliloti; identical to SEQ ID NO: 59015
  CDS (1)..(1002): transl_table=11

SEQ ID NO: 119947 - protein, 333 aa, Rhizobium meliloti; identical to SEQ ID NO: 59016

SEQ ID NO: 119948 - DNA, 990 bp, Rhodopseudomonas palustris
  CDS (1)..(990): transl_table=11
atgggttcgttgaattcgattgccgtgctcggcggcggtgcctggggcaccgcgctggcgcagactgctgcgcgcgccgggcgaaaggtgacgctgtgggagcacgatgccggcaacgccgagcatctgatcgcggcgcgcgagagccgtttcctgccgggcgtgcggctggagccgtcgatccaggtgacgcgcgatcttgccgaagcggcgcgcgccgatgcgctgctgctggtggttccggcacaggtgctgcgccaggtggtgacgtcgctgcagccgctgatcgcgccgcgcacgccgctggtcgcctgcgccaagggtatcgagcacggcacccatcggttcatgactgagatcattgccgaagcggcgcccgccgcgatcccggcgattctttcgggcccgagctttgcggccgacgtcgcgcgcggtctgccgaccgcggtgacgatcgccgccactgacgcagcctgcgcgcaggcgctggcccaggcgatgaattccggcagcttccgcccgtatcattcgaccgacgtgcgcggtgtcgaactcggcggcgccaccaagaacgtgctggcgatcgcggccggcatcgtcgagggccggcagctcggtgcctcggcgctggcggcgatgacgacgcgcggcttcgtcgaactggtgcggttcggcaaggcctatggggcgcggatcgagaccatgcatggtctgtcgggcctcggcgatctgacgatgtgctgctcgacgccgcagtcgcgcaacttctcgttcggcatggcgctcggtcgcggcgaagggatcgagtccgccgcgcacggcaagctggcggaaggctactacaccgcaccggtgctgctggagatggcgcaggccaaagacatcgacatgccgatctcgaccgcggtggcggccgtgctcggcggcaagctcagcgtcgatgcagcgatcgaagggctgctgacgcggcctctcaaggcggaggaatag

SEQ ID NO: 119949 - protein, 329 aa, Rhodopseudomonas palustris
MGSLNSIAVLGGGAWGTALAQTAARAGRKVTLWEHDAGNAEHLIAARESRFLPGVRLEPSIQVTRDLAEAARADALLLVVPAQVLRQVVTSLQPLIAPRTPLVACAKGIEHGTHRFMTEIIAEAAPAAIPAILSGPSFAADVARGLPTAVTIAATDAACAQALAQAMNSGSFRPYHSTDVRGVELGGATKNVLAIAAGIVEGRQLGASALAAMTTRGFVELVRFGKAYGARIETMHGLSGLGDLTMCCSTPQSRNFSFGMALGRGEGIESAAHGKLAEGYYTAPVLLEMAQAKDIDMPISTAVAAVLGGKLSVDAAIEGLLTRPLKAEE

SEQ ID NO: 119950 - DNA, 1050 bp, Rhodospirillum rubrum; identical to SEQ ID NO: 59017
  CDS (1)..(1050): transl_table=11

SEQ ID NO: 119951 - protein, 349 aa, Rhodospirillum rubrum; identical to SEQ ID NO: 59018

SEQ ID NO: 119952 - DNA, 978 bp, Rickettsia conorii
  CDS (1)..(978): transl_table=11
atgaacaaatttaaaaatattgcggtgtatgggggagggagtttcggtactagccttgcttctttagcagcacaaaactgtaataacgttactttatttttacgtgatgaggcaatagcaaaggaaattttacataacaaaactaatgtaaaatatttaggggatattaaattacctgctcatttacaggctactacaaacttagatataattaaggattttgaactaattattattgcattgccgtcttacgcttttgatgactcaataaaattattaaaaactcacagcatttctaaagacaatactcttctaattgcaacaaaaggctttgcccgtaatcctaccgcattactttcagataggttaaaaactctattaccgtataaccctacagcgttttttgtaggtccgaatctagcaaaagaacttgctaaaaatttacctgcttcggcaagtattgcaagtttagatatagatatagcaaataaaatagcttataacctaagttcaaaaatttttactactaatgtgtcaagcgatattgtaacattacaggtagcaggagctttaaaaaatatttttgctattaaaagcgggattgatttagcaagaaagcagggcgaaaatgcaagagcaacgcttatagtagctgccttaaaagaaattgctattttgtcgaaagcgttaggtggtatgcaaaaaaattctgatattttactagagggcgtagtaggcgatttagtgcttacttgttattcgttaggttcacgtaatacaaaatttggttatgaacttggaattagtagcgataaaaagaaatttttacaggaatataaagagctagcagagggaagagaagcattaaaattagttttggatttgataaaaaaatataatttacatatgcctataatttccgaagtagcttcgtgtgttattccttatgtcattcctgcaaaagcaggaatgacatag

SEQ ID NO: 119953 - protein, 325 aa, Rickettsia conorii
MNKFKNIAVYGGGSFGTSLASLAAQNCNNVTLFLRDEAIAKEILHNKTNVKYLGDIKLPAHLQATTNLDIIKDFELIIIALPSYAFDDSIKLLKTHSISKDNTLLIATKGFARNPTALLSDRLKTLLPYNPTAFFVGPNLAKELAKNLPASASIASLDIDIANKIAYNLSSKIFTTNVSSDIVTLQVAGALKNIFAIKSGIDLARKQGENARATLIVAALKEIAILSKALGGMQKNSDILLEGVVGDLVLTCYSLGSRNTKFGYELGISSDKKKFLQEYKELAEGREALKLVLDLIKKYNLHMPIISEVASCVIPYVIPAKAGMT

SEQ ID NO: 119954 - DNA, 966 bp, Rickettsia felis
  CDS (1)..(966): transl_table=11
atgaataaatttaaaaatattgcggtttatggaggagggagttttggtactagtcttgcttctttagcagcacaaaactgtaataacgttactttatttttacgtgacgaggaaatagcaaaagaaattttacataacaaaactaatgtaaaatatttaggagatattaaattacctactcatttacaggttactacaaacttaagtgtaattaaggattttgaactaattattattgcagtgccgtcttatgcttttgatgactcaataaaattattaaaaactcacggcatttctgcagataatactcttctaatcgctacaaaaggctttgcccgtaatcctactgaactattttcagataggttaaaaactctattaccgcatagcactacagcgttttttgcaggttcgaatctagcgaaagaactggctaaaaatttacctgcttcggcaagtattgcaagtttagatatagatatagcaaataaaatagccaataacctaagttcaaaaacttttacgacgaatacgacaagcgatattgtgaccttacaagtagcaggtgcgttgaaaaatatctttgctattaaaagcggaattgatttagcaaagaagcagggcaaaaatgcaagagcaacgcttatagtaactgtcttaaaagaaattgctattttatcgaaagctttaggcggtacagcgtcatctcgatcacttgatacaaatctattgttagaagcgggagtagtaggcgatttagtgcttacttgttattcgttaggctcacgtaatacaaaattcggttatgagcttggaattagtagcgataaaaaaatttttttacgggaatataaagagttagtagaaggacaagaagcattaaaattagttttagatttgataaaaaaatatgatttacagatgcctataatttctgaagtggctaactatgtcattcctgaatag

SEQ ID NO: 119955 - protein, 321 aa, Rickettsia felis
MNKFKNIAVYGGGSFGTSLASLAAQNCNNVTLFLRDEEIAKEILHNKTNVKYLGDIKLPTHLQVTTNLSVIKDFELIIIAVPSYAFDDSIKLLKTHGISADNTLLIATKGFARNPTELFSDRLKTLLPHSTTAFFAGSNLAKELAKNLPASASIASLDIDIANKIANNLSSKTFTTNTTSDIVTLQVAGALKNIFAIKSGIDLAKKQGKNARATLIVTVLKEIAILSKALGGTASSRSLDTNLLLEAGVVGDLVLTCYSLGSRNTKFGYELGISSDKKIFLREYKELVEGQEALKLVLDLIKKYDLQMPIISEVANYVIPE

SEQ ID NO: 119956 - DNA, 951 bp, Rickettsia prowazekii
  CDS (1)..(951): transl_table=11
atgaacaaatttaagaatattgcagtttatggaggaggtagtttcggcactagtcttgcttctttagtagcacgaaactgtaataatgttactttatttttacgtgacgagataattttaaaagaaattttatataaaaaaactaacgcacaatacttaggtgatattgaattacctactaatttgcaagctactacaaacttaagtgtaatcaaggattttgaattaattattattgcagtgccatcttatgcttttgatgattcaataaaattattgaaaacgtacggcatctctaaagagcatactattctagtagcgacaaaaggcttggctgataatcctactgaattattttctgatagacttaacactttattacccgataatcctataggatttttatctggtccaaatctagcaaaggaacttgctaaaaatttgcctgcttcggcaagtattgcaagtttagatatagatatcgcaaataaaatagcttataacttcagttcaaaaactttttcaacaaatacgaccatagatattgtaacgttacaaattgctggagctttaaaaaatatttttgctattaaaagtggaattgatttagcaagagagcagggagcaaattcaagagcaacgcttatagtaggggccttaaaagaaattactactttatctaaggttcttggaggtatgcaaaaaaattctgatattttacttgaagcaggagtattaggcgatttagtacttacttgttactctttaggttcgcgtaatacaaaatttggttatgaatttgaaattagtagggataaaaagaaatttttatgcgaatataaagaattagtagaaggacgagaagcattaaaattagttttggatctaataaaaaaatataatttacacatgcctatagttgctgaagtagcttcactcattttaatttga

SEQ ID NO: 119957 - protein, 316 aa, Rickettsia prowazekii
MNKFKNIAVYGGGSFGTSLASLVARNCNNVTLFLRDEIILKEILYKKTNAQYLGDIELPTNLQATTNLSVIKDFELIIIAVPSYAFDDSIKLLKTYGISKEHTILVATKGLADNPTELFSDRLNTLLPDNPIGFLSGPNLAKELAKNLPASASIASLDIDIANKIAYNFSSKTFSTNTTIDIVTLQIAGALKNIFAIKSGIDLAREQGANSRATLIVGALKEITTLSKVLGGMQKNSDILLEAGVLGDLVLTCYSLGSRNTKFGYEFEISRDKKKFLCEYKELVEGREALKLVLDLIKKYNLHMPIVAEVASLILI

SEQ ID NO: 119958 - DNA, 963 bp, Rickettsia typhi
  CDS (1)..(963): transl_table=11
atgaacaaatttaaaaatattgcggtttatggaggaggtagcttcggtactagtcttgcttctgtagtagcacgaaactgtaataatgttactttatttttacgtaacgagacaatattaaaagaaattttatataaaaaaactaacgtacaatacttaggtgatattaaattaccaactaatttgcaagctactacaaacttaagtgtaatcaaagattttgatttaattattattgcagtgccatcttatgcttttgttgatgcaataaaattattgaaaacgtacggcatttctaaagacaatactcttctagttgcaacaaaaggttttgctcataatcctactgaattactttctgatagacttaacactttattacctgataatcctataggatttttatctggtccgaatctagcaaaggagcttgctaaaaatttgcatacttcagcaagtattgcaagtttagatatagatatcgcaaataaaatagcgcataatctcagttcaaaaacttttacgacaaatacgactatagatatagtgacattacaagttgctggagctttaaaaaatatttttgctattaaaagtggtattgatttagcaagagaacagggagcaaattcaagagcaatgcttatagtagctgcattaaaagaaattactactttatctaaggttcttggaggtatgcaaaaaaactctgatattttactggaagcaggagtagtgggtgatttagtactgacttgttactctttaggttcacgtaatacaaagtttggttatgaatttgaaattagtatggataaaaagaaatttttacgcgaatataaagagttagtagaaggacgagaagcattaaaattagttttggatttgataaaaaaatataatttgcatatgcctatagtttctgaagtggcttcactcattcactgcggtatttacatataa

SEQ ID NO: 119959 - protein, 320 aa, Rickettsia typhi
MNKFKNIAVYGGGSFGTSLASVVARNCNNVTLFLRNETILKEILYKKTNVQYLGDIKLPTNLQATTNLSVIKDFDLIIIAVPSYAFVDAIKLLKTYGISKDNTLLVATKGFAHNPTELLSDRLNTLLPDNPIGFLSGPNLAKELAKNLHTSASIASLDIDIANKIAHNLSSKTFTTNTTIDIVTLQVAGALKNIFAIKSGIDLAREQGANSRAMLIVAALKEITTLSKVLGGMQKNSDILLEAGVVGDLVLTCYSLGSRNTKFGYEFEISMDKKKFLREYKELVEGREALKLVLDLIKKYNLHMPIVSEVASLIHCGIYI

SEQ ID NO: 119960 - DNA, 1077 bp, Saccharophagus degradans
  CDS (1)..(1077): transl_table=11
gtgttgcagctacttgtagagtttttctcactcacagaaaatcaggcatacaataatatgagtagtaaatacacagtaacagtattgggtggcggcagttttggtacagcagtagccaacataattgctactaacgggcatgtttcacgcctatggatgcgcgatgctgcgcgggcagagcgatgccaggcgtctagagaaaacactgaatacctgcctggttatcccctgcacgataaccttgtggcaactaccgatttgataggctccgtaagtacgagcgatattgttgttatctctgtgcctagtcagtcttttcgcgaagtagccaaactcgctgcgccgcatttacgtaaagatactattgttattagtaccaccaagggtatcgacgccgacggtttctttttaatgagccagatactcgagcaagagttgaccgatgtacgcataggtgtacttagtgggccgaactttgcgaaagaaattgtgcagaatcaatacactggtagtgttgtggccagtgagcatgacgaggtattaaagtgcgttcagcaagttttctcgtctaatacctttcgtatttacagcaacccagatagatacggggtggaattaggcggcgcacttaagaatatttacgccatggtgactggtatggctgcagcattgggctgtggtcacaatacgatggcaatgctgcttacccgcagtttggcggaaatggggcgatttgcacgtgagttaggtgcagattccatgacgtttttaggtttggctggtatgggggatttagttttaacctgtacgtcagatctcagccgtaactaccgcgttggctttgcagttggccgaggtaaatcgcttgagcaagccgttcaagaaattggtcaagtagccgaaggtgtgaataccttgcgcatagttaagaaaaaagcagaagaattgaatgtgtatatgccgttagtcgacggcttacatgcggtgttgtttgataagcaagacttgcagcaggttattcagggccttatgaccggtgaaatgagtagtgatgtggatttacaaggaggcttgtag

SEQ ID NO: 119961 - protein, 358 aa, Saccharophagus degradans
MLQLLVEFFSLTENQAYNNMSSKYTVTVLGGGSFGTAVANIIATNGHVSRLWMRDAARAERCQASRENTEYLPGYPLHDNLVATTDLIGSVSTSDIVVISVPSQSFREVAKLAAPHLRKDTIVISTTKGIDADGFFLMSQILEQELTDVRIGVLSGPNFAKEIVQNQYTGSVVASEHDEVLKCVQQVFSSNTFRIYSNPDRYGVELGGALKNIYAMVTGMAAALGCGHNTMAMLLTRSLAEMGRFARELGADSMTFLGLAGMGDLVLTCTSDLSRNYRVGFAVGRGKSLEQAVQEIGQVAEGVNTLRIVKKKAEELNVYMPLVDGLHAVLFDKQDLQQVIQGLMTGEMSSDVDLQGGL

SEQ ID NO: 119962 - DNA, 1020 bp, Salmonella choleraesuis
  CDS (1)..(1020): transl_table=11
atgaaccaaagtaatgcgtcaatgacagtcatcggtgccggctcgtacggcaccgctcttgccatcactctggcgagaaacggccaccaggttgtcctgtggggccacgacccaaaacatatcgcgaccctggagcacgatcgctgcaacgtcgcgttccttcccgatgtgccttttcccgatacgttacacctggaaagtgacttagcaaccgcgctggcggccagtcgtaacattctggtggtggtgccaagccatgttttcagcgacgtgctgcggcagattaaaccgctgatgcgtccggatgcgcgtctggtatgggcgaccaaaggcctggaagcggaaacggggcgcctgttgcaggatgtcgctcgcgaggcgttaggcgatcaaatcccgctggcggtgatttccggtccgacgttcgctaaagagctggcggcgggtttgccgacggcaatctcgctagcctcaaccgatgagacctttgccgacgatctccagcaactgttgcactgcggaaaaagttttcgcgtctatatcaatgcggattttatcggcgtgcagcttggcggcgcggtgaaaaacgtgattgcgattggcgcggggatgtctgacggcatcggcttcggcgcgaacgcccgcacggcgctaatcacgcgtggactgaccgaaatgtcgcggcttggcgcagcgcttggcgccgatcccgccacctttatggggatggcgggcttaggcgatctggtgctgacctgtaccgacaaccagtcgcgcaaccgtcgttttggcatgatgcttggccagggcatggacgttaaaggcgcgcaggataagattggccaggtggtcgaaggctatcgcaatacgaaagaagttcgtgaattggcgcaccgttttggtgttgaaatgccaataaccgaggaaatttatcaagtattgtattgcggaaaaaacgcgcgcgaggcagcattaacgttattaggtcgcgcccgcaaggaagagctgagtcgccactag

SEQ ID NO: 119963 - protein, 339 aa, Salmonella choleraesuis
MNQSNASMTVIGAGSYGTALAITLARNGHQVVLWGHDPKHIATLEHDRCNVAFLPDVPFPDTLHLESDLATALAASRNILVVVPSHVFSDVLRQIKPLMRPDARLVWATKGLEAETGRLLQDVAREALGDQIPLAVISGPTFAKELAAGLPTAISLASTDETFADDLQQLLHCGKSFRVYINADFIGVQLGGAVKNVIAIGAGMSDGIGFGANARTALITRGLTEMSRLGAALGADPATFMGMAGLGDLVLTCTDNQSRNRRFGMMLGQGMDVKGAQDKIGQVVEGYRNTKEVRELAHRFGVEMPITEEIYQVLYCGKNAREAALTLLGRARKEELSRH

SEQ ID NO: 119964 - DNA, 1023 bp, Serratia marcescens; identical to SEQ ID NO: 59019
  CDS (1)..(1023): transl_table=11

SEQ ID NO: 119965 - protein, 340 aa, Serratia marcescens; identical to SEQ ID NO: 59020

SEQ ID NO: 119966 - DNA, 1017 bp, Shewanella oneidensis
  CDS (1)..(1017): transl_table=11
atgaataactctgccgatatcacggtattaggggcgggctcatatggcaccgcccttgccatctctttagccagcaatggtcataagaccttgttgtgggggcacgatcctgcccatatgcagactcttgcagaggataaatgcaaccaagcattcttgcctggtattgcttttcccgagtgtttacatatcgaagccgatttagccaaagccttagccgccagcaataacgtgctggttgtcgtgcctagccatgtgtttggcacggtactggcccaagccaaacctttgttgcgccaagatgcacgcatcgtatgggcgaccaaagggctcgagcctgaaaccggacgtttgctgcaagatgtggcccgtgatgtgttaggcgagcaatatccgctggcggtattgtctgggccaacctttgcgaaggaattagccatgggtttacctacggcgatttcagttgcaggcacttgtcctcaatttaccgctgagttagtggaattgctgcacagccctaaacgtttacgggtttacgccaacgacgactttatcggcctgcaattaggcggcgcggtaaagaacgttatcgcgattggcgcggggatgtctgacggtattggctttggtgccaacgccagaacggctttaatcacccgcggtttagtcgagttaacccgcttaggcgaagccttaggcgccagcaccgctacctttatgggcatggctggattaggtgacctagtgctgacttgtaccgacaaccaatcccgtaaccgccgctttggtttagccttaggtaaaggctgcgatgtggataccgcccaggttgaaattggccaagtggttgagggttatcgcaatactaaagaagtgtttacgctagccaaacgtcttggtgttgaaatgccgatcactgagcagatttaccaagttttgtatcaaggtaaatcaccagttgatgccgcaaaagaactgctcggtagagagaagaaatcagaaacgcctacgcaataa

SEQ ID NO: 119967 - protein, 338 aa, Shewanella oneidensis
MNNSADITVLGAGSYGTALAISLASNGHKTLLWGHDPAHMQTLAEDKCNQAFLPGIAFPECLHIEADLAKALAASNNVLVVVPSHVFGTVLAQAKPLLRQDARIVWATKGLEPETGRLLQDVARDVLGEQYPLAVLSGPTFAKELAMGLPTAISVAGTCPQFTAELVELLHSPKRLRVYANDDFIGLQLGGAVKNVIAIGAGMSDGIGFGANARTALITRGLVELTRLGEALGASTATFMGMAGLGDLVLTCTDNQSRNRRFGLALGKGCDVDTAQVEIGQVVEGYRNTKEVFTLAKRLGVEMPITEQIYQVLYQGKSPVDAAKELLGREKKSETPTQ

SEQ ID NO: 119968 - DNA, 963 bp, Silicibacter pomeroyi
  CDS (1)..(963): transl_table=11
atgagtatcgcggttctgggatcgggtgcattcggaaccgcattggcgatctcgctggcgggcaaggggccggtcacgctgtggtcgcgtgcgcctgaacaggcacggcagatgcaggagacccgcgagaaccaccagcgcctgcccggcctgccgttgcctgcagcgctgaatgtgaccgccgatctggatcaggccacgcggtgcgacacgctgcttttggcggtgccgatgcagaagttgcgcggcatgctatccgagcacgccgccgcgctgcatgggcgggttctggttgcctgctgcaaggggatcgaactgaatagcggccttggcccgatggccgtgatggcagaaaccctacccggcactcgcaccgcgctgctaacaggacccagctttgcccaggatatcgcgcgcggcctgccgacggcgctgacgctggcctgcgccgatccggatctgggccgcgacctgcaggcgcagctgaccaccaccaacctgcggctctatcgcaccaccgacacgatcggggccgaactgggcggagcgctgaagaacgtgatcgcgatcgggtgcggcgcctgtatcggcgccgggatgggcgacagcgcccgcgccgcgctgctgacccgtggctttgccgagatgcagcggctggcggcgctgaaaggcgcccggcccgagaccctgatgggcctgtccggccttggcgatctgatgctcacctgctcatccgacctgtcgcgcaattatcggttcggcctggcattgggacgacaggaaccgttcgaccgcgccaccacggtcgaaggtgtggccaccgcccatgcggtggcgcagctggcccgggacctgggaatcgacatgccgatcagcacaacggtagcgcagctttcaaacggtgattacagtgtcgccgaagcgatgcgttcgctgctcaacagaccgctcaaggaggaatga

SEQ ID NO: 119969 - protein, 320 aa, Silicibacter pomeroyi
MSIAVLGSGAFGTALAISLAGKGPVTLWSRAPEQARQMQETRENHQRLPGLPLPAALNVTADLDQATRCDTLLLAVPMQKLRGMLSEHAAALHGRVLVACCKGIELNSGLGPMAVMAETLPGTRTALLTGPSFAQDIARGLPTALTLACADPDLGRDLQAQLTTTNLRLYRTTDTIGAELGGALKNVIAIGCGACIGAGMGDSARAALLTRGFAEMQRLAALKGARPETLMGLSGLGDLMLTCSSDLSRNYRFGLALGRQEPFDRATTVEGVATAHAVAQLARDLGIDMPISTTVAQLSNGDYSVAEAMRSLLNRPLKEE

SEQ ID NO: 119970 - DNA, 963 bp, Silicibacter sp
  CDS (1)..(963): transl_table=11
atgagcgtcgcggtcctcggcgcgggcgcttttggcacggcattggccatctccctcgcgcgcaaggcgccgacaacgctctggtgccgcagcaaagaccatgcagacgagatacgcagcacgcgtgaaaacacccgtcgcctgccgggcgcgcccttgcccgatgctctggccgtcacgtcggatattgcctgtcttggcgcccatgacgtgatcctgcttgctgttccgatgcaaaaaatgcgcggtttcctgaccgcgcatcacgcagcgctttccggcaagacattggtagcctgctgcaaaggcatcgagctcgacagtggtcttggcccggtggcggttctgcgcgacacggtgcctgacgcaactgcagccctgctgacgggcccaagtttcgcggcagacattgccctcggcctgccaaccgcattgacgctggcctgcgatccggatgagaccgggaaagccctgcaagccaccttgtccaccgataacctgcgcctctatcgcaccaccgacctgaccggagcggagatcggcggcgcactgaagaacgtcatcgccatcgcctgcggagcagtgatcggcgcaaggctcggtgacagtgcccgcgcggcgctcatgacacgtggctatgcagagatgcagcgcttggcactggcccgcggtgcccggccggaaacgctggcagggctttcggggtttggtgacctcaccctcacatgcggttcggaactgtcgcgcaattttcgcctcggtctgagcctcggccgtggagaggcctttgatccctctattacggtggagggcgcagcaacggcacgtgccaccgccaaaacggcccaagagatgggattggagatgccaatcacgcaaacggtaaccaatttgttggatcaaaggttgacgatctccgacgcggcggatcaattgcttaaaaggccattaaaagaggaataa

SEQ ID NO: 119971 - protein, 320 aa, Silicibacter sp
MSVAVLGAGAFGTALAISLARKAPTTLWCRSKDHADEIRSTRENTRRLPGAPLPDALAVTSDIACLGAHDVILLAVPMQKMRGFLTAHHAALSGKTLVACCKGIELDSGLGPVAVLRDTVPDATAALLTGPSFAADIALGLPTALTLACDPDETGKALQATLSTDNLRLYRTTDLTGAEIGGALKNVIAIACGAVIGARLGDSARAALMTRGYAEMQRLALARGARPETLAGLSGFGDLTLTCGSELSRNFRLGLSLGRGEAFDPSITVEGAATARATAKTAQEMGLEMPITQTVTNLLDQRLTISDAADQLLKRPLKEE

SEQ ID NO: 119972 - DNA, 999 bp, Staphylococcus aureus
  CDS (1)..(999): transl_table=11
atgactaaaattaccgtttttggtatgggaagttttgggacagcccttgccaatgttcttgcagaaaatggacatgatgttttgatgtggggtaaaaatcaagatgctgttgatgaattaaatacatgtcatacaaataaaaagtatttaaaatacgcgaaattagatgttaacatcatcgctacttcagatatgaccaaagcaattcaatttgcagatatttacttaatggctttacctactaaagcaatgcgagaagttgctactcaaattaatgataagctgacctctaaaaagacttttatacatgttgctaaaggtattgaaaatgggacgtttaaacgtgtgtcagaaatgattgaagattctatttcacccgaatataatgcaggtattggcgtgttgtcagggccaagtcatgcggaagaagttgtagtcaagcaaccaactacagttgctgcatcatcaaaagataaaagtgtaagtaaattaacgcaagatttatttatgaatgattatttgcgtgtgtacacgaatgatgacttgattggtgttgaacttggtggtgcattgaaaaatatcatcgcagtagcaagtggtatcgtagctggaattggctacggtgataatgcaaaagctgcgttaatgactcgtggtttagcggaaattagtagattaggtgaaaagttaggtgccgatcctatgacatttctaggtttaggtggtatcggtgacttaatcgttacttgcatatcaacacattctcgaaatttcacattaggatataaacttggacaaggtgaatcaatggatcaagcattatctgaaatgaatatggttgttgaaggtatttatacaactaaatcagtttatcatttagctaaagaaaaaaatgtggatatgccaattacaaatgcattatatagagtattatttgaaaatatctcagtaaaagaatgcgtaaaagatttaatggagcgcgataaaaaatctgaataa

SEQ ID NO: 119973 - protein, 332 aa, Staphylococcus aureus
MTKITVFGMGSFGTALANVLAENGHDVLMWGKNQDAVDELNTCHTNKKYLKYAKLDVNIIATSDMTKAIQFADIYLMALPTKAMREVATQINDKLTSKKTFIHVAKGIENGTFKRVSEMIEDSISPEYNAGIGVLSGPSHAEEVVVKQPTTVAASSKDKSVSKLTQDLFMNDYLRVYTNDDLIGVELGGALKNIIAVASGIVAGIGYGDNAKAALMTRGLAEISRLGEKLGADPMTFLGLGGIGDLIVTCISTHSRNFTLGYKLGQGESMDQALSEMNMVVEGIYTTKSVYHLAKEKNVDMPITNALYRVLFENISVKECVKDLMERDKKSE

SEQ ID NO: 119974 - DNA, 999 bp, Staphylococcus aureus
  CDS (1)..(999): transl_table=11
atgactaaaattaccgtttttggtatgggaagttttgggacagcccttgccaatgttcttgcagaaaatggacatgatgttttgatgtggggtaaaaatcaagaagctgttgatgaattaaatacatgtcatacaaataaaaagtatttaaaatacgcgaaattagatgttaacatcatcgctacttcagatatgaccaaagcaattcaatatgcagatatttacttaatggctttacctactaaagcaatgcgagaagttgctactcaaattaatgataagctgacatctaaaaagacttttatacatgttgctaaaggtattgaaaatgggacatttaaacgtgtgtcagaaatgattgaagattctatttcacctgaatataatgcaggtattggcgtgttgtcagggccaagtcatgcggaagaagttgtagtcaagcaaccaactacagttgctgcatcatcaaaagataaaaatgtaagtaaattaacgcaagatttatttatgaatgattatttgcgtgtgtacacgaatgatgacttggttggtgttgaacttggtggtgcattgaaaaatatcatcgcagtagcaagtggtatcgtagctggaattggctacggtgataatgcaaaagctgcattaatgactcgtggcttagcggaaattagcagattaggtgaaaagttaggtgccgatcctatgacatttctaggtttaggtggtatcggtgacttaatcgttacttgcacatcaacacattctcgaaatttcacattaggatataagcttggacaaggtgaatcgatggatcaagcattatctgaaatgaatatggttgttgaaggtatttatacaactaaatccgtttatcatttagctaaagaaaaaaatgtggatatgccaattacaaatgcattatatagagtattatttgaaaatatctcagtaaaagaatgcgtaaaagatttaatggagcgcgataaaaaatctgaataa

SEQ ID NO: 119975 - protein, 332 aa, Staphylococcus aureus
MTKITVFGMGSFGTALANVLAENGHDVLMWGKNQEAVDELNTCHTNKKYLKYAKLDVNIIATSDMTKAIQYADIYLMALPTKAMREVATQINDKLTSKKTFIHVAKGIENGTFKRVSEMIEDSISPEYNAGIGVLSGPSHAEEVVVKQPTTVAASSKDKNVSKLTQDLFMNDYLRVYTNDDLVGVELGGALKNIIAVASGIVAGIGYGDNAKAALMTRGLAEISRLGEKLGADPMTFLGLGGIGDLIVTCTSTHSRNFTLGYKLGQGESMDQALSEMNMVVEGIYTTKSVYHLAKEKNVDMPITNALYRVLFENISVKECVKDLMERDKKSE

SEQ ID NO: 119976 - DNA, 999 bp, Staphylococcus epidermidis
  CDS (1)..(999): transl_table=11
atgagaaaaattacagtttttggtatgggtagttttggtactgcattagctaatgtattagctcaaaatggtcatgatgttttaatgtggggcaaaaatgtagagaatgtagatgaacttaacacacatcatatgaacaaaaattatcttaaagatgctaaattagattcatctataaaagcaactgtagatttaaataaggcagtgcaattttcagatatctatcttatggcactacctacaaaagcaattagagaagtatcaaaagatatcgatcaattactcacatctaaaaagacttttattcatgttgctaaaggcattgaaaacgatacatttaagcgcgtatctgaaatgattgaggactctatctcttcagaacataatggaggaatcggcgtcttatcaggtccaagtcatgctgaagaagttgttataaaacaacctacaactgtagctgcatcatctaaagataataatgtgagcaaacttattcaagatttatttatgaacgactatttacgtgtttacacaaataatgatttagtaggtgtagaattaggtggtgctttaaaaaatattatagctatagctagtggtatcgttgccggcatgggttacggtgataatgcaaaagcagctttaatgacacgaggtttagccgaaatcagtcgacttggtgagaaacttggtgcagatccaatgactttcttaggtctaggtggcataggtgacttgatcgtaacttgtacgtccacacattcacgaaattacacacttgggtttaaattagggcaaggcaaaacagcagaagaagctttaaaagagatgaaaatggtggttgaaggtatttatacaactaaatcagtatatcatcttgctcaacaagaaggagtagagatgcctatcactaacgcattatatgaagttttatttgaagatgtccctgtaagtaaaagtgttagaacacttatggaaagagacaaaaaagcagaataa

SEQ ID NO: 119977 - protein, 332 aa, Staphylococcus epidermidis
MRKITVFGMGSFGTALANVLAQNGHDVLMWGKNVENVDELNTHHMNKNYLKDAKLDSSIKATVDLNKAVQFSDIYLMALPTKAIREVSKDIDQLLTSKKTFIHVAKGIENDTFKRVSEMIEDSISSEHNGGIGVLSGPSHAEEVVIKQPTTVAASSKDNNVSKLIQDLFMNDYLRVYTNNDLVGVELGGALKNIIAIASGIVAGMGYGDNAKAALMTRGLAEISRLGEKLGADPMTFLGLGGIGDLIVTCTSTHSRNYTLGFKLGQGKTAEEALKEMKMVVEGIYTTKSVYHLAQQEGVEMPITNALYEVLFEDVPVSKSVRTLMERDKKAE

SEQ ID NO: 119978 - DNA, 1017 bp, Streptococcus agalactiae serotype III
  CDS (1)..(1017): transl_table=11
atgacaaaacaaaaaattgccgttcttggacctggttcatgggggactgctcttgcacaagtattaaatgacaatggacatgaggtacgcttatgggggaacgtggttgaacaaatagaagagattaatactagccatactaatcaacgttacttcaaagatattaccttagattccaaaataaaagcctacactaatcttgaggaagcgattaataatgttgacagcattctattcgtcgtcccaactaaagttacaagacttgttgctaaacaagtggctaatcttttaaagcataaagttgttattatgcatgcttctaagggactagaacctggtactcatgaacgactttctacaattttagaagaagaaatctctgaacaatatcgtagtgatatcgttgttgtttccggtcccagtcacgctgaagaagctatcgttcgtgatattactttgattactgctgcttcaaaagatattggagcagctaagtatgtccaaaaattgtttagtaatcattattttagactttatactaacactgatgtcgtaggagtggaaacagctggtgctctaaaaaatattattgctgttggtgctggagcactacacggtcttggttatggtgataatgctaaagcagctattattacacgtggtttagctgagataacacgccttggtgtacaattaggggccgaccctctcactttcagtggtttatccggagttggagatttaattgtaactggtacatctgttcattctcgcaactggagagcgggagatgctttaggacgtggtgagaaacttgaagatattgaaaaaaatatggggatggttattgaaggtatctcaacaactaaagttgcttacgaaatcgcccaaaacttaaatgtttacatgcccattacagaagctatttataaatcaatatatgaaggggctaatatcaaagatagcattttagatatgatgtccaatgaatttcgttcagagaatgaatggcactaa

SEQ ID NO: 119979 - protein, 338 aa, Streptococcus agalactiae serotype III
MTKQKIAVLGPGSWGTALAQVLNDNGHEVRLWGNVVEQIEEINTSHTNQRYFKDITLDSKIKAYTNLEEAINNVDSILFVVPTKVTRLVAKQVANLLKHKVVIMHASKGLEPGTHERLSTILEEEISEQYRSDIVVVSGPSHAEEAIVRDITLITAASKDIGAAKYVQKLFSNHYFRLYTNTDVVGVETAGALKNIIAVGAGALHGLGYGDNAKAAIITRGLAEITRLGVQLGADPLTFSGLSGVGDLIVTGTSVHSRNWRAGDALGRGEKLEDIEKNMGMVIEGISTTKVAYEIAQNLNVYMPITEAIYKSIYEGANIKDSILDMMSNEFRSENEWH

SEQ ID NO: 119980 - DNA, 1017 bp, Streptococcus agalactiae serotype V
  CDS (1)..(1017): transl_table=11
atgacaaaacaaaaaattgccgttcttggacctggttcatgggggactgctcttgcacaagtattaaatgacaatggacatgaggtacgcttatggggaaacgtggttgaacaaatagaagagattaatactaaccatactaatcaacgttacttcaaagatattaccttagattccaaaataaaagcctacactaatcttgaggaagcgattaataatgttgacagcattttattcgtcgtcccaactaaagttacaagacttgttgctaaacaagtggctaatcttttaaagcataaagttgttcttatgcatgcttctaagggactagaacctggtactcatgaacgactttctacaattttagaagaagaaatctctgaacaatatcgtagtgatatcgttgttgtttcaggtcccagtcatgctgaagaagccatcgttcgtgatattactttgattactgctgcttcaaaagatattgaagcagctaagtatgtccaaaaattgtttagtaatcattattttagactttatactaacactgatgtcgtaggagtagaaacagctggtgctctaaaaaatattattgctgttggtgctggagcactacacggtcttggttatggtgataatgctaaagcagctattattacgcgtggtttagctgagataacacgtcttggtgtacaattaggggccgaccctctcactttcagtggtttatccggagttggagatttaattgtgactggtacatctgttcattctcgcaactggagagcgggagatgctttaggacgtggtgagaaacttgaagatattgaaaaaaatatggggatggttattgaaggtatctcaacaactaaagttgcttacgaaatcgcccaaaacttaaatgtttacatgcccattacagaagctatttataaatcaatatatgaaggggctaatatcaaagatagcattttagatatgatgtccaatgaatttcgttcagagaatgaatggcactaa

SEQ ID NO: 119981 - protein, 338 aa, Streptococcus agalactiae serotype V
MTKQKIAVLGPGSWGTALAQVLNDNGHEVRLWGNVVEQIEEINTNHTNQRYFKDITLDSKIKAYTNLEEAINNVDSILFVVPTKVTRLVAKQVANLLKHKVVLMHASKGLEPGTHERLSTILEEEISEQYRSDIVVVSGPSHAEEAIVRDITLITAASKDIEAAKYVQKLFSNHYFRLYTNTDVVGVETAGALKNIIAVGAGALHGLGYGDNAKAAIITRGLAEITRLGVQLGADPLTFSGLSGVGDLIVTGTSVHSRNWRAGDALGRGEKLEDIEKNMGMVIEGISTTKVAYEIAQNLNVYMPITEAIYKSIYEGANIKDSILDMMSNEFRSENEWH

SEQ ID NO: 119982 - DNA, 1011 bp, Streptomyces avermitilis
  CDS (1)..(1011): transl_table=11
gtgagcacgccggtcaaggcagccgtcttcgggaccggatcgtggggtacggccttcggcatggtgctcgccgacgcgggctgcgacgtcaccctgtgggcgcgccgcgccgaactcgccgacgcggtcaactccacgcgtacgaacccggactacctgccgggcgtcgaactcccggagaacctgcgggccaccaccgaccccgccgaggccgcgcgcgccgccgacttcaccgtgctcgccgtcccctcgcagaccctgcgcgggaacctcgccgaatgggtgccgctgctcgcacccgacacggtcctcgtctccctcatgaagggcgtcgaactcggctccgcgatgcggatgagcgaggtcgtcgaggacgtcgccaaggtcggcgcggaccgtatcgccgtggtcaccgggcccaacctcgcccgggagatcgccgcccgcatgccggccgccgccgtggtcgcctgtgccaacgaagccgtcgcccagcgcctccaggccgcctgccacacgccgtacttccgcccgtacaccaacaccgacgtggtcggctgcgaactcggcggcgcggtcaagaacgtgatcgggctcgccgtcggcatcgcggacggcatgggcctgggcgacaacgccaagggctcgctcatcacgcggggactcgcggagaccacccggctcggcctggtcatgggcgcggacccgctgacgttctccggtctcgcgggcctgggcgacctggtggcgacctgttcctcgccgctctcgcgcaaccacaccttcggcaccaacctcggcaggggcatgaccctccaggagaccatcgcggtcaccaagcagaccgccgagggcgtcaagtcctgtgagtccgtgctggatctggcccgcagacacggcgtcgacatgccgatcacggagacggtcgtcggcatcgtccacgagggcaagccgccggtcgtcgccctcaaggagctgatgtcgcgcagcgcgaagccggagcggcgctga

SEQ ID NO: 119983 - protein, 336 aa, Streptomyces avermitilis
MSTPVKAAVFGTGSWGTAFGMVLADAGCDVTLWARRAELADAVNSTRTNPDYLPGVELPENLRATTDPAEAARAADFTVLAVPSQTLRGNLAEWVPLLAPDTVLVSLMKGVELGSAMRMSEVVEDVAKVGADRIAVVTGPNLAREIAARMPAAAVVACANEAVAQRLQAACHTPYFRPYTNTDVVGCELGGAVKNVIGLAVGIADGMGLGDNAKGSLITRGLAETTRLGLVMGADPLTFSGLAGLGDLVATCSSPLSRNHTFGTNLGRGMTLQETIAVTKQTAEGVKSCESVLDLARRHGVDMPITETVVGIVHEGKPPVVALKELMSRSAKPERR

SEQ ID NO: 119984 - DNA, 1011 bp, Streptomyces coelicolor
  CDS (1)..(1011): transl_table=11
gtgagcaagccggtcaaggcggcggtcttcggcaccggatcctggggcaccgccttcggcacggtcctcgccgacgcgggctgcgaggtcaccctctgggggcgccgcgccgcactggccgacgccgtcaactccacccgcaccaacccggactacctgcccggcgtggaactccccgagaacctgcgggccaccaccgacgccgccgaggccgcgcgggacgccgacttcaccgtcctcgccgtcccctcccagacgctgcgcgcgggcctcgccgactggacgcccctgctggcgcccggcaccgtcctggtgtcgctcatgaagggcgtcgaactcggctccgcgatgcggatgagcgaggtgatcggggacgtcgccaaggtgggcgccgagcgcatcgccgtggtcaccggacccaacctggcccgcgagatcgccgcccgcatgccggccgccgccgtcgtcgcctgccccgacgagaccgtcgcccagcgcctccaggccgcctgccacacgccgtacttccgcccctacaccaacaccgacgtcgtcggctgcgaactgggcggcgccgtgaagaacgtgatcggtctcgccgtcggcatcgcggacggcatgggcctcggcgacaacgccaagggctccctcatcacccggggcctcgccgagaccacccgcctcggagtcgccctcggggccgacccgctgaccttctccggcctggccggactcggcgacctggtggcgacctgctcctcgccgctgtcccgcaaccacaccttcggcaccaacctcggcaagggcatgaccctggaggagaccaacgcggtcaccaagcagaccgccgagggcgtcaagtcctgcgagtcggtgctggacctggcccgcaggcacggcgtcgacatgccgatcacggagacggtcgtcgccatcgtgcacgagggcaagtccccggtggtcgccgtgaaggaactgatgtcgcgcagcgcgaagcccgaacgacgctga

SEQ ID NO: 119985 - protein, 336 aa, Streptomyces coelicolor
MSKPVKAAVFGTGSWGTAFGTVLADAGCEVTLWGRRAALADAVNSTRTNPDYLPGVELPENLRATTDAAEAARDADFTVLAVPSQTLRAGLADWTPLLAPGTVLVSLMKGVELGSAMRMSEVIGDVAKVGAERIAVVTGPNLAREIAARMPAAAVVACPDETVAQRLQAACHTPYFRPYTNTDVVGCELGGAVKNVIGLAVGIADGMGLGDNAKGSLITRGLAETTRLGVALGADPLTFSGLAGLGDLVATCSSPLSRNHTFGTNLGKGMTLEETNAVTKQTAEGVKSCESVLDLARRHGVDMPITETVVAIVHEGKSPVVAVKELMSRSAKPERR

SEQ ID NO: 119986 - DNA, 1020 bp, Streptococcus mutans
  CDS (1)..(1020): transl_table=11
atgatcagacaaaaaattgccgtactaggtcctggttcttggggaaccgccttatcccaagttcttaacgacaatggtcatgaagtccgtatctggggaaatattcctgaacagcttgatgaaattaatgaacatcatactaacaagcgttattttaaggatgtggtcctagatgaaaaaatcaaagcttatcacgatttagaggatgctcttaaggatattgatgctgtcctttttgttgttccaacaaaagtaacacgcttggtggccaagcaagtttcacaaattcttgatcacaaagccgttgtcatgcacgcttctaaaggcttggagccgggcactcacgaacgcttatctgtcattcttgaagaagaaattccaaatcatcttcgaagcgacatagttgttgtttctggacccagccatgctgaggaaaccatcgtgcgcgatattaccctgattacagcggcatctaaagatttagaagccgccaaatacgttcaaaagctctttagcaacaactattttcgtctttacaccaatcccgatgttattggtgtggaaactgctggtgctctgaaaaatatcattgctgttggggcaggagcactccatgggatggggtatggtgataatgctaaagcagctgttatcacacgcggtctagccgaaattacacgtttaggcgtcaaactgggagctgatccgctcacttacagcggtctgtctggtgttggagatttgattgttactggaacttctatctattcacgtaattggcgggccggagatgctctaggacgcggagaaaaattggaagacattgaaagaaatatgggaatggttattgaaggaatttccacaacaaaggtcgcctacgaactttctcgagaactcaacgtctatatgccaattacctgtgctatttatcagtcaatttatgaaggcaaaaatattaaagaagctatcacttctatgatgtcaaatgagtttagagcggaaaatgaatggagtaaataa

SEQ ID NO: 119987 - protein, 339 aa, Streptococcus mutans
MIRQKIAVLGPGSWGTALSQVLNDNGHEVRIWGNIPEQLDEINEHHTNKRYFKDVVLDEKIKAYHDLEDALKDIDAVLFVVPTKVTRLVAKQVSQILDHKAVVMHASKGLEPGTHERLSVILEEEIPNHLRSDIVVVSGPSHAEETIVRDITLITAASKDLEAAKYVQKLFSNNYFRLYTNPDVIGVETAGALKNIIAVGAGALHGMGYGDNAKAAVITRGLAEITRLGVKLGADPLTYSGLSGVGDLIVTGTSIYSRNWRAGDALGRGEKLEDIERNMGMVIEGISTTKVAYELSRELNVYMPITCAIYQSIYEGKNIKEAITSMMSNEFRAENEWSK

SEQ ID NO: 119988 - DNA, 1017 bp, Streptococcus pneumoniae
  CDS (1)..(1017): transl_table=11
atggaaaaacaaaccgtcgccgtcttggggcctggttcttggggaaccgccctttcacaagtcttaaatgacaatggacacgaggtacgtatttggggaaatcttcccgagcaaatcaatgaaattaatacacaccatactaataagcactactttaaagatgtcgttctagacgaaaatatcattgcctacaccgacttagcagaaacattgaaagatgtggatgcgattttgtttgttgtcccaacaaaagtgacacgacttgttgcccagcaagttgcacaaaccttggaccataaggttatcatcatgcacgcatcaaagggattagaacctgatagccataaacgattatcaaccattcttgaagaagaaattcctgaacatctccgtagtgatatcgtcgttgtttcagggcctagtcatgcagaagagaccattgtgcgtgacctaactttaataactgctgcttctaaagatttacaaacagctcaatacgttcagaagctatttagtaatcactacttccgactttataccaatacggatgttatcggggttgaaactgctggtgctcttaaaaatattattgctgtcggtgctggagctttacatggtcttggatttggtgataatgctaaggcagccatcatcgctcgaggtttagcagaaatcacccgcctaggggtagcactcggggccagtccattgacctatagcggcttatctggtgtgggagatttgatcgtaacgggaacttccatccactctcgtaactggagagctggagatgctctcggacgaggagaatccctagctgatatagaagctaatatgggcatggtaatcgaaggaatttcaacgactcgagcagcctatgaactagcccaagaacttggagtctatatgcccattacacaggctatttaccaagttatttatcacggaaccaatatcaaagatgccatttatgacatcatgaacaatgaatttaaagcagaaaatgagtggtcttaa

SEQ ID NO: 119989 - protein, 338 aa, Streptococcus pneumoniae
MEKQTVAVLGPGSWGTALSQVLNDNGHEVRIWGNLPEQINEINTHHTNKHYFKDVVLDENIIAYTDLAETLKDVDAILFVVPTKVTRLVAQQVAQTLDHKVIIMHASKGLEPDSHKRLSTILEEEIPEHLRSDIVVVSGPSHAEETIVRDLTLITAASKDLQTAQYVQKLFSNHYFRLYTNTDVIGVETAGALKNIIAVGAGALHGLGFGDNAKAAIIARGLAEITRLGVALGASPLTYSGLSGVGDLIVTGTSIHSRNWRAGDALGRGESLADIEANMGMVIEGISTTRAAYELAQELGVYMPITQAIYQVIYHGTNIKDAIYDIMNNEFKAENEWS

SEQ ID NO: 119990 - DNA, 1017 bp, Streptococcus pneumoniae
  CDS (1)..(1017): transl_table=11
atggaaaaacaaaccgtcgccgtcttggggcctggttcttggggaaccgccctttcacaagtcttaaatgacaatggacacgaggtacgtatttggggaaatcttcccgagcaaatcaatgaaattaatacacaccatactaataagcactactttaaagatgtcgttctagacgaaaatatcattgcctacaccgacttagcagaaacattgaaaaatgtggatgcgattttgtttgttgtcccaacaaaagtgacacgacttgttgcccagcaagttgcacaaaccttggaccataaggttatcatcatgcacgcatcaaagggattagaacctgatagccataaacgattatcaaccattcttgaagaagaaattcctgaacatctccgtagtgatatcgtcgttgtttcagggcctagtcatgcagaagagaccattgtgcgtgacctaactttaataactgctgcttctaaagatttacaaacagctcaatacgttcaggagctatttagtaatcactacttccgactttataccaatacggatgttatcggggttgaaactgctggtgctcttaaaaatattattgctgtcggtgctggagctttacatggtcttggatttggtgataatgctaaggcagccatcatcgctcgaggtttagcagaaatcacccgcctaggggtagcactcggggccagtccattgacctatagcggcttatctggtgtgggagatttgatcgtaacgggaacttccatccactctcgtaactggagagctggagatgctctcggacgaggagaatccctagctgatatagaagctaatatgggcatggtaatcgaaggaatttcaacgactcgagcagcctatgaactagcccaagaacttggagtctatatgcccattacacaggctatttaccaagttatttatcacggaaccaatatcaaagatgccatttatgacatcatgaacaatgaatttaaagcagaaaatgagtggtcttaa

SEQ ID NO: 119991 - protein, 338 aa, Streptococcus pneumoniae
MEKQTVAVLGPGSWGTALSQVLNDNGHEVRIWGNLPEQINEINTHHTNKHYFKDVVLDENIIAYTDLAETLKNVDAILFVVPTKVTRLVAQQVAQTLDHKVIIMHASKGLEPDSHKRLSTILEEEIPEHLRSDIVVVSGPSHAEETIVRDLTLITAASKDLQTAQYVQELFSNHYFRLYTNTDVIGVETAGALKNIIAVGAGALHGLGFGDNAKAAIIARGLAEITRLGVALGASPLTYSGLSGVGDLIVTGTSIHSRNWRAGDALGRGESLADIEANMGMVIEGISTTRAAYELAQELGVYMPITQAIYQVIYHGTNIKDAIYDIMNNEFKAENEWS

SEQ ID NO: 119992 - DNA, 1029 bp, Symbiobacterium thermophilum
  CDS (1)..(1029): transl_table=11
gtggacatggccatcctgcccgccggggtctggggcacggcgctggcggtgccggcatcggcggcgggccgccgggtgcggctgtggcgccgaacgccgggttgggccgagagctgggaccggggccatccggtcctgccggggctgaagcttcccgagaatgtggtcgcgtgcgacagcgcacaggcggccgtttccgacgcggacctggtgatcctgagcccggccggcgccgggctgcggcccgtctgccggctcgtgcggccgcacctgcgcccggatgcggtcatcgtctgcgcgaccaagtcgatcgagccggagacccatcttctcgtccatcaggtggtggaggaggagctgcccggccaccgggggcggatcgtcgctctgtccgggcccaacttcgcccacgaggtggccgcagggctgcccaccggggccgtggcggcctgtccggacctctccctggccgactgggtgcagcaggccctgatgaccgaccggttccgcgtctacaccaatccggatctggtcggcgtggagctggccggtgcgctgaagaacgtcatcgcccttggggccggcatctcggacggcctggggatgggcgacaacgcccgggccgccctcatcacccgcgggctggtggagatggcccgcctcggccgtgccatgggggcgaatccgctcaccttcgccggacttgcgggcatgggcgacctggtgctctcctgcacgggcgacagctcccgcaaccgcagggcagggctggccatcgggcgggggcagagcgcggaggcgttcctggccgagaccggcctaacggtggagggcatcaccacggcacgagccggctggcagctggcgcagcggctgggggtgcggatgcccattaccgaggcgatctaccaggtgctgtacgagggcctgccgccgctcacggccatggagcggctgatggcccggccccgggcgcacgagctggaggaggtcgccggggcggacctgaaaccgccgtttgatccgtaa

SEQ ID NO: 119993 - protein, 342 aa, Symbiobacterium thermophilum
MDMAILPAGVWGTALAVPASAAGRRVRLWRRTPGWAESWDRGHPVLPGLKLPENVVACDSAQAAVSDADLVILSPAGAGLRPVCRLVRPHLRPDAVIVCATKSIEPETHLLVHQVVEEELPGHRGRIVALSGPNFAHEVAAGLPTGAVAACPDLSLADWVQQALMTDRFRVYTNPDLVGVELAGALKNVIALGAGISDGLGMGDNARAALITRGLVEMARLGRAMGANPLTFAGLAGMGDLVLSCTGDSSRNRRAGLAIGRGQSAEAFLAETGLTVEGITTARAGWQLAQRLGVRMPITEAIYQVLYEGLPPLTAMERLMARPRAHELEEVAGADLKPPFDP

SEQ ID NO: 119994 - DNA, 927 bp, Synechococcus elongatus
  CDS (1)..(927): transl_table=11
atgtccccaagggtattgattttgggcttaggtcattggggacaaacactggcatacctatttgagcaacggggttgcacagtttcctcctgggggcgatcgcagggggcactctcggctgctcttttccaagacattcatttactggtttcggctctccctatcaaagcggtgcgcgaagtggctgcccaagtcacccgccttcacccccccttaggaatcattcttgtgagtgccacaaagggcctagaatcggaaacctttgccacagcggcggatatttggcaaacttactgtccccatcacgatctggtggtgctttcgggacccaacctagccagtgaaatccagcagggattgccggcagcagcggtggtggggggcaatctggcagccaccaagcaggttcaggattgtttgggcagtcccacgtttcgcctctatagtaatgaggaccggcggggtgttgaaatggggggcatcttcaaaaatgtgattgcgatcgcctgtggcgtcaatgatggcctcggtcttggcgttaatgcccgctctgccctgattacccgaggactcgtggaaatggtgcgggtaggtacccactggggcggacaagtggaaaccttctacggcctttcaggattaggggatctgcttgccacctgtacgagcgccctcagtcgcaattatcaagtggggtggcatcttgcccagggtaagtccctctcccaagccctagccttaaccaagggcactgctgaaggggtgaacactgctcgggtgctgtgcacctatgctcagcagcatcaattagatattccgattactgcaatggtgaatgcggtcctgtgtggctctctcacgcctcaggctgccctccattgtcttttagagcgtcccttcaagcctgaggttattcctggacaatag

SEQ ID NO: 119995 - protein, 308 aa, Synechococcus elongatus
MSPRVLILGLGHWGQTLAYLFEQRGCTVSSWGRSQGALSAALFQDIHLLVSALPIKAVREVAAQVTRLHPPLGIILVSATKGLESETFATAADIWQTYCPHHDLVVLSGPNLASEIQQGLPAAAVVGGNLAATKQVQDCLGSPTFRLYSNEDRRGVEMGGIFKNVIAIACGVNDGLGLGVNARSALITRGLVEMVRVGTHWGGQVETFYGLSGLGDLLATCTSALSRNYQVGWHLAQGKSLSQALALTKGTAEGVNTARVLCTYAQQHQLDIPITAMVNAVLCGSLTPQAALHCLLERPFKPEVIPGQ

SEQ ID NO: 119996 - DNA, 969 bp, Thermus thermophilus
  CDS (1)..(969): transl_table=11
atgagggtggcggtcctgggcgcgggggcctgggggacggccttggccgtcctcctcgccagcaaaggggtgcccacccggctttgggcccggcggaaggcgcaggcggaggccttgaaggccatgcgggagaaccgggactacctccctggggtggccctcccggcctacctctaccccacccatgaccctgaggaggccttggagggggcggagctcgccgtgctggcggtgccctccaaggccctccgggagaccgtggccggccttcccccggctccctggtacgtctccgccaccaagggcctcttttacggggaggagggggtccggacgcccgcggaggtggtggaggccctgacccaaaggcccgtggtggccctttccgggcccaaccacgccgaggaggtggcccgcttcctccccacggcgagcgtggccgcggggccggaagacctcgcccggcgggtccaggccctcttctccgggcccaccttccgggtctacaccagccgggaccggcggggggtggagcttgggggggcggtgaagaacgtcctggccctggcggcgggcatggtggacgggcttaggctcggggacaacgccaaggccgccctcctcacccggggccttaaggagatggtccgcttcggcaccgcgcttgggggggaggaggccaccttctacgggcttgcgggcctcggggacctcctggccacggcctacagcctccactcccgcaaccgcatggcgggggagagcctggtgcggggggtggaccgggaggccctcgaggcccggggggtggtggaggggctttacgcggtgaaggccatggtggcctgggggaaggagcagggggtggagctccccgtggccgaggcggtccaccgggtggcccacgagggcctggaccccctggcggccctaaaggccctcatggcccgggagcccaaggaggagtga

SEQ ID NO: 119997 - protein, 322 aa, Thermus thermophilus
MRVAVLGAGAWGTALAVLLASKGVPTRLWARRKAQAEALKAMRENRDYLPGVALPAYLYPTHDPEEALEGAELAVLAVPSKALRETVAGLPPAPWYVSATKGLFYGEEGVRTPAEVVEALTQRPVVALSGPNHAEEVARFLPTASVAAGPEDLARRVQALFSGPTFRVYTSRDRRGVELGGAVKNVLALAAGMVDGLRLGDNAKAALLTRGLKEMVRFGTALGGEEATFYGLAGLGDLLATAYSLHSRNRMAGESLVRGVDREALEARGVVEGLYAVKAMVAWGKEQGVELPVAEAVHRVAHEGLDPLAALKALMAREPKEE

SEQ ID NO: 119998 - DNA, 993 bp, Thermoanaerobacter tengcongensis; identical to SEQ ID NO: 59021
  CDS (1)..(993): transl_table=11

SEQ ID NO: 119999 - protein, 330 aa, Thermoanaerobacter tengcongensis; identical to SEQ ID NO: 59022

SEQ ID NO: 120000 - DNA, 987 bp, Thiobacillus denitrificans; identical to SEQ ID NO: 59023
  CDS (1)..(987): transl_table=11

SEQ ID NO: 120001 - protein, 328 aa, Thiobacillus denitrificans; identical to SEQ ID NO: 59024

SEQ ID NO: 120002 - DNA, 978 bp, Tropheryma whipplei
  CDS (1)..(978): transl_table=11
atgaaagagggtgggttgcgcaataaagtcgctgttataggttctggatcatgggggaccgccattgccaatctgctttgtaaggcggggaatgaaactattctatggggcagggatgaaaatgttattgatgagataaataacgccagagtcaattcgaaatatcttccaggagtagaattattcctacgggcaacttgtgatcttgattatgccgttgccgacgcctcccatgtatacatagcattaccgagctttgcgctatcaaaagtattacccaaattatccctggataagttttccattgtaataagtcttataaagtgtcttgagcctgacacgggcagacggatgagtgaggttatttcggaggctttggacctcggtcacaatcgccttgccgtcataagcggccctaatctcgcacttgaagtggccaatgacgaacccagtgtgtcggttgttgcgtctgcgaatattgcaacagcgaatattgtggctggcactctgaagtgtcctgggttttattgcattccaagttccgacatcaaaggtgttgaaatatgtgctgcctcaaaaaatctggttgcactaatatctggaatagccagaggtatggatcttggggataatacacgggctgcgctaataacgctcggattcagagagctcttgcgtcttgtgcttgaaaatggtggtactgaggaaactgtttttggcgtagcgggcctgggtgatgtggtggcaacgtgcaattctcatttgtcaagaaataacaaagcaggagttttgcttgcaaagggtgccccccttgatgaggtaaaacaaaccgcagagggggttgttgccatttcgggcgttctcgccctcgcggaacgcagtggtgtatacatgccaattgcgcaagcgttaagtcaggttattagcggtaaacgaacggcacattcgcttctggatatttgttttagcctggcgtaa

SEQ ID NO: 120003 - protein, 325 aa, Tropheryma whipplei
MKEGGLRNKVAVIGSGSWGTAIANLLCKAGNETILWGRDENVIDEINNARVNSKYLPGVELFLRATCDLDYAVADASHVYIALPSFALSKVLPKLSLDKFSIVISLIKCLEPDTGRRMSEVISEALDLGHNRLAVISGPNLALEVANDEPSVSVVASANIATANIVAGTLKCPGFYCIPSSDIKGVEICAASKNLVALISGIARGMDLGDNTRAALITLGFRELLRLVLENGGTEETVFGVAGLGDVVATCNSHLSRNNKAGVLLAKGAPLDEVKQTAEGVVAISGVLALAERSGVYMPIAQALSQVISGKRTAHSLLDICFSLA

SEQ ID NO: 120004 - DNA, 1020 bp, Tropheryma whipplei
  CDS (1)..(1020): transl_table=11
ttgcagctatcaggttatccgatgagacaggcttcatgcgacatgaaagagggtgggttgcgcaataaagtcgctgttataggttctggatcatgggggaccgccattgccaatctgctttgtaaggcggggaatgaaactattctatggggcagggatgaaaatgttattgatgagataaataacgccagagtcaattcgaaatatcttccaggagtagaattattcctacgggcaacttgtgatcttgattatgccgttgccgacgcctcccatgtatacatagcattaccgagctttgcgctatcaaaagtattacccaaattatccctggataagttttccattgtaataagtcttataaagtgtcttgagcctgacacgggcagacggatgagtgaggttatttcggaggctttggacctcggtcacaatcgccttgccgtcataagcggccctaatctcgcacttgaagtggccaatgacgaacccagtgtgtcggttgttgcgtctgcgaatattgcaacagcgaatattgtggctggcactctgaagtgtcctgggttttattgcattccaagttccgacatcaaaggtgttgaaatatgtgctgcctcaaaaaatctggttgcactaatatctggaatagccagaggtatggatcttggggataatacacgggctgcgctaataacgctcggattcagagagctcttgcgtcttgtgcttgaaaatggtggtactgaggaaactgtttttggcgtagcgggcctgggtgatgtggtggcaacgtgcaattctcatttgtcaagaaataacaaagcaggagttttgcttgcaaagggtgccccccttgatgaggtaaaacaaaccgcagagggggttgttgccatttcgggcgttctcgccctcgcggaacgcagtggtgtatacatgccaattgcgcaagcgttaagtcaggttattagcggtaaacgaacggcacattcgcttctggatatttgttttagcctggcgtaa

SEQ ID NO: 120005 - protein, 339 aa, Tropheryma whipplei
MQLSGYPMRQASCDMKEGGLRNKVAVIGSGSWGTAIANLLCKAGNETILWGRDENVIDEINNARVNSKYLPGVELFLRATCDLDYAVADASHVYIALPSFALSKVLPKLSLDKFSIVISLIKCLEPDTGRRMSEVISEALDLGHNRLAVISGPNLALEVANDEPSVSVVASANIATANIVAGTLKCPGFYCIPSSDIKGVEICAASKNLVALISGIARGMDLGDNTRAALITLGFRELLRLVLENGGTEETVFGVAGLGDVVATCNSHLSRNNKAGVLLAKGAPLDEVKQTAEGVVAISGVLALAERSGVYMPIAQALSQVISGKRTAHSLLDICFSLA

SEQ ID NO: 120006 - DNA, 1035 bp, Vibrio cholerae
  CDS (1)..(1035): transl_table=11
atgagcgaaacacagaaccacaatagctacggaaaacctgttgaaatgaccgtgataggtgcgggctcctacggtacctcactggcgatctctttggcgcgcaatggcgcgaatatcgtcctgtggggacatgatgcagagcatatggcgcgccttgacgctgaccgcgctaaccatgaatttttgcccggaattgcttttcctgacactctgattgtggaaactgacttgcaaaaagcggtgcaagcgagccgtgatctgctggtggtagtgcctagccatgtgtttggtatcgtgttgaaaagtttgcagccacacctgcgtgcggatagccgcatttgttgggcaaccaaggggctagagcctgagactggacggctactccaagatgtcgcccatgatgtacttggtgatagctacccccttgcggtgctttctggtcctacttttgccaaagagctggcgatggggatgccaaccgcgatttcagtggcttcgccggatgcgcaatttgtacgtgacctgcaagagaaaattcactgcagcaaaactttccgagtgtacgccaacagtgactttatcggtatgcagcttggcggcgcggtaaaaaacgtgattgcgattggtgcggggatgtctgatggtattggctttggcgcgaatgcgcgaaccgctcttatcactcgtggcttggctgaaatgagccgcttaggcgccgctttaggcgcgcagccggaaacttttatgggtatggcaggattaggtgatttagtgctgacttgtactgacaaccaatcgcgtaaccgccgttttggtttggcactaggtcaaggtaaagatgtggataccgcgcaaaccgatatcggccaagtggttgaagggtatcgcaacaccaaagaagtgtggatgttagcgaaacgcatgggcgttgagatgccgatagttgaacaaatttaccaagtattgtatcaaggaaaagatgcgcgactcgccgctcaggatttgctggcacgagataagaagatggagcgttaa

SEQ ID NO: 120007 - protein, 344 aa, Vibrio cholerae
MSETQNHNSYGKPVEMTVIGAGSYGTSLAISLARNGANIVLWGHDAEHMARLDADRANHEFLPGIAFPDTLIVETDLQKAVQASRDLLVVVPSHVFGIVLKSLQPHLRADSRICWATKGLEPETGRLLQDVAHDVLGDSYPLAVLSGPTFAKELAMGMPTAISVASPDAQFVRDLQEKIHCSKTFRVYANSDFIGMQLGGAVKNVIAIGAGMSDGIGFGANARTALITRGLAEMSRLGAALGAQPETFMGMAGLGDLVLTCTDNQSRNRRFGLALGQGKDVDTAQTDIGQVVEGYRNTKEVWMLAKRMGVEMPIVEQIYQVLYQGKDARLAAQDLLARDKKMER

SEQ ID NO: 120008 - DNA, 1038 bp, Vibrio parahaemolyticus
  CDS (1)..(1038): transl_table=11
atgacacaagcaaatacaaacaatgcttacggtaaagacatcgcaatgactgtaattggcgctggctcatacggtacttctctagcgatctccctcgcgcgtaatggtgcgaacgttgtcctttgggggcacgagccagagcacatggcacgcttagaggcggatcgcgcgaaccacgcatttttaccaggtgttgatttcccagaaagcttgattattgaatcggatttagaaaaagccgttcaagcaagccgagacttgttagttgtggttccaagccatgtctttggcatcgtgcttaacagctgcaaaccgttcctgcgcgaagattcgcgtatctgttgggcaaccaaaggtcttgaacctgaaactggccgactgctcaaagacgtcgcatacgacatcattggtgagaactactcgctggccgttctatctggcccaacgttcgcgaaagagctcgcgatgggtctaccaactgcgatttccgttgcctctccagatgcagagttcgtggcggatctgcaagagaaaatccactgtagcaaaaccttccgcgtgtacgcgaacaacgacttcatcggcatgcaacttggcggtgcagtgaaaaacgtgatcgcaattggcgcaggtatgtcagacggcatcggttttggtgcaaacgcacgtactgcgttgattacccgtggcttggctgaaatgagccgccttggcgctgcacttggtgccaaaccagaaaccttcatgggtatggctggtttaggtgacttggttcttacttgtactgacaaccagtcacgtaaccgccgctttggtttagctctcggtcaaggtcaagacgttgatacggcacaagaagaaattggccaagtcgtagaaggctatcgcaacacgaaagaagtatggatgctctcccaacgcatgggcgttgagatgccaattgttgaccaaatttatcaagtattgtatcaaggaaaagatgcacgcctggcagcgcaagatttacttgctcgtgacaaaaaagccgaaggaaagtag

SEQ ID NO: 120009 - protein, 345 aa, Vibrio parahaemolyticus
MTQANTNNAYGKDIAMTVIGAGSYGTSLAISLARNGANVVLWGHEPEHMARLEADRANHAFLPGVDFPESLIIESDLEKAVQASRDLLVVVPSHVFGIVLNSCKPFLREDSRICWATKGLEPETGRLLKDVAYDIIGENYSLAVLSGPTFAKELAMGLPTAISVASPDAEFVADLQEKIHCSKTFRVYANNDFIGMQLGGAVKNVIAIGAGMSDGIGFGANARTALITRGLAEMSRLGAALGAKPETFMGMAGLGDLVLTCTDNQSRNRRFGLALGQGQDVDTAQEEIGQVVEGYRNTKEVWMLSQRMGVEMPIVDQIYQVLYQGKDARLAAQDLLARDKKAEGK

SEQ ID NO: 120010 - DNA, 1038 bp, Vibrio vulnificus
  CDS (1)..(1038): transl_table=11
atgactcaaacactggttaataacgcctacggcaaagagatttcaatgactgtgatcggcgcaggttcgtacggcacatcattagcaatctcactttcacgtaacggtgccaacgttgtcctttggggacatgaaccagagcatatggctaagctcgaggcggatcgcgcaaaccacgaattcctgcccggtattgagttcccaccgagcctgattgtggaatccgatttagcaaaagccgtgcaagcgagccgagatctgttggttgtcgtaccaagccatgtgtttggtattgtgctcaatagcttaaaaccctatctgcgtgatgattctcgtatctgctgggccaccaaaggtcttgaacctgaaaccggtcgccttctaaaagacgtcgcgtttgatgtactgggtgaacactactcgttggccgtgttgtcaggcccaacctttgccaaagagctggctgcaggcatgccaactgcgatttcagtcgcctcaccagatgcgcagtttgtcgcagacctacaggaaaaaatccactgcagcaaaaccttccgtgtttatgccaacagtgatttcactggcatgcaactcggtggcgcggtgaaaaacgtcatcgccattggtgcagggatgtctgacggaattggcttcggtgccaatgctcgtaccgcattaatcactcgtggtttggcggaaatgtgtcgtttgggggctgcgcttggagcacaaccagaaacctttatgggcatggcaggtttgggcgatctggtgctgacgtgtaccgacaaccaatcacgtaaccgccgctttggtcttgcacttgggcaaggaaaagacgtcgatacggcgcaagcggatattggccaagtggtcgaaggctaccgcaacaccaaagaggtgtggatgctggcacaacgtatgggcgttgagatgcctattgttgaccaaatctatcaagtattatatcaaggaaaggatgcgcgcctggcagcgcaagatctgctggctcgcgataagaaatccgaaggaaaataa

SEQ ID NO: 120011 - protein, 345 aa, Vibrio vulnificus
MTQTLVNNAYGKEISMTVIGAGSYGTSLAISLSRNGANVVLWGHEPEHMAKLEADRANHEFLPGIEFPPSLIVESDLAKAVQASRDLLVVVPSHVFGIVLNSLKPYLRDDSRICWATKGLEPETGRLLKDVAFDVLGEHYSLAVLSGPTFAKELAAGMPTAISVASPDAQFVADLQEKIHCSKTFRVYANSDFTGMQLGGAVKNVIAIGAGMSDGIGFGANARTALITRGLAEMCRLGAALGAQPETFMGMAGLGDLVLTCTDNQSRNRRFGLALGQGKDVDTAQADIGQVVEGYRNTKEVWMLAQRMGVEMPIVDQIYQVLYQGKDARLAAQDLLARDKKSEGK

SEQ ID NO: 120012 - DNA, 990 bp, Wigglesworthia glossinidia brevipalpis
  CDS (1)..(990): transl_table=11
ttgagtaatttctcaattactgtaattggagctggagcttatggaacagctctggctgtttccttttccaaaaaaaatagaaaagtgtttttatggggtagaaataaaaaacatatgcaatctcttaaaaaagatcgttgcaataaaaaatttttaccaaaaataaattttcctaatgatttaaaaatagaaatttctttaaaaaaagctataaaatatagcaatactattgtaatagctgttcctagtataggttttaaaaacattttaattaaaattcaaccattcttaaataagaatgtttttttaatatgtggaactaaagggttagaaccaagaacaggaagactattacaagaagttgtttacgatatcttaggaagagaaacatgtttgtcaattatatcaggaccatcttttgcaagatatctagctattggattaccgacttcaatggtactagctaataattgtattaaaacttgtaaatttttagcaaataaactaaaaaataaatttttaaatatatacagcatttctgatttagttggagtgcaaataggaggagtgataaaaaatgttatcgcgatagcttctggtatgtctgatggaatacagatgggtcctaacgctaaaacagctattataacttacggattagaagaaatgtataagttgggtaaagttatgggggccaatgaatacacttttatgggaatgtctggagtaggagaccttgttcttacatgtactgatgatgaatcaagaaacaggaaatttgggatattactagctcaaggatatagcatagaaaatgctaaatcaaaagttggatgtataatagaaggatacaataatattaaagagattttaattttatcatgtaaacacaaaataaacatgcctataatcaaacaagtttataaaattttatatatgcatcaaccagtaaaaaaatctattttaaatatttttttaaacaaaaaataa

SEQ ID NO: 120013 - protein, 329 aa, Wigglesworthia glossinidia brevipalpis
MSNFSITVIGAGAYGTALAVSFSKKNRKVFLWGRNKKHMQSLKKDRCNKKFLPKINFPNDLKIEISLKKAIKYSNTIVIAVPSIGFKNILIKIQPFLNKNVFLICGTKGLEPRTGRLLQEVVYDILGRETCLSIISGPSFARYLAIGLPTSMVLANNCIKTCKFLANKLKNKFLNIYSISDLVGVQIGGVIKNVIAIASGMSDGIQMGPNAKTAIITYGLEEMYKLGKVMGANEYTFMGMSGVGDLVLTCTDDESRNRKFGILLAQGYSIENAKSKVGCIIEGYNNIKEILILSCKHKINMPIIKQVYKILYMHQPVKKSILNIFLNKK

SEQ ID NO: 120014 - DNA, 984 bp, Wolbachia pipientis wMel
  CDS (1)..(984): transl_table=11
gtggcaatatcaattttaggtgctggtgcatggggtacagcaatcgcaatttcattaggtagtaagaaagatgtgattttgtggactcacaatgaaactacatttgaatcaatcaacgggaaaagagaaagtgacaagctacccggttgtcgaatttctgataatgtgtcagtaaaattggctattgaagacataattaatgcttcagtaacaatcctcgctgttcccactcagtctctgaggaaggtatgtcagcaattgcataattgtaatctgaaaaaagatgtagcaataattttagcttgtaagggaatagaaaagtctacattaaaattacctagtgaaatagtaaatgaaattttacctaacaatcctattgctattttttcaggtcctagctttgctgtagaagttgcaagaaaattaccctattcaatggttcttgcatgccaaaataacacattaggttcaaagctagtatcagagctgcaacaagaaaatgttaaattggagtttagtaacgacattataggagtacagatttgtgcagcgttaaagaacgtttttgctatagcgtgtgggattgttctaggtagtaaacttgggtttaatgctcatgcagcattgattacgaaaagtatgagcgaaattaaggctttatactcagcaaaaattggtgacggtagtgtggatataaatacactacttgggccagcatgtctgggtgacctaattatgacatgcacatccttgaattcaagaaacttatcttttgggtttaaaataggtaatagtgacaatggctttaatgttcagcagattttgtcagaaggcaagtcagtgattgaaggttttagcactgctgagtccatatttaatttagcaggaaagctaaagataaaaatgcctatatgtgaagcggtctatagattattgtatgaaagcgcctctatagaggatactctttctgttcttataagttaa

SEQ ID NO: 120015 - protein, 327 aa, Wolbachia pipientis wMel
MAISILGAGAWGTAIAISLGSKKDVILWTHNETTFESINGKRESDKLPGCRISDNVSVKLAIEDIINASVTILAVPTQSLRKVCQQLHNCNLKKDVAIILACKGIEKSTLKLPSEIVNEILPNNPIAIFSGPSFAVEVARKLPYSMVLACQNNTLGSKLVSELQQENVKLEFSNDIIGVQICAALKNVFAIACGIVLGSKLGFNAHAALITKSMSEIKALYSAKIGDGSVDINTLLGPACLGDLIMTCTSLNSRNLSFGFKIGNSDNGFNVQQILSEGKSVIEGFSTAESIFNLAGKLKIKMPICEAVYRLLYESASIEDTLSVLIS

SEQ ID NO: 120016 - DNA, 894 bp, Wolinella succinogenes
  CDS (1)..(894): transl_table=11
atggatgtagccatcattggcgggggagcgtggggaagcgcgctctataaagcgctcttagaaaaatcttcggtggcgctagtctcccgctccgggcgcgaaggaatccaccaatgctcgctccaagaggcgttagaggcgcgatttttggtgttagcgattgcctctagtgctctaagggggtggctcaatgaggccaatctccctccaaagaccaagattttggtggcctgcaagggaatcgaggaggggagcggagcgctggtgagcgagattttagaggagtttttgcctagagagaatctcgcctatctcgcgggcccctcttttgccaaagaggtgcgcgaggggcttccttgtgctttggtgatccactctcatcacctagagttagcccaagagatgagccaattttttccttcatggattcgtctttatgtcgaaaatgacgtcgtggggggcgaagtttgcggtgcctacaaaaatgtgatcgccattgcggggggaatctgcgatggtctaggtctaggctataacgccaaagcctcgcttgtggcgaggggattggtcgaaatggcacgctttgggcaatattttggcgcaaagattgagacctttttgggtctctctggcgcgggcgatctctttctcacttcaggctccaccctctctagaaactaccgcgtggggcttggactcgcccaaggcaagagcttggaggagatattaattgagcttggcgaggtggctgaagggatcaagaccgctagggcgatcacgcaaattgctcaaagagagggcattcacgctcccatcgcacacgaggtgaacgccatcttgcagggcaagaatcccaaagagagcctcaaagacctactctctcacggacgataa

SEQ ID NO: 120017 - protein, 297 aa, Wolinella succinogenes
MDVAIIGGGAWGSALYKALLEKSSVALVSRSGREGIHQCSLQEALEARFLVLAIASSALRGWLNEANLPPKTKILVACKGIEEGSGALVSEILEEFLPRENLAYLAGPSFAKEVREGLPCALVIHSHHLELAQEMSQFFPSWIRLYVENDVVGGEVCGAYKNVIAIAGGICDGLGLGYNAKASLVARGLVEMARFGQYFGAKIETFLGLSGAGDLFLTSGSTLSRNYRVGLGLAQGKSLEEILIELGEVAEGIKTARAITQIAQREGIHAPIAHEVNAILQGKNPKESLKDLLSHGR

SEQ ID NO: 120018 - DNA, 1026 bp, Xanthomonas axonopodis pv
  CDS (1)..(1026): transl_table=11
atgagcgatttgacccacaagatcgccgttctcggcgccggttcctggggcacggccctggccgcgctgctcgccaggcatggtcacccgaccgtgctctgggggcgcgacgcggcgatggtggataccatcgaccgcacccacgagaacgcgcgctatctgccgggcattgcactgcccgacagcctgcgtgccaccaccgacctgcaggcggcggtcgctgacgccacttggatcctggtggtggtgccctcgcatgcgttcaccgagacgatccggctgatcgcaccgctgcgcccgcccggtgccggcgttgcgtgggcgaccaaaggcttcgaacccggttccgggcggtttctgcatgaagtggcgcgtgacatcctcggccccagcgttccgctggccgtggtgaccggaccttccttcgccaaggaagtcacgctcggcctgccgaccgccatcaccgtgcacggcgacgatgcggcgtttgcgcaagtggtggccgacgcgatgcatggccccactttccgcgcctacaccggcgacgacatggtgggcgccgagctcggcggggcgatgaagaacgtgctggcggtggccaccggcgtggccgatggcatgcagcttggtctcaatgcacgtgccggtttgatcacacgtggcttgaacgagatgctgcgtctggcggcggtgatcggcgctcgtccggagaccttgatgggcctggccgggttgggcgatctggtgctcacctgcaccggcgatctgtcgcgcaaccgtcgcctgggtctggccttggggcgcgggcagagcttggacgaggcgatccgcgagatcggtcaggtggtcgaatcggtgcagacggccgatgaagtcatgcgtcaggccgaacaccacggcatcgaactgccgatctccaatgccgtgcgtgcggtattgcacggcgaaatcaccccggaagcaggcttgaaggaattgctggcacgcgagcgcaagccagagtacccgcagaccttgttcacctga

SEQ ID NO: 120019 - protein, 341 aa, Xanthomonas axonopodis pv
MSDLTHKIAVLGAGSWGTALAALLARHGHPTVLWGRDAAMVDTIDRTHENARYLPGIALPDSLRATTDLQAAVADATWILVVVPSHAFTETIRLIAPLRPPGAGVAWATKGFEPGSGRFLHEVARDILGPSVPLAVVTGPSFAKEVTLGLPTAITVHGDDAAFAQVVADAMHGPTFRAYTGDDMVGAELGGAMKNVLAVATGVADGMQLGLNARAGLITRGLNEMLRLAAVIGARPETLMGLAGLGDLVLTCTGDLSRNRRLGLALGRGQSLDEAIREIGQVVESVQTADEVMRQAEHHGIELPISNAVRAVLHGEITPEAGLKELLARERKPEYPQTLFT

SEQ ID NO: 120020 - DNA, 1041 bp, Xylella fastidiosa
  CDS (1)..(1041): transl_table=11
atgatcgattctaagcagaaaattgctgttcttggtgccggctcttggggaactgctcttgcagcattggttgcaaggcatgcctatccgaccatattgtggggccgtgatgtgggagtgatacagagcatcgatatccagcgccagaacttccgttatttacctagtattatgcttcctcagacgctgcgtgccactaccgatttggctgcagcggtctcaggtgccgactgggttttggtggcggttccctcttacgccttcactgaaactctacgtcgattggctccattgctgtcaaccggcgttggtgttgcttgggcaaccaaaggatttgaaccggggtctggtcgtttcctacacgaggtggctcgtgaaatcctggggggtgatgcgccattggcagtggtgacggggccttcttttgctaaagaagtaactctgggcctgcctacagcggtcaccgtacatggtgaatatgcgcgttttactcagatggtggccaatgcgatgcatggcccgatgttccgtgcctataccggcaacgacgtgattggtgctgagcttggtggggcaatgaaaaacgtactggcagtggctattggcgtggctgatggcatgcagttaggcatgaacgcgcgtgctggtttaattactcgtggactgaatgaaatgttacgtttgtctgcggttatcggtgctcgaccggaaacgctaatggggttggctggtctgggcgatctagtattgacttgtactggtgatttgtcgcgtaatcgtcgcctaggcttcgctctggggcgaggacagagtttgtcggatgcaatacgtgagattggtcaagttgttgagtctgtacagacttccgacgaggtaatgcgccaagctgaacagcatggtgtcgagttgccgatttccgaagctgtgcgtgctgttctacgtgaagagataactccatatgctgggatgaaagccttgcttgcacgagagcaaaagcctgaatatcttgatattctgtttaaggcaaactcttctttataa

SEQ ID NO: 120021 - protein, 346 aa, Xylella fastidiosa
MIDSKQKIAVLGAGSWGTALAALVARHAYPTILWGRDVGVIQSIDIQRQNFRYLPSIMLPQTLRATTDLAAAVSGADWVLVAVPSYAFTETLRRLAPLLSTGVGVAWATKGFEPGSGRFLHEVAREILGGDAPLAVVTGPSFAKEVTLGLPTAVTVHGEYARFTQMVANAMHGPMFRAYTGNDVIGAELGGAMKNVLAVAIGVADGMQLGMNARAGLITRGLNEMLRLSAVIGARPETLMGLAGLGDLVLTCTGDLSRNRRLGFALGRGQSLSDAIREIGQVVESVQTSDEVMRQAEQHGVELPISEAVRAVLREEITPYAGMKALLAREQKPEYLDILFKANSSL

SEQ ID NO: 120022 - DNA, 1041 bp, Xylella fastidiosa
  CDS (1)..(1041): transl_table=11
atgatcgattctaagcagaaaattgccgttcttggtgccggctcttggggaactgctcttgcggcattggttgcgaggcatgactatccgaccatattgtggggtcgtgatgtgcgagtgatacagagcattgatatccagcaccagaacttccgttatttacctagcattatgcttcctcagacgctgcgtgccactaccgatttggctgcagcggtctcaggtgccgactgggttttggtggcggttccctcttacgccttcactgaaactctatgtcgattggctccattgctgtcaatcggcgttggtgttgcttgggcaaccaaaggatttgaaccggggtctggtcgtttcctacacgaggtggctcgtgaaatcctgggaggtgatgcaccattggcagtggtgacgggtccttcttttgctaaagaagtgactctgggcctgcctacagcggtcaccgtacatggtgaagatgcgtgttttactcagatggtggccaatgcgatgcatggcccgatgttccgtgcctataccggcaacgacgtgattggtgctgagcttggtggggcaatgaagaacgtactggcagtggctattggcgtggctgatggcatgcagttaggcatgaacgcgcgtgctggtttaattactcgtggactgaatgaaatgttacgtttgtctgcggttatcggtgctcggccggaaacgctaatggggttggctggtctcggtgatctagtattgacttgtactggtgacttgtcgcgtaatcgtcgcctaggctttgctctggggcgaggacagagtttgtcggatgcaatacgtgagattggtcaagtcgttgagtctgtacaaacttccgacgaggtaatgcgccatgctgaacagaatggtgtcgagttgccgatttccgaagctgtgcgtgctgttctacgtgaagagataactccatatgctgggatgaaagtcttgcttgcacgagagcaaaagcctgaatatcttgatattctgtttaaggcaaactgttctttataa

SEQ ID NO: 120023 - protein, 346 aa, Xylella fastidiosa
MIDSKQKIAVLGAGSWGTALAALVARHDYPTILWGRDVRVIQSIDIQHQNFRYLPSIMLPQTLRATTDLAAAVSGADWVLVAVPSYAFTETLCRLAPLLSIGVGVAWATKGFEPGSGRFLHEVAREILGGDAPLAVVTGPSFAKEVTLGLPTAVTVHGEDACFTQMVANAMHGPMFRAYTGNDVIGAELGGAMKNVLAVAIGVADGMQLGMNARAGLITRGLNEMLRLSAVIGARPETLMGLAGLGDLVLTCTGDLSRNRRLGFALGRGQSLSDAIREIGQVVESVQTSDEVMRHAEQNGVELPISEAVRAVLREEITPYAGMKVLLAREQKPEYLDILFKANCSL

SEQ ID NO: 120024 - DNA, 1020 bp, Yersinia pestis; identical to SEQ ID NO: 59025
  CDS (1)..(1020): transl_table=11

SEQ ID NO: 120025 - protein, 339 aa, Yersinia pestis; identical to SEQ ID NO: 59026

SEQ ID NO: 120026 - DNA, 1023 bp, Zymomonas mobilis
  CDS (1)..(1023): transl_table=11
atgcctgttcttgaagaaaagaaaacagccgatcattttcatcatatcggtgtcttaggtgcggggtcatggggaacggctttggcagccgtagccagttataaaggtgccgtcactttatggggcagaaaaagagaaattattgatgccattaatcagagacacatcaatcctgattatttgcctgacatcattataccccggactatccatgcaacagatgaattaaatgatctaagttcagcatctgctttattggtagccattccagcccaaaaaatgagatctgttttaagacagattcccaatgatagtcgcccattaattttatgtgcaaaaggaatagaagcggaatctggcctattgatgtctcagttagcggccgatattttccctcaccgtcctattgcagttttatctgggccaacatttgcaagtgaagtagcacgccatttaccgacagccgtgactttagcagccaaagagaaggatataagagcggccttaatgcaaaggttagccattccaacatttcgcccttatgcctcgtctgacgtgattggtgcggatgtgggaggtgctgtcaaaaatgtattagcgattgcctgtggagtcgttgcaggtgcaaaacttggcaataatgcccgtgcagccgttattagccgcggttttgcagaaatgaaccgctttggtattgcattgggtgcaaaagaagaaactttaacgggattatccggtttaggagatcttgtccttacctgctcgtcggaattgtctcgtaacttcacttttgggaaaaaacttggtgaaggctatagctacgaagaacagcaaaagaaaagagcagttacaacagaaggcgttttcacagcgcctgtcttacaaagagttgctaataaactaaaagtagagatgccgctggtttcagcgatttgtgatttgattgaaggtaaatctgtcaattcagtcttagagagattattatcccgtccactcaagggggaatacagcatttcagtctaa

SEQ ID NO: 120027 - protein, 340 aa, Zymomonas mobilis
MPVLEEKKTADHFHHIGVLGAGSWGTALAAVASYKGAVTLWGRKREIIDAINQRHINPDYLPDIIIPRTIHATDELNDLSSASALLVAIPAQKMRSVLRQIPNDSRPLILCAKGIEAESGLLMSQLAADIFPHRPIAVLSGPTFASEVARHLPTAVTLAAKEKDIRAALMQRLAIPTFRPYASSDVIGADVGGAVKNVLAIACGVVAGAKLGNNARAAVISRGFAEMNRFGIALGAKEETLTGLSGLGDLVLTCSSELSRNFTFGKKLGEGYSYEEQQKKRAVTTEGVFTAPVLQRVANKLKVEMPLVSAICDLIEGKSVNSVLERLLSRPLKGEYSISV

SEQ ID NO: 120028 - DNA, 1275 bp, Ashbya gossypii; identical to SEQ ID NO: 59027
  CDS (1)..(1275)

SEQ ID NO: 120029 - protein, 424 aa, Ashbya gossypii; identical to SEQ ID NO: 59028

SEQ ID NO: 120030 - DNA, 2291 bp, Candida tropicalis; identical to SEQ ID NO: 59029
  CDS (729)..(1904): transl_table=12

SEQ ID NO: 120031 - protein, 391 aa, Candida tropicalis; identical to SEQ ID NO: 59030

SEQ ID NO: 120032 - DNA, 1263 bp, Colletotrichum gloeosporioides
  CDS (1)..(1263)
atggcttctctcggcgccgacaagaaacacaaggtcacagtggtgggctccggtaactggggctcgaccatctgcaagatcgttgccgaaaacacaaaagcgaaccccgacctgttcgaagaagccgtccacatgtgggtgttcgaggaagatgttgttatcgacaagtcctcaccctactacgaccctgccgtcggcgacgctccccagaagctcaccggcgttatcaacaagtaccacgagaacacaaagtacctgccgggtatcaagctcccagacaacatcattgcgaacccctcgctccaggatgctgtcaaggactccaccatcctcgtcttcaacctcccccatcagtttattggcaacgtctgcaagcagctgcgtggtcatattatgccctttgcccgcggtatctcctgcatcaagggcgtcaacgtctcggacgacggcatttctctcttcagcgagtggattggcgacggtctgggcatctactgcggcgccctctccggcgccaacattgcctctgagattgcggccgagaaatggtcagagacgaccatcgcttacgaccctcctcccatggacaactcccgtgccccgacaccgcgctccaactcgcctgcaaacggaaacggcatcgcccctctgactcccgtcgagatgcagcacaaggacgcccgcggccgcacctccaagacgaagctcacccccgttcccgccgagtacccgcccctggaccaccagatcttcaagcagctcttccacagaccctatttccacgtccgcatggtctccgacgttgccggcgtgtcgcttggcggtgccctgaagaacatcgtcgcgctggcggccggtttcgtggacggccgcggctggggtgacaacgccaaggctgccattatgcgggtcggattgttggagatggtcaactttggaaaggagttctttggccagacggtgcacacgggcaccttcaccgaggagtcggctggtgtggcggatctgattacgtcctgtagcggtggtcgcaacttcaggtgcgccaagatggccgtcgcggagggattgagcgttgaggagattgagaaacgcgagctgaacggccagctgttgcagggtaccagcaccgccaaggaggtgaacagtttcctcaaggcgcgggggctggagaaggactacccgctctttacggcggtacacgggattctggagggacgacacagcgtcgacgacattccgagcctcgtctcggacagctag

SEQ ID NO: 120033 - protein, 420 aa, Colletotrichum gloeosporioides
MASLGADKKHKVTVVGSGNWGSTICKIVAENTKANPDLFEEAVHMWVFEEDVVIDKSSPYYDPAVGDAPQKLTGVINKYHENTKYLPGIKLPDNIIANPSLQDAVKDSTILVFNLPHQFIGNVCKQLRGHIMPFARGISCIKGVNVSDDGISLFSEWIGDGLGIYCGALSGANIASEIAAEKWSETTIAYDPPPMDNSRAPTPRSNSPANGNGIAPLTPVEMQHKDARGRTSKTKLTPVPAEYPPLDHQIFKQLFHRPYFHVRMVSDVAGVSLGGALKNIVALAAGFVDGRGWGDNAKAAIMRVGLLEMVNFGKEFFGQTVHTGTFTEESAGVADLITSCSGGRNFRCAKMAVAEGLSVEEIEKRELNGQLLQGTSTAKEVNSFLKARGLEKDYPLFTAVHGILEGRHSVDDIPSLVSDS

SEQ ID NO: 120034 - DNA, 1236 bp, Kluyveromyces thermotolerans
  CDS (1)..(1236)
atgttttcaatctccagaatcactagaacttctagtttcactacacagtttagagcgctataccgttttaaacactcagcaaggaaactccagagcatccctttcagcatatacaagaaaatgtccgctgccgacagactgaatcagacccacgacatcctatccgaatccgtgcaagccgtggaaaaccctttcaaagtcaccgtgattgggtccggtaactggggtaccaccatctccaaggttgtggccgagaacgctgcgctaagaccacacttgttcgtcaagcgtgtcgacatgtgggtgtttgaggagaccgtcgacggccagaagttgaccgagatcatcaacaccaagcaccagaacgtcaagtacctgcctaacatcgacctgccagagaacctggtcgccaacccagacttggtctctgccgtcaaggacgccgacatcctggtcttcaacatccctcaccagttcttgccacgcattgtctcccagttgcagggcaacatcaagaaggacgcccgtgccatctcctgtttgaagggtttcgacgtgtccaaggacggtgtcaagctgctatccacctacgtcaccgagaagctcggaatcacctgtggtgccctttccggtgctaacttggccccagaggttgccaaggagaactggtccgagaccactgttgcctacgagttgccaaaggacttcaagggcgagggcaaggacgtcgaccacgccgtcttgaaggctttgttccacagaccatacttccacgtcaacgtcattgacgatgtcgctggtatctctgttgccggtgccttgaagaacgttgtcgctctaggttgcggtttcgtcgagggtctaggctggggtaacaacgcctccgctgccatccagagagttggtttgggtgagatcatcaagttcggtcagatgttcttcccagactcccgtgtcgagacctactaccaggagtccgccggtgttgctgacttgatcaccacctgctctggtggtagaaacgtcagagtcgccacccacatggccaagactggtaagtctgccgaggagtgcgagaaggagctgttgaacggccagtccgcccaggtattcacacatgtaaggaggtccacgagtggttggccgagtgcggtaagaccgatgaattcgttctgttcgaggccgtttaccagattgtctacgagaacgctcctatggacactttgccagacatga

SEQ ID NO: 120035 - protein, 411 aa, Kluyveromyces thermotolerans
MFSISRITRTSSFTTQFRALYRFKHSARKLQSIPFSIYKKMSAADRLNQTHDILSESVQAVENPFKVTVIGSGNWGTTISKVVAENAALRPHLFVKRVDMWVFEETVDGQKLTEIINTKHQNVKYLPNIDLPENLVANPDLVSAVKDADILVFNIPHQFLPRIVSQLQGNIKKDARAISCLKGFDVSKDGVKLLSTYVTEKLGITCGALSGANLAPEVAKENWSETTVAYELPKDFKGEGKDVDHAVLKALFHRPYFHVNVIDDVAGISVAGALKNVVALGCGFVEGLGWGNNASAAIQRVGLGEIIKFGQMFFPDSRVETYYQESAGVADLITTCSGGRNVRVATHMAKTGKSAEECEKELLNGQSAQVFTHVRRSTSGWPSAVRPMNSFCSRPFTRLSTRTLLWTLCQT

SEQ ID NO: 120036 - DNA, 1146 bp, Pichia angusta; identical to SEQ ID NO: 59031
  CDS (1)..(1146)

SEQ ID NO: 120037 - protein, 381 aa, Pichia angusta; identical to SEQ ID NO: 59032

SEQ ID NO: 120038 - DNA, 1104 bp, Zea mays; identical to SEQ ID NO: 59033
  CDS (1)..(1104)

SEQ ID NO: 120039 - protein, 367 aa, Zea mays; identical to SEQ ID NO: 59034

SEQ ID NO: 120040 - DNA, 25 bp, Artificial sequence
  primer
atgtctgctgctgctgatagattaa

SEQ ID NO: 120041 - DNA, 27 bp, Artificial sequence
  primer
ctaatcttcatgtagatctaattcttc

SEQ ID NO: 120042 - protein, 419 aa, Artificial sequence
  consensus sequence
  Variant (2)..(2): Xaa in position 2 is any amino acid
  Variant (4)..(5): Xaa in position 4 to 5 is any amino acid
  Variant (7)..(9): Xaa in position 7 to 9 is any amino acid
  Variant (11)..(25): Xaa in position 11 to 25 is any amino acid
  Variant (26)..(68): Xaa in position 26 to 68 is any or no amino acid
  Variant (70)..(70): Xaa in position 70 is any amino acid
  Variant (71)..(72): Xaa in position 71 to 72 is any or no amino acid
  Variant (74)..(91): Xaa in position 74 to 91 is any amino acid
  Variant (92)..(108): Xaa in position 92 to 108 is any or no amino acid
  Variant (110)..(130): Xaa in position 110 to 130 is any amino acid
  Variant (131)..(139): Xaa in position 131 to 139 is any or no amino acid
  Variant (142)..(163): Xaa in position 142 to 163 is any amino acid
  Variant (164)..(172): Xaa in position 164 to 172 is any or no amino acid
  Variant (174)..(174): Xaa in position 174 is any amino acid
  Variant (176)..(178): Xaa in position 176 to 178 is any amino acid
  Variant (180)..(180): Xaa in position 180 is any amino acid
  Variant (182)..(217): Xaa in position 182 to 217 is any amino acid
  Variant (218)..(277): Xaa in position 218 to 277 is any or no amino acid
  Variant (279)..(280): Xaa in position 279 to 280 is any amino acid
  Variant (282)..(285): Xaa in position 282 to 285 is any amino acid
  Variant (288)..(288): Xaa in position 288 is any amino acid
  Variant (291)..(292): Xaa in position 291 to 292 is any amino acid
  Variant (294)..(296): Xaa in position 294 to 296 is any amino acid
  Variant (298)..(300): Xaa in position 298 to 300 is any amino acid
  Variant (302)..(304): Xaa in position 302 to 304 is any amino acid
  Variant (306)..(306): Xaa in position 306 is any amino acid
  Variant (308)..(313): Xaa in position 308 to 313 is any amino acid
  Variant (314)..(315): Xaa in position 314 to 315 is any or no amino acid
  Variant (317)..(318): Xaa in position 317 to 318 is any amino acid
  Variant (320)..(337): Xaa in position 320 to 337 is any amino acid
  Variant (338)..(348): Xaa in position 338 to 348 is any or no amino acid
  Variant (350)..(351): Xaa in position 350 to 351 is any amino acid
  Variant (354)..(355): Xaa in position 354 to 355 is any amino acid
  Variant (358)..(362): Xaa in position 358 to 362 is any amino acid
  Variant (364)..(384): Xaa in position 364 to 384 is any amino acid
  Variant (385)..(396): Xaa in position 385 to 396 is any or no amino acid
  Variant (398)..(411): Xaa in position 398 to 411 is any amino acid
  Variant (412)..(418): Xaa in position 412 to 418 is any or no amino acid
GXGXXGXXXAXXXXXXXXXXXXXXXXXXXXXXXXXXXXXXXXXXXXXXXXXXXXXXXXXXXXXXXXXXNXXXLXXXXXXXXXXXXXXXXXXXXXXXXXXXXXXXXXXXPXXXXXXXXXXXXXXXXXXXXXXXXXXXXXXKGXXXXXXXXXXXXXXXXXXXXXXXXXXXXXXXLXGXXXAXEXXXXXXXXXXXXXXXXXXXXXXXXXXXXXXXXXXXXXXXXXXXXXXXXXXXXXXXXXXXXXXXXXXXXXXXXXXXXXXXXXXXXXXXXXXXXXXXXDXXGXXXXGAXKNXXAXXXGXXXGXXXGXNXXXXXXXXGXXEXXXXXXXXXXXXXXXXXXXXXXXXXXXXXGXXDLXXTCXXXXXRXXXXXXXXXXXXXXXXXXXXXXXXXXXXXXXXXGXXXXXXXXXXXXXXXXXXXXXP

SEQ ID NO: 120043 - protein, 28 aa, Artificial sequence
  protein pattern
  Variant (3)..(3): Xaa in position 3 is Ile or Val
  Variant (4)..(4): Xaa in position 4 is Ile, Leu, Met or Val
  Variant (6)..(6): Xaa in position 6 is any amino acid
  Variant (7)..(8): Xaa in position 7 to 8 is any or no amino acid
  Variant (10)..(10): Xaa in position 10 is any amino acid
  Variant (11)..(12): Xaa in position 11 to 12 is any or no amino acid
  Variant (14)..(16): Xaa in position 14 to 16 is any amino acid
  Variant (18)..(18): Xaa in position 18 is any amino acid
  Variant (19)..(19): Xaa in position 19 is Gly, Asn or Ser
  Variant (20)..(20): Xaa in position 20 is Ala, Ser or Thr
  Variant (21)..(21): Xaa in position 21 is any amino acid
  Variant (22)..(22): Xaa in position 22 is Ala, Ser or Thr
  Variant (23)..(23): Xaa in position 23 is any amino acid
  Variant (24)..(24): Xaa in position 24 is Ile, Leu, Met or Val
  Variant (25)..(27): Xaa in position 25 to 27 is any amino acid
  Variant (28)..(28): Xaa in position 28 is Ala or Gly
KNXXAXXXGXXXGXXXGXXXXXXXXXXX

SEQ ID NO: 120044 - protein, 16 aa, Artificial sequence
  protein pattern
  Variant (2)..(2): Xaa in position 2 is Phe, Ile, Leu, Met or Val
  Variant (3)..(3): Xaa in position 3 is Ala or Gly
  Variant (6)..(7): Xaa in position 6 to 7 is any amino acid
  Variant (9)..(12): Xaa in position 9 to 12 is any amino acid
  Variant (13)..(14): Xaa in position 13 to 14 is any or no amino acid
GXXDLXXTXXXXXXRN

SEQ ID NO: 120045 - DNA, 2508 bp, Saccharomyces cerevisiae
  CDS (1)..(2508)
atgggtgaagaacataaaccacttttggacgcctcgggtgtcgaccctcgtgaggaggataaaaccgccaccgccattttaagaagaaagaagaaggacaacatgcttttggtggacgatgctatcaatgatgacaattctgtcattgctattaattctaacaccatggacaaattggaattgttccgtggtgacaccgttctcgttaagggcaagaagagaaaagatactgtcttaattgtgttgatcgatgacgaattagaagacggagcatgcaggataaaccgtgtagttcgtaacaatttacgtattaggctgggtgatttagttacaattcatccttgccccgatatcaaatacgctactagaatttctgtgttaccaattgctgatacgatcgaaggtataactggtaatcttttcgatgtttttttgaagccttattttgtggaagcctacagaccagtgaggaaaggcgaccattttgttgtcagaggcggtatgagacaagtcgaattcaaggttgtggatgtcgaacctgaagaatatgccgtcgttgctcaggatactattattcactgggaaggtgagccaatcaacagggaagatgaagaaaataatatgaatgaggtgggttacgatgatattggtggttgtcgtaagcaaatggctcaaattagggaaatggttgaactaccattgagacatcctcagttgttcaaggctatcggtatcaagccaccaagaggtgttttgatgtatggtccccctggtactggtaaaaccttgatggcaagagctgttgctaatgagaccggtgccttttttttcttaattaatggtccagaagtcatgtcaaaaatggctggtgaatcagagtctaacttaagaaaggcctttgaagaagccgaaaagaacgctccagccatcatttttatcgatgaaatcgattctatagctccaaagagagacaagactaatggtgaagttgagagaagagttgtctctcaattgttaactttaatggatggtatgaaggcaagatctaatgttgttgtcattgctgctaccaatagaccaaattcgattgatcccgctttaagaagatttggtagattcgatcgtgaagtcgacattggtatcccagatgctacaggtagacttgaagttctacgtattcacaccaagaacatgaagttggctgatgatgttgatttggaagcattggctgctgaaacacacggttacgtgggtgctgatattgcctctttgtgttctgaagctgccatgcaacagatccgtgaaaaaatggacttgatagatttagatgaagatgaaattgatgcagaggtgctcgattctttaggagtcaccatggacaacttcagattcgcattgggcaattcaaacccatctgcattgcgtgaaaccgttgttgaaagtgtcaatgttacttgggatgacgttggtggcctagatgaaatcaaggaggaattgaaggaaactgtagaatacccagtcttacatccagaccaatacacaaagtttgggttatcaccatcaaagggtgtgttgttctacggtccaccaggtacaggtaaaactttgttagcaaaagctgtagctactgaggtttctgccaactttatctcagtcaaaggtccagaattattgagtatgtggtatggtgaatcggaatctaacatccgtgatatttttgataaggcaagagcagctgcaccaaccgtcgtttttctagatgaattagactccattgccaaggcaagaggtggttccttgggtgatgctggtggtgcttcggatagagtcgtcaaccaactattaacagaaatggatggtatgaatgctaagaaaaatgtgttcgtgattggtgccaccaataggccagatcaaattgatcctgctattttaagacctggcagattggatcaattaatttatgttccattgccagatgaaaacgctagattatctattctaaatgctcaattaaggaaaacaccactagaaccagggctagagttaactgcgattgccaaggccactcaaggtttctctggtgctgatttactctatattgtgcagagggctgctaaatacgctatcaaggattctatcgaagctcacagacaacacgaagctgaaaaggaagtgaaagtagaaggtgaagacgtggaaatgacagatgagggagcaaaggctgaacaagaaccagaagtagatcctgttccatatattacaaaggagcatttcgcagaagctatgaagaccgctaaacgttctgtttcagatgctgaattgcgtcgttatgaagcatactcacagcaaatgaaagcatctagaggtcaattcagtaatttcaactttaatgacgctccattaggtactacggctacggacaatgctaacagtaataatagtgctccaagtggagcaggtgctgcatttggttctaatgcggaggaagatgatgatttgtatagttag

SEQ ID NO: 120046 - protein, 835 aa, Saccharomyces cerevisiae
MGEEHKPLLDASGVDPREEDKTATAILRRKKKDNMLLVDDAINDDNSVIAINSNTMDKLELFRGDTVLVKGKKRKDTVLIVLIDDELEDGACRINRVVRNNLRIRLGDLVTIHPCPDIKYATRISVLPIADTIEGITGNLFDVFLKPYFVEAYRPVRKGDHFVVRGGMRQVEFKVVDVEPEEYAVVAQDTIIHWEGEPINREDEENNMNEVGYDDIGGCRKQMAQIREMVELPLRHPQLFKAIGIKPPRGVLMYGPPGTGKTLMARAVANETGAFFFLINGPEVMSKMAGESESNLRKAFEEAEKNAPAIIFIDEIDSIAPKRDKTNGEVERRVVSQLLTLMDGMKARSNVVVIAATNRPNSIDPALRRFGRFDREVDIGIPDATGRLEVLRIHTKNMKLADDVDLEALAAETHGYVGADIASLCSEAAMQQIREKMDLIDLDEDEIDAEVLDSLGVTMDNFRFALGNSNPSALRETVVESVNVTWDDVGGLDEIKEELKETVEYPVLHPDQYTKFGLSPSKGVLFYGPPGTGKTLLAKAVATEVSANFISVKGPELLSMWYGESESNIRDIFDKARAAAPTVVFLDELDSIAKARGGSLGDAGGASDRVVNQLLTEMDGMNAKKNVFVIGATNRPDQIDPAILRPGRLDQLIYVPLPDENARLSILNAQLRKTPLEPGLELTAIAKATQGFSGADLLYIVQRAAKYAIKDSIEAHRQHEAEKEVKVEGEDVEMTDEGAKAEQEPEVDPVPYITKEHFAEAMKTAKRSVSDAELRRYEAYSQQMKASRGQFSNFNFNDAPLGTTATDNANSNNSAPSGAGAAFGSNAEEDDDLYS

SEQ ID NO: 120047 - DNA, 3464 bp, Oryza sativa
  CDS (725)..(3373)
gaaccggaagcctggttacggtgccgaactgcgcgctaacctagaacccacaaagggtgttggtcgattaagacggcaggacggtggtcatggaagtcgaaatccgctaaggagtgtgtaacaactcacctgccgaatcaactagccccgaaaatggatggcgctgaagcgcgcgacccacaccaggccatctgggcgagcgccatgccccgatgagtaggagggcgcggcggccgccgcaaaacccggggcgcgagcccgggcggagcggccgtcggtgcagatcttggtggtagtagcaaatattcaaatgagaactttgaaggccgaagaggagaaaggttccatgtgaacggcacttgcacatgggtaagccgatcctaagggacggggtaaccccggcagagagcgcgaccacgcgcgtgccccgaaagggaatcgggttaagatttcccgagccgggacgtggcggttgacggcgacgttaggaagtccggagacgccggcgggggcctcgggaagagttatcttttctgcttaacggcccgccaaccctggaaacggttcagccggaggtagggtccagcggccggaagagcaccgcacgtcgcgcggtgtccggtgcgcccccggcggcccttgaaaatccggaggaccgagtaccgtccacgcccggtcgtactcataaccgcatcaggtctccaaggtgaacagcctctggccaatggaacaatgtaggcaagggaagtcggcaaaacggatccgtaacttcgggaaaaggattggctctgagggctgggctcgggggtcccggccccgaacccggctcaaccaccacaactgtccaactctcgtcatgtcggaccctacgccttccaaccctccggccggcaacccgcccaagcccgaggcggccgacgacaaggatgctgctactgccatcctgcgccagaagaaatctcccaaccgccttttcgtggaagaggctaccaccgatgacaactctgtcatctgcatctcgcctgctaagatggaggagctaggcctcttccgcggcgactccaccatcgtcaaaggcaagaagcgccgtgactcttgcttcattgtcctctcggacgaatccgtcgaggatggtaaggtgcgcctcaacaaggtcgcacgtaacaacctgcgcgtgaagctcggcgatctcgtctcggtacatgcctgccatgacatcaagtacggcaagcgcatccacgttcttccctttgacgacagcatcgagggtctcaccggtaacatcttcgatgtctacctcaagccttacttccttgaggcctaccgccctgtccgcaagggcgacaccttcaccgtccgcggtggtatgcgcgcggtcgagttcaaggtcatcgagacggaccctgccgagttctgcatcgtcgcgcaggacacggtgatccacaccgagggcgatcccgtcaagcgcgaggacgaggaggccaaccttgccgatgtcggctacgacgacattggcggttgccgcaagcagatggcccagatccgtgagatggtcgagcttcccctgcgccacccacagctcttcaagtcgatcggcatcaagcctcctcgtggtgtcctcatgtacggccctccaggaaccggtaagacgctcatggcccgagccgtcgccaacgagactcgcgccttcttcttcctcatcaacggacccgagatcatgtccaagatggccggagagtccgagtccaacctgcgcaaggccttcgaggaggccgagaagaacagccctgccatcatctacatcgacgagatcgacagtatcgcgcccaagcgtgagaagaccaacggtgaggtggagcgacgtgtcgtctcgcagctcctcacgctcatggacggtctcaaggctcgatccaacattgtcgtcatggccgccaccaaccgacccaattcgatcgaccccgcacttcgtcgtttcggccgattcgaccgcgaggtcgacatcgccatccccgaccccactggccgactcgagatcctgcgcatccacaccaagaacatgaagctcgccgaagatgtcgacctcgagcagatcgccgccgagacccacggttacgttggttcggacgtggccgcgctctgctccgaggctgccatgcagcagatccgtgaaaagatggacctcatcgacctcgacgaggacacgatcgatgccgaggtgctcgactcgctcggagtcaccatggagaacttccgcttcgctctcggtgtctccaacccatcggcgctgcgcgagaccgtggtcgaggtgcccaccaccacctggaacgacattggtggtctcgagaaggtcaagcaggagctccaggagaccgtctcgtaccccgtcgagcatcccgaaaagttcctcaagtacggcatggcgccttcgaagggtgtcctcttctacggtccccctggtactggtaagacgctgctggccaaggcgatcgccaacgagtgccaggccaacttcatctcgatcaagggtcccgagctgctcaccatgtggttcggtgagtcggaggcgaacgtgcgagacgtgttcgataaggcgcgtgctgcggcgccctgtgtcatgttctttgacgagctcgacgccatcgccaaggcgcgtggctcttcgtccggcgacagcggaggagcgggtgaccgtgtgatcaaccagatcctcaccgagatggacggtgtcagctcgcgcaagaacgtcttcatcattggcgccaccaaccgaccggaccagatcgaccctgccatcctgcgtcccggacgtctggaccagctcatctacatcccgcttccagacgagccttcgcgtctgtcgattctcaaggcgacgctcaagaagtcgccgatcgccgccgacgtggacctgacgttcctggccaagcacacgcacggcttctccggtgccgatctggccgagatctgccagcgtgcagccaagctggctatccgcgagtcgatcgaggcggatattaagcgcgagcgcgaacgcatggccaccaaggaggccaacgccgagggcgaggtcaagatggaggaggacgcgactgctgccgctgaggaggaggaggacccggtgcccgagatcacgcgtgcccactttgaggaggcgatgcgtttcgcgcgcaggtccgtctcggatggcgacatccgccgctacgagctgtttgcgcagaacctgcagtcggcccgctcgttcggcacctcgttccgcttccccgagggccagaaccccggccagaccggaggcgccggcggcagcggtgctggcggcagcggcggcgctgctttcggcaacgacgacgccggcgacgacgacctgtacgcctaaaagcgttggcaggtcctagaagctcagttccaagggccagtgcccacagatttgtgttgaagagatctcaattttgatttgtgttgttctc

SEQ ID NO: 120048 - protein, 882 aa, Oryza sativa
MEQCRQGKSAKRIRNFGKRIGSEGWARGSRPRTRLNHHNCPTLVMSDPTPSNPPAGNPPKPEAADDKDAATAILRQKKSPNRLFVEEATTDDNSVICISPAKMEELGLFRGDSTIVKGKKRRDSCFIVLSDESVEDGKVRLNKVARNNLRVKLGDLVSVHACHDIKYGKRIHVLPFDDSIEGLTGNIFDVYLKPYFLEAYRPVRKGDTFTVRGGMRAVEFKVIETDPAEFCIVAQDTVIHTEGDPVKREDEEANLADVGYDDIGGCRKQMAQIREMVELPLRHPQLFKSIGIKPPRGVLMYGPPGTGKTLMARAVANETRAFFFLINGPEIMSKMAGESESNLRKAFEEAEKNSPAIIYIDEIDSIAPKREKTNGEVERRVVSQLLTLMDGLKARSNIVVMAATNRPNSIDPALRRFGRFDREVDIAIPDPTGRLEILRIHTKNMKLAEDVDLEQIAAETHGYVGSDVAALCSEAAMQQIREKMDLIDLDEDTIDAEVLDSLGVTMENFRFALGVSNPSALRETVVEVPTTTWNDIGGLEKVKQELQETVSYPVEHPEKFLKYGMAPSKGVLFYGPPGTGKTLLAKAIANECQANFISIKGPELLTMWFGESEANVRDVFDKARAAAPCVMFFDELDAIAKARGSSSGDSGGAGDRVINQILTEMDGVSSRKNVFIIGATNRPDQIDPAILRPGRLDQLIYIPLPDEPSRLSILKATLKKSPIAADVDLTFLAKHTHGFSGADLAEICQRAAKLAIRESIEADIKRERERMATKEANAEGEVKMEEDATAAAEEEEDPVPEITRAHFEEAMRFARRSVSDGDIRRYELFAQNLQSARSFGTSFRFPEGQNPGQTGGAGGSGAGGSGGAAFGNDDAGDDDLYA

SEQ ID NO: 120049 - DNA, 2882 bp, Glycine max
  CDS (194)..(2665)
acacccaccaccctctccatcacacctgcccgcctccatcacaggcgctcgttccacatcaccggcgcctttcctgccgtctcgcacgcctgtcgcctcgccggccgacagcattccaaactcgcccgtcggacttcggtgactgacatagcaacaacgagcgagacaccgctcatcacacaacaccgcaatcatgtctgcagagccagaccactccgccagcaagggtaaggtcaagctcgataatgacccatcgggcgccgagaagcgcgatgagaatgaggtcgccacagcaatcctcaagaagaagaagaagcccaacagcttgatcgtcacagacgccaccactgatgacaactcgattctcgccctctccaacaacaccatggagacgctacagctgttccgtggtgacacagtgctcgtcaagggcaagaagcgaaaggacaccgtcctcatcgtgctggccgatgacgacctcgatgacgggtcagtgcgcatgaaccgcgtcgtgagacacaacctccgcgtcaagctcggcgacgttgtcacagtcaatccatgccccgatatcaagtacgccaagcgcatcgctgtcttgcccatggccgacaccatcgagggcctcacaggctctctcttcgatgtgttcctcgcaccatacttccgtgaggcctaccgaccgcttcgacaaggcgatctcttcacagctcgcgcggctatgcgcacagtggagttcaaggtcgtcgagattgacccacccgagtacggtatcgtggcacaagacacagtcatccattgtgaaggcgagccgatccagcgagaagacgaggagggtaatctcaatgaggttggatacgacgatattggtggctgccgcaagcagatggcgcaggtgcgagagctggttgagctgccccttaggcatccacaactgttcaagtccatcggtatcaagcctccgcgtggtatcctgatgtacggacctccgggtactggtaagactctgatggcgcgagccgtcgctaacgagactggtgcattcttctttctgatcaacgggcctgagatcatgtcgaagatggctggtgagtccgagtcgaatctgcggaaggctttcgaggaggccgagaagaacagcccggccatcattttcatcgacgaaatcgactcgatcgcacccaagcgtgagaagaccaacggcgaagtcgagcgtcgtgtcgtttctcagctgctcaccctcatggacggcatgaaggctcgctcaaatgtggtcgtcatggccgccactaaccgccctaactcgatcgatcctgcccttcgccgcttcggccgcttcgatcgcgaggtcgacatcggcattcctgacccaactggtcgtctcgagattctgcaaatccacaccaagaacatgaagctcgccgacgaggtcgacctcgaaacgatcgccgccgagacgcacggttacgtgggttctgatatcgcctcgctctgctcagaagcagccatgcagcagattcgtgagaagatggacttgatcgatcttgatgaggacacaattgatgctgaggttcttgacagccttggtgtcacacaagagaacttccgcttcgccctgggcgtcagcaacccaagcgctcttcgcgaggtcgctgttgtcgaggtgccaaacgtgcggtgggaggacattggtggcctggaggacgtcaagcgcgagctcgtcgagagcgtgcaatacccagtcgaccacccagagaagttcctcaagttcggtctcagcccgtctcgcggtgtgctattctatggtccaccaggtactggtaaaacgcttcttgctaaggcggttgccaacgagtgcgccgccaacttcatctctgtcaagggtccagagctgctctccatgtggttcggagagtctgagtccaacattcgagacatcttcgacaaggctcgcgctgccgcaccatgcgtggtcttcctcgatgagctggattccattgccaaatctcgaggcggctctcagggcgatgctggcggtgccagcgatcgtgtcgtcaaccagcttctcactgagatggacggtatgaccagcaagaagaacgtgttcgttattggtgccaccaaccgacccgagcaactcgacaacgctctgtgccgtcctggtcgtctcgatactcttgtgtacgtgccacttcctgaccagccgggtcgtgagagcattctcaaggctcagctacgcaagaccccagtcgccaaggatgtcgatctctcgtacattgcctccaagacacatggcttctccggtgccgatctcggcttcatcacccagcgtgctgtcaagctggccatcaaggagagcatctcgctggccattgagaagcagaaggagcgtgaggccgcagagggcgatgacaccaagatggacgaggatgtcgatgaggaggacccagtgccagagctcacgaagcgtcacttcgaggaggccatgagcatggctcgtcgctcagtcacagacactgagattaggcggtacgaggccttcgcgcagagcatgaagaacagcgctggcggcagtgctttcttccgcttccctgaaggtggtgccgagggtgctgcggccgaggctcagcagaatggtgctggcgaagaggatctctacgattaagtacgacaagttgtggtatacaggcatggggacggaaactggttggccgcggcggattctagttttgcgtcgatgtatgcttatgatacagatgatgcggatggctcggtcagtcgttgcatgaatgaggcgatgcgcctcaccaggagctggccgttatgatagagtgtctcaatagttcgcgccctccgctggcgaaatgaagcatttgcacgat

SEQ ID NO: 120050 - protein, 823 aa, Glycine max
MSAEPDHSASKGKVKLDNDPSGAEKRDENEVATAILKKKKKPNSLIVTDATTDDNSILALSNNTMETLQLFRGDTVLVKGKKRKDTVLIVLADDDLDDGSVRMNRVVRHNLRVKLGDVVTVNPCPDIKYAKRIAVLPMADTIEGLTGSLFDVFLAPYFREAYRPLRQGDLFTARAAMRTVEFKVVEIDPPEYGIVAQDTVIHCEGEPIQREDEEGNLNEVGYDDIGGCRKQMAQVRELVELPLRHPQLFKSIGIKPPRGILMYGPPGTGKTLMARAVANETGAFFFLINGPEIMSKMAGESESNLRKAFEEAEKNSPAIIFIDEIDSIAPKREKTNGEVERRVVSQLLTLMDGMKARSNVVVMAATNRPNSIDPALRRFGRFDREVDIGIPDPTGRLEILQIHTKNMKLADEVDLETIAAETHGYVGSDIASLCSEAAMQQIREKMDLIDLDEDTIDAEVLDSLGVTQENFRFALGVSNPSALREVAVVEVPNVRWEDIGGLEDVKRELVESVQYPVDHPEKFLKFGLSPSRGVLFYGPPGTGKTLLAKAVANECAANFISVKGPELLSMWFGESESNIRDIFDKARAAAPCVVFLDELDSIAKSRGGSQGDAGGASDRVVNQLLTEMDGMTSKKNVFVIGATNRPEQLDNALCRPGRLDTLVYVPLPDQPGRESILKAQLRKTPVAKDVDLSYIASKTHGFSGADLGFITQRAVKLAIKESISLAIEKQKEREAAEGDDTKMDEDVDEEDPVPELTKRHFEEAMSMARRSVTDTEIRRYEAFAQSMKNSAGGSAFFRFPEGGAEGAAAEAQQNGAGEEDLYD

SEQ ID NO: 120051 - DNA, 2712 bp, Zea mays
  CDS (104)..(2536)
acgcgggccgcatctcgcattctcgccggtgctgctgcaattaacgccgcctccggccaaccacccgaaacctacctccgccgccgtcgtcgccaccgtcaacatggcgagccaaggggagccctcggcctctgcttccgatccgaaggagaagaaggactactcgacggcgatactagagaggaaaaagtcaccgaaccgccttgtcgtcgacgaggccaccaacgacgataactccgtcgtcgcactgcaccctgacaccatggagaggctgcagctcttccgcggcgatactgtgctcctcaagggtaagaagaggaaagacactgtttgcattgtccttgcggatgaaacctgtgaggagccaaaggttcggatgaacaaggttgtccgccagaacctgagggtgaggcttggtgatgtggtttctgtccaccagtgccaggatgtgaaatatgggaagcgtgtgcacattcttccaattgatgatacagttgaaggcattacagggaacctgtttgatgccttcttgaaaccatacttcctagaagcatacaggcccgtgaggaaaggagacctcttccttgtcaggggtggaatgagaagcgtggaattcaaagtgatagagactgacccttctgaatattgtatcgttgccccagatactgaaatattttgtgatggggagcctattaagagagaggatgaggagcgtcttgatgaagttggttatgatgatgttggtggagttagaaagcaaatggcccaaatcagagagcttgttgagcttccactacgccatcctcagcttttcaaatctattggtgtgaagccaccaaagggcatattgctgtatgggccacctggttctggaaagactcttattgctcgtgctgttgctaatgagactggagcctttttctttctgatcaatggcccagagattatgtcgaagttagcaggagagagtgagagcaatctcagaaaggcatttgaagaagcagagaagaatgctccatctatcattttcattgatgaaattgattccattgcacccaagagagaaaagaccaatggagaagtagaacgtcgtattgtttcacagctactgactcttatggatggactcaaatctcgttcccatgttattgttatgggtgctacaaaccggccaaacagcatcgatcctgctcttagaagatttggaaggtttgaccgggaaattgacattggagttcctgatgaagttggccggcttgaggttctccgtattcacactaagaacatgaagctagctgaagatgttaatttggaactcatttcaaaggatacccatggatacgttggtgctgatcttgctgctctttgtactgaggctgctcttcagtgcattcgtgagaagatggacatcatagatcttgaggatgagacaatagatgcagagatattgaactcgatggctgttacaaatgaccatttcaagactgcgcttggaacaagcaacccatctgctctccgtgaaactgttgttgaagtcccaaatgtctcttgggaggatattggtgggctggagaatgtcaagagggagctccaggagactgttcaatatcctgtggaacatccagagaagttcgagaagtttggcatgtctccatccaaaggagttctgttttatggtcctcctggttgtggtaaaaccttgttggcgaaggcaattgccaacgagtgccaggctaacttcatcagtgtcaagggtcctgaattgcttaccatgtggtttggtgagagtgaagccaacgtccgcgaaatttttgataaggctcgccaatctgctccttgtgtcctcttctttgatgagcttgactcaattgcgacgcagagaggaagtagtgtgggtgatgctggaggcgcggctgatagagtgcttaatcagctactgaccgagatggatggcatgaacgccaagaaaactgtgtttattattggtgctacaaacaggcctgacatcattgatcctgctcttctgaggccagggcgtcttgaccagctgatctacattccactgcctgatgagcagtctaggctccagatcttcaaggcctgcctaaggaagtcccctgtggcaaaggatgtggacctgaatgctcttgctaagtacacacaagggttcagtggagcagatatcacagaaatttgccagcgtgcgtgcaaatatgcaatcagagagaacattgagaaggacattgagagggaaaggcggatgaaggacaaccctgaggcgatggaggaagatgaagtggacgagattgccgagatcaaagcagctcacttcgaggagtctatgaagtatgctcggcgcagtgtcagtgatgctgatatccgcaagtaccaggcgttcgcccagacgttgcagcagtcccgtgggttcggcagcgagttccgcttctcagagcagtcggcgacagctggtgctgctgcagccgatccgtttgcttcggctggtgctgcggctgacgatgacgatctatacagctaggtgtcctgttgggttggttctgggttgtgcaatatcagtctcatcagtcatctgtttaaaactctgattatacttagacacgggatgtcatgcaatgatatttgttttccgtacatttggacgttgagataatgcctgtttattttaaaaaaaaaaaaaaaaaaaaaaaaaaaaaa

SEQ ID NO: 120052 - protein, 810 aa, Zea mays
MASQGEPSASASDPKEKKDYSTAILERKKSPNRLVVDEATNDDNSVVALHPDTMERLQLFRGDTVLLKGKKRKDTVCIVLADETCEEPKVRMNKVVRQNLRVRLGDVVSVHQCQDVKYGKRVHILPIDDTVEGITGNLFDAFLKPYFLEAYRPVRKGDLFLVRGGMRSVEFKVIETDPSEYCIVAPDTEIFCDGEPIKREDEERLDEVGYDDVGGVRKQMAQIRELVELPLRHPQLFKSIGVKPPKGILLYGPPGSGKTLIARAVANETGAFFFLINGPEIMSKLAGESESNLRKAFEEAEKNAPSIIFIDEIDSIAPKREKTNGEVERRIVSQLLTLMDGLKSRSHVIVMGATNRPNSIDPALRRFGRFDREIDIGVPDEVGRLEVLRIHTKNMKLAEDVNLELISKDTHGYVGADLAALCTEAALQCIREKMDIIDLEDETIDAEILNSMAVTNDHFKTALGTSNPSALRETVVEVPNVSWEDIGGLENVKRELQETVQYPVEHPEKFEKFGMSPSKGVLFYGPPGCGKTLLAKAIANECQANFISVKGPELLTMWFGESEANVREIFDKARQSAPCVLFFDELDSIATQRGSSVGDAGGAADRVLNQLLTEMDGMNAKKTVFIIGATNRPDIIDPALLRPGRLDQLIYIPLPDEQSRLQIFKACLRKSPVAKDVDLNALAKYTQGFSGADITEICQRACKYAIRENIEKDIERERRMKDNPEAMEEDEVDEIAEIKAAHFEESMKYARRSVSDADIRKYQAFAQTLQQSRGFGSEFRFSEQSATAGAAAADPFASAGAAADDDDLYS

SEQ ID NO: 120053 - DNA, 2418 bp, Bombyx mori
  CDS (1)..(2418)
atggcagataataaaagccctgatgatttatcgaccgcgatcctccgtcgcaaggacagacccaaccgtctcattgtcgaagaagcagtcagcgatgacaactcagtcgtggcactttcacaggccaaaatggagcaacttcaactcttccgtggtgacacagtcttgctcaagggcaaacgccgcaaggaaaccgtttgcatcgtgctctcagacgataattgccctgatgagaaaattcggatgaaccgtgttgtgagaaacaaccttcgtgtgcgtctttctgatgtggtatccatcgctccgtgtccttcagtgaaatatggaaaacgagtccacatactgccaattgatgattcagttgagggtcttactggcaatctattcgaagtatacttgaagccgtacttcatggaggcttaccgtccgatccatcgtgacgacaccttcatggtccgcgggggcatgcgcgccgtcgagttcaaagtggtcgaaacagatccatcaccattttgcatcgtggctcctgataccgtaatacactgtgacggtgaaccgattaaacgtgaggaagaagaggaagcactaaatgctgtcggctatgatgacatcggcggttgtcgcaaacaactggcgcaaattaaggagatggtggagttgccactgcgtcatccttcactgttcaaggctattggagtgaagcctccacgcggcattctcatgtatgggccgcctggtaccggaaaaacactcattgctcgtgctgttgctaatgaaacaggagctttcttctttttaattaatggaccggagatcatgtctaagctggcgggagaatcggagtcaaacctccgtaaggcgtttgaggaagccgacaagaactctccggctattatcttcattgatgaactcgatgctattgcaccaaagagagagaaaacccacggtgaagtggaaagacgtatcgtttcacagttattgacgcttatggatggcatgaagaagtcgtcccacgtgatcgtgatggcggccacgaaccggccgaactccatcgacccggcgctgcggcgcttcgggcggttcgaccgcgagatcgacatcggcatccccgacgcgaccggccgcctcgagatcctgcgcatacacaccaagaacatgaagctaggagacgacgtcgatctagaacagatcgcagcagagtctcacggtcacgtgggcgctgatctcgcgtctctgtgctcggaggcagccttgcagcagattcgtgagaagatggatctcattgacctcgaggacgatcagattgacgcagaggttctcaattctctggctgtctccatggataacttccggtacgcaatgacgaaatcgtctccgtcggcgttacgtgagacagtggtggaagttcccaacgtgacgtggaccgacatcggcgggctggagggagtgaagcgtgaactccaagaactcgtgcagtatccggtcgaacatcccgacaaattcctgaagttcggcatgcagccttcgcgcggtgttctcttctacggacctcctggttgtggtaaaactttgctggcaaaggccatcgccaacgagtgtcaggctaactttatatcagtgaagggaccagagctgctcaccatgtggttcggcgagtccgaggcgaacgtacgcgacatcttcgacaaggctcgatcggcatctccgtgcgtgttgttcttcgacgagctggactccatcgccaagtcgcgcggcggctccgtgtcggacgcgggcggggcggcggaccgcgtcatcaaccagatcctcaccgagatggacggcatgggcgccaagaagaacgtcttcatcatcggtgccacaaacagaccggacatcatcgacccggccatcctgcgtcccggccgtctggaccagctcatctacatcccgctgccggacgagaagtcccgcgaggccatcctgcgcgccaaccttcgcaaatcgcctatcgctaaggacgttgacttgtcttacatcgccaaggtgacgcaaggcttcagtggcgctgacctgacggagatatgccagcgagcctgcaagctggccattcgccaggccatcgaggcggagatccatcgcgagaggagtcgccagcagcaagccgccgctgccgttatggacatggacgaggaagaccccgttccggagattagccgcgctcacttcgaggaggcgatgaagttcgcgcgccgctccgtgtccgacaacgacatccgcaagtacgagatgttcgcgcagaccctgcagcagagccgcggcttcggaaccaacttcagattcccaacaaacgcgggagctacagggggcacgggtacttcagcgggcgaccagcccacgttccaggaggaggggggtgacgacgacctgtacagctaa

SEQ ID NO: 120054 - protein, 805 aa, Bombyx mori
MADNKSPDDLSTAILRRKDRPNRLIVEEAVSDDNSVVALSQAKMEQLQLFRGDTVLLKGKRRKETVCIVLSDDNCPDEKIRMNRVVRNNLRVRLSDVVSIAPCPSVKYGKRVHILPIDDSVEGLTGNLFEVYLKPYFMEAYRPIHRDDTFMVRGGMRAVEFKVVETDPSPFCIVAPDTVIHCDGEPIKREEEEEALNAVGYDDIGGCRKQLAQIKEMVELPLRHPSLFKAIGVKPPRGILMYGPPGTGKTLIARAVANETGAFFFLINGPEIMSKLAGESESNLRKAFEEADKNSPAIIFIDELDAIAPKREKTHGEVERRIVSQLLTLMDGMKKSSHVIVMAATNRPNSIDPALRRFGRFDREIDIGIPDATGRLEILRIHTKNMKLGDDVDLEQIAAESHGHVGADLASLCSEAALQQIREKMDLIDLEDDQIDAEVLNSLAVSMDNFRYAMTKSSPSALRETVVEVPNVTWTDIGGLEGVKRELQELVQYPVEHPDKFLKFGMQPSRGVLFYGPPGCGKTLLAKAIANECQANFISVKGPELLTMWFGESEANVRDIFDKARSASPCVLFFDELDSIAKSRGGSVSDAGGAADRVINQILTEMDGMGAKKNVFIIGATNRPDIIDPAILRPGRLDQLIYIPLPDEKSREAILRANLRKSPIAKDVDLSYIAKVTQGFSGADLTEICQRACKLAIRQAIEAEIHRERSRQQQAAAAVMDMDEEDPVPEISRAHFEEAMKFARRSVSDNDIRKYEMFAQTLQQSRGFGTNFRFPTNAGATGGTGTSAGDQPTFQEEGGDDDLYS

SEQ ID NO: 120055 - DNA, 2430 bp, Oryza sativa (japonica cultivar-group)
  CDS (1)..(2430)
atggcgagccagggagagccctcctcctcctccgatccgaaggggaagaaggatttctcgacggcgatcctcgagaggaagaagtcgccgaaccggctggtggtcgacgaggccaccaacgatgataactccgtcatcgggatgcaccccgacaccatggagaagctccagcttttccgcggcgacactgtgctgctcaagggtaagaagagaaaagacaccatctgcattgttcttgctgatgacacctgcgaggagccgaagatcagaatgaacaaggttgtcaggaagaacctgagagtacgacttggtgatgtcgtgtctgttcatcaatgcccagatgtcaaatacggcaagcgtgtgcacatacttccaattgatgatactgttgagggcatcaccggaaacttgtttgatgccttcctgaaaccgtacttccttgaagcataccgtcctttgaggaaaggagaccttttccttgttaggggtgggatgagaagtgttgaattcaaagttatagagactgaccctgcagagtactgcattgttgcacctgatacggagatattctgtgatggtgagcctattaagagggaggatgaggaaagacttgatgaagttggttacgatgatgttggtggagttaggaagcagatggcccaaatcagagaacttgttgagctcccattgcgccatccccaacttttcaagtctattggtgtgaagcctccaaagggcatactgctttatggaccccctggctctggaaagaccctcattgctagagctgttgctaatgaaacaggtgctttcttctttctgattaatggcccggagattatgtcaaagctagcaggagaaagtgagagtaatctcaggaaggcatttgaagaagctgagaagaatgcaccatcaatcattttcatcgatgagatagactccatagcaccaaagagagagaagacccatggagaagttgagaggcgcatcgtttcacagctgttgactcttatggatgggctcaaagctcgttcccatgtcattgtcatgggtgctacaaaccggccaaacagtattgatcctgctctcagaaggtttggtaggttcgatcgggagattgacattggtgttcctgatgaagttgggcggcttgaagttcttcggattcacaccaaaaacatgaagctggctgaagatgttgacctggaacacattgccaaagacactcatgggtatgtgggtgctgatcttgctgctctttgcactgaggctgctctccaatgcatccgtgagaagatggatattatagatcttgaggatgagaccatagatgctgagatacttaactcgatggctgttacaaatgatcacttcaagactgcactagggacaagcaacccgtctgctctccgtgaaactgttgttgaagttccaaatgtctcttgggaggatattggtggactggagaatgtcaaacgggagctgcaggagactgtccaatatccagtggagcatcctgagaaatttgagaagtttggcatgtctccgtccaaaggtgttctgttctatggccctcctggctgtggtaagactttgttggccaaggcaattgctaacgagtgccaggctaacttcattagtgtcaagggacctgagctgcttaccatgtggtttggtgagagtgaggccaatgtgcgtgagatttttgacaaggctaggcagtcagctccttgtgtcctcttctttgatgagcttgactcaattgctacccagagaggaagcagtgttggtgatgccggaggtgctgctgatagagtgctgaaccagttgttgactgagatggacggcatgaacgcgaagaaaaccgtgttcattattggtgctactaacaggccagatatcattgaccctgccttgctaaggccagggcgtcttgatcagcttatctacattcctctgcctgatgatcaatctaggctgcagatcttcaaagcttgcctccggaagtcacctgtggccaaggatgtagacctgaatgctcttgccaaatacacccaaggtttcagtggtgctgatattacagaaatctgccagcgtgcatgcaaatacgccatcagagagaacattgaaaaggacatcgagatggagaagcggaggaaggacaaccctgaagccatggaggaggacgaggttgatgatattgctgagatcaaggcggctcacttcgaggagtcgatgaagtacgcacgccggagtgtgagtgacgccgacatccgcaagtaccaggccttcgcccagactctgcagcagtctcgtgggttcggcaccgagtttaggttcgctgaccagccagcgtctggcgccggcgccgccgctgaccccttcgcatccgctgccgccgcagctgacgatgatgatttatatagttag

SEQ ID NO: 120056 - protein, 809 aa, Oryza sativa (japonica cultivar-group)
MASQGEPSSSSDPKGKKDFSTAILERKKSPNRLVVDEATNDDNSVIGMHPDTMEKLQLFRGDTVLLKGKKRKDTICIVLADDTCEEPKIRMNKVVRKNLRVRLGDVVSVHQCPDVKYGKRVHILPIDDTVEGITGNLFDAFLKPYFLEAYRPLRKGDLFLVRGGMRSVEFKVIETDPAEYCIVAPDTEIFCDGEPIKREDEERLDEVGYDDVGGVRKQMAQIRELVELPLRHPQLFKSIGVKPPKGILLYGPPGSGKTLIARAVANETGAFFFLINGPEIMSKLAGESESNLRKAFEEAEKNAPSIIFIDEIDSIAPKREKTHGEVERRIVSQLLTLMDGLKARSHVIVMGATNRPNSIDPALRRFGRFDREIDIGVPDEVGRLEVLRIHTKNMKLAEDVDLEHIAKDTHGYVGADLAALCTEAALQCIREKMDIIDLEDETIDAEILNSMAVTNDHFKTALGTSNPSALRETVVEVPNVSWEDIGGLENVKRELQETVQYPVEHPEKFEKFGMSPSKGVLFYGPPGCGKTLLAKAIANECQANFISVKGPELLTMWFGESEANVREIFDKARQSAPCVLFFDELDSIATQRGSSVGDAGGAADRVLNQLLTEMDGMNAKKTVFIIGATNRPDIIDPALLRPGRLDQLIYIPLPDDQSRLQIFKACLRKSPVAKDVDLNALAKYTQGFSGADITEICQRACKYAIRENIEKDIEMEKRRKDNPEAMEEDEVDDIAEIKAAHFEESMKYARRSVSDADIRKYQAFAQTLQQSRGFGTEFRFADQPASGAGAAADPFASAAAAADDDDLYS

SEQ ID NO: 120057 - DNA, 2547 bp, Oryza sativa (japonica cultivar-group)
  CDS (1)..(2547)
atggccgacgccgacgtctcttcctccaagacgacgacggcgagggattacagcacggcgatcctggagtgcgccaagaagaagtccccgaaccggctgatggcggacgacgccgagggcggggtggccgtcgacaactccacggtgacgctcagcgaggcgaccatggaggagctcggcatcttccgcggcgacctggtgaccctccgcgggaggcggcgccgcgaggccgtctgctacgcgcagaaggacgagtcgtgccccgacggccgcctccgcctcagccgcggcgtccgcagcaacctccacgtccgcctcggcgacctcgtcaccgtcaagccgtgccccaccattaggaacgccaagagggtgcagctccgccccttcgacgactctgtcgagggcatctccggtgatctgttcgagccctacctcaaaccgtacttcatggatgcgttgcggccggtgaagaagggcgaccggttcctggtgcgcggccacatgcacgccgtggagttcaaggtgatggacacggagccgaacaacgagcccgtgatcgtggcgggcgacacggagatcttctgcgacgagggcgacccggtgaagcgcgaggacgaggagcggctcgacgggccgggctacgacgacgtcggcggcgtccgcaagcagctggcgcagatcagggagctcgtcgagctgcccctgcgccaccccaagctgttccagacgctcggcgtgcgcccgcccaagggcatcctcctctacgggccccccggcaccggcaagacgctgcttgcgcgcgccatcgccgccgagtccggcgcccacttcgtcgtcgtcaacgggccggagatcatgtccgggatgcccggcgagagcgaggccaacctgcgcgccgtgttcgccgaggcggacgccgcggcgccgtccatcgtgttcatggacgagatcgactccatcgcgcccagccgcgagaaggcgcacggcgaggtggagcgccgcgtcgtgtcgcagctgctcacgctcatggacggcctccgcccgcgggcccaggtgatcgtcatcggcgccaccaaccgccccaacagcctcgacccggcgctccgccgcttcggccgcttcgaccgcgagctcgacatcggcgtccccgacgagctcggccgcctcgagatcctccgcatccacaccaagaacatgccgctctccgacgacgtcgacctcgagcgcgtcggcaaggacacccacgggttcgtcggctccgacctcgcctcgctctgctccgaggccgccatgcagtgcatccgggagaagctggacatcatcgacatcgagaacgacaccatcgacgtggagatcctcaactcgctgaccgtcaccatggaccacctcaagttcgccatggaggtcaccaagccctccgccctgcgcgagaccgggatcgtcgaggtgcccaaggtgtcgtgggacgacatcggcggcctgggcgaggtcaagcgcgagctccaggagacggtgcagtacccggtggagcacccggagatgttcgacctgtttggcatgtcgccgtcgcgcggcgtgctcttctacggcccgccggggtgcggcaagacgatgatggccaaggccatcgccaaggagtgcaaggccaacttcatcagcatcaaggggcccgagctgctcaccatgtggttcggcgagagcgagggcaacgtccgcaacctgttcgacaaggcgcggcagtcggcgccgtgcatcctcttcttcgacgagctcgactccatcgccgtcaagcgcggcaacagcgtcggcgacgccggcggcacgccggaccgcgtgctcaaccagctgctcaccgagatggacggcatcaacgccaagaagacggtgttcgtcatcggcgccaccaaccggccggacatcatcgacccggcgatgctccggccgggccgcctcgaccagctcatctacatcccgctcccggacgcctcgtcgcggctggagatcttcagggcgaacctccgcaaggcgcccatgtcccgccacgtcgacctgccggccatggccgcctccaccgacgggttcagcggcgccgacatcaaggagatctgccagcgcgcgtgcaagctcgcggtgcgcgaggtggtccagaagagcaccctggtcgggaaggccctggcaatggcgggcgcggagctcaccgtggaccacttcaagagcgccatgaagcacgcaaggaagagcgtcagcgagctcgacgtcatcaagtacgagtacttcaagcacaagttcagcggcggcatccccgacgaggaggaggcgccggcgacggagccggagctgccggtgggacagctgaggttggtggcgaagccgaagacgaagacgaaggcggagctagaagcagaggcggaggctgcggcaaaagcgaaggcggaggcagaggcgaaggcgaaagcaaagctgaaggggaaggcggtggccgtggatgacgacgacgacgactctacgtactccatggattcgatggacgaggacttgctgtattag

SEQ ID NO: 120058 - protein, 848 aa, Oryza sativa (japonica cultivar-group)
MADADVSSSKTTTARDYSTAILECAKKKSPNRLMADDAEGGVAVDNSTVTLSEATMEELGIFRGDLVTLRGRRRREAVCYAQKDESCPDGRLRLSRGVRSNLHVRLGDLVTVKPCPTIRNAKRVQLRPFDDSVEGISGDLFEPYLKPYFMDALRPVKKGDRFLVRGHMHAVEFKVMDTEPNNEPVIVAGDTEIFCDEGDPVKREDEERLDGPGYDDVGGVRKQLAQIRELVELPLRHPKLFQTLGVRPPKGILLYGPPGTGKTLLARAIAAESGAHFVVVNGPEIMSGMPGESEANLRAVFAEADAAAPSIVFMDEIDSIAPSREKAHGEVERRVVSQLLTLMDGLRPRAQVIVIGATNRPNSLDPALRRFGRFDRELDIGVPDELGRLEILRIHTKNMPLSDDVDLERVGKDTHGFVGSDLASLCSEAAMQCIREKLDIIDIENDTIDVEILNSLTVTMDHLKFAMEVTKPSALRETGIVEVPKVSWDDIGGLGEVKRELQETVQYPVEHPEMFDLFGMSPSRGVLFYGPPGCGKTMMAKAIAKECKANFISIKGPELLTMWFGESEGNVRNLFDKARQSAPCILFFDELDSIAVKRGNSVGDAGGTPDRVLNQLLTEMDGINAKKTVFVIGATNRPDIIDPAMLRPGRLDQLIYIPLPDASSRLEIFRANLRKAPMSRHVDLPAMAASTDGFSGADIKEICQRACKLAVREVVQKSTLVGKALAMAGAELTVDHFKSAMKHARKSVSELDVIKYEYFKHKFSGGIPDEEEAPATEPELPVGQLRLVAKPKTKTKAELEAEAEAAAKAKAEAEAKAKAKLKGKAVAVDDDDDDSTYSMDSMDEDLLY

SEQ ID NO: 120059 - DNA, 2436 bp, Archaeoglobus fulgidus DSM 4304
  CDS (1)..(2436): transl_table=11
atgggtgataatatggaaatcacgctaaaggtaaatcaggcgtatccgagtgattcaggaagaggaatagcaagattggacccggacacaatgttaaagcttcaaatctcccccggagacataatagaaatagagggggccagaaagaccgttgcaaaggtctggagagctccgaagagggactgggggaagaacatcataaggattgacagattcataagggagaatgccggagttggtgttggggatgtcgtcaaggttaggaaggttgagtaccagcccgcaaaaaccgtaatcctcgcccccctcaagaagatggatttgaggatttacggagtcgatattggggagtatctcaagcaccagtttctgaaaagaccggttgttgaaggagatttagtccctctcgttggctctccggccctttcgggatttggaaggtacaaccagcagaaccaagctgtggttttcgttgcagtcaagaccgagcccaagggccctgtggtcatcgacgagacaaccaaggtcgtttacagggacagaccggcaaagggcttcgagaggttcggaaaggccggaatcacttacgaagacataggaggtttaaaagaggagcttcagaaggtaagagaggtcatagagctgcctttaaggtatccggagctcttccagaggctcggaatcgagccgccgaagggtgtgctgctctacggtccgccgggaactggaaaaacgttgattgccaaagctgtggcgaacgagatcggggccagcttcttcaccatcaacggtccggaaatcatgagcaagttctatggagaaagcgagcaaaggctgagggagatttttgaagaggcgaaggagaacgctccgtcgataatcttcatagacgaaatcgactcaatcgctcctaagagagaagaggtcaccggagaagttgagagaagagtcgtcgctcagcttctgactctgatggacgggcttgaggagagagggcaggttatagtcatcggcgcaacgaacagaattgacgctgtcgatccagcgttgagaaggccgggaaggttcgacagggagattgagatcggagtgccggacagagagggcagatacgagatattccagatacacacgaggaacatgccactggaggctaagtacagcagagagttcgtcctcgatgcgattgagagattcaagaggcaggttgacgaccctgagctgataaagaatctcgatttcctctacgacgagataaagaactcagagacggaggaggaagtgaaaggagctgtgaaaaatctcctcccgcaggaagtaatcgacgagcttgaagttgagataactaaggcgatgctccgcagccttgctgatcaaacccacggatttgttggggcagacatagaggctctctgcaaggaggctgcaatgaaggctcttaggaggtacctgccgcagattgacctcaacgaggacgagattccgatagagctgctcgaatcgatcagagtgacatgggacgacttcatggatgctctcagagaaattgagccctctgcgatgagggaagttttcgttgagatacccaaggtcacctggaacgacgttggagggcttgaggacgttaagagggagataattgaggctgtggagtggccgctgaagtaccctgagaagttcaagaagttcggaattaagccgccgaaaggtgtgctgctctacggtccgccgggaactggtaaaacgctgattgccaaagctgttgccaacgaaagtgaggcgaacttcataagcatcaagggagggcagattctaagcaagtggctcggagagagtgagaaggctgtgaggaagatattcaggaaggcgaggcaggttgcaccctgtataatcttcttcgacgaaatcgatgcaatagcccaaatgagaggcatagacgaaggaagtagagcagttgagagggtgctcaaccagcttctgactgagatggacggtctcgaggagttgcacggagttgtagttattggcgcaaccaaccgcccggacattctcgaccccgcattgctcaggccgggcagattcgacagaatggtttacgtccgcccaccggacaaaaagagcagactggcaatattcaagattcacacgagggacatgcccctctccgaagacgttgacctcgaggagcttgctgatttgaccgaagggtacgttggagcggacatcgaggcgatttgcagagaggctgtgatgctggcaatcagggaaaacatcaacgcggagaaggtggagatgaggcacttccttgaggctctgaagaagataaagccgagcgtcaacgaggccatgctgaacttctacgagagattcgaggagaaaatgaggaccgagagaatgcaggttgcagcaacaaagcccttcatgggctacggttaa

SEQ ID NO: 120060 - protein, 811 aa, Archaeoglobus fulgidus DSM 4304
MGDNMEITLKVNQAYPSDSGRGIARLDPDTMLKLQISPGDIIEIEGARKTVAKVWRAPKRDWGKNIIRIDRFIRENAGVGVGDVVKVRKVEYQPAKTVILAPLKKMDLRIYGVDIGEYLKHQFLKRPVVEGDLVPLVGSPALSGFGRYNQQNQAVVFVAVKTEPKGPVVIDETTKVVYRDRPAKGFERFGKAGITYEDIGGLKEELQKVREVIELPLRYPELFQRLGIEPPKGVLLYGPPGTGKTLIAKAVANEIGASFFTINGPEIMSKFYGESEQRLREIFEEAKENAPSIIFIDEIDSIAPKREEVTGEVERRVVAQLLTLMDGLEERGQVIVIGATNRIDAVDPALRRPGRFDREIEIGVPDREGRYEIFQIHTRNMPLEAKYSREFVLDAIERFKRQVDDPELIKNLDFLYDEIKNSETEEEVKGAVKNLLPQEVIDELEVEITKAMLRSLADQTHGFVGADIEALCKEAAMKALRRYLPQIDLNEDEIPIELLESIRVTWDDFMDALREIEPSAMREVFVEIPKVTWNDVGGLEDVKREIIEAVEWPLKYPEKFKKFGIKPPKGVLLYGPPGTGKTLIAKAVANESEANFISIKGGQILSKWLGESEKAVRKIFRKARQVAPCIIFFDEIDAIAQMRGIDEGSRAVERVLNQLLTEMDGLEELHGVVVIGATNRPDILDPALLRPGRFDRMVYVRPPDKKSRLAIFKIHTRDMPLSEDVDLEELADLTEGYVGADIEAICREAVMLAIRENINAEKVEMRHFLEALKKIKPSVNEAMLNFYERFEEKMRTERMQVAATKPFMGYG

SEQ ID NO: 120061 - DNA, 2238 bp, Thermoplasma volcanium GSS1
  CDS (1)..(2238): transl_table=11
atggataacagcagcggtataatactcagggttgccgaggcaaactcaacagatccaggcatgtctagggttaggcttgatgaatcgtctaggcgcctgctcgatgccgagatcggcgatgtagtagagatcgagaaggccagaaaaactgtaggcagggtatacagggccaggccggaggacgagaacaaggggatagtaaggatagacagtgtaatgaggaataactgcggcgcttccataggggataaggtaagggtcagaaaagtaaggacagagatagccaagaaagtaacgcttgcacccataatacgtaaagatcaacgcttaaaatttggcgaaggcatagaggaatacgtccaaagggcgcttataagaaggccaatgctcgaacaggacaacataagcgtcccaggtttaacgcttgcaggccaaaccggacttttatttaaggttgtaaaaactatgcctggcaaggtaccagttgaaatcggagaagagacaaagatagagataagggaggaacctgcctctgaagtattggaggaggtatctagggttagttatgaagatataggaggtctctcagaacagctgggcaagatcagggagatgatcgagcttccattaaagcatcctgaactattcgaaaggctgggcattacacctccaaagggtgttatactatatgggcctcctggaactggaaaaacccttattgctagagctgttgcaaatgaatctggggccaatttcctgtccataaacggaccggagataatgagtaagtactatgggcagagcgagcaaaagctgagagagatattctcaaaggcagaagaaacagccccatctataatattcatagatgaaatagattcgattgcacccaagagggaagaggtacagggggaggtcgaaagaagagtagttgcacaactccttactttgatggacggtatgaaggaacgcggtcacgtaatagtcataggtgcaaccaacaggatagacgcagtggatccagcgctgagaaggccaggaaggttcgacagagagatcgaaataggagttccagaccgcaatggcagaaaggaaatcttaatgatacataccagaaacatgcctctaggcatggacgaggagcagaaaaacaagttccttgaggaaatggctgactacacctatggatttgtaggagctgatcttgccgccctcgtaagggagagtgcaatgaacgccctaaggaggtatctaccggaaatcgacctagataagccgatacctacagaaatattggaaaaaatggttgttactgaagaagactttaagaatgcattgaagaacattgaaccaagcagcctcagagaggtaatggtcgaagtgcctaacgtacactgggatgacataggcggtctcgaagatgttaagagggaggtaaaggaaactgtagaattgccgcttctaaagccagatgtgtttaagagattaggaataaggccgtcgaaaggtttcttgttatacggtccgcccggagttggaaagacgctgttggccaaggcggttgccacagagagcaacgctaactttatatctattaagggcccggaggtattaagcaagtgggtaggagagagcgagaaggctataagggaaatattcaagaaagcaaagcaagtcgcccctgctatagtattcctcgatgaaatagattctatagcgccaaggagaggtacgacaagcgactcaggcgtcactgaaaggatagttaatcaactcctaacatcgctcgatggcatagaggttatgaacggagttgtagccattggggccacgaataggccggatataatggatccagcactgcttagggctggaagatttgataaacttatctacataccgccaccggacaaggacgcacgcctcagcatattaaaggtacataccaaaaatatgccgctcgcgccggatgtcgatctggacagcattgcccaaaggacagagggctacgtgggtgcagaccttgagaacctatgcagggaagcaggtatgaatgcctatcgagagaacccagatgcaactcaggtttcacagaagaactttattgatgcccttaagactataaggccatccatagatgaagaagtaataaagttctacaagagcatcagcgaaaccatgggcaaatcggtatcggaaaagaggaaggagcttcaggatcagggactgtatctgtga

SEQ ID NO: 120062 - protein, 745 aa, Thermoplasma volcanium GSS1
MDNSSGIILRVAEANSTDPGMSRVRLDESSRRLLDAEIGDVVEIEKARKTVGRVYRARPEDENKGIVRIDSVMRNNCGASIGDKVRVRKVRTEIAKKVTLAPIIRKDQRLKFGEGIEEYVQRALIRRPMLEQDNISVPGLTLAGQTGLLFKVVKTMPGKVPVEIGEETKIEIREEPASEVLEEVSRVSYEDIGGLSEQLGKIREMIELPLKHPELFERLGITPPKGVILYGPPGTGKTLIARAVANESGANFLSINGPEIMSKYYGQSEQKLREIFSKAEETAPSIIFIDEIDSIAPKREEVQGEVERRVVAQLLTLMDGMKERGHVIVIGATNRIDAVDPALRRPGRFDREIEIGVPDRNGRKEILMIHTRNMPLGMDEEQKNKFLEEMADYTYGFVGADLAALVRESAMNALRRYLPEIDLDKPIPTEILEKMVVTEEDFKNALKNIEPSSLREVMVEVPNVHWDDIGGLEDVKREVKETVELPLLKPDVFKRLGIRPSKGFLLYGPPGVGKTLLAKAVATESNANFISIKGPEVLSKWVGESEKAIREIFKKAKQVAPAIVFLDEIDSIAPRRGTTSDSGVTERIVNQLLTSLDGIEVMNGVVAIGATNRPDIMDPALLRAGRFDKLIYIPPPDKDARLSILKVHTKNMPLAPDVDLDSIAQRTEGYVGADLENLCREAGMNAYRENPDATQVSQKNFIDALKTIRPSIDEEVIKFYKSISETMGKSVSEKRKELQDQGLYL

SEQ ID NO: 120063 - DNA, 2388 bp, Pyrococcus abyssi GE5
  CDS (1)..(2388): transl_table=11
atggcagagaagaaggaggtcaaacttaaggtagcttccgcttatcaaagggacgttggtaggggaattgtcaggttagatagaaaaactatgagagagctaggaatctccccaggagatgtcgttgagataatcggaacaaagaacacggcagcgatagcctggccagcctatccagaggatgaagggctaggaataataagaatggacggaactatcagaaagaatgcaggagtagggcttggagacgaggttactgttaggaaggcagaagtcagggaagctaagaaggtcacgctagccccaacagagcccataaggttcggaagggacttcgttgaatggctccacgagaggctagttggaaggccagtagttagaggagactacattaaggtcggagttcttgggcaagagctaaccttcgttgtcacggcaacccagccgagtggtgttgtccagataacggaattcactgacttcaacatcagcgagaagccagtgaaggaagtagagaagagaatgacaacgggagtaacttacgaggacatcggcggactcaaggatgtcatcgagaagataagggagatgatagagttaccgttgaagcaccctgaactgttcgagaaactcggtatagagcctcctaagggtgttcttctctatggtccaccaggaactggtaagaccttgctagccaaggcggtagctaacgaggctaacgcttacttcatcgcaataaacgggccggagataatgagcaagtactacggagagagcgaagaaaggttgagagaggtcttcaaggaagctgaagagaacgctccagcgataatattcatagacgagatagatgcgatagcaccgaagaggagcgaagttactggggaagttgagaagagggtagtggctcagctgttagcattaatggacggtctcaagagcaggggtaaggtcatcgtcataggcgcaaccaacaggccagatgccatagacccagctctaagaaggcctggaaggttcgatagggaaattgaggtaggagtcccagacaggcaaggtaggaaggagatactccagatacacactaggggaatgccaatagagccagacttcaggaaggatgatgtgcttaagatactcgaagacttcaagagggagggcaagttcactaagataatagataaggctattgaggaagtcaacaagagcaaggaggaggaaattccacaggttctcaagaagatagacgcagagttatacgatgaggttaagacgaggctaatagacaagttgctcgatgagttagccgatgtaacccatggattcgttggtgcagacttggctgcactagcaagagaggcagcgatggcggcactgaggagactaataagggaaggaaagatcgacttcgaagcagagacaattccaagagaagtcctagatgagcttaaggttaccaggagagacttttatgaggctttgaagatggttgagccttctgctctcagggaagtgctcattgaagttccaaacgttcactgggacgacattggaggattagaagatgtgaagcaagaactaagagaagcagtagaatggccactaaagtacccagaggcgtttaaagcctatggaataactcctccaaagggtatcctgctctacggcccaccgggaactggtaagaccttgctagctaaggcagttgccactgaaagccaggcaaacttcatagctgtcagggggcccgagatcttaagtaaatgggtcggtgagagcgagaagaacataagggagatattcaggaaggctagacaagcggcgccgacggtgatattcatagacgagatagatgcaatagctccaagaaggggaaccgacgttaacagggtaaccgataggataatcaatcagttactaacagagatggatggaatccaggagaatgcaggggtggtcgtcatagcagctactaataggcctgatattttggatcctgcgttgttgaggcctgggcgttttgataggcttatcctagtgcctgctcctgatgagaaggctaggtttgagatattcaaggttcacacgaggggaatgccactggcagatgacgttgacttgaaagaactagcaagaagaacagaaggctacacaggagcagacatagcagcagtctgcagagaagcagccatgatagccatgagaagggcgctagagaaggggataataaagccaggcatgaaggccagcgagataaggagattagccaaggtcacgatgaaggacttcgaggaggccctgaggaagataggaccatccgtaagcaaggagacgatggagtactacagaaagatacaggagcagttcaagcaggctaggggatga

SEQ ID NO: 120064 - protein, 795 aa, Pyrococcus abyssi GE5
MAEKKEVKLKVASAYQRDVGRGIVRLDRKTMRELGISPGDVVEIIGTKNTAAIAWPAYPEDEGLGIIRMDGTIRKNAGVGLGDEVTVRKAEVREAKKVTLAPTEPIRFGRDFVEWLHERLVGRPVVRGDYIKVGVLGQELTFVVTATQPSGVVQITEFTDFNISEKPVKEVEKRMTTGVTYEDIGGLKDVIEKIREMIELPLKHPELFEKLGIEPPKGVLLYGPPGTGKTLLAKAVANEANAYFIAINGPEIMSKYYGESEERLREVFKEAEENAPAIIFIDEIDAIAPKRSEVTGEVEKRVVAQLLALMDGLKSRGKVIVIGATNRPDAIDPALRRPGRFDREIEVGVPDRQGRKEILQIHTRGMPIEPDFRKDDVLKILEDFKREGKFTKIIDKAIEEVNKSKEEEIPQVLKKIDAELYDEVKTRLIDKLLDELADVTHGFVGADLAALAREAAMAALRRLIREGKIDFEAETIPREVLDELKVTRRDFYEALKMVEPSALREVLIEVPNVHWDDIGGLEDVKQELREAVEWPLKYPEAFKAYGITPPKGILLYGPPGTGKTLLAKAVATESQANFIAVRGPEILSKWVGESEKNIREIFRKARQAAPTVIFIDEIDAIAPRRGTDVNRVTDRIINQLLTEMDGIQENAGVVVIAATNRPDILDPALLRPGRFDRLILVPAPDEKARFEIFKVHTRGMPLADDVDLKELARRTEGYTGADIAAVCREAAMIAMRRALEKGIIKPGMKASEIRRLAKVTMKDFEEALRKIGPSVSKETMEYYRKIQEQFKQARG

SEQ ID NO: 120065 - DNA, 2523 bp, Pyrococcus abyssi GE5
  CDS (1)..(2523): transl_table=11
atgatactcggaaggagtgaacctcaaaaggatgaaattaagcttagagttgctgaggccctaaagagggacgttggaagggggattgttaggttcgacaggaagtaccagaggatgataggcgttgaacccggtgatatagtggagatagaaggagaaagaataacggcggcgatagtcgctaaccctcaccccgacgatagaggtttggacataatcaggatggatggttacataaggaagaacgccggcgtaactattggagactttgtaacgattagaagagcggaggttaaagaggctaagaaagtagttcttgctccggcacagaagggcgttatagttcagattcctggggacatagtcaagaacaacctattgggaaggccagttgttaagggagatataatagttgcaagtggaaggagtgagatgtattactcaagtggtactccatttgacgagatcttcaggggcttcttcgaggctatgtcggttggctttggagagctcaagttcatggtcgtgaacacgataccaaaggggatagttcagataacatataacacggaagttgaggttctgccccaagccgttgaagttagggaggaaaagatcccagaagttacttacgaggatataggaggattaaaggaggccatagagaagataagggaaatggtggagttaccgttaaagcatcctgagctgtttgagagacttggaattgagcctcctaagggtgttctcctctatggtccaccgggaaccggtaagaccttgctggctaaagctgtagctaacgaggctaatgcctacttcatcgcaataaacgggccggagataatgagcaagtactacggagagagcgaggaaagattgagagaaatatttaaagaagctgaggagaatgccccggcaataatcttcatagacgagatagatgcgatagctccgaagagagaggaagtcgttggggaggttgagaaaagggttgtaagccagctgttaactctaatggatggtctcaagagcaggggtaaagttatcgtaatagctgcaactaataggcctgatgcgctggacccggctttaagaaggcctggaaggtttgacagggaaatagaggtaggtgttccagataagcagggtagaaaggagattctccagatacacacgagaggaatgccaatagagcccgattttgagaaagaaaccgttattaaggctttaaaggagcttgaaaaggatgataggtttgacaaggagaagatcaaaaagataatcgagaaggtctcgaaagctaagagtgaggaggaaataaaggatatactcagagaggataggaatctatacattgaggttaggacaaagcttatagataagttgcttgatgagcttgccgaggttactcatggatttgttggggctgacttagctgcactagcaagagaagcagcaatggtagtgctaagaaggctcataaaggaaggtaagataaatccggaggccgaaacaattccgagggaggttcttgaggagttaaaggtaactaaggctgacttctatgaggctttgaagatggttgagccttctgcccttagggaagtgctcattgaagttccaaacgttcactgggacgacattggaggattagaagatgtaaaacaagaactaagagaagcagtagaatggccactaaagtatccaaaggccttcaagaggctcggcatcactccaccgaaaggcgttcttctctatggcccaccgggaactggtaagaccttgctagctaaggcagttgccactgaaagccaggcaaacttcatagccataagaggacctgaagttctaagtaagtgggttggagagagcgagaaaagaataagggagatctttagaaaggctaggcaagcttcacctgctataatattcattgacgagatagatgcaattgcaccagcgaggggaactgctgagggggagaaagtaacggataggataattaaccagctactcactgagatggatggactagtggagaacagtggcgttgttgttattgctgctactaataggcctgatattttggatcctgcgttgttgaggcctgggcgttttgataggcttatcctagtgcctgctcctgatgagaaggctaggtttgagatattcaaggttcacacgaggggaatgccattagctgacgacgttgacttgaaagaattggcaagaagaacagaaggctacacaggagcagacatagcagcagtctgcagagaagcagcaatgaatgccctaaggagagcggtggctaagctctcgccggaagaacttgaagaggagagtgagaagtttctaaagagcttaatcgttacaaggaaggacttcgaagtagcgttaaagaaggtcaagccaagtgttacaaagtacatgatggaatactatagacaattcgaagagtcgagaaaaaggatggttggggagtctacgggaagggaacctgattactttactggatag

SEQ ID NO: 120066 - protein, 840 aa, Pyrococcus abyssi GE5
MILGRSEPQKDEIKLRVAEALKRDVGRGIVRFDRKYQRMIGVEPGDIVEIEGERITAAIVANPHPDDRGLDIIRMDGYIRKNAGVTIGDFVTIRRAEVKEAKKVVLAPAQKGVIVQIPGDIVKNNLLGRPVVKGDIIVASGRSEMYYSSGTPFDEIFRGFFEAMSVGFGELKFMVVNTIPKGIVQITYNTEVEVLPQAVEVREEKIPEVTYEDIGGLKEAIEKIREMVELPLKHPELFERLGIEPPKGVLLYGPPGTGKTLLAKAVANEANAYFIAINGPEIMSKYYGESEERLREIFKEAEENAPAIIFIDEIDAIAPKREEVVGEVEKRVVSQLLTLMDGLKSRGKVIVIAATNRPDALDPALRRPGRFDREIEVGVPDKQGRKEILQIHTRGMPIEPDFEKETVIKALKELEKDDRFDKEKIKKIIEKVSKAKSEEEIKDILREDRNLYIEVRTKLIDKLLDELAEVTHGFVGADLAALAREAAMVVLRRLIKEGKINPEAETIPREVLEELKVTKADFYEALKMVEPSALREVLIEVPNVHWDDIGGLEDVKQELREAVEWPLKYPKAFKRLGITPPKGVLLYGPPGTGKTLLAKAVATESQANFIAIRGPEVLSKWVGESEKRIREIFRKARQASPAIIFIDEIDAIAPARGTAEGEKVTDRIINQLLTEMDGLVENSGVVVIAATNRPDILDPALLRPGRFDRLILVPAPDEKARFEIFKVHTRGMPLADDVDLKELARRTEGYTGADIAAVCREAAMNALRRAVAKLSPEELEEESEKFLKSLIVTRKDFEVALKKVKPSVTKYMMEYYRQFEESRKRMVGESTGREPDYFTG

SEQ ID NO: 120067 - DNA, 2523 bp, Pyrococcus horikoshii OT3
  CDS (1)..(2523): transl_table=11
atgatactcgggaggagtgagcctcaaaaggaggagatcaagcttagggtagctgaggcccttaagcgtgacgttggtagggggattgttagatttgatagacgctatcagaagatgataggcgttgagccgggggatatagttgagatagagggagagagggtaacagcagctatcgttgcgaactcccatccggatgataaagggctcgacataataaggatggatggttatataagaaaaaacgctggagttagcattggagattacgttaccattaggagagctcaagttaaagaggccaaaaaggttgtccttgctcctgcgcagaagggagttatagtccagattcctggagatattataaagaataaccttctcgggaggcctgtagttaagggtgacatcgtagttgctagtggtcgtggggatttatactattctagcggaactccattcgatgagatcttcaggggattctttgaggccatgtcggtcggctttggagagcttaaattcatggttgtaaataccattccaaaagggatagtccagataacatataacaccgaagtcgaggttcttcctcaggccgttgaggtcagggaagagaagatcccggaagttacctatgaggatattggtggccttaaggaggcaatacagaagataagggaaatggtcgagctacccctaaagcatcctgagctctttgaaagactgggtattgagcctcctaagggtgttcttctttatggtcctcctgggactggtaagactctcttagctaaggccgttgctaatgaggctaacgcttactttatcgcaataaacgggccagagataatgagcaaatactacggagaaagcgaagaaagattaagggagatatttaaggaagctgaggaaaatgctcctgcaataatcttcattgacgagattgatgcaatagctccgaagagggaggaggttgttggtgaggtagaaaagagggttgtctctcaattgttaactttgatggatggtttgaagggtaggggtaaggttattgttattggggctactaataggcctgatgctttggatcctgctttgaggaggcctgggcgttttgatagggagattgaggttggagtgccagacaagcaaggaagaaaagaaatactacaaatccacacaagaggaatgccaatagaaccagacttcgagaaggatgcagtaataaaagtcctcaaagatttggagaaggatgagaggtttgagaaggagaagattgagaagataatcgagaaggtttcaaaggccaacagcgaggatgaaataaaggagatactcaaggaggacgggaacgtatatgtagaggttagaaacaggctaatagataagttgcttgaggaattggctgaggttactcatggtttcgttggcgctgacctagcagcactagccagagaagcagcaatggtcgtgcttagaaggctcataaatgagggtaagataaatccagaggccgaaagtattccaagggaggttctcgaagagttgaaggttacaaagagagatttctatgaggctttgaagatggttgagccttctgctttgagggaggtcctcatcgaagtcccaaacgtccactgggatgacataggcggattagaagaagtaaaacaagaactaagagaagcagtagaatggccactaaaataccccaaggcgtttaagaaactcggtataactcctcctaagggtgttttgttgtatggtcctcctgggactggtaagactctcttagctaaggccgttgctactgagagtgaagccaacttcatagccgttagaggcccagaagtattaagcaagtgggttggcgaaagcgagaagagaattagggaaatctttaggaaagcaaggcaagctgcacccgcaataatctttattgatgagattgatgcaatagctccggctaggggaacttctgagggtgaaaaggttactgataggatcattaatcagttgcttacggaaatggatggactagttgagaacagtggtgtcgtcgttattgctgctactaataggcctgatattttggatcctgctttgttgaggcctgggcgttttgataggcttattttagttcctgctcctgatgaggaggctaggtttgagattttcaaggttcacactagaagcatgccattagccgatgacgttgatttaagagaattagcaaggagaacagaaggatacacaggagcagacatagcagcagtatgcagagaagcagccctaaacgcgctgaggagggttgttaagagcgtgccaaaggagaaattggaggaggaaagtgaagagttcctcaataaattggtagtcacaagaaaggattttgaagaagcgttgaagaaagtcaaaccgagtgttagcaagtatatgatggaatactatagacaatttgaagaggcaagaaagagggttagtggagagtccgtaggaagggaaccagattactttactggataa

SEQ ID NO: 120068 - protein, 840 aa, Pyrococcus horikoshii OT3
MILGRSEPQKEEIKLRVAEALKRDVGRGIVRFDRRYQKMIGVEPGDIVEIEGERVTAAIVANSHPDDKGLDIIRMDGYIRKNAGVSIGDYVTIRRAQVKEAKKVVLAPAQKGVIVQIPGDIIKNNLLGRPVVKGDIVVASGRGDLYYSSGTPFDEIFRGFFEAMSVGFGELKFMVVNTIPKGIVQITYNTEVEVLPQAVEVREEKIPEVTYEDIGGLKEAIQKIREMVELPLKHPELFERLGIEPPKGVLLYGPPGTGKTLLAKAVANEANAYFIAINGPEIMSKYYGESEERLREIFKEAEENAPAIIFIDEIDAIAPKREEVVGEVEKRVVSQLLTLMDGLKGRGKVIVIGATNRPDALDPALRRPGRFDREIEVGVPDKQGRKEILQIHTRGMPIEPDFEKDAVIKVLKDLEKDERFEKEKIEKIIEKVSKANSEDEIKEILKEDGNVYVEVRNRLIDKLLEELAEVTHGFVGADLAALAREAAMVVLRRLINEGKINPEAESIPREVLEELKVTKRDFYEALKMVEPSALREVLIEVPNVHWDDIGGLEEVKQELREAVEWPLKYPKAFKKLGITPPKGVLLYGPPGTGKTLLAKAVATESEANFIAVRGPEVLSKWVGESEKRIREIFRKARQAAPAIIFIDEIDAIAPARGTSEGEKVTDRIINQLLTEMDGLVENSGVVVIAATNRPDILDPALLRPGRFDRLILVPAPDEEARFEIFKVHTRSMPLADDVDLRELARRTEGYTGADIAAVCREAALNALRRVVKSVPKEKLEEESEEFLNKLVVTRKDFEEALKKVKPSVSKYMMEYYRQFEEARKRVSGESVGREPDYFTG

SEQ ID NO: 120069 - DNA, 2397 bp, Pyrococcus horikoshii OT3
  CDS (1)..(2397): transl_table=11
gtgatgctaatggtggagaaaaaggagataaagctgaaggttgcttccgcttatcaaagggatgttggtagagggattgtaagaattgataggagaagtatgagagaattaggagtatcgccaggggatgttgtagagattatcggaaccaagaataccgctgctatcgtttggcccgcttatcctgaggatgagggcctcggaataatcaggatggatggtaccattagaaagaatgcaggggttggccttggggatgaagttaccataagaaaagctgacgttaaggaagccagaaaggtagtactagccccaacggagcctattaggtttggaagggacttcgttgagtggcttcacgagaggctggtaggaaggcctgtagtgagaggtgactatattaaaattggagttcttggccaggagctaacctttgtagttactacaactcaaccgagcggagttgttcaaataacagagtacacggactttgatataagtgaaaagccagtgaaagaagttgaaaagagaatgacaactggagtgacctacgaggatataggtggactaaaggatgttatcgagaagatcagagaaatgatagagctaccattaaagcatccagaattattcgaaaagctgggtattgagcctcctaagggtgttcttctttatggtcctcctgggactggtaagactctcttagctaaggccgttgctaatgaggctaatgcttactttatcgcaataaacgggccagagataatgagcaaatactacggagaaagcgaagaaagattaagggaggtgttcaaggaggccgaagagaacgcaccatcgataatctttattgatgagattgatgcaatagctccaaagagaagtgaggttactggagaagttgagaagagagtcgtagcccagctacttgccttgatggatggtttgaagggtaggggtaaggttattgttattggggctactaataggcctgatgctttggatcctgctttgaggaggcctgggcgttttgatagggagattgaggttggagtgccagacaagcaaggaagaaaagaaatactacaaatccacacaagaggaatgccaatagaaccagacttcagaaaagaggatgtacttaagatccttgaggggcttaaaaaggaagggaagttcagggatgtcattgataaggccattgatagggttatgaaggttagcgaggatgatattcctaaagtgcttaaggaacttaatggtgagctatacgaggaagttagaaccagattagttgatctattacttgaggaattggctgaggttactcatggtttcgttggcgctgacctagcagcactagccagagaagcagcaatggccgcacttagaaggttaatcaaggaaggaaagatagactttgaggccgagacaataccaagagaagtcctagatgaacttaaggtaactagaaaggacttctatgaggctttgaagatggttgagccttctgctttgagggaggtcctcatcgaagtcccaaacgtccactgggatgacataggcggattagaagaagtaaaacaagaactaagagaagcagtagaatggccactaaaatacccagaggccttcagggcttacgggatcacacctcctaagggtgttttgttgtatggtcctcctgggactggtaagactctcttagctaaggccgttgctactgagagtgaagccaacttcatagccgttagaggcccagaagtattaagcaagtgggttggcgaaagcgagaagaacataagggaaatctttaggaaagcaagacaagctgctccaaccgtgatattcatagacgaaattgatgcaatagccccgaggaggggaacagatgtaaacagagttactgataggcttatcaatcaattactcacagagatggacggaatccaggagaatacgggagttgtcgttattgctgctactaataggcctgatattttggatcctgctttgttgaggcctgggcgttttgataggcttattttagttcctgctcctgatgaggaggctaggtttgagattttcaaggttcacactagaagcatgccattagccgatgacgttgatttaagagaattagcaaggagaacagaaggatacacaggagcagacatagcagcagtatgcagagaagcagctatgatagctatgaggaaggcccttgagaaggggataattaagcctgggatgaaagctgacgagataaagcagaaggctaaagttaccatgaaagacttcgaagaggcactgaagaagataggaccctcagtaagcaaggagaccatggagtattacagaaagatccaagagcagttcaagcaggctagaggatga

SEQ ID NO: 120070 - protein, 798 aa, Pyrococcus horikoshii OT3
MMLMVEKKEIKLKVASAYQRDVGRGIVRIDRRSMRELGVSPGDVVEIIGTKNTAAIVWPAYPEDEGLGIIRMDGTIRKNAGVGLGDEVTIRKADVKEARKVVLAPTEPIRFGRDFVEWLHERLVGRPVVRGDYIKIGVLGQELTFVVTTTQPSGVVQITEYTDFDISEKPVKEVEKRMTTGVTYEDIGGLKDVIEKIREMIELPLKHPELFEKLGIEPPKGVLLYGPPGTGKTLLAKAVANEANAYFIAINGPEIMSKYYGESEERLREVFKEAEENAPSIIFIDEIDAIAPKRSEVTGEVEKRVVAQLLALMDGLKGRGKVIVIGATNRPDALDPALRRPGRFDREIEVGVPDKQGRKEILQIHTRGMPIEPDFRKEDVLKILEGLKKEGKFRDVIDKAIDRVMKVSEDDIPKVLKELNGELYEEVRTRLVDLLLEELAEVTHGFVGADLAALAREAAMAALRRLIKEGKIDFEAETIPREVLDELKVTRKDFYEALKMVEPSALREVLIEVPNVHWDDIGGLEEVKQELREAVEWPLKYPEAFRAYGITPPKGVLLYGPPGTGKTLLAKAVATESEANFIAVRGPEVLSKWVGESEKNIREIFRKARQAAPTVIFIDEIDAIAPRRGTDVNRVTDRLINQLLTEMDGIQENTGVVVIAATNRPDILDPALLRPGRFDRLILVPAPDEEARFEIFKVHTRSMPLADDVDLRELARRTEGYTGADIAAVCREAAMIAMRKALEKGIIKPGMKADEIKQKAKVTMKDFEEALKKIGPSVSKETMEYYRKIQEQFKQARG

SEQ ID NO: 120071 - DNA, 2181 bp, Aeropyrum pernix K1
  CDS (1)..(2181): transl_table=11
gtggccaactctagtgttgagctgagggtgagtgaggcctatcccagggatgttgggaggaagatagtccgtatagaccgtcagacagctgctaggctcggggttgaggtcggtgacttcgttaaagtatcaaagggtgataggagtgtggtagcggttgtctggcctttgaggccggacgacgagggtagaggcataataaggatggacggatatctcagggcagccctaggagtgacggtgggggatacagtcactgttgagaaggctgagaaggttgagccagcatcgaaggttgttctcgcgcctacagagcctattaggtttgggagagactttgtggagtacgttaaggagtttctcctgaggaagcctattagcaggggggagaccataatcgtacctgttctcgaaggccttcccctggtcgtcgtctccacccagccagcccacttcgtctatgtgacggaggctaccgaggttgagatcagggagaagcctgttagggaagagatagagaggctgaggggtgttcccaaggtaacgtgggaggatataggcgatctcgaggaggctaaggagaggattagggagatagtggagctccctatgaagcaccccgagatattcaaacacctgggcatcgagcctccgaagggtattctgctgtatggcccgccgggcaccggtaagacgctgctggccaaggcgttggcgaacgagattggagcctactttatctccatcaacgggccggagattatgagcaagtattacggcgagagcgagcagcggctcagggagatctttaaggaggcggaggagaacgcccccagcattatcttcatcgacgagattgacgcgatagccccgaagagggaggaggttacaggggaggttgagaagagggttgtggcacagcttctcacactcatggatggattgaaggagagggggagggttatagtcataggcgcgacgaacaggcctgacgccatagacccggctctgaggaggcctggaaggttcgacagggagattgagatacggcctcccgataagagggctagagccgagattctgaaggttcacacccggaacatgcctctcgcagaggacgtggaccttgacaagctagccgagatgacccatggctacacaggagcggatctcgccgctctggcgaaggaggcggccatggcggctttgagaaggttcatacgggaggggaagatcaattttgaggccaaggagattccggcaaccgtcctcaaggagctgaaggtgacgatgaaagacttcatggaggctatgaagatgataaggcctacgcttataagggagatctacgtcgaggttcccgaggttaggtggagtgatataggcggcctcgaggaggctaaacaggctcttcgagaagctgttgagtggcctctgaagcaccccgagatatttgagaagatgggtattaggcctcctaggggtgttctcttgttcgggcctccgggtactggtaagacgcttctggccaaggctgtggctactgagagtggggcgaacttcatagcggtgaggggcccggagatactcagcaagtgggtaggagaaagcgaaagagctattcggaagatctttgagagggccaggcaggcagccccagccgtagtgttcttcgacgagatagacgccatagcccctgcgaggggagctaggttcgacaccagcggtgttacggacagaattgtaaaccaaatgctggctgagatggacgggatacagccgctctcaaacgtcgttgtcataggggcgacgaacaggcctgacatactggaccctgcactactgaggccaggaaggttcgacaggcttatctacgtgccaccaccggataaggaggctaggaaggagatattcaagatacacacaaaaaaggtgccactcggagaagatgttgacctcgagaagctcgcggagatgacggagggctacacaggagccgatatagaggcggtggttagagaggcagttatggcaaaacttagggagaagctagaggtcggtaaagtcgaaatgagacacttcctagaggcgctaaagaaagtgccacccagtcttaccaaggaggatatactccggtatgaaaggctcgcaaaggagctgaagaagctgacgctgggatga

SEQ ID NO: 120072 - protein, 726 aa, Aeropyrum pernix K1
MANSSVELRVSEAYPRDVGRKIVRIDRQTAARLGVEVGDFVKVSKGDRSVVAVVWPLRPDDEGRGIIRMDGYLRAALGVTVGDTVTVEKAEKVEPASKVVLAPTEPIRFGRDFVEYVKEFLLRKPISRGETIIVPVLEGLPLVVVSTQPAHFVYVTEATEVEIREKPVREEIERLRGVPKVTWEDIGDLEEAKERIREIVELPMKHPEIFKHLGIEPPKGILLYGPPGTGKTLLAKALANEIGAYFISINGPEIMSKYYGESEQRLREIFKEAEENAPSIIFIDEIDAIAPKREEVTGEVEKRVVAQLLTLMDGLKERGRVIVIGATNRPDAIDPALRRPGRFDREIEIRPPDKRARAEILKVHTRNMPLAEDVDLDKLAEMTHGYTGADLAALAKEAAMAALRRFIREGKINFEAKEIPATVLKELKVTMKDFMEAMKMIRPTLIREIYVEVPEVRWSDIGGLEEAKQALREAVEWPLKHPEIFEKMGIRPPRGVLLFGPPGTGKTLLAKAVATESGANFIAVRGPEILSKWVGESERAIRKIFERARQAAPAVVFFDEIDAIAPARGARFDTSGVTDRIVNQMLAEMDGIQPLSNVVVIGATNRPDILDPALLRPGRFDRLIYVPPPDKEARKEIFKIHTKKVPLGEDVDLEKLAEMTEGYTGADIEAVVREAVMAKLREKLEVGKVEMRHFLEALKKVPPSLTKEDILRYERLAKELKKLTLG

SEQ ID NO: 120073 - DNA, 2214 bp, Aeropyrum pernix K1
  CDS (1)..(2214): transl_table=11
ttgtcaagtagtggtttcggcgttagaaggcctgtcaaagaagctatactgagggttgctgaggctaagcccagggactcggggaggaagagggttaggatagatatcgacattatgaaggagctgggtgtcgagcccggtgatgtagtcgagattgagggtaagaagaaaactgtcgccattgtaatgccagcctacccggaggacatgggtctcgacatcataagaatggatggtatactgaggaggaatgcagacgttaatattggagagaaggttattgttaggaagactagtgtgaggacggctacaaaggtgaagctagcccccgtcagctacacaatgactgtagacgaggggttcaagaggtatgtgaagaagaagctccagggagtgcctatcaccgagggcgacgtggttgttgtccccgttataggccaggctgtccagctgcaggtggttgacgctaggccgaagggtgcggtcatagtttctgaggagacgatagttgatgttcttgagaagccggtagcgcagagccgtgttccaaaggtcacctacgaggatatcggagggcttaaagaggtaatcgagaaggtcagggagatggtggagcttcctctgaggcatccagagatcttcaagaggcttggcatcgagcctccgaagggtattttactgtatggcccgccgggcactggtaagacgctgctggccaaggctgttgcgaacgaagccgacgcctacttcatctccatcaacgggccggagattatgagcaagtattacggcgagagcgagcagcggctcagggagatcttcgaagaggctaagaagaacgcccccagcattatcttcatcgacgagattgacgccatagccccgaagagggacgaagttgtcggggaggttgagaggagggttgtggcacagcttctagccctcatggacgggcttgaggctagaggtaacgtgatagtcattgcagcgactaacaggcctaacgccatagacccggctctgaggaggcctggaaggttcgacagggagatagaggtgcccttgccggataagcatggcaggctggaaatactgcagatacacaccaggcatatgcctctggcggaggacatggatcttgagaagctggccgagatgaccaaaggcttcaccggcgctgatctcgcagccctagcgagagaagcggccatgtacgccctccgaagatacctacccgagatagacctggaccaggagtccatacccgtggaggtcctcgaaaagatggtagttaccatggaggacttcctcaaagccctcagggagataacgcccagcggcttgagggagatacagattgaggttcccgaggttaggtggagtgatataggcggcctcgaggatgtgaagcaggagctgagagaggtagtggagtggcctctgaagcacccggaggcattcaccaggatgggtattaggcctcctaggggtgttctcttgttcgggcctccgggtactggtaagacgctgctggccaaggctgtggctactgagagtggggcgaacttcatagcggtgaggggcccggagatactcagcaaatgggtgggagaaagcgaaagagctattagagagatattcgcgaaggcaaggcaacacgcccccgccgtagtgttcttcgacgagatagacgccatagcccccgtcagaggcaccgacgtgggcacaagggttaccgagaggattgtcagccagctgctaaccgagatagatggggtctctgacctccacgacgtggtagtaatagccgccaccaacaggcccgacatggtcgacccagccctcatgaggccgggccggctcgagaagatgatatacgtaccacccccagacttcagctcgagactcgagatactgaggatacatacccggaaggtgcctctcgccgaggacgttgaccttgccgagatagctaggagaaccgagggctacacaggtgctgatatagaagctctagtcagggaagcgagtctagcggcgttgagggaggatataaacgcggcggaggtgtcgatgagacacttcgaagtggccctcaagaaggtgaagccgagcgtaacaccgcagatggtggagtactacaagagatggctggagaccgtcaagcagaggcaggaagaggttaagagggaggcccccaccattaccctgtaa

SEQ ID NO: 120074 - protein, 737 aa, Aeropyrum pernix K1
MSSSGFGVRRPVKEAILRVAEAKPRDSGRKRVRIDIDIMKELGVEPGDVVEIEGKKKTVAIVMPAYPEDMGLDIIRMDGILRRNADVNIGEKVIVRKTSVRTATKVKLAPVSYTMTVDEGFKRYVKKKLQGVPITEGDVVVVPVIGQAVQLQVVDARPKGAVIVSEETIVDVLEKPVAQSRVPKVTYEDIGGLKEVIEKVREMVELPLRHPEIFKRLGIEPPKGILLYGPPGTGKTLLAKAVANEADAYFISINGPEIMSKYYGESEQRLREIFEEAKKNAPSIIFIDEIDAIAPKRDEVVGEVERRVVAQLLALMDGLEARGNVIVIAATNRPNAIDPALRRPGRFDREIEVPLPDKHGRLEILQIHTRHMPLAEDMDLEKLAEMTKGFTGADLAALAREAAMYALRRYLPEIDLDQESIPVEVLEKMVVTMEDFLKALREITPSGLREIQIEVPEVRWSDIGGLEDVKQELREVVEWPLKHPEAFTRMGIRPPRGVLLFGPPGTGKTLLAKAVATESGANFIAVRGPEILSKWVGESERAIREIFAKARQHAPAVVFFDEIDAIAPVRGTDVGTRVTERIVSQLLTEIDGVSDLHDVVVIAATNRPDMVDPALMRPGRLEKMIYVPPPDFSSRLEILRIHTRKVPLAEDVDLAEIARRTEGYTGADIEALVREASLAALREDINAAEVSMRHFEVALKKVKPSVTPQMVEYYKRWLETVKQRQEEVKREAPTITL

SEQ ID NO: 120075 - DNA, 2199 bp, Methanothermobacter thermautotrophicus str. Delta H
  CDS (1)..(2199): transl_table=11
gtgggttgtatgacaaaaaaagagataaaattaaaggttgcagaggccctggcccagcaggacgtcgggaggggaatagcccgtgtggaccctgcatgcatggaaaaactgggtctttcggatggagacataattgaaatagagggcaaaaaactgacagctgcaacggtagtatcatcacagtccgacataggactcggaataataaggatagacggatacctccgtaaaaacgccggcgcatccataggcgaagaggtgacagtcagaagggccgacgttaaggacgcccagaaggtcgttctggccccagtggaccaggaggtcataataaggggggacataagatcagcattcctcaacagggtacttgttaagggagacataatagtatcaggtatcagacagcatatatccggcggcggactcttcgacgagttcttcagggacttcatggacatatcacccctcggagagatcaaactggccgtcgtatcaacaagtcccgcaggtgttgtgcgtgtaacaccctcaacacaggtcgagatgcagcaaaaacccgtggacgtcagcaaactcgagggcgtcaagaacctcgttgatgtcacctacgaggacatcgggggcctcaaggaggaggtcaaaaaggtccgggaaatgatagagatccccctcaagagaccggaactcttcgaaaggcttggaataacaccaccaaagggtgtcctcatgcacggaccaccaggaacaggtaaaacactcctggcgaaggccgttgccaacgagagcgacgcccacttcatagccatcaacgggcccgagataatgagcaaatacgtcggggggtccgaggagaggctcagggaattcttcgaggaagcagaagagaacgctccatcaatcatattcatcgatgagatagacgccatagcgcccaaaagggaagacgtgagcggagaggttgaaaggaggatcgttgcccagctcctcaccctgatggacggcctcaagagcaggggccaggttgttgtcataggtgcaaccaacagacccgacgcccttgaccctgcactcagaaggccgggccgctttgacagggaaatcgagataggagtccctgacagggaggaaaggaaggagatactccagatacacaccagggggatgccccttgcagatgacgttgacctcgatgaactggcagagataacccatggatttgtgggtgcagaccttgagtcactctgtaaggaatccgccatgagggtcctgaggagggtgctcccggagataaaggctgatgaggagatacccaaggaggtcctcaagaagatggtggtaacaagggccgacttcaaggacgccctcaaggagatacagccatcagccctcagggaggtcctggtacaggtccccaatgtttcatgggacgacataggaggcctggagggcgcaaagcaggagctgagggaggctgttgagtggcccctcaagtaccccgacagattcaagaagtttggaataagaccacctaagggtattctcctgcacggatcaccgggtaccggtaaaacactcctggcgaaggccgttgccaatgagagccaggcaaacttcatagcggttaagggtccggagctcctgtcaaagtgggtcggtgaatcagagaagggtgtgcgtgaagttttcagaaaagcacgtcagacagctcccacagtgatattcttcgatgagatagactcaatagcctcagtgaggagtggaagcaccgccgactccggcgtaacccagagggtggtcaaccagctgctcacagagatcgatggacttgaagagctgcaggatgtggcggttatagccgcgacaaacaggcccgacatcctcgaccccgcactcctcaggcctggaagattcgacaggcacgtcaaggttgaggatccagataaggaggcaaggctcgcaatattcagggtccacacaaaggacatgccccttgcagatgacgttgatcttgaaaaacttgcagagaaaactgagggatacgtcggtgcagacattgaggctgtatgcagagaagccgccatgctgaccctcagggataacatggacgccgaggaggtctcaatgaagtacttccttgaggccatggagaaagtaaaaccaaagggcggcgtagaggagcaggtccagtaccactaa

SEQ ID NO: 120076 - protein, 732 aa, Methanothermobacter thermautotrophicus str. Delta H
MGCMTKKEIKLKVAEALAQQDVGRGIARVDPACMEKLGLSDGDIIEIEGKKLTAATVVSSQSDIGLGIIRIDGYLRKNAGASIGEEVTVRRADVKDAQKVVLAPVDQEVIIRGDIRSAFLNRVLVKGDIIVSGIRQHISGGGLFDEFFRDFMDISPLGEIKLAVVSTSPAGVVRVTPSTQVEMQQKPVDVSKLEGVKNLVDVTYEDIGGLKEEVKKVREMIEIPLKRPELFERLGITPPKGVLMHGPPGTGKTLLAKAVANESDAHFIAINGPEIMSKYVGGSEERLREFFEEAEENAPSIIFIDEIDAIAPKREDVSGEVERRIVAQLLTLMDGLKSRGQVVVIGATNRPDALDPALRRPGRFDREIEIGVPDREERKEILQIHTRGMPLADDVDLDELAEITHGFVGADLESLCKESAMRVLRRVLPEIKADEEIPKEVLKKMVVTRADFKDALKEIQPSALREVLVQVPNVSWDDIGGLEGAKQELREAVEWPLKYPDRFKKFGIRPPKGILLHGSPGTGKTLLAKAVANESQANFIAVKGPELLSKWVGESEKGVREVFRKARQTAPTVIFFDEIDSIASVRSGSTADSGVTQRVVNQLLTEIDGLEELQDVAVIAATNRPDILDPALLRPGRFDRHVKVEDPDKEARLAIFRVHTKDMPLADDVDLEKLAEKTEGYVGADIEAVCREAAMLTLRDNMDAEEVSMKYFLEAMEKVKPKGGVEEQVQYH

SEQ ID NO: 120077 - DNA, 2280 bp, Halobacterium sp. NRC-1
  CDS (1)..(2280): transl_table=11
atgaaactcacggtcaaaccactcaaacagaaggacgcaggtcgcggtctcgccgccgtcgaccgcgactccatggacgagctggcgctcgaaaacggcgactacgtggttatcgacgggcagggcgaccacgggcgcgcggtcgcccgcgtctggccgggctaccccgaagacgacggcgacggcgtcgtccgcatcgacggacggctgcgcaaggaggccgacgtcgggatcgacgatcaagtcaccgtcgaacccgcggacatcaagcccgccggcggcgtcaccgttgccctcccgcagaaccttcgcgtgcgcggcaacatcgcgccgatggttcgtgaccggctcaacggccgcccggtcaccgccgggcaaaccatccccatctcgttcgggttcggcggcatgagcaccatctccggccaacagatcccggtcaagatcgccgaaaccgagcccagcggcacggtcgtcgtcagcaacgacaccgaaatccagctctccgagcgccccgccgaagagatcgcgccgggggccggtgaggcagccgagaccggcgaccccacgccgaacgtcacctacgaggacatcggcggcctcgacggcgaactcgaacaggtgcgggagatgatcgagttgccgatgcgtcaccccgaactcttccagcaactcggcatcgacccgccgaaaggcgtgctcctccacggcccgcccggcaccggcaaaacgctcatcgcgaaagccgtcgccaacgagatcgacgcgcacttcgagacgatctccggcccggagatcatgagcaaatactacggcgaaagcgaggagaagctccgcgaggtcttcgacgaggccgaggagaacgcccccgcgatcgtcttcgtcgacgagctcgactccatcgcgcccaagcgaggcgaaacccagggcgacgtcgagcgccgcgtggtcgcccagctgttgagcctcatggacggcctggaggaccgcggcgacgtcacggtcatcgcggcgaccaaccgcgtcgacgccatcgaccccgcgctccgccggggcgggcgtttcgaccgcgagatcgagatcggcgtccccgaccaggacggccgcaaggagatcctgcaggtgcacacgcgtggcatgccgctggtcgaggacatcgacctcgacgactacgccgagagcacgcacggcttcgtcggcgcggacatcgagagcctcgccaaggaagccgcgatgaacgcactgcgccgggtgcgcccggacatcgacctggaatccgacgagatcgacgccgaactcctggaatccatctcgatcacggaagccgacttcaagcgcgcgctgaacggcatcgagccgtccgcgctccgcgaagtgttcgtggaggtgccggacaccacgtgggcggacgtcggcggcctcacggacaccaaagaacgcctccgggagaccatccagtggcccctggactacccggacgtgttctccgagatggatctccagtccgccaaaggcgtcttgctgtacggcccgccgggcaccggcaagacgctgttggcgaaagccgtcgccaacgaggcgaactcaaatttcatctccgtgaaaggcccggagctgctgaacaagtacgtcggcgagtccgagaagggcgtccgtgaggtgttcgagaaggcgcggtcgaacgccccgacagtggtgttcttcgacgagatcgacgccatcgcgggccagcgcgggcgcgcaaccagcgactcgggcgtgggcgagcgcgtcgtctcccagctgctcaccgaactggacggcatcgaggccctcgaagacgtggtcgtggttgcgacctcgaaccggccggacctcatcgacgacgcgctgctgcggccgggccgcctcgaccgccacatccacgtgccggtgcccgacgccgacgcgcgccgcgcgatcctcgacgtgcacacgcgcgacaaacccctcgcggacgacgtcgatctcgacgtcgtggcccagcggatggacgggttcgtcggcgcggacgtggaggcgctcgtccgggaggccacgatgaacgccacccgcgagttcatcaactccgtcgaccccgccgacgccagcgactccgtggggaacgtccgcgtaacgatggcgcacttcgaggccgcgctcggggaggtcacggccagcgtcgacgcggacgtcaaggagaactacgaggagatcgaacagcggttcaacaccgcggacacgccgaccgacgacgaacccgcgtccggagcgttccgctga

SEQ ID NO: 120078 - protein, 759 aa, Halobacterium sp. NRC-1
MKLTVKPLKQKDAGRGLAAVDRDSMDELALENGDYVVIDGQGDHGRAVARVWPGYPEDDGDGVVRIDGRLRKEADVGIDDQVTVEPADIKPAGGVTVALPQNLRVRGNIAPMVRDRLNGRPVTAGQTIPISFGFGGMSTISGQQIPVKIAETEPSGTVVVSNDTEIQLSERPAEEIAPGAGEAAETGDPTPNVTYEDIGGLDGELEQVREMIELPMRHPELFQQLGIDPPKGVLLHGPPGTGKTLIAKAVANEIDAHFETISGPEIMSKYYGESEEKLREVFDEAEENAPAIVFVDELDSIAPKRGETQGDVERRVVAQLLSLMDGLEDRGDVTVIAATNRVDAIDPALRRGGRFDREIEIGVPDQDGRKEILQVHTRGMPLVEDIDLDDYAESTHGFVGADIESLAKEAAMNALRRVRPDIDLESDEIDAELLESISITEADFKRALNGIEPSALREVFVEVPDTTWADVGGLTDTKERLRETIQWPLDYPDVFSEMDLQSAKGVLLYGPPGTGKTLLAKAVANEANSNFISVKGPELLNKYVGESEKGVREVFEKARSNAPTVVFFDEIDAIAGQRGRATSDSGVGERVVSQLLTELDGIEALEDVVVVATSNRPDLIDDALLRPGRLDRHIHVPVPDADARRAILDVHTRDKPLADDVDLDVVAQRMDGFVGADVEALVREATMNATREFINSVDPADASDSVGNVRVTMAHFEAALGEVTASVDADVKENYEEIEQRFNTADTPTDDEPASGAFR

SEQ ID NO: 120079 - DNA, 2310 bp, Sulfolobus solfataricus P2
  CDS (1)..(2310): transl_table=11
ttgagcgctagttctggagaggaacagaagccgcaaagaaaggagttaatacttagagtaatggaagcaagacaaaaagatgtcgggagagggaaagtaagaattgatattgatttactctcacaaattgatgtaagcccgggtgatgtagtcgaaattgaaggaaccagaaagaccgctgcgcttgcatggcctttgtcgccagaagatacaacaactggagaaaaagacataataagaatggatggaattactaggaaaaacgctggtgtctcgattggagataaggttatagtacggaaagcaattgtaaaaccagccagcacagtaaaattagcaccatctaacttctcaattaccgtagatccaggtttcatcagttatgttaagaaacgattaaaagaattccccctagttgaaggggatacagtattaattccagttctaggacaagctataccgtttactgtggttcaagtcaaacctgcaggtatagttctagtaaatgacgatacaataataagcatatctgataagccagtagaaccttccagatatcccagagttacctatgaagatataggtggaatgaaaaatattatagaaaaagttagagagttagtagaactacccttaagacatccagaactgttcaagagattaggaatagaaccgcctaagggcatactactatatggcccacctggagttggaaagacgttactcgctaaagctatagctaacgagactgatgcctacttcacttcaattaatggaccagaaataatgagtaaattctatggggaaagtgagcaaagattaagagaaatatttgaagatgccaaaaaacatgctcctgcgataatattcgtagatgaaatagacgcaatagcaccgaaaagagacgaagtaataggagaagtagaaagaagagttgttgcacagttactcaccctaatggatggacttgaaaatagaggaaacgtgatagttatagcagctaccaatagacctagtgctgttgatccagcattaagaagaccgggaagatttgatagggaaatagaaataccattaccagataagcaaggaagattagaaatattacaaatccacacaaggaatatgccattatctaaggatgttgacctagaaaagcttgcagatatgacacacggatatactggtgctgatttgtctgcattagtaagagaagctgcaatgaattccttaagaagatatttaccaaagatagatttgaaccaagataagatacctccagagatattagagtctatggaagttaagatggaggatttcataaatgcattcaaggaaatagtaccgagtggcttaagggaaatttacatagaagttcctgaggttaaatggacagatataggtggacttgaagaaataaaagaagagctaaaagaagtagttgaatatcccttgaaatactcagagctataccaaaactctggtatagagccacctaagggtatattgttatttggtccacccggaactggaaagacaatgctagcgaaggctgtggcgactgaaagcggagcaaatttcatagcagtgagagggccagaaatattatccaaatgggtaggtgaaagtgaaaaagcagttagagaaatatttagaaaagctagaatgtatgctccagctgtaatattctttgacgaaatagattcaatagcgccaataaggggaatttcttatgattccggagtaacagagagaatagtaaatcagctattagcggaaatggatggaatagaaaaattagagaatgtggtagttatagctgcaactaatagaccagatatcttagatccagcattgctaagacccggtaggtttgagaaattaatctatgtacccccaccagataagagggcaaggacagaaatattaaaggtgcatactaggaacatagcgctaggtgaggatatcagcttagaggacgtagctgaaaagactgaaggctacaccggagctgacttagcagcgttagtaagagaagctacaatgagagctataagagagagcatgaaaatatgtatagataagactaacgagaattgtaaacctacagatgctgaatgcagagataagactatgaaagaatgtatgaaggttaacggggttaaggtttccctaagacatttcgaagaggctatgaggaaagttaaaccatcagttacacaagatatgttgcaattctatcaaaattgggtggaaaaagctaggcaacaattgccaaaaactactgttaaaccaagtacatatgcgtga

SEQ ID NO: 120080 - protein, 769 aa, Sulfolobus solfataricus P2
MSASSGEEQKPQRKELILRVMEARQKDVGRGKVRIDIDLLSQIDVSPGDVVEIEGTRKTAALAWPLSPEDTTTGEKDIIRMDGITRKNAGVSIGDKVIVRKAIVKPASTVKLAPSNFSITVDPGFISYVKKRLKEFPLVEGDTVLIPVLGQAIPFTVVQVKPAGIVLVNDDTIISISDKPVEPSRYPRVTYEDIGGMKNIIEKVRELVELPLRHPELFKRLGIEPPKGILLYGPPGVGKTLLAKAIANETDAYFTSINGPEIMSKFYGESEQRLREIFEDAKKHAPAIIFVDEIDAIAPKRDEVIGEVERRVVAQLLTLMDGLENRGNVIVIAATNRPSAVDPALRRPGRFDREIEIPLPDKQGRLEILQIHTRNMPLSKDVDLEKLADMTHGYTGADLSALVREAAMNSLRRYLPKIDLNQDKIPPEILESMEVKMEDFINAFKEIVPSGLREIYIEVPEVKWTDIGGLEEIKEELKEVVEYPLKYSELYQNSGIEPPKGILLFGPPGTGKTMLAKAVATESGANFIAVRGPEILSKWVGESEKAVREIFRKARMYAPAVIFFDEIDSIAPIRGISYDSGVTERIVNQLLAEMDGIEKLENVVVIAATNRPDILDPALLRPGRFEKLIYVPPPDKRARTEILKVHTRNIALGEDISLEDVAEKTEGYTGADLAALVREATMRAIRESMKICIDKTNENCKPTDAECRDKTMKECMKVNGVKVSLRHFEEAMRKVKPSVTQDMLQFYQNWVEKARQQLPKTTVKPSTYA

SEQ ID NO: 120081 - DNA, 2310 bp, Sulfolobus solfataricus P2
  CDS (1)..(2310): transl_table=11
ttgtcaacttcccaatctcgtatagttttaatgagtaagacttattttaaacgtttcggaaagatgaataatatgtcccaacaattgaaattgagagtggtagaggctaggcaaagagatgttgggagaaaagtcgccagaataacggattacactataagcagactaggcatagaaaacggtgactatgtagagattattggaccttctggttctgcgttagctcaagcattaataggagacggaattgcagacaatgagataagagtagatggttacattagaagatccataggagtgggtattggagatgaagttacagtaaagagagcacaagtacaagatgccactaaagtagttttagctccaacacaacctatatcctttagtcagagtttcgtagaatacgttaaagactggttaatggataaaccgataagcagaggagaaacaatttctgtacctacttatgttggctcaatagattttgtcgtagtttcgactcagccttcacaatcagtaaggattactggtaggacatcattagagataagacaagaaccagtaaaagagtctgcagcagtacctaaggtaacttgggaagatattggcgatcttgaagatgtaaaagagaaaataagagaaatagtagaactaccaatgagacatccagaagttttccagcatctaggaatagaacctccaaagggtgtactactatatggaccaccgggagttggaaaaaccttattggctagagcactggctaatgagataggtgcatacttcacttcaattaatggaccagaaataatgagtaaattctatggggaaagtgagcaaagattaagagaaatatttgaggaagcagaaaagaattctccagcaataatattcattgatgaaattgatgcaatagcaccaaagagagaagaagttactggagaagtagagaaaagagtagtagcgcaattgttaactctaatggatggaattaaaggaagaggaaaagtaatagttataggagcaactaatagaccagatgcagtagatcctgcattaagaagacctggcagatttgatagggaaatagaaattagaccacccgatgctaaggctagaaaagagattctacaagtacataccagaaacatgcctctagctgaggatgtagatttagataaaatttctgagcagactcacggttacactggagctgatctcgcagctctggctagagaggcagctatgaatgcattgagaagatttataaatgaacgcaagattaatctagaacaagaacaaataccagtagatgttttaaaggaattgaaagtaacaatgcaagatttcattgacgccatgaagttcattcaaccaacactccttagagaagtatacgttgaagttccgaaggttaaatgggaggatattggaggactggaagaagccaaacagcaattaagagaggctgtggagtggccattgaaatttccagaaatgtttgaaaagcttggaattagaccacctaagggtatattgttatttggtccacccggaactggaaagacaatgctagcgaaggctgtggcgactgaaagcggagcaaacttcatagcagtgagaggaccagaaatattatccaaatgggtaggtgaaagtgaaaaagcagttagagaaatatttaggagagcaagacaaacggctccttgcgtaatattctttgatgaaatagattcgattgcacccatgagaggctttacacatgattctggtgtaacagaaagaatagtaaatcagttattgtcagaaatggatggaattcaatcactaaatagagttgtagttatagctgcaactaatagaccagatattttagatccagcattgctaagacctggtaggtttgatagattaatatatgttccgccacctgatgagaaggctagaatagagatactcaaaatttacactagaacattacctatagattctagtgtaaacctagaggagttagccaaaaaacttgaaggatatacgggagctgatatagaagccttagctagggaaacaacaatgaaagtactgagacaaaagtattacgattgcttaaataaagccaaaaaggagtgcaaagatcaagagtgcactgataagactataaagagttgcatgagcaatctagaaataaaaattactatgcaagatttcctagataccatgaagattgtaacgcctagtctaactaaagctgatattatgagatatgaaaacatggtaaaagaaataaagagatcggtgattggttga

SEQ ID NO: 120082 - protein, 769 aa, Sulfolobus solfataricus P2
MSTSQSRIVLMSKTYFKRFGKMNNMSQQLKLRVVEARQRDVGRKVARITDYTISRLGIENGDYVEIIGPSGSALAQALIGDGIADNEIRVDGYIRRSIGVGIGDEVTVKRAQVQDATKVVLAPTQPISFSQSFVEYVKDWLMDKPISRGETISVPTYVGSIDFVVVSTQPSQSVRITGRTSLEIRQEPVKESAAVPKVTWEDIGDLEDVKEKIREIVELPMRHPEVFQHLGIEPPKGVLLYGPPGVGKTLLARALANEIGAYFTSINGPEIMSKFYGESEQRLREIFEEAEKNSPAIIFIDEIDAIAPKREEVTGEVEKRVVAQLLTLMDGIKGRGKVIVIGATNRPDAVDPALRRPGRFDREIEIRPPDAKARKEILQVHTRNMPLAEDVDLDKISEQTHGYTGADLAALAREAAMNALRRFINERKINLEQEQIPVDVLKELKVTMQDFIDAMKFIQPTLLREVYVEVPKVKWEDIGGLEEAKQQLREAVEWPLKFPEMFEKLGIRPPKGILLFGPPGTGKTMLAKAVATESGANFIAVRGPEILSKWVGESEKAVREIFRRARQTAPCVIFFDEIDSIAPMRGFTHDSGVTERIVNQLLSEMDGIQSLNRVVVIAATNRPDILDPALLRPGRFDRLIYVPPPDEKARIEILKIYTRTLPIDSSVNLEELAKKLEGYTGADIEALARETTMKVLRQKYYDCLNKAKKECKDQECTDKTIKSCMSNLEIKITMQDFLDTMKIVTPSLTKADIMRYENMVKEIKRSVIG

SEQ ID NO: 120083 - DNA, 2244 bp, Sulfolobus tokodaii str. 7
  CDS (1)..(2244): transl_table=11
atgagccaagaggtcagtctaagagtaagtgaagctaggcaaagagacgtaggaaaaaagattgcaagattatcagattacacgatgagaaaacttgggattgaaactggagattacattgaaataataggtccaaatggttccgccctagctcaagctatgccttcttatgatatttctgatgacgaaataaagattgatgggtatattaggaaatctataggagtggggatcggcgatgatgtaaaggtaaagaaagctaatgtaactccagcaacaaagataactcttgcacctacacagccaataagatttgatagaagtttcgtagaatatgtgaaagaccaactaatgaataaaccgttggcaaagggagaaacaataccagtcccaatttacactggtacattagatttcatagtaataaatactcaaccttcaaattatgtatatgttacagagtctacaaaccttgagataagagaagaaccagctaaagaaagtgaattgggcggatatcctaaagtaacatgggaggatataggcgatttagaagaggctaaacaaaaaatcagagaaatagttgaatggcctttaaggcaccctgaattattccaaagattagggatcgaaccacctaaaggaatcttgctatatggtcctccaggaaatggtaaaactttacttgctagggcattagctaatgaggttggagctagtttttatacaattaacggcccagaaattatgagtaaattctatggtgagagcgaacaaagactaagagaaatatttgaagaggcacagaaaaatgccccagctataatatttattgacgaaatagattctatcgcacctaaaagagaggaagttactggtgaagttgagaagagagttgtagcacaactattaacattaatggacggaattaaaggtagaggaaaagtaatagtaataggtgctacaaatagaccagatgcggtagatccagcactaagaaggcctggaagattcgatagggaaatagagattagacctccagatactaaaggaagaaaagaaatcctacaagtacatacaagaaatatgccattagcagaagatgtagatttagataaacttgcagaaattacatacggatatactggagcagatttagcagcattagcaaaagaagccgctatgaatgcgttaagaaggtttatagctgagaaaaaaataaatcttgaacaagaaagaattcctgctgaaattttaaaggaattaaaagttactatgcaagatttcttagaggctatgaaatctatacagccaactctccttagagaagtttatgttgaagttccaaaagttcattggaatgatattggtggtcttgaagaggttaaacaacagcttagggaagcggtagaatggcctttaagattttcagaactatttaacaaaagcggaataactccgcctaagggtattttgttgtttggtcctcctggtactggtaagactatgcttgctaaggctgttgctactgagagtggtgctaattttattgctgttcgtggtcctgaaatcttatcaaagtgggttggtgagagtgagaaggctattagggaaatatttaggaaggctaggcaagcagcaccaacaataatattctttgatgaaatagatgcaatagcaccaatgagaggactaacaacagacagtggcgtaacagaaagaatagtaaaccaactactagcagaaatggacgggattgtgcccctaaataaggttgtcgttattgctgctactaataggcctgatattcttgatcctgctttgttgaggcctggtaggtttgataggttgatttatgttcctccgccagataagagggctagggctgagattttgaaagttcatactaggaatgtgccattagctgaagatattacattagacgagctagctgaaaaaacagaaggctacacaggtgcagatattgaagctttggtaagagaagctacaattaatgctatgagaaagatattcaatgattgtgacaagaaagccaaagatcaatgtcagaataatgttgattgttataatagtaaaatgagggattgtatgaataatgcaaaagttattgtaacaaaagaagattttaataaagctttagaagtagttaaaccaagtttaacagcagctgacatacaaagatatgaaagactagcaaaagaattaaagaggtcagtattatga

SEQ ID NO: 120084 - protein, 747 aa, Sulfolobus tokodaii str. 7
MSQEVSLRVSEARQRDVGKKIARLSDYTMRKLGIETGDYIEIIGPNGSALAQAMPSYDISDDEIKIDGYIRKSIGVGIGDDVKVKKANVTPATKITLAPTQPIRFDRSFVEYVKDQLMNKPLAKGETIPVPIYTGTLDFIVINTQPSNYVYVTESTNLEIREEPAKESELGGYPKVTWEDIGDLEEAKQKIREIVEWPLRHPELFQRLGIEPPKGILLYGPPGNGKTLLARALANEVGASFYTINGPEIMSKFYGESEQRLREIFEEAQKNAPAIIFIDEIDSIAPKREEVTGEVEKRVVAQLLTLMDGIKGRGKVIVIGATNRPDAVDPALRRPGRFDREIEIRPPDTKGRKEILQVHTRNMPLAEDVDLDKLAEITYGYTGADLAALAKEAAMNALRRFIAEKKINLEQERIPAEILKELKVTMQDFLEAMKSIQPTLLREVYVEVPKVHWNDIGGLEEVKQQLREAVEWPLRFSELFNKSGITPPKGILLFGPPGTGKTMLAKAVATESGANFIAVRGPEILSKWVGESEKAIREIFRKARQAAPTIIFFDEIDAIAPMRGLTTDSGVTERIVNQLLAEMDGIVPLNKVVVIAATNRPDILDPALLRPGRFDRLIYVPPPDKRARAEILKVHTRNVPLAEDITLDELAEKTEGYTGADIEALVREATINAMRKIFNDCDKKAKDQCQNNVDCYNSKMRDCMNNAKVIVTKEDFNKALEVVKPSLTAADIQRYERLAKELKRSVL

SEQ ID NO: 120085 - DNA, 2103 bp, Sulfolobus tokodaii str. 7
  CDS (1)..(2103): transl_table=11
atgatttcgcaacagtttttctttgtaagagtatacgaaggaagagttaagcaagatgttgctttagtcagtagtaatattatgcagtcttatggattattaccaggtgatgtaatactccttttgggaaataggcaaattcctttttatgttcaagaaagttccgataacaagatagatggtatcgttataggcgaaaataaacttaaacttttagggataagaagtggtgaaagagtaccagttaggaaagtttcagtttcctctataaaagaaataactttggcaccctcagaacaaaagaattacgatctaagaaaattaaacttagaattaagaggaagattagttaccagaggtataaccttagaatcaaaagaaggaacttttgcagtaatttcctattccccacaagtggaagttggttatatttcgagtgagactcgaataaatatagctccggaatcaatcagaatagctcagaaaaatattccttatgtaacccttgatgatgttggtggtttatcaaaacaaataagggaattactagaaatagtagaattagccttaacaaaagtagaggtagccaggatgttaggtttaagaccgcctaaaggagtactcctctatggtcctccaggtactggaaagactttgattgcaaaagctattgcaaatactattatggctaacttcttttatataagtggtccagaaataggctccaaatattatggtgagagtgaaaaaaggctaagagatatatttgagcaagctgagaaaaatgctccatccataattttcgtagacgaaatagatgcaatcgcacctaatagagatactacatcatctgagactgacagaaggattgtagcacagctattaacattaatggatggtttgactagtggcagtggagtagtggttattggtgcaacaaatagaccaaatgctctagatccggccctaagaagacctggtagatttgacagagaaatagaaattcccgttccagataagcaaggaagattagaaatattaaaaatacatactaggcgagttcctttatcacaagaagtagacttggaaaaaattgctgagaggacccatggcttcgtcggtgctgatctagaggctttagtaagggaagcagttctgagtgcttatcatagatgtaatggtaatttagaatgtatgcaagttacgatgagtgattttgatgaagcattaaagaatgtagaaccttcagcactaagagaattcagaattgaaatacctaatactacatgggaagacattgtaggtttagaagatattaaactagagctaaaggaagttgtagaatggccattaaaggatccagggttatatgaggaaatgaaagcagaaataccgtctgggattcttctttacggaccacccggtactggaaagactatgttagctagggctgttgcacatgaaagtggtgctaactttattgcgataaatgggccggaattaatgagtatgtgggtaggagagactgaaagggctattagagaggtatttaagaaagctagacaatcctcacctactattatattctttgatgagatagatgcaatagcagttgcaaggggtgctgatccaaataaagtaactgataggattgttagccaattattaactgaaatggatgggataagcaaaaggagggaaaaagtagttatcatagctgcaactaacagaccagacataatagacccagctttattaagacccgggagattagaaaagttaatttatgttcccccaccagattatcagactaggatagctttgttctcaaggctcataaataatagacctcatgaggaaattgatattgaaagattagctaaattaactgaaaattatacgccagctgagattaaaggaatagtgaataaggctgtattattagcaattagaagagcaaaactaaagaacgaaaaacctgagctcacaatgagtgattttgaagaagctttgaagactgtaaaacctattgttactcagactatgttagattattatgtctcattctatcaaagagtaaggagagcaagtggatatgcttga

SEQ ID NO: 120086 - protein, 700 aa, Sulfolobus tokodaii str. 7
MISQQFFFVRVYEGRVKQDVALVSSNIMQSYGLLPGDVILLLGNRQIPFYVQESSDNKIDGIVIGENKLKLLGIRSGERVPVRKVSVSSIKEITLAPSEQKNYDLRKLNLELRGRLVTRGITLESKEGTFAVISYSPQVEVGYISSETRINIAPESIRIAQKNIPYVTLDDVGGLSKQIRELLEIVELALTKVEVARMLGLRPPKGVLLYGPPGTGKTLIAKAIANTIMANFFYISGPEIGSKYYGESEKRLRDIFEQAEKNAPSIIFVDEIDAIAPNRDTTSSETDRRIVAQLLTLMDGLTSGSGVVVIGATNRPNALDPALRRPGRFDREIEIPVPDKQGRLEILKIHTRRVPLSQEVDLEKIAERTHGFVGADLEALVREAVLSAYHRCNGNLECMQVTMSDFDEALKNVEPSALREFRIEIPNTTWEDIVGLEDIKLELKEVVEWPLKDPGLYEEMKAEIPSGILLYGPPGTGKTMLARAVAHESGANFIAINGPELMSMWVGETERAIREVFKKARQSSPTIIFFDEIDAIAVARGADPNKVTDRIVSQLLTEMDGISKRREKVVIIAATNRPDIIDPALLRPGRLEKLIYVPPPDYQTRIALFSRLINNRPHEEIDIERLAKLTENYTPAEIKGIVNKAVLLAIRRAKLKNEKPELTMSDFEEALKTVKPIVTQTMLDYYVSFYQRVRRASGYA

SEQ ID NO: 120087 - DNA, 2214 bp, Halobacterium sp. NRC-1
  CDS (1)..(2214): transl_table=11
atgcgacttacggtcaaacaactcaagaaccgcgatccagggagcggtatggccgtcatcgaccgcgatgcgcttcaggagatcggcgtcagcagtggcgacttcgtcgcgatcgagggccgcaacggcggacgaacggtcgcccgcgtctggcctagtaacacgagcgacgcgggtcgcggtatcatccgaatcgacggccagctccgacaggcagcgaacgtcagcatcgacgaccgcgtcgaggtcgagaaaacggaggtcgagccggcggaccgagttaccgtctccctaccacagaatcttcagatcagaggagatctcggctcgcacctccgcgaacatctcgtcgaccaggcggtgagggcaggacagacggtcgcgttcccgatcgggtttggtatgttctccggtcggtctggtcgacgcattcccctacgggtggtcgatacgcagcccagcgggacggtcgtcgtgcagaacacgaccgagatcgagatcgccgaccagagcgcccaggaggtctccgtcgaatcgggagaaccggaaaatacgaccgctccagccctcacgtacgaggacatcggcggcctcgacgacgaactcgagcaggttcgggagatgatcgagttgccgatgcgccaccccgagctgttcgggacgctcggcatcgaaccgccgaagggcgttctcctccacggtcctcccgggacggggaagaccctgatcgccaaggccgtcgccaacgaaatcgacgctcacttccagacgatctctggcccggagatcatgagcaagtactacggcgagagcgaagagcagcttcgcgacgtgttcgaggaggccgaggagaacgcgcccgcgatcgtcttcattgacgaactcgactccatcgcgcccaagcgcgaagacgtcagtggcgatgtcgaacgccgggtcgtcgcccagttgctctcgctgatggacggcctcgaagagcgcggccagctcacggttatcggcacgaccaaccgcgtcgatgccgtggatccggcgctccgccgtcccggtcggttcgatcgtgaaatcgagatcggcgtccccgaccatgacgggcgcgaaaagatccttcagatccacacgcgcgggatgcctctcggcgacggcgtcgatctcgaccggtacgctgagaatactcaaggtttcgtcggcgcagatctcgagaacctcgtgaaagagagcgcgatgcacgcgcttcgccggattcggcccgatctggatctcgacgaagaagagatccccgccgacatcctcgactcgatagaggtgaccgagaacgacttcaaagaggcgctgaggggcatcgaaccctccgcgctgcgagaggtattcgtcgaggtccccgatgtcacctgggaccacgtcggtggtctcgatgatgcgaaggaacgcctccaggagaccgtccagtggcccctcgaacacgccgacgcctacgagcaagtcgcactcgaaccggcgaagggcgtcttgctctacgggccgcccggcaccgggaagacgctgcttgcgaaggccgttgctaacgaggcgaactcgaacttcatctcgatcaaggggcctgagctgttcaacaagtacgtcggcgagtccgagaggggcgttcgtgaagtgttctcgaaggcccgcgagaacgcccccacggtggtgttcttcgacgagatcgacgcgatcgcctcggaacgtggccagggcgttggcgactcgaacgtcggcgaacgcgtggtctcacagctgctgaccgaactcgacggtctcgaagaactcgaggacatcgtagtgatcgccacgacgaaccgcccagacctcatcgacgatgccttgctccgaccgggacggctcgaccgtcacgtcgcagtcgacgagcccgacgaagcggcacggcgtgagatcttcgagatccacaccgaggacaagccgctggccgaagatgtcgacgtcgacgaactcgtcgagcggactgacggctacgtcggtgccgatatcgaggcggtctgccgcgaggctgcgacggtcgccgtccgcgaatacgtccgtgcgactgcgagtgccgaatcggccaacgtcgacgaaatcgagctgtcaatagagcacttcgagcaggcgctcgaagaggtcgactcaaacgctggatccgaaacgcaggcgttcgaaaagccagctgaagccgtgtag

SEQ ID NO: 120088 - protein, 737 aa, Halobacterium sp. NRC-1
MRLTVKQLKNRDPGSGMAVIDRDALQEIGVSSGDFVAIEGRNGGRTVARVWPSNTSDAGRGIIRIDGQLRQAANVSIDDRVEVEKTEVEPADRVTVSLPQNLQIRGDLGSHLREHLVDQAVRAGQTVAFPIGFGMFSGRSGRRIPLRVVDTQPSGTVVVQNTTEIEIADQSAQEVSVESGEPENTTAPALTYEDIGGLDDELEQVREMIELPMRHPELFGTLGIEPPKGVLLHGPPGTGKTLIAKAVANEIDAHFQTISGPEIMSKYYGESEEQLRDVFEEAEENAPAIVFIDELDSIAPKREDVSGDVERRVVAQLLSLMDGLEERGQLTVIGTTNRVDAVDPALRRPGRFDREIEIGVPDHDGREKILQIHTRGMPLGDGVDLDRYAENTQGFVGADLENLVKESAMHALRRIRPDLDLDEEEIPADILDSIEVTENDFKEALRGIEPSALREVFVEVPDVTWDHVGGLDDAKERLQETVQWPLEHADAYEQVALEPAKGVLLYGPPGTGKTLLAKAVANEANSNFISIKGPELFNKYVGESERGVREVFSKARENAPTVVFFDEIDAIASERGQGVGDSNVGERVVSQLLTELDGLEELEDIVVIATTNRPDLIDDALLRPGRLDRHVAVDEPDEAARREIFEIHTEDKPLAEDVDVDELVERTDGYVGADIEAVCREAATVAVREYVRATASAESANVDEIELSIEHFEQALEEVDSNAGSETQAFEKPAEAV

SEQ ID NO: 120089 - DNA, 2406 bp, Drosophila melanogaster
  CDS (1)..(2406)
atggcagattccaagggtgaagatctggctacggcgatcctgaagcgcaaggaccgtcccaaccgactgattgtggaagaggcgcagaatgacgacaactctgtggtgtcgctatcgcaggcgaagatggatgagctgcagctcttccgtggcgacaccgtgattctgaagggcaagcgccgaaaggagacggtgtgcatcgtgctctcggacgacacctgtcccgacgagaagatccgcatgaaccgcgtggtgcgcaacaacctgtgcgtccatctttcagatgtggtttccgtgcagtcctgcccggacgtcaagtacggcaaacgggtgcgcatcctgcccatcgacgaaagcaccgaaggcgttaccggcaacctgttcgagatctatctgaagccgtacttcctagaggcctatcggccaatccacatgggcgacaactttattgtgcgcgccgccatgcgtcctattgagttcaaggtggtgctgaccgacccggagccctactgcatcgtagctcccgagacggtaatcttctgcgacggtgatccaattaagcgcgaggaggaggaggagtccctaaacgccgttggctacgatgatatcggtggttgccgcaagcagctggcccagatcaaggagatggttgagttgcctttgcggcatccatcgctcttcaaggccattggtgtgaagccaccgcgtggtattcttatgtacggtcccccgggtaccggtaagaccctgattgccagggctgtggccaacgagaccggagcctttttcttcctgattaacggaccggagatcatgtccaaactggccggagagtcggaatcgaatctgcgcaaggccttcgaggaagccgagaaaaactcgccggctatcatcttcatcgatgagatcgacgctattgcccccaagcgtgacaagacccacggtgaggtggagcgtcgcattgtgtcgcagcttttgaccctgatggatggcatgaagaagagctcccatctgatcgttatggctgctaccaacaggcccaactccattgacccggccctgcgtcgctttggacgttttgatcgtgagattgacatcggcattccagatgccactggacggctggaggtgctgcgcattcacaccaagaacatgaagctgcatgatgatgttgacctggagcagattgctgccgaatcccacggacatgtgggcgctgatctggcttcactctgctctgaggctgcccttcagcaaatccgtgagaagatggacctcatcgatttggaagacgataagatcgatgccgaggtgctggcgtcgctggccgtgacaatggagaacttccgctacgctatgaccaagtccagtccatcggcgctgcgtgaaactgttgttgaggtgcccaacaccacctggacagacatcggaggtctggagagcgtcaagaaggaattgcaggagctggtgcaatacccagtggagcatccggacaagttcttgaagtttggcatgcagcccagtcgcggtgtccttttctacggaccccctggttgcggtaagacgctgctggccaaggccattgccaacgagtgccaggcgaacttcatctcagtcaagggtcccgaactgctgaccatgtggttcggcgagtctgaggccaacgtgcgcgacatcttcgataaggcccgctcggcggctccttgtgtgctcttcttcgacgagctggactcgatcgccaaagcccgtggcggtaatgtcggcgatgctggcggcgccgctgatcgtgtgatcaatcagatccttaccgaaatggatggcatgggagccaagaagaatgtgttcatcatcggagccaccaatcgcccggacattatcgatccggccatcctccgtccgggccgtctggatcagttgatctatattccgctgcccgacgacaaatcgcgtgaggctatcctgaaggctaacttgcgcaagtcgccgctggccaaggaagtagaccttacctacatcgccaaggtgacgcagggcttctctggcgccgatctgaccgagatctgccagcgggcttgcaagctggccatccgacaggccatcgaggctgaaattcgtcgcgagaaggagcgcgccgaaaatcagaactccgcgatggacatggacgaggacgatccagtgccggagattactagcgcccacttcgaggaggccatgaagttcgctcgccgttcggtgtccgataatgacatcaggaagtacgagatgtttgcccagactttgcagcagtcccgtggattcggacagaacttcagattccccggtcaaaccggcaacacctcaggatctggtaacaacttgccagttaactcgcccggcgacaacggcgacgatgatctttacagttag

SEQ ID NO: 120090 - protein, 801 aa, Drosophila melanogaster
MADSKGEDLATAILKRKDRPNRLIVEEAQNDDNSVVSLSQAKMDELQLFRGDTVILKGKRRKETVCIVLSDDTCPDEKIRMNRVVRNNLCVHLSDVVSVQSCPDVKYGKRVRILPIDESTEGVTGNLFEIYLKPYFLEAYRPIHMGDNFIVRAAMRPIEFKVVLTDPEPYCIVAPETVIFCDGDPIKREEEEESLNAVGYDDIGGCRKQLAQIKEMVELPLRHPSLFKAIGVKPPRGILMYGPPGTGKTLIARAVANETGAFFFLINGPEIMSKLAGESESNLRKAFEEAEKNSPAIIFIDEIDAIAPKRDKTHGEVERRIVSQLLTLMDGMKKSSHLIVMAATNRPNSIDPALRRFGRFDREIDIGIPDATGRLEVLRIHTKNMKLHDDVDLEQIAAESHGHVGADLASLCSEAALQQIREKMDLIDLEDDKIDAEVLASLAVTMENFRYAMTKSSPSALRETVVEVPNTTWTDIGGLESVKKELQELVQYPVEHPDKFLKFGMQPSRGVLFYGPPGCGKTLLAKAIANECQANFISVKGPELLTMWFGESEANVRDIFDKARSAAPCVLFFDELDSIAKARGGNVGDAGGAADRVINQILTEMDGMGAKKNVFIIGATNRPDIIDPAILRPGRLDQLIYIPLPDDKSREAILKANLRKSPLAKEVDLTYIAKVTQGFSGADLTEICQRACKLAIRQAIEAEIRREKERAENQNSAMDMDEDDPVPEITSAHFEEAMKFARRSVSDNDIRKYEMFAQTLQQSRGFGQNFRFPGQTGNTSGSGNNLPVNSPGDNGDDDLYS

SEQ ID NO: 120091 - DNA, 2196 bp, Pyrobaculum aerophilum str. IM2
  CDS (1)..(2196): transl_table=11
gtgtctgactggattgagctaagagtccaggagagtaaggcccgtgacgccaacaggccggtggttagaattgaccctgaggttatggaaagggccggaattgttgttggagacgtggtggagattgtgggaaggaggaggactgcggctaaggtctggaacggcctccctgaggatagggggaaaggcgttattagaatgaacagtattttgcgtaaaaatgcagacgtttcgcttaatgagactgtaaaagtaagaagggtggagcctaagcccgcggcttttgtaaaactagccccagtctctatgactatagccgtcgacgccaatttcttacagtacataaaacaaaggcttagggaatacgtactcgttgagggcgacatgttacaaattcacgtcctcagccagcccctgacttttcaagtagtacaaactaagccatctaacaccgtgttaattattacagaggacacgcaaattcagattttcgaaaagccggtatctggagttaaaatcccgcatgtgacttgggaggatattggcgatttagaagacgccaagcagaaaattagagagcttgtggagctccccttgcgccatcccgagttgtttaaacatttaggcattgagcctcccaagggaattctcctcattggccctccggggactgggaagactctcttggccaaggccgttgccaatgaggccaatgcctatttcgtcgccataaacggccccgagattatgtctaaatactacggcgaatctgaggcaaggctgagggagatatttgaagaggctaagaaaaacgccccggcgataattttcatagacgaaatagacgccatagccccaaagagagaggaagtgactggggaggtggagaagagagtagtggcccagctacttacgctaatggacgggctacaagaaagaggacaagtgatagtcataggcgccaccaaccgcccagacgcagtagacccggcgttgagaaggccggggagattcgacagagaaatttggattaacccgcctgacttcaaggggaggtatgaaattctcttaatacacacccgtaacatgcccctggctcctgacgtagatttgagaaaactggccgagatgacccacggcttctccggggctgatctggccgccctggctagagaggccgccatgtcggcgttgcggagggcgatacaaagcggcttaattgacttgaaccagccgtctatacctcctgaggtgtttgagaaaattaaggtgacaatgaccgatttcacaagcgcgcttagggagatagtcccctctgcgttgagagaaatacacatagaggttcctcgggtccgctgggaggacgtcggaggcttagaaaacgtaaagcaagagttgagagaagccgtggagtggcctttgaaatatccagacaagtttaagaaatttggactgaggcctcccaagggcatattgctcttcgggcctcccggcactgggaagaccctcttggcgaaggccgtggccactgagtcaggcgccaatttcattgcggtaagaggcccggagatattctctaaatgggtcggcgagtctgagaaaatggtgagggagatttttagaaaggcgcgtatggcggcgccggcggtggtgtttatagacgaaatagatgccttagccactgcgagagggcttggcggcgactcgcttgtaacagaacgcgtcgtggcgcagttgctcgccgaaatggacggcataaaggcgcttgaaaacgtggtggtaatcgccgcaacaaatagacctgatcttgtagacccggcgttgctgaggcccgggcgttttgatagaattatttacgtgcctcctccagattttaaggcgaggcttgacatcttgcttatacacactagatccacgcctcttgcaaaagacgtcgacttggaggagctagcccggaggactgagggatattccggggcggatttagagcttttagtaagagaggcgacgttcttagcgcttagggaggacataaacgcaaaggaggtttcaatgaggcattttgaagaggctatgaaaaaagtgaggccctctataactcccgacatgcttaagttctacgagtcgtggctggagaaggccaggcagttaacagtttctgctaaggcgaaggccacgcccccgctgtatttatga

SEQ ID NO: 120092 - protein, 731 aa, Pyrobaculum aerophilum str. IM2
MSDWIELRVQESKARDANRPVVRIDPEVMERAGIVVGDVVEIVGRRRTAAKVWNGLPEDRGKGVIRMNSILRKNADVSLNETVKVRRVEPKPAAFVKLAPVSMTIAVDANFLQYIKQRLREYVLVEGDMLQIHVLSQPLTFQVVQTKPSNTVLIITEDTQIQIFEKPVSGVKIPHVTWEDIGDLEDAKQKIRELVELPLRHPELFKHLGIEPPKGILLIGPPGTGKTLLAKAVANEANAYFVAINGPEIMSKYYGESEARLREIFEEAKKNAPAIIFIDEIDAIAPKREEVTGEVEKRVVAQLLTLMDGLQERGQVIVIGATNRPDAVDPALRRPGRFDREIWINPPDFKGRYEILLIHTRNMPLAPDVDLRKLAEMTHGFSGADLAALAREAAMSALRRAIQSGLIDLNQPSIPPEVFEKIKVTMTDFTSALREIVPSALREIHIEVPRVRWEDVGGLENVKQELREAVEWPLKYPDKFKKFGLRPPKGILLFGPPGTGKTLLAKAVATESGANFIAVRGPEIFSKWVGESEKMVREIFRKARMAAPAVVFIDEIDALATARGLGGDSLVTERVVAQLLAEMDGIKALENVVVIAATNRPDLVDPALLRPGRFDRIIYVPPPDFKARLDILLIHTRSTPLAKDVDLEELARRTEGYSGADLELLVREATFLALREDINAKEVSMRHFEEAMKKVRPSITPDMLKFYESWLEKARQLTVSAKAKATPPLYL

SEQ ID NO: 120093 - DNA, 2217 bp, Pyrobaculum aerophilum str. IM2
  CDS (1)..(2217): transl_table=11
atgtccactgaggtcattctaaaagtcgccgaggcgaggtcgcgcgacgtcggccgcagtattgtcaggttgcccgtccgcataatgaaaaagctcggcattgagccaggggattacgtggagattatcgggaggaagtccgcatatgcgcaggtatggcccgcgtatccagaggacgaggataaagaggtcattagaatggacggcattataaggcagaatgcaggggtgggcataggcgatacggtaaaagtgagaaaggcggtattaaaacccgcgcagagagtagtgctgaccccaacagagcctgtaagagtagactcagaatacttgaagaaacagatactgctcggcaagccggtggccagggggcaggcaatagacgtgcccttttacggcggggcgataagatttgtcgttgtgcaagtccagccaggcccggcggcgtacgtctcaatagacacagaagtcacagtgcgcgaagagcctgtaaaagaggctgagctgacaattcccagagtgacttgggaggatattggcgatttagaagacgccaagcagaaaattagagagcttgtggagctccccttgcgccatcccgagttgtttaaacatttaggcattgagcctcccaagggaattctcctcattggccctccggggactgggaagactctcttggccaaggccgttgccaatgaggccaatgcctatttcgtcgccataaacggccccgagattatgtctaaatactacggcgaatctgaggcaaggctgagggagatatttgaagaggctaagaaaaacgccccggcgataattttcatagacgaaatagacgccatagccccaaagagagaggaagtgactggggaggtggagaagagagtagtggcccagctacttacgctaatggacgggctacaagaaagaggacaagtgatagtcataggcgccaccaaccgcccagacgcagtagacccggcgttgagaaggccggggagattcgacagagaaattcacataccaatgccagataaaagagctaggcgtgagatactcgcagttcacactaggaatatgccgctgtgcacaaaggccgacgtggagacaaagatttgtaatccaggcgacgaagtggatttagacagaattgccgagatgacccacggctacactggcgccgacctcgccgccttggctaaagaggccgccatgacggctctgcgcaaggctatgaacaaggggatgataaatatagaacaggacattatcccccaggaggtgttgagcaagttgaaggtcgggatgtcggatttcctagaggccatgaagttcgtccaccccacggtcttgcgcgaggtcattatagaagtcccagaggtgcactgggacgatattggcggctacgacactataaaacaagagttaagggaaatagttgagtggcccatgaagtataaacactattttgacgaactcggcgtagagccgcccaagggcattctcctctttggaccgcctggcgtgggcaagacgctattcgccaaggcggtggccaccgagtcaggcgccaactttattgcagtacgggggccggagctgttgtctaaatgggtcggcgagagcgagaaggcgattagagaggtctttaaaaaggcgcgtatggcggcgccctgcgttatattcttcgacgagatagactccatagcccccgccaggggctctaggctcggggactcaggcgtaactgacagaatggttaaccagctcctcgccgaaatggacggcatagggacgttgaaaaacgtagtagtcatggcggcgactaataggccggacatcttagacccagcgctgttaaggccggggcgttttgaccgcgttatatacgtcccgcccccagacctcaaggcgagaattgaaatcttcaaagtacacaccaagagggttaagctagccgacgacgtcaacctagaggagctggcaaaaagaacagagggctacaccggcgccgacattgcggcgcttgtgagagaggcggctatgttagccctaagggagactataagggagaagactgttaaggcaaagcccgtgtccatgaagcacttcgaagaggcgttgaagagaatacccccatctctcacgccggaggacataaggcgttacgaggaaatagctaagaggctcagacgggctattgccggcttgtga

SEQ ID NO: 120094 - protein, 738 aa, Pyrobaculum aerophilum str. IM2
MSTEVILKVAEARSRDVGRSIVRLPVRIMKKLGIEPGDYVEIIGRKSAYAQVWPAYPEDEDKEVIRMDGIIRQNAGVGIGDTVKVRKAVLKPAQRVVLTPTEPVRVDSEYLKKQILLGKPVARGQAIDVPFYGGAIRFVVVQVQPGPAAYVSIDTEVTVREEPVKEAELTIPRVTWEDIGDLEDAKQKIRELVELPLRHPELFKHLGIEPPKGILLIGPPGTGKTLLAKAVANEANAYFVAINGPEIMSKYYGESEARLREIFEEAKKNAPAIIFIDEIDAIAPKREEVTGEVEKRVVAQLLTLMDGLQERGQVIVIGATNRPDAVDPALRRPGRFDREIHIPMPDKRARREILAVHTRNMPLCTKADVETKICNPGDEVDLDRIAEMTHGYTGADLAALAKEAAMTALRKAMNKGMINIEQDIIPQEVLSKLKVGMSDFLEAMKFVHPTVLREVIIEVPEVHWDDIGGYDTIKQELREIVEWPMKYKHYFDELGVEPPKGILLFGPPGVGKTLFAKAVATESGANFIAVRGPELLSKWVGESEKAIREVFKKARMAAPCVIFFDEIDSIAPARGSRLGDSGVTDRMVNQLLAEMDGIGTLKNVVVMAATNRPDILDPALLRPGRFDRVIYVPPPDLKARIEIFKVHTKRVKLADDVNLEELAKRTEGYTGADIAALVREAAMLALRETIREKTVKAKPVSMKHFEEALKRIPPSLTPEDIRRYEEIAKRLRRAIAGL

SEQ ID NO: 120095 - DNA, 2514 bp, Pyrococcus furiosus DSM 3638
  CDS (1)..(2514): transl_table=11
atgataattggaaggggagaagagagaaaagaagaaattaagcttagagtagctgaagctcttaagtgggacgttggaagaggtattgtaagatttgataagaaatatcagagaatgcttggagtcgaacctggggacattgtagaaattgaaggaaatagaattactgcagcaatagtggcaaacgcccacccagacgatagggggttggatatagttagaatggacggctacattagaaagaatgctggagttagcattggagattacgtaacaattaggagagctgaagttaaagaggcaaaaaaagttgttttagctcctgcccaaaagggagtatatatccagattccaggagacctagttaaaaacaacctcctgggaagacccgtggtaaaaggagacattgtagtggcaagtggaagaagtgaattttacacaggaacaccatttgacgagatattcagaggattctttgagatgtccatgggctttggagagctgaagtttgtagttgtaagtacagttcccagaggaatagtgcaaataacttacaatactgaagttgaagtacttccgcaagcggttgaggtcagagaggagaaagttcctgaagtcacctatgaggacattggtggtctaaaagaagcaatagagaagattagggaaatggttgaattgcccttgaagcatccagaattgtttgaaagattgggtattgagcctccgaagggtgttttgttgtatggtcctcctgggactggtaagactttgctggctaaggctgttgccaatgaggctaatgcttacttcattgcaattaatggtccggaaataatgagcaagtactatggagagagcgaagaaagattgagagagatattcaaggaagctgaggaaaatgcaccggcaataatctttattgatgaaattgatgcaattgctccaaagagagaagaagttgtcggagaggttgaaaaaagagtagtgtctcagctattaaccttaatggatgggctaaagagtagagggaaagtaatagtaattgcagccacaaataggcccgatgccattgatccagccttgagaaggcctggaaggtttgacagagaaatagaagtcggagttccagataagcagggtaggaaggaaatcctccagatccacacaagaggaatgccaatagagcctgattacgataaggaaagtgtcataaaagcactaaaagaacttgaaaaggaagaaaagtacgaaaagagcgaaatcaaaaagattatcgaagaaatcagcaaggcaacaagcgaagaggaagtcaaagaaattctaaagaagcacggcaagatattcatggatgttagggcaaagctaattgacaagttgctcgatgagctggctgaggttactcatggattcgttggtgctgatttggctgcgttggcaagagaggcagcgatggtagtgctgaggaggctaataaaagaaggtaaaataaacccagaagctgagagcattcccagggaagttcttgaggaattgaaggtaactaggagggatttctatgaggctttgaagatggtggagccttctgctcttagggaggttctcattgagattccaaacgtccactgggacgatatcggaggactagaagaagtaaaacaacaactaagagaagcagtagaatggccacttaagtatccgaaagctttcaagaggttaggcatttctccgcctaaggggattttgttgtatggtcctcctgggactggtaagactttgctggctaaggctgttgctactgagagtcaggctaattttattgccattcgtgggcctgaggttttgagtaagtgggttggtgagagtgagaagaggattagggaaatcttcagaaaagccagacaagcagccccagcaataatcttcatagacgaaatcgacgcaatcgcacctgctaggggtggatacgagggagagagagtaacagataggctgataaaccagttgctaactgagatggacgggatacaggaaaatagtggtgttgtggttattggtgctactaataggccggatattattgatccggctttgttgaggcctgggcgttttgataggcttattttagttccagctcctgatgagaaggctaggcttgagattttcaaggttcacactaggggcatgccattggctgatgacgttgacttgaaagagttggccaggaggactgaaggttacactggtgcagacatagcagcagtctgccgagaagcagcactaaacgctctaaggagagttgttaaaagtgtaccgaaggaggagttggaggaggagagcgaagagttccttgataagctaatagttacgaggaaggactttgaggaggcgctaaagaaagtcaagccaagtgtcaataaatacatgatggaatattacaggcaatttgaagagtcgaggaagagaattagtggggagtccatgggaagagagccagattactttactggatag

SEQ ID NO: 120096 - protein, 837 aa, Pyrococcus furiosus DSM 3638
MIIGRGEERKEEIKLRVAEALKWDVGRGIVRFDKKYQRMLGVEPGDIVEIEGNRITAAIVANAHPDDRGLDIVRMDGYIRKNAGVSIGDYVTIRRAEVKEAKKVVLAPAQKGVYIQIPGDLVKNNLLGRPVVKGDIVVASGRSEFYTGTPFDEIFRGFFEMSMGFGELKFVVVSTVPRGIVQITYNTEVEVLPQAVEVREEKVPEVTYEDIGGLKEAIEKIREMVELPLKHPELFERLGIEPPKGVLLYGPPGTGKTLLAKAVANEANAYFIAINGPEIMSKYYGESEERLREIFKEAEENAPAIIFIDEIDAIAPKREEVVGEVEKRVVSQLLTLMDGLKSRGKVIVIAATNRPDAIDPALRRPGRFDREIEVGVPDKQGRKEILQIHTRGMPIEPDYDKESVIKALKELEKEEKYEKSEIKKIIEEISKATSEEEVKEILKKHGKIFMDVRAKLIDKLLDELAEVTHGFVGADLAALAREAAMVVLRRLIKEGKINPEAESIPREVLEELKVTRRDFYEALKMVEPSALREVLIEIPNVHWDDIGGLEEVKQQLREAVEWPLKYPKAFKRLGISPPKGILLYGPPGTGKTLLAKAVATESQANFIAIRGPEVLSKWVGESEKRIREIFRKARQAAPAIIFIDEIDAIAPARGGYEGERVTDRLINQLLTEMDGIQENSGVVVIGATNRPDIIDPALLRPGRFDRLILVPAPDEKARLEIFKVHTRGMPLADDVDLKELARRTEGYTGADIAAVCREAALNALRRVVKSVPKEELEEESEEFLDKLIVTRKDFEEALKKVKPSVNKYMMEYYRQFEESRKRISGESMGREPDYFTG

SEQ ID NO: 120097 - DNA, 2391 bp, Pyrococcus furiosus DSM 3638
  CDS (1)..(2391): transl_table=11
atgagtgagaagaagaaggaagttaagcttaaggttgcctctgcttatcagagagatgttggtaggggcatagtaagaatagacagggaaacgatgagagagctaggaatatcaccaggagatgttgttgagatcataggaactaagaatacagcagcaatagcttggccagcataccccgaagacgaggggcttggaattatcagaatggatggtacaataagaaagaatgctggagttggacttggcgatgaagtaattgtaagaaaagctgacgttaaagaggctagaaaagtagtattggctccaacagagccaataagatttggaagggacttcattgaatggctacacgaaaggttaattggaaggccagtagttagaggagactacattaaggtaggtgttcttggtcaggagctaacttttgtagtaacaacaactcagccagctggagttgttcagattacagaatttacagactttgatgtcagtgaaagacctgtaaaagaagtagagaaaagaataacaacaggagttacttacgaagacattggtggtctaaaagatgtaatagagaagataagagagatgatagagcttccactaaagcacccagagctattcgagaagcttggtattgagcctccgaagggtgttttgttgtatggtcctcctgggactggtaagactttgctggctaaggctgttgccaatgaggctaatgcttacttcattgcaattaatggtccggaaataatgagcaagtactatggagagagcgaagaaagactaagagaagtgtttagagaggcagaagaaaatgcaccagcaataatcttcattgatgagattgatgcaattgctccaaagagagaagaagttactggagaagtagagaagagagttgttgctcagttattgaccttaatggatggattaaagagcagaggaaaggtcatagtcataggtgccacaaacaggccagatgccattgatccagccttgagaaggcctggaaggtttgacagagaaatagaaataggcattccagacaagcagggtaggaaggaaatcctccaaatccacacaagaggaatgccaatagagccagactttaggaaggatgatgttctaaagattctcgaagagctaagaggggaggagaagttcaaggatgttattgacagggcaatagatcaggtcagcaaggctaaagaagaagaaattcagcaagtgctcaaaagaataagccaagatctatatgaagaggttaaagcaagacttattgacaagctattagaggagctggctgaggttacttatggattcgttggtgctgacttggccgcattggcaagagaggcagcaatggcagcactgaggaggctcataagagagggtaagatagactttgaagcagaaacgataccaagagaggtcttagaagagcttaaggtaactaggagggatttctatgaggctttgaagatggtggagccttctgctcttagggaggttctcattgagattccaaacgtccactgggacgatatcggaggactagaagaagtaaaacaacaactaagagaagcagtagaatggccactcaaatacccagaggccttcagggcatttggaataactccgcctaaggggattttgttgtatggtcctcctgggactggtaagactttgctggctaaggctgttgctactgagagtcaggctaattttattgccattcgtgggcctgaggttttgagtaagtgggttggtgagagtgagaagaggattagggaaatcttcagaaaagccagacaagcagccccagcaataatcttcatagacgaaatcgacgcaatcgcaccaacaagaggaactgatgtcaatagagtaaccgacagaataatcaaccagctactgacagaaatggatggtatagtggagaatagtggtgttgtggttattggtgctactaataggccggatattattgatccggctttgttgaggcctgggcgttttgataggcttattttagttccagctcctgatgagaaggctaggcttgagattttcaaggttcacactaggggcatgccattggctgatgacgttgacttgaaagagttggccaggaggactgaaggttacactggtgcagacatagcagcagtctgccgagaagcagcactaaatgccatgagaagggcccttgagcaaggaataatcaaggaaggcatgaaagctgacgaaataaggaaagtggctaaggtaacaatgaaggactttgaagaggcattaaagaagattggaccttcagtaagtaaagaaaccatggaatactacctcaaagtccaagagaagttcaagcaggccagaggctga

SEQ ID NO: 120098 - protein, 796 aa, Pyrococcus furiosus DSM 3638
MSEKKKEVKLKVASAYQRDVGRGIVRIDRETMRELGISPGDVVEIIGTKNTAAIAWPAYPEDEGLGIIRMDGTIRKNAGVGLGDEVIVRKADVKEARKVVLAPTEPIRFGRDFIEWLHERLIGRPVVRGDYIKVGVLGQELTFVVTTTQPAGVVQITEFTDFDVSERPVKEVEKRITTGVTYEDIGGLKDVIEKIREMIELPLKHPELFEKLGIEPPKGVLLYGPPGTGKTLLAKAVANEANAYFIAINGPEIMSKYYGESEERLREVFREAEENAPAIIFIDEIDAIAPKREEVTGEVEKRVVAQLLTLMDGLKSRGKVIVIGATNRPDAIDPALRRPGRFDREIEIGIPDKQGRKEILQIHTRGMPIEPDFRKDDVLKILEELRGEEKFKDVIDRAIDQVSKAKEEEIQQVLKRISQDLYEEVKARLIDKLLEELAEVTYGFVGADLAALAREAAMAALRRLIREGKIDFEAETIPREVLEELKVTRRDFYEALKMVEPSALREVLIEIPNVHWDDIGGLEEVKQQLREAVEWPLKYPEAFRAFGITPPKGILLYGPPGTGKTLLAKAVATESQANFIAIRGPEVLSKWVGESEKRIREIFRKARQAAPAIIFIDEIDAIAPTRGTDVNRVTDRIINQLLTEMDGIVENSGVVVIGATNRPDIIDPALLRPGRFDRLILVPAPDEKARLEIFKVHTRGMPLADDVDLKELARRTEGYTGADIAAVCREAALNAMRRALEQGIIKEGMKADEIRKVAKVTMKDFEEALKKIGPSVSKETMEYYLKVQEKFKQARG

SEQ ID NO: 120099 - DNA, 2295 bp, Methanosarcina acetivorans C2A
  CDS (1)..(2295): transl_table=11
ttgactgaagaggataaatcgactataaaacttaaggttgcagaagccgatcaaagggatgtcggaaaagggattgtccgaatcgacgaaagattcagggaaaaacttggcctgaagccctttgatgttgtggagattaaaggagggaaatcaacttccgcccttataggccgtccttatcccagtgatgccgggcttgatatcatccgcatggacggactaatccgcaccaatgcaaaaaccagtataggggaatatgtggacatccgcaaagcagactggaaagaggcaaagagtgtaacctttgctcctgtagcccagggcatgcagatctatgccccaagtgaaaccctcaaagccgtatttatgaaccgcacggtttcaaaaggggatttcatttccaccacaagcctcagaaggtccagggaaagggagacttttgggaaaggggtcatgtttgaagatttctttcaggactttttcgggcaaggcttcggaccatctttcgggcttggagaaattaaactacaggtagtgtctaccgctcctgcgggaatagttaagattacggatatgacacaggtagagctcctgccggaagctatggaaataatctccgaacaaaatatccctactgttatgtatgaggacctgggagggctcaaggacgccatcagcaaggtaagggaaatgatagaactgcccctgaaacaccctgagctctttgacaggcttggaatcgatgctccgaagggtgtactgctgcaaggcccacccggaacgggcaagacgatgcttgcaaaagcagttgctaacgagtcggatgcctatttcatttccatcaacggcccggagataatgtccaaatactacggggaatccgagagggcaattcgggagatctttgaggatgccgaaaagaatgcgcctgcaattatcttcctggatgaaattgactcgatcgcccctaagagggctgaagtgaccggagaagtagaaaggagagtcgttgcccagcttctttccctgatggacgggcttaaggcccgcaagaatgttattgtcataggggcaaccaaccgtcctgaagcccttgacattgcactccgccgtccgggaaggtttgatagggaaattgaactgagggttccggatacggaaggaaggcttgagattttccagatccacacaaggggtatgcctcttgccgataatgttaacctgatggactttgcccaaataacctacgggtttgtgggggccgacattgctgcactctgcagggaagcagccatgagtgcacttagacggattttgccgaaaattaacctcaacgaacctgaaatttcaaaagagatccttgatgccctgcaagtcacaagggaagactttgaaaatgccctgaaagatgtccagccatcagccataagagaaatcctgatagaggtccccaatgtcagctgggaagatgtgggcggtcttgaaagagtaaaagagcttctgaaagaggttgtggaatggcctctgaagaaccctgagtcatacagggatataggggttgaagctcctaaaggcgtgctcctgtatgggcctccgggtaccggaaagaccctgcttgcaaaagccattgcccacgagtccgatgccaattttataactgccaagggcagcgacctgctttccaaatggtatggagagtccgaaaagaggattgcagaagtctttacgcgggcaaggcaggttgctccatccattattttccttgacgaacttgattcgcttgctcctatccgcgggacttccgtaggcgagcctcaggttacagccaggatccttaaccagctactctccgagatggacgggcttgaagaactcagggctgttgtagtaataggggcaaccaaccgacctgacataatagaccctgccctgctcagacccgggcgttttgatgagctgatccttgtccctgttccggatgagggagcccgcagggaaattttcagggtccatacaaaaaatatggcacttgcagaggatgttgatattgaaaaactcgtttcttttacagaccagtatacaggtgccgacattgcagctgtgtgtaaaaaagcaggacggcatgcgctgcgggaggatctgcacgcaaaaaaagtcagacagaaacacttcctgcaagcgattgaagaaacgggaccatcggtcactcctgatacgatgaaatactatgaggcaataaagggggaactgagaaaaaggaagtctaaggaaatagaaaatccctattatgtataa

SEQ ID NO: 120100 - protein, 764 aa, Methanosarcina acetivorans C2A
MTEEDKSTIKLKVAEADQRDVGKGIVRIDERFREKLGLKPFDVVEIKGGKSTSALIGRPYPSDAGLDIIRMDGLIRTNAKTSIGEYVDIRKADWKEAKSVTFAPVAQGMQIYAPSETLKAVFMNRTVSKGDFISTTSLRRSRERETFGKGVMFEDFFQDFFGQGFGPSFGLGEIKLQVVSTAPAGIVKITDMTQVELLPEAMEIISEQNIPTVMYEDLGGLKDAISKVREMIELPLKHPELFDRLGIDAPKGVLLQGPPGTGKTMLAKAVANESDAYFISINGPEIMSKYYGESERAIREIFEDAEKNAPAIIFLDEIDSIAPKRAEVTGEVERRVVAQLLSLMDGLKARKNVIVIGATNRPEALDIALRRPGRFDREIELRVPDTEGRLEIFQIHTRGMPLADNVNLMDFAQITYGFVGADIAALCREAAMSALRRILPKINLNEPEISKEILDALQVTREDFENALKDVQPSAIREILIEVPNVSWEDVGGLERVKELLKEVVEWPLKNPESYRDIGVEAPKGVLLYGPPGTGKTLLAKAIAHESDANFITAKGSDLLSKWYGESEKRIAEVFTRARQVAPSIIFLDELDSLAPIRGTSVGEPQVTARILNQLLSEMDGLEELRAVVVIGATNRPDIIDPALLRPGRFDELILVPVPDEGARREIFRVHTKNMALAEDVDIEKLVSFTDQYTGADIAAVCKKAGRHALREDLHAKKVRQKHFLQAIEETGPSVTPDTMKYYEAIKGELRKRKSKEIENPYYV

SEQ ID NO: 120101 - DNA, 2361 bp, Methanosarcina acetivorans C2A
  CDS (1)..(2361): transl_table=11
atggaagaaatacagttgaaggttgaaaaggcataccctatcgaccttggaagaggaattatccggcttgaccctgcagcgctactgaaacttcagctctctcccggcgacattgtagagattagggggaagaaaaagaccacagcaaaggtatggagagcagaccggcaggattgggaacagggaatagtgcgaattgataattttatccggcagaatgccggagtttccatcggggagaaggtgaccattaaaaaggtcgaagccccggaagcaaaaaagctcattctggcgcttccggaaagcatgactcagggagggcccgaactgcagtttggagagcatgcgaatgagatcataaagcggcacatcctgaaaagacctgttttcaagggggacataattccgattattaattcgatgtctcagccaatgactgagtccctgacaacaagccaggtaatcccgctggttgctgttgagacggacccggcaaacaccattgtccttatcacggaagccacaattattgagctccggaaaaagccggtacagggctacgaaaaagcgaccagaggcgtcactacctacgaagacatcggagggcttggccaggagatcatgcgtgtccgggaaataatagagatgccgatgaaacacccggagctctttgcccacctcaatatagagcctccgaaaggagttatcctctacggcccacccggaaccggaaagacccttatcgcaaaagccgtggcaaatgaatccggggcaagcttccattacattgcagggcccgaaatcgttggaaagttctacggggaaagcgaggaaaggctgaggaagatcttcgaagaagcaacccaggacgccccttcggttattttcattgacgaaatagactccattgcccccaaaagggaaaacgtaacaggagaagttgaaaggcgtgttgttgcccagctcctgacccttcttgacgggatggaggaaagggggcaggtcgtggttataggagctaccaaccgtgtggatgcaatcgaccccgcactcaggagaccggggcgttttgacagggaaatccatatcggagtgccggataccaaagacaggtacgagattctgcagatccacacccggggcatgccaatcgagaaagatgacgaaatcacaccagcagagtccgaagtcgaacttgaagaagcaactgaaatcgaagctgaaatagaagtcgatgaagctgccctggagagagaaaaaaaagagaagacaaaccgctatctcatgtatctggctgagaagacgcagggctttgtaggggcagaccttctggctctcgtgcaggaagccgcaatgcgctgcctcagggaaaacctgcctgaccttgacctcgaaaaggaaacaattcctcccgaacggctggaaaagattgttgtaaccaagaagaacttcgaagatgctttgatggaagccgaaccctcagccctgagggagatctttgttgagatgccttcggttggctgggacggcgtgggaggcctggatgaagcgaagaatgcgatcatcgaagccgtcgagtggcctattaaaaacccggaaaaatttgtcaaactgggcataaaagctccgaagggaatcttgctttacggcccaccggggacgggaaagaccctgatagcccaggctgtagccaaagagtcaaacgccaatttcataagcgtcaaagggccggagatgttttcgaagtggctcggggagtcggaaaaagcaatcagggaaaccttcaagaaagcaaggcaggttgctccctgtgttgtcttctttgatgagattgactccattgctgccatgcagggcatggaatctacggacagccggacttcggaaagggtgctcaaccagctgctgaccgaaatggacgggcttgagaccctcaaggacgtggtaattattgccgcaacaaaccgtcctaacctgcttgaccccgcaatcatgcgcccgggccgttttgacaggctggtttacgttggtgcacctgaccgtaaaggcaggatgaagatctttaagatccacacaaggaataccccgcttgcggaggacgtagatcttgaaaaccttgccaatataactgaaggatacgtgggtgctgacatagaagcagtatgcagagaggctgtaatgtttgccctcagagagaacttcgatgttgaagcaattgagatgaggcacttcagagaagccctcaagaaagtaaaacccacaattaacgaaaacattgcacagttctatgagaagatagaggagcagtttaagggaggccagagaccagcagagacagctgggtatgtaggatacaggtaa

SEQ ID NO: 120102 - protein, 786 aa, Methanosarcina acetivorans C2A
MEEIQLKVEKAYPIDLGRGIIRLDPAALLKLQLSPGDIVEIRGKKKTTAKVWRADRQDWEQGIVRIDNFIRQNAGVSIGEKVTIKKVEAPEAKKLILALPESMTQGGPELQFGEHANEIIKRHILKRPVFKGDIIPIINSMSQPMTESLTTSQVIPLVAVETDPANTIVLITEATIIELRKKPVQGYEKATRGVTTYEDIGGLGQEIMRVREIIEMPMKHPELFAHLNIEPPKGVILYGPPGTGKTLIAKAVANESGASFHYIAGPEIVGKFYGESEERLRKIFEEATQDAPSVIFIDEIDSIAPKRENVTGEVERRVVAQLLTLLDGMEERGQVVVIGATNRVDAIDPALRRPGRFDREIHIGVPDTKDRYEILQIHTRGMPIEKDDEITPAESEVELEEATEIEAEIEVDEAALEREKKEKTNRYLMYLAEKTQGFVGADLLALVQEAAMRCLRENLPDLDLEKETIPPERLEKIVVTKKNFEDALMEAEPSALREIFVEMPSVGWDGVGGLDEAKNAIIEAVEWPIKNPEKFVKLGIKAPKGILLYGPPGTGKTLIAQAVAKESNANFISVKGPEMFSKWLGESEKAIRETFKKARQVAPCVVFFDEIDSIAAMQGMESTDSRTSERVLNQLLTEMDGLETLKDVVIIAATNRPNLLDPAIMRPGRFDRLVYVGAPDRKGRMKIFKIHTRNTPLAEDVDLENLANITEGYVGADIEAVCREAVMFALRENFDVEAIEMRHFREALKKVKPTINENIAQFYEKIEEQFKGGQRPAETAGYVGYR

SEQ ID NO: 120103 - DNA, 2262 bp, Methanosarcina acetivorans C2A
  CDS (1)..(2262): transl_table=11
atgactgaagaaatgaatctgagagtagctgaggcttatcataaagatgtgggcagaggaattgcaagaattgatacccgtcttatgcaggaaatgggtcttgtgagcggagatattattgaaatctcaggcagatcaaagacttatgcaatagtctggcctaacgtcgagcgcggacaggagaacaggatcagaatagacggaaacctgcgcagcaatgcaaaagtcggaattgatgacagagttactatccagaaggttcaggcaaaacatgctcaaagggtcacacttgctccatcccagcctgtcagacttgtgggcggagcccattacatcctgaggataattgagggcagacctctgaacaaaggtcagcagatcagagttgaaaccgtaaataatcccctgactttcgtagtggcatccacaaggcctgcagggccggtcgttgtcaccaaagacactgaaattgttatcaaggaaaaatcaatcgaagaaatcaagaccccggaagggatttcgtatgaggacatcggggggcttagacgggaaatccagctcgtaagggaaatgatcgagttgccaatgagacatcctgaactcttccagaagctgggaatcgagcctcccaaaggggtcctgcttcacgggccgccgggaacgggcaaaaccatgattgcaaaggcagttgcaagtgaaaccgacgccaatttcatcacaatcagcggccctgaaatcgtttccaaatattacggagaaagtgaacagaagctccgggagatcttcgacgaagctgagaaggatgcaccttccatcatcttcatagacgaaatcgactccattgctcccaaacgcggtgaagttaccggagaaatggaacgaagggtggtagcccagctcctctccctgatggacgggcttaagtccaggggtgaagtcgttgtcatagctgccacaaaccgcccgaactccattgacgaagccctccgccgcggcggaaggtttgacagggaaattgaaatcggaattcctgaccggaacggcaggagacagattctcctgatccacaccagaggcatgcctcttgaagatgaagtaagtcttggagaaattgcagatgtaacccacggttttgtgggagccgatctctcctctctctgtaaggaagctgcaatgcatgccctcagaaggatcacccctgaaatcgatatcgaagaagagatcccacaggaaatcattgacaacctggtggttacgaaggaagacttcagagaagccctgaagaatatcgagccttcagccatgcgagaagtctatgttgaagttccgcatgtgggctgggacgatatcggcggacttgacaaagcaaaacaggaacttatcgagtctgttgaatggcctctcaagtatcccgaaatgttcaaggccgtcaatataaagcctcctagaggtgtcctgctcttcgggcctccgggtacggggaagactttgcttgcaaaagctgttgcaagcgagagtgaagccaactttataagtataaaaggccctgaacttctcagtaaatatgtgggtgaatccgaacgtgcaatcagggagacgttcaggaaagcaaagcaggctgcaccgactgtaattttctttgatgagatcgactccattgctcctgaaaggagctctgtttccgacactcacgtatccgaaagggtggtaagccagatcctgacagaacttgacggtgtagaggaactcaaggacgtgatcatagttgctgctacaaaccggccggatatggtagaccctgccctcctcagacccggccgttttgacaggctcatttacataaagccgcccggaaaagaaggcagagagaagatctttgagatccacacaaaaggaaaacccctcgcagaggatgtaaaactctccgaactggctgaaatgaccgaagggtatgtgggtgcggatatcgaaggcatctgcagggaagcggcaatgcttgccctcagggaaatagtcactccaggcactgaccggaagagcattaaggaaaaggccggagacgttcgcctttcaaaaaggcattttgaaagggcaatccgccgtgtaaggcctacaacgtccagagaaacccttagcgcctacgaaaagagtgcagagctctttgccaggtatgcagccgagcttgaggaagaatcttccgaagcaaaagaagaagaaaaggaaatagagggaaaagaagtcccgaattttcctaaggtctaa

SEQ ID NO: 120104 - protein, 753 aa, Methanosarcina acetivorans C2A
MTEEMNLRVAEAYHKDVGRGIARIDTRLMQEMGLVSGDIIEISGRSKTYAIVWPNVERGQENRIRIDGNLRSNAKVGIDDRVTIQKVQAKHAQRVTLAPSQPVRLVGGAHYILRIIEGRPLNKGQQIRVETVNNPLTFVVASTRPAGPVVVTKDTEIVIKEKSIEEIKTPEGISYEDIGGLRREIQLVREMIELPMRHPELFQKLGIEPPKGVLLHGPPGTGKTMIAKAVASETDANFITISGPEIVSKYYGESEQKLREIFDEAEKDAPSIIFIDEIDSIAPKRGEVTGEMERRVVAQLLSLMDGLKSRGEVVVIAATNRPNSIDEALRRGGRFDREIEIGIPDRNGRRQILLIHTRGMPLEDEVSLGEIADVTHGFVGADLSSLCKEAAMHALRRITPEIDIEEEIPQEIIDNLVVTKEDFREALKNIEPSAMREVYVEVPHVGWDDIGGLDKAKQELIESVEWPLKYPEMFKAVNIKPPRGVLLFGPPGTGKTLLAKAVASESEANFISIKGPELLSKYVGESERAIRETFRKAKQAAPTVIFFDEIDSIAPERSSVSDTHVSERVVSQILTELDGVEELKDVIIVAATNRPDMVDPALLRPGRFDRLIYIKPPGKEGREKIFEIHTKGKPLAEDVKLSELAEMTEGYVGADIEGICREAAMLALREIVTPGTDRKSIKEKAGDVRLSKRHFERAIRRVRPTTSRETLSAYEKSAELFARYAAELEEESSEAKEEEKEIEGKEVPNFPKV

SEQ ID NO: 120105 - DNA, 2295 bp, Methanosarcina mazei Go1
  CDS (1)..(2295): transl_table=11
ttgactgagggggataaatccactataaaacttaaggttgcagaagccgatcaacgcgatgtgggaaaaggaattgtccggattgacgagaaattccgggagaaactgggactgaaaccttttgatgttgtggaaatcagaggtggaaaatcaacttctgctctgatagggcgtccgtatcccagtgattccgggcttgatattgtccgcatggacgggcttatccgtatgaatgcaaagaccagcataggggaatatgtggacatccgcaaagctgattggaaagaagcaaagagtgtgacccttgcgcctgtagccaagggcatgcagatctacgctcccagtgagaccctcaaagccgtattcatgaaccgcacggtttcaaaaggggactttatctctaccacaagccttcggaggtcgcgggaaagggaaactttcggcaagggggtaatgttcgaggatttctttcaggacttcttcggacagggttttgggcaatctttcggtcttggggaaataaaacttcaggttgtatccacctctccgtccgggatagtaaagattacggacatgacgcaggtggaacttctgccggaagcaacggaaataactcctgagcaaaacattccaactgtaatgtacgaagacctgggcgggcttaaagacgccattggcagggtcagggaaatgatagagctgcctctgaaacaccccgagctctttgacaggctcggaatcgacgctcccaagggagtgctgcttcatggccctcccgggacgggcaaaactatgcttgcaaaagccgttgctaatgaatcggatgcttatttcatttcaattaacggccccgagatcatgtcaaaatactatggggaatccgagagggcaataagggagatctttgaggacgcagaaaagaatgctcctgcgattatcttcctggacgaaattgattctattgcccctaaaagggctgaggtcacgggtgaagttgaacggagggtggtcgcccagcttctttcccttatggacgggcttaaagcccgcaagaatgtgattgttatagggtctaccaaccgccctgaagccatagatatcgcactccgccgtcctggaaggtttgaccgggagattgagctcagagttccggacacggaaggcaggcttgagattttccagattcatacaagagggatgccccttgcggacaacgtaaatcttatggattttgcccagataacctacggttttgtgggggcagacattgctgcactgtgccgggaagcagccatgagtgctctgaggcgtattttgccgaaaatcaacctcaacgagcctgaaatcccgggtgagatcctcgattcccttcaggtaacaagggaagactttgaaaatgccctgaaagatgtccagccgtctgccatacgagagatcctgatagaggtccccaatattggctgggatgacgtgggagggcttggagaggtaaaagagctcctgaaagaggctgtggaatggccgttgaagagtccagagtcttacaggaatataggggttgaggctcctaaaggcgtgctcttatacggtcctccgggtaccgggaaaaccctccttgcaaaagctattgcccacgagtccgatgctaacttcatcacagccaaaggaagtgatcttctttccaaatggtacggtgagtctgaaaaaaggattgctgaggtatttacgcgcgcaagacaggtcgccccgtctataattttccttgatgaactcgattcccttgcaccggtccgcggggcttccacaggtgagcctcaggtaacagcaagaatccttaaccagcttctctcggaaatggacgggcttgaagagctaagggctgttgtggtaatcggggcaaccaaccgtcctgatatgatagaccctgcccttctcaggcctgggcgttttgatgagctgattcttgttcctgtccctgatgagggggcacgcagggagattttcagggtgcataccgagaatatggctcttgcagaagacgttgatattgaaaaacttgtttctcttacagaccagtatacgggtgcggatattgcagctgtatgcaaaaaggcgggaaggtatgccctgcgtgaagatctgcatgcaaaaagcgtcagacaaaaacacttccttcaggcaattgaagagacagggccttcggtcaccccggacacaatgaaatattaccaggcaataagaggagagctgagaaaaagaaaatcaaaggaaatagagagcccttactatatctga

SEQ ID NO: 120106 - protein, 764 aa, Methanosarcina mazei Go1
MTEGDKSTIKLKVAEADQRDVGKGIVRIDEKFREKLGLKPFDVVEIRGGKSTSALIGRPYPSDSGLDIVRMDGLIRMNAKTSIGEYVDIRKADWKEAKSVTLAPVAKGMQIYAPSETLKAVFMNRTVSKGDFISTTSLRRSRERETFGKGVMFEDFFQDFFGQGFGQSFGLGEIKLQVVSTSPSGIVKITDMTQVELLPEATEITPEQNIPTVMYEDLGGLKDAIGRVREMIELPLKHPELFDRLGIDAPKGVLLHGPPGTGKTMLAKAVANESDAYFISINGPEIMSKYYGESERAIREIFEDAEKNAPAIIFLDEIDSIAPKRAEVTGEVERRVVAQLLSLMDGLKARKNVIVIGSTNRPEAIDIALRRPGRFDREIELRVPDTEGRLEIFQIHTRGMPLADNVNLMDFAQITYGFVGADIAALCREAAMSALRRILPKINLNEPEIPGEILDSLQVTREDFENALKDVQPSAIREILIEVPNIGWDDVGGLGEVKELLKEAVEWPLKSPESYRNIGVEAPKGVLLYGPPGTGKTLLAKAIAHESDANFITAKGSDLLSKWYGESEKRIAEVFTRARQVAPSIIFLDELDSLAPVRGASTGEPQVTARILNQLLSEMDGLEELRAVVVIGATNRPDMIDPALLRPGRFDELILVPVPDEGARREIFRVHTENMALAEDVDIEKLVSLTDQYTGADIAAVCKKAGRYALREDLHAKSVRQKHFLQAIEETGPSVTPDTMKYYQAIRGELRKRKSKEIESPYYI

SEQ ID NO: 120107 - DNA, 2379 bp, Methanosarcina mazei Go1
  CDS (1)..(2379): transl_table=11
atggaagaaatacagttgaaggttgaaaaggcatatcctattgaccttggaagaggaattatccggcttgaccctacagctctgctgaaacttcagctctctcccggtgacattgtggagataagggggaagaaaaagaccactgcaaaggtatggagagcggaccggcaggactgggaacagggaattgtgcgcattgataatttcatccggcaaaatgccggggtctccataggggagaaggtgacaattaaaaaggttgaagccccggaagcaaaaaaattgatcctggcgcttccggaaagcatgacacagggagggcccgaacttcagtttggagaacatgcaaatgagatcataaaacggcatatcctgaaaagacctgtgttcaagggggacataattccaataataaattcaatgtctcagccaatgacagagtccctgacaacaagccaggtaatccccctggttgctgtcgagactgaccctgcaaatacaattgtcctgattaccgaaacaacaaacattgaactccggaaaaaaccggtacagggctacgaaaaggcaacaagaggcgtcaccacctatgaagatatagggggcctgggtgacgagatcatgcgtgtccgtgaaatgatagagatgcccatgaagcaccctgaactttttgcccaccttaacattgagcctccgaaaggagtcatcctctacggcccaccgggaaccggaaagaccctgattgcaaaagccgtggcaaacgagtccggagcaagtttccattacattgccgggcccgagattgtaggaaagttctatggggaaagtgaagaaaggctgaggaagatcttcgaggaggctacccaggaagccccttcagtcatcttcatcgatgaaatcgactccattgcccccaagagggaaaacgtgacaggggaagtggaaaggcgtgtggttgcccagctcctgaccctgcttgacgggatggaggaaagaggacaggttgtggttataggggctaccaaccgtgtggacgcaatagacccagcactcaggagacctggccgctttgacagggaaatccatataggagtgccggataccaaagacaggtatgagattctgcagatccatacaaggggcatgccgattgaaaaagatgaagagtccgtgacaggtgagcctgcgccggaagtcgaaattggagccctggatgaattcgaggttgaaacagggactgagatagaagtcgatgaagctgccatggagagggaaaagaaagagaagacaaacctgtatctcatgtccctggctgagaggacgcagggatttgtgggtgcggaccttctggctcttgtgcaggaagcagcaatgaggtgcctaagggaaaacctgcctgacctcgacctggaaattgacacaatcccacctgaaaggctggagaagattgttgtaaccaaaaagaacttcgaagatgcactgatggaagccgagccttcagccctgagagagatctttgttgagatgccttctgtcagctggggcgatgttggaggtcttgatgaagcaaagcattctatcatcgaagctgttgagtggcctattaaaaacccggaaaagtttgtcaagatgggaataaaagctcctaaaggaatcctgctttacggacctccgggaacaggaaagaccctgatagcccaggctgttgcaaaagagtcaaatgccaatttcataagcgttaaagggccggagatgttttcaaagtggcttggagaatcggaaaaagcaattcgtgaaaccttcaagaaagcgaggcaggtctctccctgtgttgtcttctttgatgagatcgactctattgccggtatgcagggtatggaatccacggacagccggacttctgaaagggtactcaaccagctgctcaccgaaatggacgggcttgagacactcaaggatgtggtaattattgccgcaactaaccgccctaacctgcttgaccccgcaatcctgcgtcctggccgctttgacaggcttgtttatgtgggggcgccggacaggaaaggcaggctgaggatcttcaaaatccatacgcagaatacacctcttgcagaggacgtgaaccttgagaaccttgccgatacgacagaaggatatgtgggtgcggatatagaagcggtatgcagagaggctgtaatgtttgctctcagagaaaacttcgatattgaagcgattgagatgaggcacttcagagaagcccttaagaaagttaagcccacaattaacgagaacattgcccagttctatgagaagatagaggagcagtttaaaggaggccagagaccggtcgagacagccggattggtgggatacaggtaa

SEQ ID NO: 120108 - protein, 792 aa, Methanosarcina mazei Go1
MEEIQLKVEKAYPIDLGRGIIRLDPTALLKLQLSPGDIVEIRGKKKTTAKVWRADRQDWEQGIVRIDNFIRQNAGVSIGEKVTIKKVEAPEAKKLILALPESMTQGGPELQFGEHANEIIKRHILKRPVFKGDIIPIINSMSQPMTESLTTSQVIPLVAVETDPANTIVLITETTNIELRKKPVQGYEKATRGVTTYEDIGGLGDEIMRVREMIEMPMKHPELFAHLNIEPPKGVILYGPPGTGKTLIAKAVANESGASFHYIAGPEIVGKFYGESEERLRKIFEEATQEAPSVIFIDEIDSIAPKRENVTGEVERRVVAQLLTLLDGMEERGQVVVIGATNRVDAIDPALRRPGRFDREIHIGVPDTKDRYEILQIHTRGMPIEKDEESVTGEPAPEVEIGALDEFEVETGTEIEVDEAAMEREKKEKTNLYLMSLAERTQGFVGADLLALVQEAAMRCLRENLPDLDLEIDTIPPERLEKIVVTKKNFEDALMEAEPSALREIFVEMPSVSWGDVGGLDEAKHSIIEAVEWPIKNPEKFVKMGIKAPKGILLYGPPGTGKTLIAQAVAKESNANFISVKGPEMFSKWLGESEKAIRETFKKARQVSPCVVFFDEIDSIAGMQGMESTDSRTSERVLNQLLTEMDGLETLKDVVIIAATNRPNLLDPAILRPGRFDRLVYVGAPDRKGRLRIFKIHTQNTPLAEDVNLENLADTTEGYVGADIEAVCREAVMFALRENFDIEAIEMRHFREALKKVKPTINENIAQFYEKIEEQFKGGQRPVETAGLVGYR

SEQ ID NO: 120109 - DNA, 2256 bp, Methanosarcina mazei Go1
  CDS (1)..(2256): transl_table=11
atgactgaagaaattaatttgagagtagctgaggcttatcataaagacgtgggaaggggaattgcaagaatcgacacccgtttaatgcaggaaatgggacttgtaagcggggatattattgagatttcgggcagatccaaaacctacgcaattgtctggccaaacgtcgaacgtgggcaggaaaacaggatcagaatagatggaaacctgcggagcaatgcaaaggtaggaatagacgacagagtcactattcagaaggtccaggcaaagcatgctcagagggttacacttgctccatcccagcctgtcaggcttgtgggtggtgctcattacatcctgagaataattgagggcagacctctaaataaaggtcagcaaataagggttgaaaccgtaaacaacccactgactttcgtggtcgcatctacaagacctgcaggtcctgttgttgttaccaaagatactgaaatcatcattaaagaaaaatcaattgaagagatcaaggcccctgaaggtatatcctacgaagatatcggagggctcagacgggaaatccagcttgtaagggaaatgattgagctgccaatgaggcatcctgaactcttccagaagctgggtgtcgagcctccaaaaggagttcttcttcatggacctcccggaacgggtaagaccatgattgcaaaggctgtcgcaagtgaaaccgatgccaattttattacaatcagcggtcctgaaatcgtctccaagtattacggagaaagcgaacagaaactcagggaaatcttcgaagaagccgagaaggatgctccttccatcatcttcatagacgaaatagactcaatcgcccctaaacgaggcgaagtcaccggggaaatggaaagaagggttgtagcccagctgctttccctgatggacgggctcaagtccaggggcgaagtggtggtcatagctgctacaaaccgcccgaactccattgatgaagctctccgccgcggtggaaggtttgacagagagatcgagatcggaatacctgacagaaacggcaggaagcagattctcctgatccatactagaggcatgccactcgaagatgaagtgagcctcagtgagatcgcagatgtgacccatggttttgtgggagctgacctctcatccctctgtaaggaagctgcaatgcatgcactcagaaggatcactccagaaattgatatcgaagaggagattccacaggagatcatcgacaatcttgtggtcacaaaagaaaatttcagagaagccctgaaaaatattgagccttcagccatgagagaagtctatattgaagttccgcatgttggctgggacgatataggcgggcttgagaaagcaaaacaggaacttatcgagtctgtggaatggcctctcaaatatcctgaaatgttcaaggctgtcagtataaagcctccgagaggcgtccttctcttcgggccgccgggtactggtaaaactttgcttgcaaaagctgttgcaaatgaaagtgaggctaatttcatcagcattaaaggcccagaactcctcagcaagtatgtgggtgaatccgagcgtgcgataagggaaacgttcaggaaagcaaaacaggctgctccgactgtaatcttctttgatgagatcgattccattgctcctcaaagaagctctgtttccgacacgcatgtttccgaaagagtggtcagccagatccttacggaacttgacgggatagaagagctgaaagacgtaatcatagtcgccgctacaaacaggccggatatggtagaccctgcccttctgaggcccggccgctttgacaggctcatctacatcaagcctcctggaaaagaaggaagagagaagatctttgagattcatgcgaaagaaaaaccgcttgcagaagatgtaaaactctctgagctcgctgagatgaccgaagggtatgtgggtgcggatattgaaggcatctgcagggaagctgcaatgctagccctcagggaaatcgtcactccgggtgctgataggaagaacatccaggaaaaggcagcagaagtccgtctttcaaaaaggcacttcgaaaaagcgatccgccgtgtaaagcccacgacatccagagaaactctgagtgcctatgaaaagagtgctgaactctttgccaggtacgcaactgagtttgaggaagagtcttcagaagaaaaagatcaggaaatcaaggtcgaagaaaaagatcaggaaaccagggtctaa

SEQ ID NO: 120110 - protein, 751 aa, Methanosarcina mazei Go1
MTEEINLRVAEAYHKDVGRGIARIDTRLMQEMGLVSGDIIEISGRSKTYAIVWPNVERGQENRIRIDGNLRSNAKVGIDDRVTIQKVQAKHAQRVTLAPSQPVRLVGGAHYILRIIEGRPLNKGQQIRVETVNNPLTFVVASTRPAGPVVVTKDTEIIIKEKSIEEIKAPEGISYEDIGGLRREIQLVREMIELPMRHPELFQKLGVEPPKGVLLHGPPGTGKTMIAKAVASETDANFITISGPEIVSKYYGESEQKLREIFEEAEKDAPSIIFIDEIDSIAPKRGEVTGEMERRVVAQLLSLMDGLKSRGEVVVIAATNRPNSIDEALRRGGRFDREIEIGIPDRNGRKQILLIHTRGMPLEDEVSLSEIADVTHGFVGADLSSLCKEAAMHALRRITPEIDIEEEIPQEIIDNLVVTKENFREALKNIEPSAMREVYIEVPHVGWDDIGGLEKAKQELIESVEWPLKYPEMFKAVSIKPPRGVLLFGPPGTGKTLLAKAVANESEANFISIKGPELLSKYVGESERAIRETFRKAKQAAPTVIFFDEIDSIAPQRSSVSDTHVSERVVSQILTELDGIEELKDVIIVAATNRPDMVDPALLRPGRFDRLIYIKPPGKEGREKIFEIHAKEKPLAEDVKLSELAEMTEGYVGADIEGICREAAMLALREIVTPGADRKNIQEKAAEVRLSKRHFEKAIRRVKPTTSRETLSAYEKSAELFARYATEFEEESSEEKDQEIKVEEKDQETRV

SEQ ID NO: 120111 - DNA, 2367 bp, Methanococcus maripaludis S2
  CDS (1)..(2367): transl_table=11
atggtagatttaatggtcgcagaagcctaccagggagatgtaggcaagggaattgtaagaattgatccgctaacgatggaaaaactctctttaaaagcaggggatgccatagaaattgcaggaaaagaaaaaacttacgcaaccgtctggagaggatacctcgaagatcagggaaaaggtatcataagaatggacggtattttaagacagaatactaaagccggtattggggataaagtaaaaattaccgtcgttgaagtaaaagaagctaaaaaaataacactcgcaccaatgcaggctgtaagattcagcacaggatttgaaagttatgtgggaagcagacttgtagaacaggtcgtagataaaggatccaaagttgtaattggggttttaggaaccgcatttccattcattgtaactggaactactccaaaaggacctgtaaaaattaatgaatatacacaaattgaattaaaaaccgaaccggttaccgaattaaaagaaaccaaagttccaaacgtaacttacgaagatatcggtggcttaaaagaagaagtcaaaaaaatcagggaaatggtagaacttccaatgagataccctgaattatttgataaacttggtattgaaccgccaaaaggtgttttacttgcagggccccccggaactggaaaaactctgcttgcaaaagctgttgcaaatgaagccggagctaacttctacacgataaacggccccgaaataatgagtaaatacgtcggtgaaaccgaagaaaatttaaggaaaatatttgaagaagctgaagaaaattcgccttcaattatatttatcgatgaaatcgatgcagttgctccaaaaagggacgaagcaagcggtgaagttgaaagaagaatggttgcccagcttttaacactgatggacggtcttgaaagtagaggtcagctcgtaattctcgcagctacaaacagacctgattcaatcgatatggctttgagaagacctggaagacttgacagggaaattacgattggaattcccgataggcacggtagaaacgagattttgcagatacatacaagaaatatgccacttcaaccagattatgaaaaatctgatgtaatttcaatattaaatgaacttgttggagaatacgataggagcaaaatcgaaagccttgtcaaattagtcgaaaaagcgtcatcagaagaagaaatcgaaaaaatattaaaagatggcgaagtagaggacaaagtaaaagtaaaattaaatcaattaatggtaaaagaacttgcagacaaaacccacggttttgctggtgctgatttagctgctctttcaaaagaagctgcgatgaaaactttaagaagattcctacctgacatcgaccttgaaaaagaagaaattcctcgagaagtactcgataaaattaaagtaactaaagaagactttgtgggcggtttgaaagaagtagaaccttctgcattgagagaagtattggtagaagttccaaatatcaaatggagtgatgttggagggcttgaagacattaaacaggatttaaaagaagctgttgaatggccaattaaaaataaagaaatgtttgaaagaatgggaataaggcccccaaaaggagttttactctttggtcctccaggaactggaaaaacattgcttgcaaaagctgttgcaaatgaaagtgaagcaaatttcatcagcgtcaaaggcccagaaatattcagcaaatgggtcggggaaagcgaaaaagcaatccgtgaaatatttagaaaagcaagacaggcagctccaacagttatattcttcgatgaaatcgattcagttgctccaaaaagaggaatggactttggaagtagcggtgttactgaaaaagttgtaaatcagcttttaacagaactcgatggtcttgaagaacctaaagatgtagtgataattgctgcaacaaacaggcccgacatattagatcaggcacttttaaggcctggaagactcgatagaattgtattagttcctattcctaatgaaacagcaagacttgagatatttaaagttcacacgaaaggaatgcctattggaaaagacgttaaccttgaaaaacttgcaaaagaaactaaaggatatactggtgcagatatagaagcagtttgtagagaagctgcaatgattgcattaagggaaaatataaattcagaacatgtcgaatcgagacactttgacggtgcgtttaaaagaattgcaccttctgtaaaagatgatgatatggatgaatacaaagacctcgcaaaagaatacggtcaaaacgcaggcgtatccgagattgaaaaaggccctgaaaataccggataccacggataa

SEQ ID NO: 120112 - protein, 788 aa, Methanococcus maripaludis S2
MVDLMVAEAYQGDVGKGIVRIDPLTMEKLSLKAGDAIEIAGKEKTYATVWRGYLEDQGKGIIRMDGILRQNTKAGIGDKVKITVVEVKEAKKITLAPMQAVRFSTGFESYVGSRLVEQVVDKGSKVVIGVLGTAFPFIVTGTTPKGPVKINEYTQIELKTEPVTELKETKVPNVTYEDIGGLKEEVKKIREMVELPMRYPELFDKLGIEPPKGVLLAGPPGTGKTLLAKAVANEAGANFYTINGPEIMSKYVGETEENLRKIFEEAEENSPSIIFIDEIDAVAPKRDEASGEVERRMVAQLLTLMDGLESRGQLVILAATNRPDSIDMALRRPGRLDREITIGIPDRHGRNEILQIHTRNMPLQPDYEKSDVISILNELVGEYDRSKIESLVKLVEKASSEEEIEKILKDGEVEDKVKVKLNQLMVKELADKTHGFAGADLAALSKEAAMKTLRRFLPDIDLEKEEIPREVLDKIKVTKEDFVGGLKEVEPSALREVLVEVPNIKWSDVGGLEDIKQDLKEAVEWPIKNKEMFERMGIRPPKGVLLFGPPGTGKTLLAKAVANESEANFISVKGPEIFSKWVGESEKAIREIFRKARQAAPTVIFFDEIDSVAPKRGMDFGSSGVTEKVVNQLLTELDGLEEPKDVVIIAATNRPDILDQALLRPGRLDRIVLVPIPNETARLEIFKVHTKGMPIGKDVNLEKLAKETKGYTGADIEAVCREAAMIALRENINSEHVESRHFDGAFKRIAPSVKDDDMDEYKDLAKEYGQNAGVSEIEKGPENTGYHG

SEQ ID NO: 120113 - DNA, 2502 bp, Nasonia vitripennis
  CDS (1)..(2502)
atgccaaaacaatactttgaggttaggagcgagctgtccttatcagctggtttcgaggaagaagcagcatcagatacccctacaagaaactttcgagagaaggaaagaaagaatgcggataacctggcgacagcaatccttcgtaagaaggacaagcctaacagactcctggtggacgaggccaacaacgatgacaactcggtcgtcgccctgtcccaagccaagatggacgagctgcagctcttccgcggtgacacagtcctgctcaagggcaagcgtcgcaaggagaccgtttgcatcgttctctccgacgctaactgccctgacgagaagattctcatgaacagagttgtcaggaacaacttgagagtgcgcctcagcgacgtcgtgtccgtgcagtcttgcccggagattaaatatggaaagagaattcatgttttgcccatcgatgacaccgttgagggactcacaggcaacctcttcgaggtttatctgaaaccatacttcttggaggcataccgtcccatccacaaggatgacacattcattgtccgtggtggtatgcgcgctgtagaattcaaagttgttgagactgatccaggacctttctgtatagtagcccctgaaactgtgatccattgtgagggagacccagttaagagagaggaagaagaggaggcattgaacgccgttggttacgacgacatcggtggcgtgcgcaaacaattagctcaaatcaaagaaatggtggaactcccgttgcgccatccttctctttttaaagccattggtgtcaagccaccccgtggtatcctcttgtatggtccaccaggtactggtaagactctcattgcccgcgctgtagctaacgaaaccggagcgttctttttccttattaacggtcccgagattatgagcaaacttgccggtgaatctgaaagtaatttgcgtaaggccttcgaagaggcagagaaaaactccccagccatcatcttcattgatgagctcgacgccattgctccaaaaagagagaagacccacggtgaggttgagaggcgtatcgtctcgcagcttttgactcttatggacggcatgaagcagagtgcccacgtcattgtgatggccgccacgaatcgtccgaacagcattgacggagctcttagacgtttcggtcgttttgacagagaaatcgacatcggtataccagactcgactggacgtttggaaattttgcgcatccacacgaaaaatatgaagcttgctgaagatgtcgaactagaagagattgctgctgaaactcatggtcacgttggtgctgatttggcgtctctgtgctcggaggctgctctgcaacagatccgagagaagatggatctgattgatctcgaggacgaccagatcgatgctgaagtactgtcttcgcttgccgtatcaatggacaacttcaagtacgcaatgagcaagagcagtcctagtgcactgcgtgagacgatcgtggaggtgccaacagtcacctgggaagacatcggaggtctacagaacgtcaaactggaactgcaagaacttgtgcagtacccagtcgaacatccagacaagttcctcaagtttggtatgcaaccatcgcgtggtgtgttgttctacggtccacccggttgcggtaagacactgctggctaaggctatcgctaacgagtgccaggcgaatttcatctccgtcaagggaccggaactgctcaccatgtggttcggtgagtccgaagccaacgttcgtgacgtcttcgacaaggcaagatctgccgcaccctgcgtgctcttctttgatgagctggactccatcgccaagtcccgaggcggttccgtgggagatgctggtggtgctgccgatcgtgtcatcaatcagattctgacagagatggacggtatgggtgccaagaagaacgtatttatcatcggtgcaacgaacaggcccgacatcatcgatccggctattcttcgacctggaagactggatcaattgatctacatcccactgcctgacgaaaagtcccgcgagtctattttcaaggctaatcttcgcaaatcgcccgtcgctcaggatgtcgatttaacttacatcgctaaggtcacgcacggattctccggagccgacattacagaaatctgtcagcgcgcctgcaagctggctattaggcaatgcatagagtcggaaatccgtagagaaaaggaacgagcgtccaatcccgctgcttctatggatacggatgaagacgatcctgttcccgagattacgcgagctcacttcgaagaagctatgaggttcgcacgacgatcggtctcggacaacgatattcgcaaatacgaaatgttcgcccagactctccaacaatcgcgagggttcggcactaacttcagatttcctcaaagcggcccaggtggagctcaagatacaacacaaggtgaccaaccgttccaagatgatggcgatgacgatctctacagttaa

SEQ ID NO: 120114 - protein, 833 aa, Nasonia vitripennis
MPKQYFEVRSELSLSAGFEEEAASDTPTRNFREKERKNADNLATAILRKKDKPNRLLVDEANNDDNSVVALSQAKMDELQLFRGDTVLLKGKRRKETVCIVLSDANCPDEKILMNRVVRNNLRVRLSDVVSVQSCPEIKYGKRIHVLPIDDTVEGLTGNLFEVYLKPYFLEAYRPIHKDDTFIVRGGMRAVEFKVVETDPGPFCIVAPETVIHCEGDPVKREEEEEALNAVGYDDIGGVRKQLAQIKEMVELPLRHPSLFKAIGVKPPRGILLYGPPGTGKTLIARAVANETGAFFFLINGPEIMSKLAGESESNLRKAFEEAEKNSPAIIFIDELDAIAPKREKTHGEVERRIVSQLLTLMDGMKQSAHVIVMAATNRPNSIDGALRRFGRFDREIDIGIPDSTGRLEILRIHTKNMKLAEDVELEEIAAETHGHVGADLASLCSEAALQQIREKMDLIDLEDDQIDAEVLSSLAVSMDNFKYAMSKSSPSALRETIVEVPTVTWEDIGGLQNVKLELQELVQYPVEHPDKFLKFGMQPSRGVLFYGPPGCGKTLLAKAIANECQANFISVKGPELLTMWFGESEANVRDVFDKARSAAPCVLFFDELDSIAKSRGGSVGDAGGAADRVINQILTEMDGMGAKKNVFIIGATNRPDIIDPAILRPGRLDQLIYIPLPDEKSRESIFKANLRKSPVAQDVDLTYIAKVTHGFSGADITEICQRACKLAIRQCIESEIRREKERASNPAASMDTDEDDPVPEITRAHFEEAMRFARRSVSDNDIRKYEMFAQTLQQSRGFGTNFRFPQSGPGGAQDTTQGDQPFQDDGDDDLYS

SEQ ID NO: 120115 - DNA, 2463 bp, Magnaporthe grisea 70-15
  CDS (1)..(2463)
atgtctgccgacccatcacaggaccctcccaagaagaaggtcaacttggccgatgtatctggcgccgatgtcaaggaggagtcggatgtagcaaccgcaattctgaaaaagaagaagaagccgaatcagttgatggttgccgatgccacaaacgatgacaactccatcatcgcactctccaacagcaccatggaggctttacagctcttccgtggtgacaccgtccttgtgcggggaaagaagcggaaggacacagtcctgatcgtcctagctgatgatgagctggatgacggaagcgcacgactcaaccgtgtggtgcgtcacaacctcagggtcaagcatggagatgtcgtcactatccacccttgccctgacatcaaatatgccaaacgaattgccgttttgccgattgccgacaccgtagaaggcttgacaggctctctgttcgatgtcttccttgcgccctatttccgggaggcctaccgcccagtccgccaaggcgatatttttttggttcgtggtggcatgcgtcaagtcgagttcaaggttgttgaggttgatcctccggagtacggtatcgtagcccaagacacggttatccactgtgagggcgagcccattcagcgtgatgaggaggagaacaacctcaacgaggttggctacgacgacatcggtggctgcaggaagcagatggcacagatccgtgagatggtggagcttcctctgcgccaccctcagctattcaagtcgatcggaatcaagcctccacgcggtgtcctcctctatggacctcctgggaccggaaagacgctcatggcccgtgctgtcgcaaacgagaccggtgctttcttcttccttatcaacggtcccgagatcatgtcaaagatggccggcgagtccgagtcaaacctgcgcaaggcctttgaggaggctgagaagaactcacccgcaatcatcttcattgatgagatcgattccattgcaccaaaacgtgagaagacaaacggcgaggttgagcgccgtgtcgtttcccagctgttgaccctcatggacggcatgaaggcgcgttccaacgttgtggtcatggccgcaacaaacaggcctaactctatcgaccccgccctccgccgttttggacgtttcgatcgtgaggtcgacattggcattcctgacccgaccggtcgtttggagatcctccaaatccacaccaagaacatgaagcttggagatgatgtggacttggagcaaatcgccgctgagacgcacggttacgttggttctgatgttgcggccctttgctcagaggcagccatgcaacagattcgggagaagatggatctcatcgacctcgatgaggacaccattgatgctgaggttcttgactctctaggtgtcaccatggagaacttccgctttgcccttggcgtctccaacccttcggctctgcgtgaggttgcagttgtcgaggtgcccaacgttcgctgggaggatatcggtggtctggacgaggtcaagcaggacctcagggagcaggtccagtacccagtcgaccaccccgagaagttcctcaagttcggtctctcaccatcgcgtggcgtgcttttctacggtcccccgggtaccggaaagaccatgttggccaaggccgttgccaacgagtgtgcagcaaactttatctccgtcaagggtccagagctgctcagcatgtggtttggagagtcggaaagcaacattcgtgatatcttcgacaaagcgcgcgctgcggcaccttgcattgttttccttgacgagcttgactcaatcgccaaggctcgtggaggctcggtgggtgacgccggcggtgcatcggaccgtgttgtaaaccagctgctgacggagatggacggtatgacttccaagaagaacgtgttcgttattggagcgaccaaccgtccggagcaattggatcccgccctttgccgtcctggacgtcttgactcgctcatctatgtgccgcttcctgatgagctgggccgcctcagcattctcaaggctcagctgcgcaagacgcccgtctcagatgatgtcgaccttcagtacatcgccaacaagacgcacggcttttctggtgccgatcttgggtttatcactcagcgtgctgtcaagatcgccatcaaggagtccatcacggccgacatcaaccgcactaaggctcttgaggctgcaggcgaggatgtccccatggacgaggatgccgaggaccctgtccccgagttgacgaagcgtcactttgaggaggccatgcaacaggctcgcaagtcggttagcgatgtcgagatccgtcgctacgaggctttcgcccagcagatgaagaatgctggcccgggcgccttcttcaagttccctgaaggcgagggtgcaccggcagccagcggcggcgagacattcaacgacggtggtaacgacgatggtctgtacgactaa

SEQ ID NO: 120116 - protein, 820 aa, Magnaporthe grisea 70-15
MSADPSQDPPKKKVNLADVSGADVKEESDVATAILKKKKKPNQLMVADATNDDNSIIALSNSTMEALQLFRGDTVLVRGKKRKDTVLIVLADDELDDGSARLNRVVRHNLRVKHGDVVTIHPCPDIKYAKRIAVLPIADTVEGLTGSLFDVFLAPYFREAYRPVRQGDIFLVRGGMRQVEFKVVEVDPPEYGIVAQDTVIHCEGEPIQRDEEENNLNEVGYDDIGGCRKQMAQIREMVELPLRHPQLFKSIGIKPPRGVLLYGPPGTGKTLMARAVANETGAFFFLINGPEIMSKMAGESESNLRKAFEEAEKNSPAIIFIDEIDSIAPKREKTNGEVERRVVSQLLTLMDGMKARSNVVVMAATNRPNSIDPALRRFGRFDREVDIGIPDPTGRLEILQIHTKNMKLGDDVDLEQIAAETHGYVGSDVAALCSEAAMQQIREKMDLIDLDEDTIDAEVLDSLGVTMENFRFALGVSNPSALREVAVVEVPNVRWEDIGGLDEVKQDLREQVQYPVDHPEKFLKFGLSPSRGVLFYGPPGTGKTMLAKAVANECAANFISVKGPELLSMWFGESESNIRDIFDKARAAAPCIVFLDELDSIAKARGGSVGDAGGASDRVVNQLLTEMDGMTSKKNVFVIGATNRPEQLDPALCRPGRLDSLIYVPLPDELGRLSILKAQLRKTPVSDDVDLQYIANKTHGFSGADLGFITQRAVKIAIKESITADINRTKALEAAGEDVPMDEDAEDPVPELTKRHFEEAMQQARKSVSDVEIRRYEAFAQQMKNAGPGAFFKFPEGEGAPAASGGETFNDGGNDDGLYD

SEQ ID NO: 120117 - DNA, 2466 bp, Gibberella zeae PH-1
  CDS (1)..(2466)
atggctccccagcctgacgagcaccacccccacaagaaggtcaacctgaccgacgcttctggcgccgaggtcaagaacgaggatgacgtcgcgactgcgatcctcaagaagaagaagaagcccaaccagttgatggtcaccgatgccgtcaacgatgataacagtatcattgccctctctgaggccaccatggaccagctccagctcttccgtggtgacaccgtcctcgtccgaggcaagaagagaaaggacacagtcctcatcgtccttgctgatgatgagctcgatgatggcagtgcccgcatcaaccgagtcgttcgtcacaacctgcgagtcaagcacggcgacatgattactatccacccttgtcccgatatcaaatatgccaagcgcattgctgttctccctatcgctgataccgtcgagggtatcaccggttccctatttgacgttttcctcgccccttacttccgagaagcctaccgacctgtccgccaaggagacctattcatcgtccgtggtggcatgaggcaagtagagttcaaggtcgtcgaggtcgaccccccagagtacggtatcgtcgcacaagatactgtcattcactgcgagggtgagcccattcagcgcgacgaggaggagaacaacctcaacgaggtcggttacgacgatattggtggatgccgaaagcagatggcccagatccgagagatggttgagcttcctctccgacatccccaacttttcaagtctattggtgttaagcctccgcgaggtgttttgcttttcggacctcccggtactggtaagactctgatggcccgagctgttgccaacgagactggtgccttcttcttcctcatcaacggtcccgagatcatgtcgaagatggctggtgagtctgagtcgaacttgcgaaaggcctttgaggaagccgagaagaactctcccgccattatcttcatcgacgagattgactccatcgctcccaagcgtgaaaagactaacggtgaggtcgagcgacgagtcgtttctcagcttcttaccctcatggacggtatgaaggctcgttccaacgtcgttgtcatggccgccaccaaccgacccaactctatcgaccccgctcttcgacgattcggccgattcgatcgtgaggtcgacattggtgtccccgaccctactggtcgtctcgagattctccagatccacaccaagaacatgaagctcggtgacgatgtcgacctggagcagattgcatccgagacacatggttacgttggttccgatgttgccgccctctgctctgaggctgccatgcagcagattcgtgagaagatggatctgatcgatctcgatgaggacacaatcgatgccgaggtcctcgactcccttggtgtcacaatggagaacttccgcttcgctctcggtgtctccaacccctccgctctccgcgaggtcgccgttgtcgaggttcccaacgttcgctgggaggatattggtggtctccaggaggtcaagcaagatctcaaggagaacgtccagtaccctgtcgatcaccccgagaagtacctcaagttcggcatgtctccttcccgaggtgtgctgttctttggtcctcctggtactggtaaaactatgttggccaaggccgtcgccaacgagtgtgctgccaacttcatctccgtcaagggacctgaactcctcagcatgtggtttggtgagtctgagagcaacatccgagacatctttgacaaggcccgtgccgctgctccttgtgttgtcttccttgacgagcttgactccattgccaaggcccgtggtggttccatgggtgacgccggcggtgcttccgaccgtgttgtcaaccagcttctcacagagatggacggtatgacttccaagaagaacgttttcgttattggtgccaccaaccgacccgagcagcttgaccctgctctatgccgacctggtcgtcttgattcgctcatctacgtgcccctccccgacgagcctggccgtcttagcattatcaaggctcagctccgaaagacccctatcgcctccgatatcgactttggttacattgcctccaagacacacggtttctctggtgccgatatcggtttcatcacacaacgcgctgtcaagattgccatcaaggagtccatcgctatcgatatcgagcgccaaaaggctcgtgaggctgctggtgacgagatggacacagacgaggacgctgaggaccctgtccctgagctgaccaaggctcactttgaggaggccatgcagatggctcgccgatcagtgtcagatgttgagatccgccgatacgaggctttcgcccagcagatgaagaacgccggtcctggcgctttcttcaagttccctgaggctggtgccgaggccgctggtggtgacgccggcaactccttcggtgatgctggcaatgatgatgatctctacgactaa

SEQ ID NO: 120118 - protein, 821 aa, Gibberella zeae PH-1
MAPQPDEHHPHKKVNLTDASGAEVKNEDDVATAILKKKKKPNQLMVTDAVNDDNSIIALSEATMDQLQLFRGDTVLVRGKKRKDTVLIVLADDELDDGSARINRVVRHNLRVKHGDMITIHPCPDIKYAKRIAVLPIADTVEGITGSLFDVFLAPYFREAYRPVRQGDLFIVRGGMRQVEFKVVEVDPPEYGIVAQDTVIHCEGEPIQRDEEENNLNEVGYDDIGGCRKQMAQIREMVELPLRHPQLFKSIGVKPPRGVLLFGPPGTGKTLMARAVANETGAFFFLINGPEIMSKMAGESESNLRKAFEEAEKNSPAIIFIDEIDSIAPKREKTNGEVERRVVSQLLTLMDGMKARSNVVVMAATNRPNSIDPALRRFGRFDREVDIGVPDPTGRLEILQIHTKNMKLGDDVDLEQIASETHGYVGSDVAALCSEAAMQQIREKMDLIDLDEDTIDAEVLDSLGVTMENFRFALGVSNPSALREVAVVEVPNVRWEDIGGLQEVKQDLKENVQYPVDHPEKYLKFGMSPSRGVLFFGPPGTGKTMLAKAVANECAANFISVKGPELLSMWFGESESNIRDIFDKARAAAPCVVFLDELDSIAKARGGSMGDAGGASDRVVNQLLTEMDGMTSKKNVFVIGATNRPEQLDPALCRPGRLDSLIYVPLPDEPGRLSIIKAQLRKTPIASDIDFGYIASKTHGFSGADIGFITQRAVKIAIKESIAIDIERQKAREAAGDEMDTDEDAEDPVPELTKAHFEEAMQMARRSVSDVEIRRYEAFAQQMKNAGPGAFFKFPEAGAEAAGGDAGNSFGDAGNDDDLYD

SEQ ID NO: 120119 - DNA, 2403 bp, Apis mellifera
  CDS (1)..(2403)
atgggcgaaccaaaaagtgaagatttggcaacagcaatccttcgaaagaaggacaagccaaatagattattagtggatgaagctattgcagatgacaattctgttgtggctctgtctcaagcaaaaatggatgaattacaacttttccgaggagatacagtattgttgaaaggaaaaagacgcaaagaaactgtatgcattgttctttctgatgatacttgccctgatgaaaaaattcgtatgaaccgtgttataagaaataacttacgtgtacgtttaagtgacgttgtctctgtacaagcatgtccagaagttaaatatggaaaacgtattcatgtgctaccaatggatgatacagtaactggtcttacaggaaacttatttgaagtatatttaaaaccatacttcttggaagcttatcgtcctgttcataaagatgataattttattgtacgtggtggtatgcgtgttgtagaatttaaagtagtagaaacagatcctggaccattttgtattgtagctcctgatacaattattcactgtgaaggtgatgctattaaaagggaggaagaagaagaggcattaaatgctgtaggttatgatgatattggtggagttcgtaaacaattagctcaaatcaaggaaatggtagaattacctttaaggcatccatctttatttaaagttattggagttaaaccaccccgtggtattcttttatatgggccaccaggcactggaaaaactcttattgctcgtgctgttgcaaatgaaacaggagcattcttttttcttattaatggtcctgaaattatgagtaaacttgcgggagaatcggaaagtaatttaagaaaagcatttgaagaagctgaaaaaaattcaccagctataattttcattgatgaacttgatgcaattgctccaaaaagagaaaagactcacggagaagtagaaagacgcatagtatctcagctattaactttaatggatggcatgaaacaaagttctcatgttattgtaatggctgctaccaatcgacctaatagcattgatccagcattacgtcgttttggtcgttttgataaggaaattgatattggaatacctgatgctactggtcgtttagaaattttacgaattcatacaaaaaatatgaaacttgcagatgatgttgaattagaagagattgcagctgaaacacatgggcatgtaggagcagatttggcttcattgtgctctgaagcagcgttacaacaaattcgagaaaaaatggatcttattgacttggaagaagaacatatagatgctgaagttttatcttctcttgctgtcactatggataatttcaaatatgctatgactaaaagtagtccaagtgccctacgagaaactattgtggaagttccaactgttacatgggatgatattggaggtttacaaaatgttaaaatggaattgcaggaattggtacagtatcctgttgaacatccagataaattcttgaaatttggtatgcaaccttccagaggagtattattctatggacctcctggttgcggtaaaacattacttgctaaagcaatagcaaatgaatgtcaagcaaattttatttctgtaaaaggtccagaattattgactatgtggtttggtgaatctgaggcgaatgttagagatgtttttgataaagcaagagctgcagctccttgtgtattattttttgatgaacttgattctattgctaaatctcgtggtggcacattaggagatgctggtggagcagcagaccgcgtaataaatcaaattttaacagaaatggatggtatgggagccaaaaaaaatgtatttatcataggagctactaatcgtcctgatattattgatcccgctattctacgacctggtagattagatcagttgatttatataccattaccagatgaaaaatctcgagaagcgatttttagagctaatctccgaaaatcacctgtagcaaaggatgtagatttaagctatatagctaaagtaacacatggtttctcgggtgctgatataacagaaatttgtcaacgtgcatgtaaacttgctattagacaaagcattgaaactgaaattcgaagagaaaaagaacgtgctagtaatccatctgtatctatggatatggatgaagatgatcctgtaccagaaataactagagctcattttgaagaagcaatgagatttgcacgacgttctgtatctgataatgatattagaaaatatgaaatgttcgcacagacacttcaacaatctcgtggatttggcagcaatttcagatttccgcaaagtggaacaagtggtactcaagacacaacacaaggtgatcaagccttccaagatgatggagatgatgatctttacagctaa

SEQ ID NO: 120120 - protein, 800 aa, Apis mellifera
MGEPKSEDLATAILRKKDKPNRLLVDEAIADDNSVVALSQAKMDELQLFRGDTVLLKGKRRKETVCIVLSDDTCPDEKIRMNRVIRNNLRVRLSDVVSVQACPEVKYGKRIHVLPMDDTVTGLTGNLFEVYLKPYFLEAYRPVHKDDNFIVRGGMRVVEFKVVETDPGPFCIVAPDTIIHCEGDAIKREEEEEALNAVGYDDIGGVRKQLAQIKEMVELPLRHPSLFKVIGVKPPRGILLYGPPGTGKTLIARAVANETGAFFFLINGPEIMSKLAGESESNLRKAFEEAEKNSPAIIFIDELDAIAPKREKTHGEVERRIVSQLLTLMDGMKQSSHVIVMAATNRPNSIDPALRRFGRFDKEIDIGIPDATGRLEILRIHTKNMKLADDVELEEIAAETHGHVGADLASLCSEAALQQIREKMDLIDLEEEHIDAEVLSSLAVTMDNFKYAMTKSSPSALRETIVEVPTVTWDDIGGLQNVKMELQELVQYPVEHPDKFLKFGMQPSRGVLFYGPPGCGKTLLAKAIANECQANFISVKGPELLTMWFGESEANVRDVFDKARAAAPCVLFFDELDSIAKSRGGTLGDAGGAADRVINQILTEMDGMGAKKNVFIIGATNRPDIIDPAILRPGRLDQLIYIPLPDEKSREAIFRANLRKSPVAKDVDLSYIAKVTHGFSGADITEICQRACKLAIRQSIETEIRREKERASNPSVSMDMDEDDPVPEITRAHFEEAMRFARRSVSDNDIRKYEMFAQTLQQSRGFGSNFRFPQSGTSGTQDTTQGDQAFQDDGDDDLYS

SEQ ID NO: 120121 - DNA, 2493 bp, Candida glabrata CBS 138
  CDS (1)..(2493)
atgggtgaggaacacaagcccttgttggatggttctggtgccgaaccaactgtggaggacagtaccgccactgctattttgagacgtaagaagaaggacaacacattgattgtggacgatgctaccaatgatgacaactctgtgatcgctatcaactcaaacaccatggacaagctagagttgttcagaggtgactctgtgcttgtaaagggtaagaaaaggaaagacaccgtgctaattgtgttgattgatgacgaattggaggatggtgcctgtaggattaaccgtgtggtaagaaacaacttgcgtgtgagattgggtgacctggtctcgatccacccatgcccagacatcaagtacgctagcagaatttctgtgttgccaattgccgacacgattgaaggtatcactggtaacttattcgacgtctacttgaagccatacttcgttgaagcttatagaccagttagaaaaggtgaccatttcgttgtcagaggtggtatgagagctgttgaattcaaggttgttgatgtcgaaccagaagaatatgccgtggttgcacaagataccatcatccattgggaaggtgagccaattaacagagaagatgaggaaaataacatgaacgaagtcggttatgacgatattggtgggtgccgtaagcaaatggctcaaatcagagaaatggtcgaattgcctttgagacacccacaattgttcaaagccatcggtattaaaccaccaaggggtgttttgatgtatggtccacctggtactggtaaaaccttgatggctagagctgttgccaatgaaactggtgctttcttcttcttgatcaatggtcctgaagtcatgtctaagatggcaggtgaatcagaatccaatctaagaaaggcttttgaggaggctgaaaagaatgctccagctatcatcttcattgatgaaatcgattccattgctccaaagagagacaagactaacggtgaagttgaaagaagagttgtttcccaattattgactttgatggatggtatgaaggctagatctaatgttgttgtcatcgcagccactaacagacctaactccattgacccagcactaagaagatttggtagattcgatcgtgaggtcgacatcggtattccagacgctactggtagactagaggttctacgtatccataccaagaacatgaaacttgccgatgacgtcgatcttgagactttggctgctgaaacccatggttatgttggtgccgatattgcttctttgtgttctgaagcagctatgcaacaaattcgtgagaagatggacttgatcgatcttgaagaagacgaaattgacgcagaagtgctagactctcttggtgtcactatggataactttagatttgctcttggtaactctaacccatctgccctacgtgaaaccgttgtcgagagtgtcaacgttacttgggatgatgttggtggtctagatgagattaaggaagaattgaaggaaaccgttgaatacccggttcttcacccagaccaatacaccaagtttggcttggctccatccaagggtgttctattctatggtccaccaggtactggtaagactttactagccaaggctgttgccactgaagtttctgcaaactttatttctgttaagggtcctgaacttttgagtatgtggtatggtgagtctgaatccaacatccgtgatattttcgataaagctagagctgctgctccaactgttgttttccttgatgaattggattcgattgctaaggctagaggtggttctttgggtgacgctggcggtgcctcagacagagttgtcaatcaattattgacagaaatggatggtatgaatgcgaagaagaatgtcttcgttattggtgccaccaatagaccagaccaaatcgatcctgctattttgagaccaggtagattggaccaactgatatatgttccattgccagatgagccagcaagattatcaattctaaaggcacaattaagaaagacacctctagaaccaggcttagatctaacagcaattgccaaggctacccaaggtttctctggtgctgatttgtcatacattgttcaaagagctgctaaatacgccattaaggattctattgaagcccacagagaaagcttagctgctgctgaagctgaagtcaagacagaaggtggagatgttgacatgaccagtgaagatgtcaagaaggaaccagttgagactgttgatccagttccatacattaccagagagcattttgctgaagctatgaagactgccaagcgttctgtttctgatgctgaattacgtcgttacgaagcttactctcaacaaatgaaggcctccagaggtcaattcagtaacttcaactttggtgattccaaccaaggtactactgaaaccggtaatgacggtaacagcggtgctaacttcggttcagccggtgatgacgacgacgatttgtacagttag

SEQ ID NO: 120122 - protein, 830 aa, Candida glabrata CBS 138
MGEEHKPLLDGSGAEPTVEDSTATAILRRKKKDNTLIVDDATNDDNSVIAINSNTMDKLELFRGDSVLVKGKKRKDTVLIVLIDDELEDGACRINRVVRNNLRVRLGDLVSIHPCPDIKYASRISVLPIADTIEGITGNLFDVYLKPYFVEAYRPVRKGDHFVVRGGMRAVEFKVVDVEPEEYAVVAQDTIIHWEGEPINREDEENNMNEVGYDDIGGCRKQMAQIREMVELPLRHPQLFKAIGIKPPRGVLMYGPPGTGKTLMARAVANETGAFFFLINGPEVMSKMAGESESNLRKAFEEAEKNAPAIIFIDEIDSIAPKRDKTNGEVERRVVSQLLTLMDGMKARSNVVVIAATNRPNSIDPALRRFGRFDREVDIGIPDATGRLEVLRIHTKNMKLADDVDLETLAAETHGYVGADIASLCSEAAMQQIREKMDLIDLEEDEIDAEVLDSLGVTMDNFRFALGNSNPSALRETVVESVNVTWDDVGGLDEIKEELKETVEYPVLHPDQYTKFGLAPSKGVLFYGPPGTGKTLLAKAVATEVSANFISVKGPELLSMWYGESESNIRDIFDKARAAAPTVVFLDELDSIAKARGGSLGDAGGASDRVVNQLLTEMDGMNAKKNVFVIGATNRPDQIDPAILRPGRLDQLIYVPLPDEPARLSILKAQLRKTPLEPGLDLTAIAKATQGFSGADLSYIVQRAAKYAIKDSIEAHRESLAAAEAEVKTEGGDVDMTSEDVKKEPVETVDPVPYITREHFAEAMKTAKRSVSDAELRRYEAYSQQMKASRGQFSNFNFGDSNQGTTETGNDGNSGANFGSAGDDDDDLYS

SEQ ID NO: 120123 - DNA, 2493 bp, Kluyveromyces lactis NRRL Y-1140
  CDS (1)..(2493)
atgccagaagaacataagaaattgttagatagttctggcactgcagctgacgcagatgatgctaccgccactgccatcttgagaagaaagaagaagcaaaacatgttactggtcgatgatgcagttaacgatgacaattctatcattgctatcaattctaacactatggatcttttacaattgttccgtggtgacaccgttttagtcaagggtaagaagagaaaggacaccgttttgattgttatgattgatgacgaactggaagatggtgtctgtagagtaaaccgtgttattcgtaacaacttgagaataagactcggtgatttggtcactatccatccatgtaccgatatcaagtatgcttccagaatctcagtgttgccaatcgctgacaccatcgaggggttgactggtaatctatttgatgtgtacttgaagccatactttgtcgaagcttatagaccggttagaaaaggtgaccactttatcgttagaggtggtatgagacaagtagagttcaaggtcgtagacgttgagcctgaagagtacggtgttgttgcccaagatactgtcattcatagtgaaggtgagccaattaacagagaagatgaagaaaataacatcaatgaagtcggttatgatgatattggtggttgtcgtaagcaaatggctcaaattagagaattggtcgaattgccattgagacacccacaactatttaaggccattggtatcaaacctccgaagggtattttgatgtacggtcctccaggtaccggtaaaactctaatggccagagctgtggctaacgagacaggtgcatttttcttcttaatcaatggtccagaagtcatgtccaagatggctggtgaatctgaatccaacttgagaaaggctttcgaagaagcagaaaagaatgctccggccattatttttatcgatgaaattgattctattgcaccaaagcgtgacaagactaacggtgaagtggaaagaagagtcgtttctcaattattgactctaatggatggtatgaaggctagatccaacatcgttgtcattgcagccaccaatagacccaattctatcgatcctgctttgagaagattcggtagatttgatagagaagtcgatattggtgttcctgacgttactggtagattggaagtcttacgtattcacactaaaaatatgaagttggctgacgacgtcgacttagaaaagttggccgctgaaacccatggttatgttggtgctgatattgcctccctatgttctgaagctgctatgcaacaaattcgtgaaaagatggacctaattgacttagatgaagacgaaattgacgccgaagtgttggactcattaggagttactatggacaacttcagatttgcattgggtaactccaacccatccgcattgcgtgaaaccgttgtagaatctgttaatgtcacatgggatgatatcggtggcttggatgaaattaaggatgaattgaaggaaaccgtcgaatatccagtcttgcatccagatcaatacaccaagtttggtttgtcaccatcgaagggtgtgttgttctacggtcctcctggtactggtaagactttgttagctaaggctgtcgccaccgaagtgtctgctaatttcatttcggtcaagggtcctgagttattaagtatgtggtacggtgagtccgaatccaatatccgtgatattttcgacaaagccagagctgcagccccaactgtcgttttcttagatgaattggactccattgctaaggctcgtggtggttctttaggtgatgcaggtggtgcatctgacagagtggttaaccaattattgaccgaaatggatggtatgaacgccaagaagaacgttttcgttattggtgccactaacagaccagatcaaatcgatccagctattttaagacctggtagattggatcaattgatctacgttccattaccagacgaaacaggaagattatctattctatcagcccaattaagaaatacaccattagaaccaggactagatctaaagaccatcgctcaagctacacagggattctctggtgcagatttattatatatcgtacagagagctgcgaagtttgccattaaagattccatcgaggcacaaaaacgtgcagaagttgtcaagaaagaagaaggtgcagaagaaaccgagaaggtcaagacagaagaagacgttgaaatgtcagacgttcaacaagaggatccagttccattcattaccaaagaacacttcactgaagctatgaaaacagccaagcgttctgttacagatactgagcttcgtcgttacgaagcttatgctcaacagatgaaggcatccagaggacaattcggcaacttctcgtttggtgatgattcaggtgctgccgcaactcaagctggtgctgagggttctggtgcagctttcggagatgccgctggtgaagatgacgatgatttgtacagttag

SEQ ID NO: 120124 - protein, 830 aa, Kluyveromyces lactis NRRL Y-1140
MPEEHKKLLDSSGTAADADDATATAILRRKKKQNMLLVDDAVNDDNSIIAINSNTMDLLQLFRGDTVLVKGKKRKDTVLIVMIDDELEDGVCRVNRVIRNNLRIRLGDLVTIHPCTDIKYASRISVLPIADTIEGLTGNLFDVYLKPYFVEAYRPVRKGDHFIVRGGMRQVEFKVVDVEPEEYGVVAQDTVIHSEGEPINREDEENNINEVGYDDIGGCRKQMAQIRELVELPLRHPQLFKAIGIKPPKGILMYGPPGTGKTLMARAVANETGAFFFLINGPEVMSKMAGESESNLRKAFEEAEKNAPAIIFIDEIDSIAPKRDKTNGEVERRVVSQLLTLMDGMKARSNIVVIAATNRPNSIDPALRRFGRFDREVDIGVPDVTGRLEVLRIHTKNMKLADDVDLEKLAAETHGYVGADIASLCSEAAMQQIREKMDLIDLDEDEIDAEVLDSLGVTMDNFRFALGNSNPSALRETVVESVNVTWDDIGGLDEIKDELKETVEYPVLHPDQYTKFGLSPSKGVLFYGPPGTGKTLLAKAVATEVSANFISVKGPELLSMWYGESESNIRDIFDKARAAAPTVVFLDELDSIAKARGGSLGDAGGASDRVVNQLLTEMDGMNAKKNVFVIGATNRPDQIDPAILRPGRLDQLIYVPLPDETGRLSILSAQLRNTPLEPGLDLKTIAQATQGFSGADLLYIVQRAAKFAIKDSIEAQKRAEVVKKEEGAEETEKVKTEEDVEMSDVQQEDPVPFITKEHFTEAMKTAKRSVTDTELRRYEAYAQQMKASRGQFGNFSFGDDSGAAATQAGAEGSGAAFGDAAGEDDDDLYS

SEQ ID NO: 120125 - DNA, 2496 bp, Debaryomyces hansenii CBS767
  CDS (1)..(2496)
atgccggacgataaaaagaacttactagacgcttctggagcacaaaccgctgaagatagaacagcaactgctatcttgagaagaaagaagaaggataatgcattgattgtagacgacgctgaaaatgatgataactctgttattactatgtcgtctaacacaatggaattgttgcaattattcagaggagacaccgtgttggtcaagggaaagaagagaaaagatacggtgttaattgtattggctgatgatgatatggatgatggtgttgctagaattaatagatgtgtccgtaataacttgagagttagacttggggacattgtgagtattcacccatgcccagacatcaagtatgccaacagaatcagcgttttgcctattgctgacaccgttgaaggtataaccggatcactttttgacgtgtacttgaagccatactttgtcgaggcctacagaccagtcagaaagggagacttgttcactgtcagaggtggtatgagacaggttgaattcaaggttgttgaggttgatccagaagaaattgccattgtcgcccaagacacgattattcattgtgaaggtgaaccaattaaccgtgaagacgaagaaaacaacatgaatgaagttggttacgatgatatcggtggatgtaggaagcaaatggctcaaattagagaattggtcgagttgccattgcgccacccacaattattcaagtctattggtatcaaacctccaaagggtatcttgatgtatggtcctccaggtactggtaagactgtcatggcgagggctgttgcgaatgagacaggtgcatttttcttcttgattaatggtccagaaattatgtccaagatggcaggtgaatctgaatctaacttgagaaaagcattcgaagaagcagagaaaaattcgccatccattatcttcattgatgaaatcgattctattgctcctaagagagacaagactaatggtgaagttgaaagaagagttgtttctcaattattaactcttatggacggtatgaaggcaagatctaacaccgttgttattgccgcaactaacagaccaaactccattgatccagccttgagaagattcggtagatttgatagagaagtcgatataggtgttcctgatgcagcaggccgtttggaaattttaagaatccacaccaaaaacatgaaattaaatgacgatgtcgatttagaggccattgcttctgaaactcacggttttgtgggtgcggatattgcttccttatgttcagaagcagctatgcaacaaattagagaaaagatggaccttattgatttagaggaagaaactatcgatgcagaagttttggattcattaggtgttacaatggagaacttcaagtttgctttaggcaactccaacccatcggcattacgtgaaaccgttgtggagaatgtcaatgttacttggaatgacattggtggattagataccatcaagaatgagttaaaggaaactgttgaatatcctgttttacatccagatcaatatcaaaagtttggattatcaccttctaagggtgtattattttatggtcctccaggtactggtaagaccttgttagccaaggccgttgctaccgaagtttctgctaatttcatttcagtcaaaggtccggaattattaagtatgtggtatggtgaatcagagtctaatattcgtgatattttcgataaggccagagctgcagctccaactgttgtcttcctcgatgaattggattctattgccaaagctagaggtggatcgcatggcgatgccggtggtgcttctgaccgtgttgttaatcaattattgacagaaatggatggtatgaatgccaaaaagaatgttttcgtcatcggtgcaactaatagacctgatcaaatcgatccagctttattgagacctggtagattagatcaattaatctatgttccattaccagatgaagtggctagattatctattttacaagcccaattaagaaacactccattagaaccaggtttggatttgttagaaattgcaaagatcaccaatggtttctcgggtgcagatttatcatacattgttcaaagatctgctaagtttgctattaaggattccattgaagcgcatatcaggttacaaaagtctaaggcagattctaaacaaggtgatgatgttgaaatgaccgaagaatctaagcctgcaggtgacgaagaagaagaagaggaagaagaccctgttccttatattactagagctcatttcgaagaagctatgaagacagccaagcgttccgtctccgatgctgaattacgtcgttatgaagcttattctcaacaaatgcaagcttcaagaggacaattcaccaactttagatttagtgaaggtgaaggcaatgaaggcgctcaatccaactctactggaaatgaaaatgctgctgcttttggtaatgttgaagaagacgatgatttatatagttag

SEQ ID NO: 120126 - protein, 831 aa, Debaryomyces hansenii CBS767
MPDDKKNLLDASGAQTAEDRTATAILRRKKKDNALIVDDAENDDNSVITMSSNTMELLQLFRGDTVLVKGKKRKDTVLIVLADDDMDDGVARINRCVRNNLRVRLGDIVSIHPCPDIKYANRISVLPIADTVEGITGSLFDVYLKPYFVEAYRPVRKGDLFTVRGGMRQVEFKVVEVDPEEIAIVAQDTIIHCEGEPINREDEENNMNEVGYDDIGGCRKQMAQIRELVELPLRHPQLFKSIGIKPPKGILMYGPPGTGKTVMARAVANETGAFFFLINGPEIMSKMAGESESNLRKAFEEAEKNSPSIIFIDEIDSIAPKRDKTNGEVERRVVSQLLTLMDGMKARSNTVVIAATNRPNSIDPALRRFGRFDREVDIGVPDAAGRLEILRIHTKNMKLNDDVDLEAIASETHGFVGADIASLCSEAAMQQIREKMDLIDLEEETIDAEVLDSLGVTMENFKFALGNSNPSALRETVVENVNVTWNDIGGLDTIKNELKETVEYPVLHPDQYQKFGLSPSKGVLFYGPPGTGKTLLAKAVATEVSANFISVKGPELLSMWYGESESNIRDIFDKARAAAPTVVFLDELDSIAKARGGSHGDAGGASDRVVNQLLTEMDGMNAKKNVFVIGATNRPDQIDPALLRPGRLDQLIYVPLPDEVARLSILQAQLRNTPLEPGLDLLEIAKITNGFSGADLSYIVQRSAKFAIKDSIEAHIRLQKSKADSKQGDDVEMTEESKPAGDEEEEEEEDPVPYITRAHFEEAMKTAKRSVSDAELRRYEAYSQQMQASRGQFTNFRFSEGEGNEGAQSNSTGNENAAAFGNVEEDDDLYS

SEQ ID NO: 120127 - DNA, 2445 bp, Yarrowia lipolytica CLIB122
  CDS (1)..(2445)
atgactgacaataccgaagaatcgaagcgattgatcgacaattccggtgctgccgagaacgccgacgactctctggccaccgccattctgcgaaagaaaaagaaggacaatgctcttgtcgtggacgatgccaccaacgatgacaactccatcatctgcatgtcgccagcaaccatggatctgctccagctgttccggggcgacacagtgctggtcaagggcaagaagcgaaaggacacggtgctcattgtgctggccgacgaggaactcgaggacggcgtgtgccgaatcaaccgatgcgtccgaggcaacctgcgagtccggctcggagacgtggtttcggtccacccctgccccgacatcaagtacgccacccgaatttcgtgtctgcccatctccgacaccattgagggtctgaccggctcgctgttcgacgtcttcctcaagccctactttgtcgaggcttaccgacccgtgcgaaagggcgatctgttcaccgtgcgaggaggtatgcgacaagtcgagttcaaggttgtcgacgtcgaccccccggagtacgccattgtcgcccaggataccgtcatccactgcgagggcgatcccattgagcgagaggacgaggagggcaacctcaacgaggtcggctacgacgatattggaggcgtgcgaaagcagatggcccagatccgagagctagtcgagctgcctctgcggcacccccagctgttcaagtctattggtatcaagccccccaagggtattctcatgtacggtccccccggtactggtaagaccctgatggctcgagccgtggccaacgagaccggagccttcttcttcctgatcaacggtcccgagatcatgtccaagatggccggtgagtccgagtccaacctgcgaaaggccttcgaggaggccgagaagaactctcctgccatcatcttcattgatgagattgattctatcgcccccaagcgagacaagaccaacggtgaggttgagcgacgagtggtttcccagctgctgactctcatggacggaatgaaggcccgagccaacattgtcgtcattgccgccaccaaccggcccaactccatcgaccctgctctgcgtcgattcggccgattcgaccgagaggtcgacattggtattcccgaccccaccggtcgacttgagattctgcgaatccacaccaagaacatgaagcttggcgacgacgttgatctcgagaccattgccgccgagactcacggttacgtcggttccgatattgcctctctgtgttccgaggcagccatgcagcagatccgagagaagatggatctgattgatctggaagaggagaccattgacgccgaggtgctcgactcccttggagtcaccatggagaacttccgattcgcactcggcaactcgaacccctctgctctccgagagaccgttgttcagtccgtcaacgtcacctgggaggacattggaggtctcgacggcatcaagcaggagctcaaggagaccgtcgagtaccccgttctgcaccccgagatgtacaccaagtttggcctgtctccctccaagggtgtgttgttctatggtccccccggtaccggtaagactctgcttgccaaggccgttgccaccgaggtgtctgcaaacttcatctccgtcaagggtcccgagctgctgtccatgtggttcggagagtcagagtccaacatccgagacattttcgacaaggcccgagctgccgctccttgtgttgtcttcctcgatgagttggattccattgccaaggcccgaggtggctctgttggcgatgccggtggagcttccgaccgagttgtcaaccagctgctgaccgagatggacggtatgaacgccaagaagaacgtgttcgtcattggagctaccaaccggcccgaccagattgatcctgctctgctgcgacccggccgactggaccagctcatctatgtgcctctgcccgacgaggccggccgactgtccattctcaaggcgcagctgcgaaagacccctctcgagcccggtctgtctctgcaggagcttgccaagtctacccatggcttcactggtgccgatctgtcgtacattgtgcagcgatctgccaagtttgccatcaaggactccattgaggctgccatcaccgcccagcgggaggctgaggctgccggcaacgaggacgtggagatggaagaccctgttccttacatcacccgggcccactttgaggaggccatgaagaccgccaagcgatctgtcagcgacagtgagctgcgtcgatacgaggcctatgcccagcagatccagtcgtcgcgaggaaacattggtttccggttcagcgaggacgctgctggtgaggctgccgccgccgacgctggtgccggcactgcttttggtgctgaccaggaggatgacctgtacaactag

SEQ ID NO: 120128 - protein, 814 aa, Yarrowia lipolytica CLIB122
MTDNTEESKRLIDNSGAAENADDSLATAILRKKKKDNALVVDDATNDDNSIICMSPATMDLLQLFRGDTVLVKGKKRKDTVLIVLADEELEDGVCRINRCVRGNLRVRLGDVVSVHPCPDIKYATRISCLPISDTIEGLTGSLFDVFLKPYFVEAYRPVRKGDLFTVRGGMRQVEFKVVDVDPPEYAIVAQDTVIHCEGDPIEREDEEGNLNEVGYDDIGGVRKQMAQIRELVELPLRHPQLFKSIGIKPPKGILMYGPPGTGKTLMARAVANETGAFFFLINGPEIMSKMAGESESNLRKAFEEAEKNSPAIIFIDEIDSIAPKRDKTNGEVERRVVSQLLTLMDGMKARANIVVIAATNRPNSIDPALRRFGRFDREVDIGIPDPTGRLEILRIHTKNMKLGDDVDLETIAAETHGYVGSDIASLCSEAAMQQIREKMDLIDLEEETIDAEVLDSLGVTMENFRFALGNSNPSALRETVVQSVNVTWEDIGGLDGIKQELKETVEYPVLHPEMYTKFGLSPSKGVLFYGPPGTGKTLLAKAVATEVSANFISVKGPELLSMWFGESESNIRDIFDKARAAAPCVVFLDELDSIAKARGGSVGDAGGASDRVVNQLLTEMDGMNAKKNVFVIGATNRPDQIDPALLRPGRLDQLIYVPLPDEAGRLSILKAQLRKTPLEPGLSLQELAKSTHGFTGADLSYIVQRSAKFAIKDSIEAAITAQREAEAAGNEDVEMEDPVPYITRAHFEEAMKTAKRSVSDSELRRYEAYAQQIQSSRGNIGFRFSEDAAGEAAAADAGAGTAFGADQEDDLYN

SEQ ID NO: 120129 - DNA, 2484 bp, Aspergillus nidulans FGSC A4
  CDS (1)..(2484)
ttgtgttgttggggcggttccaggtccggcacactcaacctttgcgtaaactctcgtcgagtctacgttgctgatgcttctggtgccgagaagaaagaggaactcgatacctctacggcgattctgaagaagaagaagaagcccaactccctaattgttactgatgccgtgaacgatgataactctacaatctccctctccaacaacaccatggacacccttgggctcttcagaggcgacacagtcacagtccgaggcaaaaagcgcaaggagactgttttgattgtgcttgccgatgatgatctcgatgatggaagcgcccgcatcaacagggtcgtcaggcataacttgcgcgtaaagcacggtgatatcatcacagttcacccttgccctgatattaaatatgctaagcgtatcgccgttctccccattgccgacaccgtcgagggcctcacaggttctctttttgatgtctaccttgctccttacttccgagatgggtaccgacccgtgaagcaaggcgatctcttcacagtaagaggtggcatgcgacaagttgagttcaaggttgtcgaggtggatcccccagagttcggtatcgttgctccggacactatcattcacagtgagggggagcccatccagcgtgaggatgaggagaacaacttaaacgaagttggctacgatgacatcggtggatgccgaaaacagatggctcagatccgtgaattggtcgagctgccgcttcgtcaccctcaactcttcaagtccatcggtatcaagcctcctcgtggtatccttatgtacggtcctcccggtactggtaagacgcttatggctcgtgctgtggccaacgagactggcgctttcttcttcttgattaacggtcctgagatcatgtccaagatggctggtgaatctgagtcgaaccttcgcaaggctttcgaagaagctgagaagaattcgcctgctatcatctttatcgatgaaatagactcgatcgcacctaagcgtgagaagaccaacggagaggttgagcgccgtgttgtctcccagcttctgactcttatggatggtatgaaggcgcgctctaacgtcgtcgtcatggccgccaccaaccgtcctaactctatcgaccccgctcttcgccgcttcggccgtttcgaccgtgaagtcgacattggcattcctgaccctaccggccgtcttgaaattctttcgatccacaccaagaacatgaagcttggagaggatgtcgacttagagaccatcgctgctgagactcatggttacgtcggttccgatcttgcttcgctctgttccgaggctgccatgcagcagatccgtgaaaagatggatctgatcgatctcgacgaagataccattgatgcggaggtcttggactcacttggtgttaccatggagaacttccgttatgcccttggcgtttccaacccctctgctctccgcgaggttgccgttgtcgaggtccccaatgttcgctgggaggatattggtggtttggaggaggtcaagcgcgaacttatcgagagcgtccagtaccctgtcgatcatcccgagaagttccagaagttcggtctgtcaccttctcgcggtgttttgttctatggtcctcctggtactggtaagaccatgcttgcaaaggccgtcgccaacgagtgcgccgcaaacttcatatccgttaagggccctgaattgctgagcatgtggtttggtgagtctgagagcaacattcgtgacattttcgacaaggctcgtgctgctgctccctgtgttgtgttcctcgatgaactggactccatcgccaaatctcgtggcggctccgtcggagatgctgggggtgcttccgaccgtgtcgtcaaccagcttctgactgaaatggacggaatgacctcgaagaagaacgttttcgtcattggtgccacgaacagacctgagcagctcgacgctgccttggtgcgtcccggccgtctcgacactctggtctacgttcctctgcccgaccaagcctctcgtgagggtatcctcaaggctcagctccgcaagactcctgtcgcttccgatgtcgacatcgagttcattgccagcaaaactcacggcttctctggtgctgatctcggattcgtcacccagcgagctgtcaagcttgctatcaaggaatccatctctgctgaaattgagcgtcagaagcagcgtgaagctgctggtgaggatgttaagatggaggatgaggaggaaggcgaagaccccgtgccagaactcacgcgggctcatttcgaagaggctatgaagacagcccgacgatctgtcagcgatgtggagattcgccgatatgaagctttcgctcagagcctgaagaattccggcggcagctctttcttccgcttcccctctgccaatgaggctgcggatagcggcaacacatttggtgaagccggtaatgacgacagcctctatgattaa

SEQ ID NO: 120130 - protein, 827 aa, Aspergillus nidulans FGSC A4
MCCWGGSRSGTLNLCVNSRRVYVADASGAEKKEELDTSTAILKKKKKPNSLIVTDAVNDDNSTISLSNNTMDTLGLFRGDTVTVRGKKRKETVLIVLADDDLDDGSARINRVVRHNLRVKHGDIITVHPCPDIKYAKRIAVLPIADTVEGLTGSLFDVYLAPYFRDGYRPVKQGDLFTVRGGMRQVEFKVVEVDPPEFGIVAPDTIIHSEGEPIQREDEENNLNEVGYDDIGGCRKQMAQIRELVELPLRHPQLFKSIGIKPPRGILMYGPPGTGKTLMARAVANETGAFFFLINGPEIMSKMAGESESNLRKAFEEAEKNSPAIIFIDEIDSIAPKREKTNGEVERRVVSQLLTLMDGMKARSNVVVMAATNRPNSIDPALRRFGRFDREVDIGIPDPTGRLEILSIHTKNMKLGEDVDLETIAAETHGYVGSDLASLCSEAAMQQIREKMDLIDLDEDTIDAEVLDSLGVTMENFRYALGVSNPSALREVAVVEVPNVRWEDIGGLEEVKRELIESVQYPVDHPEKFQKFGLSPSRGVLFYGPPGTGKTMLAKAVANECAANFISVKGPELLSMWFGESESNIRDIFDKARAAAPCVVFLDELDSIAKSRGGSVGDAGGASDRVVNQLLTEMDGMTSKKNVFVIGATNRPEQLDAALVRPGRLDTLVYVPLPDQASREGILKAQLRKTPVASDVDIEFIASKTHGFSGADLGFVTQRAVKLAIKESISAEIERQKQREAAGEDVKMEDEEEGEDPVPELTRAHFEEAMKTARRSVSDVEIRRYEAFAQSLKNSGGSSFFRFPSANEAADSGNTFGEAGNDDSLYD

SEQ ID NO: 120131 - DNA, 2481 bp, Candida albicans SC5314
  CDS (1)..(2481): transl_table=12
atgactggtgaagaagataaaaaacaacattttgatgcttctggtgcttctgctgtagatgataaaacagcaactgcaattttaagaagaaaaaagaaagataatgccttggtcgttgatgacgccaccaacgatgacaattctgtcataaccatgtcgtcaaacacaatggaattgttacaattattccgtggtgatacagtcttggtgaaaggtaagaagagaaaggacacagtgttgatcgttttagctgatgatgatatgcctgatggcgttgctagagttaacagatgtgttcgtaacaatttgcgtgtcagattgggagatatcgttactgtccatccatgtcctgatattaaatatgccaacagaatctcagtattgccaattgctgatactgttgaaggtattaatggttccttattcgacctttacttgaagccatattttgttgaagcctatagaccagtgagaaaaggtgatttattcactgtgaggggtggtatgagacaagtagaattcaaagttgttgaagttgaccctgaagaaattgcaattgttgctcaagataccattattcattgtgaaggagaacctattaatcgtgaagatgaagaaaatagcttgaatgaagtgggttacgacgatattggaggttgtaagaaacaaatggcccaaattagagaattggttgaattgcctttgagacatccacaattgttcaaatcgattggtattaagccaccaaagggtattttgatgtatggtccacctggtaccggtaaaaccattatggcaagagcagtggccaatgaaacaggtgccttctttttcttgataaatggtccagaaattatgtctaaaatggctggtgagtctgaatccaatttaagaaaagcttttgaagaggctgaaaagaattctccttccattattttcattgatgagattgactctattgccccaaagagagacaaaactaatggtgaagtagaaagaagagttgtttctcaattgttaacccttatggatggtatgaaggccagatctaatgtagttgttattgctgctactaacagaccaaattctattgatcctgctttgagaagatttggaagattcgacagagaagttgacattggtgttccagatgctgaaggacgtttagagattttgagaatccacacaaagaatatgaaattggctgatgatgttgacttggaagccatcgcttctgaaacacatggtttcgttggtgctgatattgcttcattatgttcagaagctgctatgcaacaaatccgtgaaaagatggatcttatcgacttggaagaagaaaccattgatactgaagtgttgaactctttgggtgtcactcaagacaacttcagatttgctctcggaaactccaacccatctgccttgcgtgaaactgttgttgaaaatgttaatgtcacttgggatgatattggtggtttggacaacattaagaatgaattaaaagaaaccgtggagtatcctgttttacatccagatcaataccaaaaattcggattggcaccaacaaaaggtgttttgttctttggtccaccaggtactggtaagacacttttggccaaggctgttgctactgaagtttctgctaatttcatttctgtcaaaggtccagaattgttgagtatgtggtatggtgaatctgagtctaatatccgtgatatatttgacaaggccagagctgctgctcctactgtggtgtttttggatgaattggactccattgccaaagctagaggtggttctcacggtgatgctggtggtgcctccgacagagtggtcaatcaattgttgactgaaatggacggtatgaatgctaagaagaatgtgtttgtcattggtgccactaacagaccagatcaaattgatcctgcattattgagaccaggtagattggatcaattaatttatgtcccattgccagatgagccagctagattgtctattttacaagctcaattgagaaacactccattagaacctggtttggacttgaacgaaattgccaagatcactcacggtttctcgggtgcagatttgtcttatattgttcaaagatctgctaaatttgctattaaagactctattgaagcccaagtaaagattaacaagattaaagaagaaaaagaaaaggtgaaaactgaagatgttgatatgaaggtagatgaagttgaagaagaagaccctgtgccttacattaccagagctcactttgaagaggctatgaagaccgcaaaaagatctgtttcagacgctgaattacgtcgttatgagtcttacgctcaacaattgcaagcctcaagaggtcaattttctagctttagattcaatgaaaatgctggtgccactgataatggttcagcagcaggtgccaactcaggtgcagctttcggaaacgttgaagaggaagacgatttgtacagttga

SEQ ID NO: 120132 - protein, 826 aa, Candida albicans SC5314
MTGEEDKKQHFDASGASAVDDKTATAILRRKKKDNALVVDDATNDDNSVITMSSNTMELLQLFRGDTVLVKGKKRKDTVLIVLADDDMPDGVARVNRCVRNNLRVRLGDIVTVHPCPDIKYANRISVLPIADTVEGINGSLFDLYLKPYFVEAYRPVRKGDLFTVRGGMRQVEFKVVEVDPEEIAIVAQDTIIHCEGEPINREDEENSLNEVGYDDIGGCKKQMAQIRELVELPLRHPQLFKSIGIKPPKGILMYGPPGTGKTIMARAVANETGAFFFLINGPEIMSKMAGESESNLRKAFEEAEKNSPSIIFIDEIDSIAPKRDKTNGEVERRVVSQLLTLMDGMKARSNVVVIAATNRPNSIDPALRRFGRFDREVDIGVPDAEGRLEILRIHTKNMKLADDVDLEAIASETHGFVGADIASLCSEAAMQQIREKMDLIDLEEETIDTEVLNSLGVTQDNFRFALGNSNPSALRETVVENVNVTWDDIGGLDNIKNELKETVEYPVLHPDQYQKFGLAPTKGVLFFGPPGTGKTLLAKAVATEVSANFISVKGPELLSMWYGESESNIRDIFDKARAAAPTVVFLDELDSIAKARGGSHGDAGGASDRVVNQLLTEMDGMNAKKNVFVIGATNRPDQIDPALLRPGRLDQLIYVPLPDEPARLSILQAQLRNTPLEPGLDLNEIAKITHGFSGADLSYIVQRSAKFAIKDSIEAQVKINKIKEEKEKVKTEDVDMKVDEVEEEDPVPYITRAHFEEAMKTAKRSVSDAELRRYESYAQQLQASRGQFSSFRFNENAGATDNGSAAGANSGAAFGNVEEEDDLYS

SEQ ID NO: 120133 - DNA, 2469 bp, Ustilago maydis 521
  CDS (1)..(2469)
atgtgcccacccgccgatgacaaggatgaggtcgcaactgccatcctacgtcagcgaaagtcacctaacaaggtgttcgtcgaggagtctacgacagatgacaactcagtagcgtgtctgtcggccgccaagatggacgaactcggcctctttcgcggtgacaccatcttgctcaggggaaagaagcgtagagacacagtgttgatctgcctctctgatgaaaataccgaagactccaagattcgcctcaacaaggtagcccgaaacaatctccgcgtcaagctcggcgacctcgtctctattcatgcttgccatgacatcaagtacggcaagcgcattcacgttcttccctttgacgatagcgtcgagggtcttactggaaacatctttgacgtctacctcaagccctacttcctcgaggcctaccgtcccgttcgcaagggtgacactttcaccgtacgtggtggtatgcgtgctgtcgaattcaaggtcatcgagaccgatcctgccgaattctgcattgttgcccaagacacggtaattcacacggagggcgaaccggtcaagcgcgaagatgaggaggccaacctcgcagatgtcggctacgacgacattggtggttgccgcaaacagatggcccagatccgtgagatggtcgagttgcctctacgacacccgcagctattcaaatcgatcggtatcaagccgcctcgcggtgtgctcatgtatggtcctccaggtaccggcaagacgcttatggctcgtgctgtcgccaacgaaacgggtgccttctttttcctcatcaatggtcccgagatcatgtccaagatggccggagagtccgagtcgaacctgcgaaaggcgtttgaggaggccgagaagaacagccccgccatcatcttcattgacgagattgacagtattgcacccaagcgtgagaaaaccaacggtgaagtcgagcgacgtgtcgtttcacagcttctcaccctcatggacggtctcaaggcgcgttccaacattgtggtcatggccgccaccaaccgacccaactcgatcgatcctgctcttcgacgattcggccgattcgaccgtgaagtcgacattggtatccccgaccccactggtcgactcgagattctgcgcattcacaccaagaacatgaagctggccgacgacgtcgatctcgagcagattgctgccgagactcacggttacgtcggttcggatgtagccgccctctgctccgaggctgccatgcagcagattcgtgaaaagatggacctcattgaccttgacgaggacacaattgatgccgaggtgctagactcgctcggagtcaccatggagaacttccgcttcgctctcggcgtctccaacccgtcggctctccgagagacggtggttgaggtgcccactaccacttggaaggacattggtggtctcgacaaggtcaagcaagagctgcaagagaccgtctcgtaccccgtcgagcatcccgaaaagttcctcaaatacggcatggcgccttccaagggtgtcctcttctacggaccgcctggtaccggtaagacgctgcttgccaaggctattgccaacgagtgccaagccaactttatttcgatcaagggtcctgagctgctcaccatgtggttcggtgagtcggaggctaacgtgcgagacgttttcgacaaggcgcgtgctgctgctccatgtgtcatgttcttcgacgagctggatgccatcgccaagtcacgaggttcgtcatctggcgatggcggtggagctggtgaccgtgtcattaatcagatccttaccgagatggacggtgtcagctcgcgtaagaacgtcttcatcattggtgctaccaaccgacctgaccagatcgacccggctatcctgcgtcccggccgtctcgaccagctcatctacatccccctccccgacgagccttcgcgtctgtcgattctcaaggcgacgctgaagaagtcgcccatcgccgaggatgtcgacctcaccttccttgccaagcacacacacggtttctctggtgccgatcttgccgaaatctgtcagcgtgctgccaagctggctatccgcgagtcgatcgaagccgacatcaagcgcgagcgcgagcgtattgagaagaaggaggccaatgctgatggtgaggtcaagatggaagaggacgccgctgctggtgctgctgctgaggaggaggaggatgaccctgtccctgagatcacccgagctcactttgaagaggccatgcgcttcgctcgccgatccgtatcggacggtgacattcgccgttacgagctgttcgcacagaacctccagtcagcacgctcgtttggtacttcgttccgcttccctgagggccagaacccagcgcagactggtggcgctggcggagcaggtggcgctgcctttggcaatgacgacgccggcgatgatgacctatacgcttaa

SEQ ID NO: 120134 - protein, 822 aa, Ustilago maydis 521
MCPPADDKDEVATAILRQRKSPNKVFVEESTTDDNSVACLSAAKMDELGLFRGDTILLRGKKRRDTVLICLSDENTEDSKIRLNKVARNNLRVKLGDLVSIHACHDIKYGKRIHVLPFDDSVEGLTGNIFDVYLKPYFLEAYRPVRKGDTFTVRGGMRAVEFKVIETDPAEFCIVAQDTVIHTEGEPVKREDEEANLADVGYDDIGGCRKQMAQIREMVELPLRHPQLFKSIGIKPPRGVLMYGPPGTGKTLMARAVANETGAFFFLINGPEIMSKMAGESESNLRKAFEEAEKNSPAIIFIDEIDSIAPKREKTNGEVERRVVSQLLTLMDGLKARSNIVVMAATNRPNSIDPALRRFGRFDREVDIGIPDPTGRLEILRIHTKNMKLADDVDLEQIAAETHGYVGSDVAALCSEAAMQQIREKMDLIDLDEDTIDAEVLDSLGVTMENFRFALGVSNPSALRETVVEVPTTTWKDIGGLDKVKQELQETVSYPVEHPEKFLKYGMAPSKGVLFYGPPGTGKTLLAKAIANECQANFISIKGPELLTMWFGESEANVRDVFDKARAAAPCVMFFDELDAIAKSRGSSSGDGGGAGDRVINQILTEMDGVSSRKNVFIIGATNRPDQIDPAILRPGRLDQLIYIPLPDEPSRLSILKATLKKSPIAEDVDLTFLAKHTHGFSGADLAEICQRAAKLAIRESIEADIKRERERIEKKEANADGEVKMEEDAAAGAAAEEEEDDPVPEITRAHFEEAMRFARRSVSDGDIRRYELFAQNLQSARSFGTSFRFPEGQNPAQTGGAGGAGGAAFGNDDAGDDDLYA

SEQ ID NO: 120135 - DNA, 2343 bp, Encephalitozoon cuniculi GB-M1
  CDS (1)..(2343)
atggcagctgctgcaaacgagaaggacttttcgacagccattcttgagtcgaagacaaagaatacgcttatagtctgcgacaaggactgcagtaagctccggacataccaggtgggccttcaccccacaaccctcaacgagctggagctctttgagtctgactatgtcaggatactgggaaagaaaaaggcggagctgatcttcagcacggttgcgctcgaaagcgtcccccccaggcacattgcaattgttagggacggaagattcaacctgaggataaggatcacggacactgtgaagctatacagagtggacaaggacattccggtggttagcaagcttaacttccttccgataaaggatacggttgagaatatcaggggaaacattttcgacgagtttgtcaggccgtttctggatttcaacttcatgccccttacgacggggtcgatttacggagtcacctctgggcttgggagggttgagttcaaggttaccaagatgatagatgcacaggacatggagattaagcatgggtctgtgacgtcgacaacctctgtatactgcgacgagacgatttcaagggaggaggttgaaaaggagttcaacatggtcggatatgacgatgttggaggatgcagggcacagatggcgaagatcagggagctggttgagcttccgctgaggcactcccagctatactcaaagataggggtgaagccgccgaaggggattctgctgtacggacctcctggaacaggaaagaccttgatagcaagggcgatagcaaacgagactggggcctttctgtttttgattaacgggcctgaaatcatgtcgaagatggcgggcgagagcgagtcgaacctaagaaaggcctttgaagaggcagagaagaactcccctgcaataatcttcattgacgagattgacgcgcttgcacctaaaagagagaaatcccaaggtgaagttgaaagaaggattgtgagccagctgttgaccctcatggacgggatgaaggcaaggagcaacgtgatagttctcggggccacgaacaggcccaactccattgaccctgcactcaggagatatgggagattcgacagggagattgagattggggttcccgatgagaccggaaggcttgagattttgaggatccacaccaagaacatgaagatgtcggaggatgtggacctggtggcgataaacaaggagctgcatgggtttactgggagtgacctggcatcgctatgcagtgaagcggcactacagcagatcagagaaaagcttccgcagatagatctagacagcgagaagattgatgccaaggtcctagcctcgctgaaagttaacagtgagaacttcaggtatgcaatcgagcacacggacccaagttctcttagggaaacagttatccaatctccaaatgtcaagtggtcggatatcggggggcttgagcaggttaagcaggagctgagggaaactgtgcagtatcctgtggagtatcctgagaagttcataaagtttggaatgacgcctgctaagggtgtcttgttctacgggcctccgggatgtggtaagacacttcttgccaaggctgttgctacggaatgcaaggccaacttcatatccataaagggcccggagctcctttcgatgtgggttggagagtctgagtcgaacatcagagacctgtttgcacgggcaaggggggcagcaccttgcgttctgttctttgatgagatagattcgattgccaaggcaaggtctgggaatgatgggagtagtggggccactgatagaatgctgaaccagctgctatctgagatggatgggataaaccagaagaagaatgtgtttgtgatcggggcaacaaacaggcctgaccagttggatagtgctttgatgaggccaggaaggcttgaccagctggtttacatcccactgcccgatctcgacagcagagtatccatcctgcaggccacactcaagaagacacccctctctcctgagatcgatcttcgacagcttgcagaggccacggacaagttctctggggccgatctttcggagatatgccagagggcgtgcaaactggcgataagagaaacgatcgagtatgagcttgagcagaagaaaaagggctctgagatgatggatctcgaggaccccgttccctaccttcgtcccgatcatctagttcaatccttgaagactgcaagacgcagtgtgtctgagaaggaggtcgagcggtacgaggcgtttgcaaggtcgatgaaagttgatgtaagaaagttcgacaagaaaaatgacatcaacgatgatgggctctacgaataa

SEQ ID NO: 120136 - protein, 780 aa, Encephalitozoon cuniculi GB-M1
MAAAANEKDFSTAILESKTKNTLIVCDKDCSKLRTYQVGLHPTTLNELELFESDYVRILGKKKAELIFSTVALESVPPRHIAIVRDGRFNLRIRITDTVKLYRVDKDIPVVSKLNFLPIKDTVENIRGNIFDEFVRPFLDFNFMPLTTGSIYGVTSGLGRVEFKVTKMIDAQDMEIKHGSVTSTTSVYCDETISREEVEKEFNMVGYDDVGGCRAQMAKIRELVELPLRHSQLYSKIGVKPPKGILLYGPPGTGKTLIARAIANETGAFLFLINGPEIMSKMAGESESNLRKAFEEAEKNSPAIIFIDEIDALAPKREKSQGEVERRIVSQLLTLMDGMKARSNVIVLGATNRPNSIDPALRRYGRFDREIEIGVPDETGRLEILRIHTKNMKMSEDVDLVAINKELHGFTGSDLASLCSEAALQQIREKLPQIDLDSEKIDAKVLASLKVNSENFRYAIEHTDPSSLRETVIQSPNVKWSDIGGLEQVKQELRETVQYPVEYPEKFIKFGMTPAKGVLFYGPPGCGKTLLAKAVATECKANFISIKGPELLSMWVGESESNIRDLFARARGAAPCVLFFDEIDSIAKARSGNDGSSGATDRMLNQLLSEMDGINQKKNVFVIGATNRPDQLDSALMRPGRLDQLVYIPLPDLDSRVSILQATLKKTPLSPEIDLRQLAEATDKFSGADLSEICQRACKLAIRETIEYELEQKKKGSEMMDLEDPVPYLRPDHLVQSLKTARRSVSEKEVERYEAFARSMKVDVRKFDKKNDINDDGLYE

SEQ ID NO: 120137 - DNA, 2412 bp, Tribolium castaneum
  CDS (1)..(2412)
atggccgagggtaaaagtcctgacgacctggcgactgcgatcttgcgccgcaaggaccgccccaacagactcctggtggaggaggccaccaacgacgacaactccgtcgtggcgctatcgcaggccaaaatggacgagctgatgctgttccgaggcgatacagtgttgctgaaagggaagcggcggaaagagaccgtctgcattgtgctggccgacgaaaactgccccgatgagaagatccggatgaacaggatcgtcaggaataatctacgggttaggctctctgacgtcgtctggatccagccctgtcccgacgtcaaatacgggaagaggatccacgttttgcccatcgatgacacggtcgaagggctcgtcggaaatctcttcgaggtgtacttaaaaccatacttcctcgaagcttatcgaccaatccacaaaggcgacgttttcatcgtccgtggtggcatgcgagccgttgaattcaaagtggtggaaacggaaccgtcaccatattgtatcgtcgcccccgataccgtcatccattgtgacggcgatccgatcaaacgagaagaagaggaggaagccttgaacgccgtcggctacgacgatatcggcggttgtcgcaaacaactcgcacaaatcaaagaaatggtcgaattacctctacgccacccgtcgctcttcaaggccattggcgtgaaaccaccacgtggtatcctcttgtacggacctccaggtaccggtaaaactttaatcgcacgtgcagtggccaacgaaaccggtgctttcttcttcttaatcaacggtcccgaaattatgagtaaattagccggcgaatccgaaagtaatctaaggaaagcgttcgaagaagccgataaaaactcaccggctattattttcatcgatgaattggacgcgattgcaccgaaacgtgaaaaaacccacggcgaagtcgaacgccgaattgtctcgcaattgttaacactgatggacggcatgaagaaaagctcgcatgttatcgtgatggcggccacaaatcgcccgaactcaatcgatccggctttgcgtcggttcggtcgttttgaccgcgagatagatattggcattcctgacgccaccggacgtctggaagtgttgcgtattcacaccaaaaatatgaagcttgccgacgacgttgatcttgagcaaatcgccgccgagacgcacggtcacgtgggcgccgacttagcgtcgttgtgttcggaggcggcgttgcagcaaatccgcgaaaaaatggatctgattgatttggatgacgatcaagtcgatgcggaggttttgaattcgttggctgttagtatggagaatttccgttatgctatgaccaagtcgagtccgagtgcgttgagggagaccgtggtcgaagtgccgaatattacgtgggacgatatcggtggattgcagaatgttaagaaggaattgcaggaattggtgcagtatccggttgagcatcctgataagttcttgaagtttggcatgcaaccgtcacgtggtgtgttgttttatggaccacctggttgcgggaagactttgttggcgaaggctatagcgaatgaatgtcaagcgaattttatttcggtcaaggggccggagttgttgacgatgtggtttggggagtcggaggccaacgttagggacattttcgataaggctcgatcggccgccccttgcgtcctcttcttcgacgagttggattcgatagcaaaatcacgtggaggcaacctgggggatgccggaggcgccgccgaccgtgtcattaatcaaattttgacggaaatggacggaatgggcgcaaagaagaacgtttttattatcggagccacaaacagacctgatatcattgatcctgcaatcttgcgtcccggccgtctcgatcaattgatttatatcccgctgccggatgaaaagtctcgcgaagcgattttcaaagcaaatctgcgtaaatcccccgttgcaaaagacgtggatcttacttacatagctaaagtgactcacggattctcaggtgccgatttgacggaaatctgtcaaagggcgtgtaaattagcgattcgccaaagcatcgaaaccgagattcggcgggagcgcgagagggccatgaacccgaacagcgcaatggatttggatgaggatgatccggttccggagataactcgcgcccatttcgaggaggcgatgagatttgcccgaagatcggtgtcggataatgacatcaggaagtatgaaatgttcgcgcagacgctgcaacagtcgcgtggttttggcactaacttccggttcccgtcgggaacgggaggctcggctgcgccaggagggacaggaggcgatcagggcaacttccaagatgatcctgaagacgatttatacagttaa

SEQ ID NO: 120138 - protein, 803 aa, Tribolium castaneum
MAEGKSPDDLATAILRRKDRPNRLLVEEATNDDNSVVALSQAKMDELMLFRGDTVLLKGKRRKETVCIVLADENCPDEKIRMNRIVRNNLRVRLSDVVWIQPCPDVKYGKRIHVLPIDDTVEGLVGNLFEVYLKPYFLEAYRPIHKGDVFIVRGGMRAVEFKVVETEPSPYCIVAPDTVIHCDGDPIKREEEEEALNAVGYDDIGGCRKQLAQIKEMVELPLRHPSLFKAIGVKPPRGILLYGPPGTGKTLIARAVANETGAFFFLINGPEIMSKLAGESESNLRKAFEEADKNSPAIIFIDELDAIAPKREKTHGEVERRIVSQLLTLMDGMKKSSHVIVMAATNRPNSIDPALRRFGRFDREIDIGIPDATGRLEVLRIHTKNMKLADDVDLEQIAAETHGHVGADLASLCSEAALQQIREKMDLIDLDDDQVDAEVLNSLAVSMENFRYAMTKSSPSALRETVVEVPNITWDDIGGLQNVKKELQELVQYPVEHPDKFLKFGMQPSRGVLFYGPPGCGKTLLAKAIANECQANFISVKGPELLTMWFGESEANVRDIFDKARSAAPCVLFFDELDSIAKSRGGNLGDAGGAADRVINQILTEMDGMGAKKNVFIIGATNRPDIIDPAILRPGRLDQLIYIPLPDEKSREAIFKANLRKSPVAKDVDLTYIAKVTHGFSGADLTEICQRACKLAIRQSIETEIRRERERAMNPNSAMDLDEDDPVPEITRAHFEEAMRFARRSVSDNDIRKYEMFAQTLQQSRGFGTNFRFPSGTGGSAAPGGTGGDQGNFQDDPEDDLYS

SEQ ID NO: 120139 - DNA, 2430 bp, Tribolium castaneum
  CDS (1)..(2430)
atggccgagggtaaaagtcctgacgacctggcgactgcgatcttgcgccgcaaggaccgccccaacagactcctggtggaggaggccaccaacgacgacaactccgtcgtggcgctatcgcaggccaaaatggacgagctgatgctgttccgaggcgatacagtgttgctgaaagggaagcggcggaaagagaccgtctgcattgtgctggccgacgaaaactgccccgatgagaagatccggatgaacaggatcgtcaggaataatctacgggttaggctctctgacgtcgtctggatccagccctgtcccgacgtcaaatacgggaagaggatccacgttttgcccatcgatgacacggtcgaagggctcgtcggaaatctcttcgaggtgtacttaaaaccatacttcctcgaagcttatcgaccaatccacaaaggcgacgttttcatcgtccgtggtggcatgcgagccgttgaattcaaagtggtggaaacggaaccgtcaccatattgtatcgtcgcccccgataccgtcatccattgtgacggcgatccgatcaaacgagaagaagaggaggaagccttgaacgccgtcggctacgacgatatcggcggttgtcgcaaacaactcgcacaaatcaaagaaatggtcgaattacctctacgccacccgtcgctcttcaaggccattggcgtgaaaccaccacgtggtatcctcttgtacggacctccaggtaccggtaaaactttaatcgcacgtgcagtggccaacgaaaccggtgctttcttcttcttaatcaacggtcccgaaattatgagtaaattagccggcgaatccgaaagtaatctaaggaaagcgttcgaagaagccgataaaaactcaccggctattattttcatcgatgaattggacgcgattgcaccgaaacgtgaaaaaacccacggcgaagtcgaacgccgaattgtctcgcaattgttaacactgatggacggcatgaagaaaagctcgcatgttatcgtgatggcggccacaaatcgcccgaactcaatcgatccggctttgcgtcggttcggtcgttttgaccgcgagatagatattggcattcctgacgccaccggacgtctggaagtgttgcgtattcacaccaaaaatatgaagcttgccgacgacgttgatcttgagcaaatcgccgccgagacgcacggtcacgtgggcgccgacttagcgtcgttgtgttcggaggcggcgttgcagcaaatccgcgaaaaaatggatctgattgatttggatgacgatcaagtcgatgcggaggttttgaattcgttggctgttagtatggagaatttccgttatgctatgaccaagtcgagtccgagtgcgttgagggagaccgtggtcgaagtgccgaatattacgtgggacgatatcggtggattgcagaatgttaagaaggaattgcaggaattggtgcagtatccggttgagcatcctgataagttcttgaagtttggcatgcaaccgtcacgtggtgtgttgttttatggaccacctggttgcgggaagactttgttggcgaaggctatagcgaatgaatgtcaagcgaattttatttcggtcaaggggccggagttgttgacgatgtggtttggggagtcggaggccaacgttagggacattttcgataaggctcgatcggccgccccttgcgtcctcttcttcgacgagttggattcgatagcaaaatcacgtggaggcaacctgggggatgccggaggcgccgccgaccgtgtcattaatcaaattttgacggaaatggacggaatgggcgcaaagaagaacgtttttattatcggagccacaaacagacctgatatcattgatcctgcaatcttgcgtcccggccgtctcgatcaattgatttatatcccgctgccggatgaaaagtctcgcgaagcgattttcaaagcaaatctgcgtaaatcccccgttgcaaaagacgtggatcttacttacatagctaaagtgactcacggattctcaggtgccgatttgacggaaatctgtcaaagggcgtgtaaattagcgattcgccaaagcatcgaaaccgagattcggcgggagcgcgagagggccatgaacccgaacagcgcaatggataatgtgaaattgtttcagttggatgaggatgatccggttccggagataactcgcgcccatttcgaggaggcgatgagatttgcccgaagatcggtgtcggataatgacatcaggaagtatgaaatgttcgcgcagacgctgcaacagtcgcgtggttttggcactaacttccggttcccgtcgggaacgggaggctcggctgcgccaggagggacaggaggcgatcagggcaacttccaagatgatcctgaagacgatttatacagttaa

SEQ ID NO: 120140 - protein, 809 aa, Tribolium castaneum
MAEGKSPDDLATAILRRKDRPNRLLVEEATNDDNSVVALSQAKMDELMLFRGDTVLLKGKRRKETVCIVLADENCPDEKIRMNRIVRNNLRVRLSDVVWIQPCPDVKYGKRIHVLPIDDTVEGLVGNLFEVYLKPYFLEAYRPIHKGDVFIVRGGMRAVEFKVVETEPSPYCIVAPDTVIHCDGDPIKREEEEEALNAVGYDDIGGCRKQLAQIKEMVELPLRHPSLFKAIGVKPPRGILLYGPPGTGKTLIARAVANETGAFFFLINGPEIMSKLAGESESNLRKAFEEADKNSPAIIFIDELDAIAPKREKTHGEVERRIVSQLLTLMDGMKKSSHVIVMAATNRPNSIDPALRRFGRFDREIDIGIPDATGRLEVLRIHTKNMKLADDVDLEQIAAETHGHVGADLASLCSEAALQQIREKMDLIDLDDDQVDAEVLNSLAVSMENFRYAMTKSSPSALRETVVEVPNITWDDIGGLQNVKKELQELVQYPVEHPDKFLKFGMQPSRGVLFYGPPGCGKTLLAKAIANECQANFISVKGPELLTMWFGESEANVRDIFDKARSAAPCVLFFDELDSIAKSRGGNLGDAGGAADRVINQILTEMDGMGAKKNVFIIGATNRPDIIDPAILRPGRLDQLIYIPLPDEKSREAIFKANLRKSPVAKDVDLTYIAKVTHGFSGADLTEICQRACKLAIRQSIETEIRRERERAMNPNSAMDNVKLFQLDEDDPVPEITRAHFEEAMRFARRSVSDNDIRKYEMFAQTLQQSRGFGTNFRFPSGTGGSAAPGGTGGDQGNFQDDPEDDLYS

SEQ ID NO: 120141 - DNA, 2235 bp, Picrophilus torridus DSM 9790
  CDS (1)..(2235): transl_table=11
atgcaatccgatggtataatactcagggttgccgaggctaacgccactgatcctggtatggccagggttcgtctcgatgaggaatcaaggcttgcacttgatgttgatataggcgatgtggtctcaatagaaaaggtgaggccaacagtgggcagggttttcagggctcgccccgaggatgagaataagggtatagtaagaatagacagtgtaatgaggaacaactgtggcgcttcaattggtgataaggtcaaggtcaaaaaggtctttgttgaggaggcaaagaagatcgttttagctcctataataagaaaggatcagaggcttcgcttcggtgagggcattgatgacttcgttcaaaaggcattaatgagaaggccaatgatagagcaggattcaattagcgttccagggttgacgctggcaggacacactgggcttttattcaaggttgtaaaaacgataccaagcaaggttcctgttgaggtatctgaatcaacacagatagaaataagagaggatcctgcatcagaggttcttgaggaggtaacaagggtaagctacgaggatatcggtggtctctcggaccagcttggaaggatacgcgagatcatagagctgccattaaagcatccagagctctttgaaaggcttggaataacgccgccaaagggtgtccttctcagcgggcctcctggaacaggcaaaacattgatagcaaaggccgttgcaaacgagagcggtgcaaacttctatgcaataaacggtccagagataatgagcaaatactacggccagagcgagcagaagctccgtgagatcttccagaaggcagaggagtctgagccatcaataatattcatcgacgagatagactcaatagcacccaaaagagaggatgttcagggtgaggtcgagagaagggttgttgcgcagttattaacattgatggatggccttaaggaaagggggcacgtaatagtaataggtgccacaaaccgtatagatgccgttgatccggccctcaggaggcctggcaggttcgacagggagataaccataggcgttcctgacaagaagggcagaaaggagatacttgcaatacacaccaggggtatgccgcttggcatgaccgatgatgaaaaggagaactttctggaaaagatagcagatctcacatatggctttgttggcgccgatcttgcagcattaacaagggaatctgcaatgaacgcattaagaaggtatctcccggaaatagatcttgacaagccgataccaacagaggttcttgaaaagatggttgtaacagagcaggacttcatggaggcactaaaaacaatagagcccagcagtctaagggaggttaccgtggaggttccaaacgttaaatgggacgatatcggtggtcttgagaacgttaagtctgagctaagggaggctgttgaattaccattattaaatcctgatgtctttaagaggcttggcatccgtgcaccaaagggctttctattatatggaccccctggaacgggcaagacgctccttgcaaaggctgttgcaaacgagagcaatgccaatttcatatcaataaaggggcctgaggtgctaagcaagtgggtcggagagagtgaaaaggccgtcagggagatattcaaaaaggcgaagcaggttgcgccatctatagtattccttgatgaaatagattcaatagccccaagacgcggtgcatccatggattcaggcgtaacagaaagaatagttaaccagctcttaacatcccttgacggcatagaggtattaaacggtgtcgtcgttatagcagcaaccaacaggccagatataatagatccagcgcttctaagagcaggtcgtttcgataaaataatgtacataccaccaccggatgaagagggaagatacaagatacttcaggtgcacacaaagaacatgccactggcaccggacgtagatcttcgcgaacttgcaaagaagaccgatggctttgtcggtgctgatatagaaaacctatgcagggaggctggcatgatggcatacaggtcaaatccagatgcaacagaggttacacagaatgacttcctaaacgcattaaagacgataagaccatcagttgacgaaagcgtaataaaattctataatgaccttgcaaagagcatgggccgcgatataatcgaaaggaagaaatccgtggaggatctcggtttatatcaataa

SEQ ID NO: 120142 - protein, 744 aa, Picrophilus torridus DSM 9790
MQSDGIILRVAEANATDPGMARVRLDEESRLALDVDIGDVVSIEKVRPTVGRVFRARPEDENKGIVRIDSVMRNNCGASIGDKVKVKKVFVEEAKKIVLAPIIRKDQRLRFGEGIDDFVQKALMRRPMIEQDSISVPGLTLAGHTGLLFKVVKTIPSKVPVEVSESTQIEIREDPASEVLEEVTRVSYEDIGGLSDQLGRIREIIELPLKHPELFERLGITPPKGVLLSGPPGTGKTLIAKAVANESGANFYAINGPEIMSKYYGQSEQKLREIFQKAEESEPSIIFIDEIDSIAPKREDVQGEVERRVVAQLLTLMDGLKERGHVIVIGATNRIDAVDPALRRPGRFDREITIGVPDKKGRKEILAIHTRGMPLGMTDDEKENFLEKIADLTYGFVGADLAALTRESAMNALRRYLPEIDLDKPIPTEVLEKMVVTEQDFMEALKTIEPSSLREVTVEVPNVKWDDIGGLENVKSELREAVELPLLNPDVFKRLGIRAPKGFLLYGPPGTGKTLLAKAVANESNANFISIKGPEVLSKWVGESEKAVREIFKKAKQVAPSIVFLDEIDSIAPRRGASMDSGVTERIVNQLLTSLDGIEVLNGVVVIAATNRPDIIDPALLRAGRFDKIMYIPPPDEEGRYKILQVHTKNMPLAPDVDLRELAKKTDGFVGADIENLCREAGMMAYRSNPDATEVTQNDFLNALKTIRPSVDESVIKFYNDLAKSMGRDIIERKKSVEDLGLYQ

SEQ ID NO: 120143 - DNA, 2508 bp, Thermococcus kodakarensis KOD1
  CDS (1)..(2508): transl_table=11
atgatattcggtaaagaagatgaaaaggttgacgagattaagctccgcgtcgcggaggccctgaaaagggacgttggaaggggaatagtcaggtttgacagaaagtaccagagaaagctcggcgttgagccaggtgacatagttgcgctcaagggagagagggttacggcggcgatagttgcaaacgcccacccagacgacaggggacttgacataatcaggatggacggctacatcaggagaaacgcgggagtgagcataggggactacgtcacggtctccagggcggaagtccaggaggccaagaaggtcgttctggcccctgcccagaagggagtcttcatccagattcctggggagattgtaaagcagaacctcctcggaaggcccgtcgtcaagggcgacctcgtagtggccggtggacagaacgaggcggtttactcgccctttgatgagctgctcagagggttcttcgaggctatgccgatcggcttcggtgagctgaagttcgttgtggtaaacacagttccaaaaggcatcgtccagataacctacaacaccgaggtcgaggtgctcccgcaggccgtcgaagtcaaggaggagagcatccctgaggtcacctacgaagacataggcggcctcagcgacgccattcaaaaaatccgtgagatggtcgagctcccgctcaagcacccggagctcttcgagaggcttgggattgaaccgccgaagggagttctcctctacgggccgccaggaacgggtaagactctcctggcgaaggccgtcgccaacgaggcaaacgcccacttcatagccatcaacggcccagagataatgagcaagttctacggcgagagcgaggagaggctgagggagatattcaaagaagccgaggagaacgccccgagcataatcttcattgatgagatagacgcgatagcccccaagagagaagaggtcgttggggaggtcgagaagagggttgtcagccagctgcttaccctgatggacggtctcaagagccgtgggaaggtcatagtcattgccgctaccaacagacctgatgcactcgacccggccctgaggaggcctggaaggttcgacagagagattgaggtcggcgttcccgacaagcagggcaggaaggagatactccagatccacaccagaggaatgcccctcgaaccggactacgacaaagaggccgtccttagggtgctccgcgagataagggaaaagggcaactttgatgctgaaagagtagacaaaatcattgccgaagttgagaacgcaaagaacgagagcgaagtcaaggaggccctcaaaaaggacgccgaaatatactccgaggtcaggaacaggctgatagacaaaatgctcgacgagctggctgaagttacgcacggcttcgtcggtgctgatttagctgcccttgcaagagaagcggccatggtcgttctcaggaggctcatcaaagagggcaagataagccccgaacaggagagaatcccaccagaggttctccaggagctccgcgttagaagagacgacttttacgaggccctcaagatggttgagccaagtgccctcagggaggtactcatcgaagtcccgaacgtccgctgggaggacatcgggggccttgaagatgtcaagcaggagctcagagaagcagtagaatggccgctcaagtaccccaaggcctttgagaggctcggcattgagccgccgaagggaatactcctctacggcccgccaggaacgggtaagactctcctcgccaaggcagtagccaacgagagccaggccaacttcatagcgataagggggccagaggttctctcaaagtgggtcggtgagaccgagaagaggattagggaaatcttcaggaaggctcgccaggctgctccgacggtggtgttcatagacgagatcgatgcaatagcaccggccaggggatccgagggggacagggtcactgacaggctgatcaaccagctgctcaccgagatggacggtattcaggagaacagcggcgtggtcgtcattggtgccaccaacaggccggacattatcgatccagcactcctcaggccaggaaggttcgacaggctgatactcgttccagctccagacgagaaggccagactcgaaatattcaaagtccacaccagaagagtaccgcttgcaggtgatgttgaccttagggagctcgccaagaagaccgaaggctacacgggtgcggacatagccgcgctcgtcagggaggcggccctaatagcgatgcgcaggataatgagagagctcccgcgtgaggtagttgaaagcgagtccgaggagttccttgagaggctgaaggtgtcgaagaaggacttcgagatggccatgaagaaggtcaaaccgagcgtcacgccgtacatgatggagtactacaggagctttgaggagaacagaaagaagcaggcagggaaggaaagaggaggccccgactactataccttctga

SEQ ID NO: 120144 - protein, 835 aa, Thermococcus kodakarensis KOD1
MIFGKEDEKVDEIKLRVAEALKRDVGRGIVRFDRKYQRKLGVEPGDIVALKGERVTAAIVANAHPDDRGLDIIRMDGYIRRNAGVSIGDYVTVSRAEVQEAKKVVLAPAQKGVFIQIPGEIVKQNLLGRPVVKGDLVVAGGQNEAVYSPFDELLRGFFEAMPIGFGELKFVVVNTVPKGIVQITYNTEVEVLPQAVEVKEESIPEVTYEDIGGLSDAIQKIREMVELPLKHPELFERLGIEPPKGVLLYGPPGTGKTLLAKAVANEANAHFIAINGPEIMSKFYGESEERLREIFKEAEENAPSIIFIDEIDAIAPKREEVVGEVEKRVVSQLLTLMDGLKSRGKVIVIAATNRPDALDPALRRPGRFDREIEVGVPDKQGRKEILQIHTRGMPLEPDYDKEAVLRVLREIREKGNFDAERVDKIIAEVENAKNESEVKEALKKDAEIYSEVRNRLIDKMLDELAEVTHGFVGADLAALAREAAMVVLRRLIKEGKISPEQERIPPEVLQELRVRRDDFYEALKMVEPSALREVLIEVPNVRWEDIGGLEDVKQELREAVEWPLKYPKAFERLGIEPPKGILLYGPPGTGKTLLAKAVANESQANFIAIRGPEVLSKWVGETEKRIREIFRKARQAAPTVVFIDEIDAIAPARGSEGDRVTDRLINQLLTEMDGIQENSGVVVIGATNRPDIIDPALLRPGRFDRLILVPAPDEKARLEIFKVHTRRVPLAGDVDLRELAKKTEGYTGADIAALVREAALIAMRRIMRELPREVVESESEEFLERLKVSKKDFEMAMKKVKPSVTPYMMEYYRSFEENRKKQAGKERGGPDYYTF

SEQ ID NO: 120145 - DNA, 2391 bp, Thermococcus kodakarensis KOD1
  CDS (1)..(2391): transl_table=11
atgagtgagaggagagaggtcaagctcaaggttgcctctgcctaccagagggacgttggcagggggatcgtgaggattgacaggaaagccatgcgcgagcttggcgtccagtcaggtgacatagtcgagatcataggtaccaagaacaccgctgcagttgtctggccagcctatccagaggacgaggggcttggcatcataaggatggacggtacgatcaggaagaacgccggtgttggtctcggcgacgaggtcaccgtgagaaaggccgacgtcaaggaggcaaagaaggtcatagtcgctccgactgagccgatacgcttcggcgctgacttcgtcgagtggctccacagcaggctcgtcggaaggcccgtagtcaggggagactacatcaagatcggcatactcggccaggagctgacattcgtagttaccgccacaactccagcggggatcgttcagataaccgagttcaccgacttccaggtgagcgagaagccagttaaggaggtcagcaaggcaaccgccctcggagtgacctacgaggacataggtggcctcaaggacgtcatccagaaggttagggagatgatagagctcccgctcaagcacccggagctcttcgagaagctcggcattgagccgcctaagggtgtgctcctctacggaccaccgggaacgggtaagacactcctggctaaggccgttgccaacgaagccaacgctcacttcatagccatcaacggaccggaaataatgagcaagtactacggcgagagcgaggagaggcttagggaggtcttcaaggaggctgaggagaacgcgccggcgataatcttcattgacgagatcgacagcattgcgccgaagagagaggagacccacggtgaggtcgagaagagggttgtcagccagctgctaacgctaatggacggcctcaagagccgcggaaaggtcatagtcatcggtgccaccaacaggccggacgcgattgacccggccctgaggaggcctggaaggttcgacagggaaattgaggtcggcgttcccgacaagcagggcagaaaggagatactccagatccacaccagaggaatgccgatcgagcccgagttcaggagggacaaggtaatcgagatactcgaggagcttgagaagaacgacacctaccgcgaggccgctgagagggctatcatgaaggtcaagaaggccaaagacgaagaggagatcaggaggatcctcagggagaccgacgagaagctctacgaggaggtcagggcgaagcttatcgatgcactcctcgacgagctggctgaggttacgcacggcttcgtcggtgccgacctggcagcactcgccagggaggctgcaatggcagctctcaggaggctcatcaacgagggcaagatcgacttcgaggccgagtacataccgaaggaagtcctcgacgagctcaaggtcacgaggagggacttctacgaggccctcaagatggtcgagccgtcagctctcagagaggtgctcctggaggttccaaacgtccgctgggacgacatcggcggccttgaagatgtcaagcaggagctcagagaggcagtcgagtggcctctcaagtatcccgaggcattcatgggtctcggcataacaccgccgaagggaatactcctctacggtccgccgggaaccggtaagactctcctcgccaaggcagtcgccaacgagagcgaggccaacttcatagcaatcaagggtccagaggtgctcagtaagtgggtcggtgagagcgagaagaacatccgcgagatcttcaggaaggctcgccaggccgcaccaaccgtgatattcatcgacgagattgacgccatcgccccgagaagaggaaccgacgtgaacagggtcactgacaggttgatcaaccagctgctcactgagatggacggaatccaggagaacagtggcgtggtcgtcattggtgccaccaacaggccggacattatcgatccagcactcctcaggccaggaaggttcgacaggctgatacttgtaccagctccagacgagaaggccaggctcgaaatattcaaagtccacaccagaagagtaccgcttgcaggtgatgttgaccttagggagctcgccaagaagaccgaaggctacaccggcgcagacatagcggcagtggtcagggaggctgcgatgctcgccatgaggagggccctgcaggagggcatcataagacccggcatgaaggccgacgagataagggggaaggtcaaggtcaccatgaaggacttcgaggaggccctcaagaagatcgggccgtcagtgagcaaggagaccatggagtactacaggaagatccaggagcagttcaaacaggctcgcggatga

SEQ ID NO: 120146 - protein, 796 aa, Thermococcus kodakarensis KOD1
MSERREVKLKVASAYQRDVGRGIVRIDRKAMRELGVQSGDIVEIIGTKNTAAVVWPAYPEDEGLGIIRMDGTIRKNAGVGLGDEVTVRKADVKEAKKVIVAPTEPIRFGADFVEWLHSRLVGRPVVRGDYIKIGILGQELTFVVTATTPAGIVQITEFTDFQVSEKPVKEVSKATALGVTYEDIGGLKDVIQKVREMIELPLKHPELFEKLGIEPPKGVLLYGPPGTGKTLLAKAVANEANAHFIAINGPEIMSKYYGESEERLREVFKEAEENAPAIIFIDEIDSIAPKREETHGEVEKRVVSQLLTLMDGLKSRGKVIVIGATNRPDAIDPALRRPGRFDREIEVGVPDKQGRKEILQIHTRGMPIEPEFRRDKVIEILEELEKNDTYREAAERAIMKVKKAKDEEEIRRILRETDEKLYEEVRAKLIDALLDELAEVTHGFVGADLAALAREAAMAALRRLINEGKIDFEAEYIPKEVLDELKVTRRDFYEALKMVEPSALREVLLEVPNVRWDDIGGLEDVKQELREAVEWPLKYPEAFMGLGITPPKGILLYGPPGTGKTLLAKAVANESEANFIAIKGPEVLSKWVGESEKNIREIFRKARQAAPTVIFIDEIDAIAPRRGTDVNRVTDRLINQLLTEMDGIQENSGVVVIGATNRPDIIDPALLRPGRFDRLILVPAPDEKARLEIFKVHTRRVPLAGDVDLRELAKKTEGYTGADIAAVVREAAMLAMRRALQEGIIRPGMKADEIRGKVKVTMKDFEEALKKIGPSVSKETMEYYRKIQEQFKQARG

SEQ ID NO: 120147 - DNA, 2265 bp, Methanosarcina barkeri str. Fusaro
  CDS (1)..(2265): transl_table=11
atgattgaagaaattaatttgagagttgctgaagcttatcataaggacgtgggcaggggaattgcaagaattgacactcgcttgatgcagcagatggggcttgtaagcggggacataattgagatttcagggagagcaaagacctatgcaattgtctggccaaatgtggagcgtgaacaggaaaatcggatccggattgacggaaacttgcgcagtaatgccaaagttgggattgatgacagggttacaatccagaaagtccaggcaaaaaacgctcagagagttacccttgctccttctcagcctgtaagacttgttggaggggctcactacatccttagaattattgaggggagacctttgaacaaaggtcagcagatcagggtggaaactgtaaataaccctttgactttcgtagttgcatctacaagacctgcaggacctgttgttgtcactaaagatactgatatcgtcatcaaggaaaaatcagctgaggagatccgggttccagaaggcatttcatatgaggatatcggtgggcttagaagggaaattcaactggtcagagaaatgattgagttgcctttgagacatcctgaactcttccagaagcttggaattgagccccctaaaggtgtactgcttcatggacctccaggcacgggcaaaacactgattgcaaaggcagttgcaagtgaaaccgatgcaaatttcattactattagcggtcctgaaatcgtttccaagtattacggagaaagcgagcagaagcttcgcgagattttcgaggaagccgaaaaggaagcaccttccatcatctttatagacgagatcgattccatagcccccaagcgcggtgaagtcacaggcgaactggaacgcagagtagttgcccagttgctctcacttatggacgggctaaactccagaggcgaagtagttgtaattgctgccacaaaccgcccgaactcaatagatgaagctctccgccgtggcggaagatttgacagggaaatagaaatcggaattcccgatcggaatggcaggaagcagattcttctcattcacaccagaggtatgcctattcaggatgtaagccttagtgaaattgcagatgtaactcatgggtttgtaggcgctgatctgtcttctctctgtaaagaagcagcaatgcatgctctcagaaggataactcctgaaatcgatatcgaagaagacgaaattccacaggaaattcttgataaactagtggtcaccaaagatgatttcaaggaagctctgaagaatatcgagccgtctgcaatgagggaagtttatgttgaggttccgcatgtaggatgggaggatatcggaggacttgaaaatgcaaagcaggaacttattgaggctgttgagtggcccctgaagtatcctgaactctttagcagtatcaatataaaacctcccagaggcgtattattatttgggcccccgggtacaggtaaaaccttgcttgcaaaggccgttgccagtgaaagcgaagccaatttcattagcattaaaggtccagaacttctcagcaagtatgtgggagaatccgagcgtgcggttagggaaacctttaggaaagccaaacaggctgcaccgactgttgtcttctttgacgaaatcgattcaattgcccctcaaagaagttctgtttcagatacgcatgtatccgaaagagttgtcagtcagatcctcactgaattggatggagtagaggaactcaaggatgtaattattgttgcggccacaaaccggcctgatatggtagaccctgcgcttctcagacctggccgctttgacaggctcatctatatcaagccaccagataacataagcagggaaaagatctttgagatccatacgcagggaaaaccccttgcagaagatgtaaatctttctgagcttgctgatatgactgaagggtatgtgggagcagacatcgagggtatttgcagagaggctgcgatgctggccctgagggaaatagttaccccaggagctagcagaaaggatatcgagaaacgggcaggagaagtcataatttcaaagaagcactttgaacgtgcaatccgccgtgtaaagcctacaacatccagggaaagccttgcggcttatgaacggagtgctgaactctttgctaaatacgcaactgaatttgaagaagaagctcccgaggctgaagaacaggaaaaagaactcgaacatgaaaatgttccggatttctttcaggctcagtaa

SEQ ID NO: 120148 - protein, 754 aa, Methanosarcina barkeri str. Fusaro
MIEEINLRVAEAYHKDVGRGIARIDTRLMQQMGLVSGDIIEISGRAKTYAIVWPNVEREQENRIRIDGNLRSNAKVGIDDRVTIQKVQAKNAQRVTLAPSQPVRLVGGAHYILRIIEGRPLNKGQQIRVETVNNPLTFVVASTRPAGPVVVTKDTDIVIKEKSAEEIRVPEGISYEDIGGLRREIQLVREMIELPLRHPELFQKLGIEPPKGVLLHGPPGTGKTLIAKAVASETDANFITISGPEIVSKYYGESEQKLREIFEEAEKEAPSIIFIDEIDSIAPKRGEVTGELERRVVAQLLSLMDGLNSRGEVVVIAATNRPNSIDEALRRGGRFDREIEIGIPDRNGRKQILLIHTRGMPIQDVSLSEIADVTHGFVGADLSSLCKEAAMHALRRITPEIDIEEDEIPQEILDKLVVTKDDFKEALKNIEPSAMREVYVEVPHVGWEDIGGLENAKQELIEAVEWPLKYPELFSSINIKPPRGVLLFGPPGTGKTLLAKAVASESEANFISIKGPELLSKYVGESERAVRETFRKAKQAAPTVVFFDEIDSIAPQRSSVSDTHVSERVVSQILTELDGVEELKDVIIVAATNRPDMVDPALLRPGRFDRLIYIKPPDNISREKIFEIHTQGKPLAEDVNLSELADMTEGYVGADIEGICREAAMLALREIVTPGASRKDIEKRAGEVIISKKHFERAIRRVKPTTSRESLAAYERSAELFAKYATEFEEEAPEAEEQEKELEHENVPDFFQAQ

SEQ ID NO: 120149 - DNA, 2328 bp, Methanosarcina barkeri str. Fusaro
  CDS (1)..(2328): transl_table=11
atggaagaaatacagttgaaggttgaaaaagcatatcctatcgaccttggaagaggaattatccgacttgaccctacaactttgctgaagcttcagctctcgccaggcgacatcgtggaaataagaggtaagaaaaagaccacggcaaaagtatggagagctgacaggcaggactgggaccagggactcgtgagaattgataacttcatccggcaaaatgcaggcgtttccataggagagaaggtaaccatcaaaaaagttgaagctccagaagcaaaaaagcttgttctggcacttccagaaagcatgatgcaggggggacctgaacttcagtttggggaacatgcaaatgaaatcataaaacgacatattctcaaaaggccggttttcaggggggacattattcctataataaattcgatgtctcagccaatgacagaatctcttactacaagccaggtaatccctctggttgctgttgaaactgagccttcaaacacaattgtccttgttacggaagaaacacttatcgaacttcgcaagaagccggtacagggctacgaaaaagcaacccgaggcgtaaccacctacgaagacataggaggcttaggggctgagataatgcgcgtccgggaaatgatagagttgcctatgaagcatcctgaacttttcggtcacctgaatattgagcctcctaaaggagtcattctctatggcccacccggaaccggaaaaaccctgattgcaaaagccgtagccaacgaatccggggcaagtttccattacattgccggccctgaaattgtaggaaaattctatggagaaagtgaagaaaggctaaggaaaatcttcgaagaagcgactcaggatgctccatctgtcatttttattgacgaaattgattcaattgctccaaaaagagagaatgtaacaggggaagtggaaaggcgtgtggtcgcccagctccttactctacttgacggaatggtagaaagaggtcaggtcgtggttataggagccacaaaccgtgtagatgcgattgaccctgcactcaggagaccaggccgctttgacagagaaatccatattggtgtgcctgataccaaggataggtatgaaatcttgcagattcataccaggggtatgcctatagaaagagatgaggaaaccgaggagatcggaaaagtcgaaaccgaagctgatgaggctgccctggagagggaaagaaaagaaaaggcagataaatatctgatgtatctggctgaaagaacccagggatttgtaggcgcagatctgctggctcttgtacaggaagctgccatgcggtgcctcagggaaaatcttcctgaccttgaccttgaaaaggaagcaattccacctgagaggctggaaaaaatcgttgtaaccaagaggaactttgaagatgccttgatggaggccgaaccttcggctctaagagaaatttatgtggaaatgcccacagttagctggaatgatgttggagggctcgatgaagcaaagcagtccattactgaggctgtggaatggcccattaaaaatccagaaaagttctctcacatgggcataaaagctccaagaggaatcctgctttacggcccgccaggaaccggaaagactctgatagcaaaggctgttgccaaagagtcaaatgcgaactttataagcgtcaaagggcctgagattttctcaaagtggcttggagaatcggaaaaagctatcagagagaccttcaggaaagcccgacaggttgctccctgtgtgattttctttgacgaaatcgattcgattgcttctatgccagggatggaatctactgacagtcacacttcagagagggtgcttaaccagctccttaccgagatggatgggcttgagtcccttagggatgtggtagtgattgctgcaaccaatcgccctaaccttctggaccctgcgatcctgcgtccaggacgttttgacaggctggtttatattggttctcctgataggaaaggaaggctcaagatcttcaggatccatacaaaagatacaccccttgctgaaaatgtaaaccttgaaactcttgccgatgaaactgagggttacgtgggagccgatatcgaatccgtttgcagggaagccgtaatgattgccctgagggaaaacttcgatacagaatatgtagaaatgagacacttcagagaagcgctgaagaaggtaaaacccacaattacggagaatatcgctcagttctacgaaaaaatcgaggcacagttcaagggaggtcagagactcacagaaacagctggctacatcggttacaggtaa

SEQ ID NO: 120150 - protein, 775 aa, Methanosarcina barkeri str. Fusaro
MEEIQLKVEKAYPIDLGRGIIRLDPTTLLKLQLSPGDIVEIRGKKKTTAKVWRADRQDWDQGLVRIDNFIRQNAGVSIGEKVTIKKVEAPEAKKLVLALPESMMQGGPELQFGEHANEIIKRHILKRPVFRGDIIPIINSMSQPMTESLTTSQVIPLVAVETEPSNTIVLVTEETLIELRKKPVQGYEKATRGVTTYEDIGGLGAEIMRVREMIELPMKHPELFGHLNIEPPKGVILYGPPGTGKTLIAKAVANESGASFHYIAGPEIVGKFYGESEERLRKIFEEATQDAPSVIFIDEIDSIAPKRENVTGEVERRVVAQLLTLLDGMVERGQVVVIGATNRVDAIDPALRRPGRFDREIHIGVPDTKDRYEILQIHTRGMPIERDEETEEIGKVETEADEAALERERKEKADKYLMYLAERTQGFVGADLLALVQEAAMRCLRENLPDLDLEKEAIPPERLEKIVVTKRNFEDALMEAEPSALREIYVEMPTVSWNDVGGLDEAKQSITEAVEWPIKNPEKFSHMGIKAPRGILLYGPPGTGKTLIAKAVAKESNANFISVKGPEIFSKWLGESEKAIRETFRKARQVAPCVIFFDEIDSIASMPGMESTDSHTSERVLNQLLTEMDGLESLRDVVVIAATNRPNLLDPAILRPGRFDRLVYIGSPDRKGRLKIFRIHTKDTPLAENVNLETLADETEGYVGADIESVCREAVMIALRENFDTEYVEMRHFREALKKVKPTITENIAQFYEKIEAQFKGGQRLTETAGYIGYR

SEQ ID NO: 120151 - DNA, 2295 bp, Methanosarcina barkeri str. Fusaro
  CDS (1)..(2295): transl_table=11
ttggctgacagggaaaagataactgcaaaactaaaagttgcagaagctgatcaaagagatgtaggaaaaggaatcgtccgggtcgacgatagtttcagggaaaagctgggcctcaagccatttgacgttgtggaaataagagggggaaaatcgacttcagcgctgttaggacgcccatatcccagcgattcgggtctggatattatccgtatggacgggcttatccgtaccaatgcaaaaaccagcataggggaatacgtggatattcgcaaagccgactggaaagaggcaaggagtgtaactctcgcgcctgtagctaaaggcatgcagatctatgctccaagtgaaactcttaaagccatattcatgaaccgtacggtttctaagggagattttatttccaccacaagtttgaggcggtcacgggaaagagagactttagggaaaggaattatgttcgaagatttctttcaggatttttttggtccaggtatggggcagtcatttgggttgggagaaataaagttacaggtggtatctacttccccttccgggatagtaaagattacagacatgacagaggttgagctcttacctgaagctgcagaaataactcctgaacagaatgttcccactgtcatgtatgaggatctgggtggggttaaagaggctatcaccaaaataagagaaatgatagagctacctttgaagcatcctgaactttttgacaggctgggaatcgacgctccaaaaggagtactgctttatggaccgcctggaacaggcaagacaatgcttgcaaaagcagttgcaaacgagaccgatgcttactttatctcagtcaatggtccggaaattatgtccaagtattatggagagtcagaaaaagggatcagagacgtcttcgaagacgcagagaaaaacgctcctgcaatcattttccttgatgaaatcgattccattgcacctaagagagctgaagtgactggagaagtcgaaaggagagttgtagctcaactcctttccctgatggacgggcttaaggctcgcaagaatgtgattgtgatagggtcaaccaaccgtcctgaagcaattgatatggcacttcgtcgccctggtcgatttgacagagaaattgagttaagggttccggacactgaaggaaggcttgagattttccagattcacacaagaggtatgccacttgccgaaaacgtaaatctcatggacttcgctcagataacttatgggtttgtgggagctgacattgctgcgctttgccgggaagctgcaatgagttctttgaggcggattctcccgaagattaacctcaatgaacctgaaattccaagtgagatccttgacacacttcgggtcacaagggaagattttgaaaatgcccttaaagacgtccagccgtctgctataagagaaatccttatcgagattccgaatgtgagctgggaagatgtaggcggcctggagggagtaaaacaacttttgaaggaagctgtggaatggccccttaaaagtccggaatcgtacagggatataggagttgaggctcccaaaggagtgcttctatatggtccaccgggaactggaaagactctccttgcaaaagccatcgcccatgagtccgaagctaacttcatcacagcaaaaggaagtgatctgctttccaagtggtacggagagtccgaaaaaaggattgccgaggttttttcacgggcaaggcaggttgctccatctattattttcctggatgaactcgactctcttgcgcctattcgcggggctgccataggtgagccacaggttactgccaggatcctgaatcagcttctttccgagatggatggacttgaggaacttagagctgtagtggtaataggcgcaaccaaccgtcctgatattatagatccagctcttctaaggcctggacgttttgacgagttaattctcgttcctgttccggatgcgggagctcgcaaggaaatttttagggtccataccgcaaaaatgtcgcttgcagaggatgttgatattgacaaactcgtttccatgactgatcagtatacgggtgctgacattgcggctgtgtgcaaaaaggcaggaagagacgcacttcgcgaagaccttcatgctaaagaggtaaagcagaaacatttccttcaagcgattgctgaaaccgggccttcggttactcctgataccatgaaatattaccaggctgtacagagtggcctgagaaaaagacagtcaaaagaaatagagactccattttatacctga

SEQ ID NO: 120152 - protein, 764 aa, Methanosarcina barkeri str. Fusaro
MADREKITAKLKVAEADQRDVGKGIVRVDDSFREKLGLKPFDVVEIRGGKSTSALLGRPYPSDSGLDIIRMDGLIRTNAKTSIGEYVDIRKADWKEARSVTLAPVAKGMQIYAPSETLKAIFMNRTVSKGDFISTTSLRRSRERETLGKGIMFEDFFQDFFGPGMGQSFGLGEIKLQVVSTSPSGIVKITDMTEVELLPEAAEITPEQNVPTVMYEDLGGVKEAITKIREMIELPLKHPELFDRLGIDAPKGVLLYGPPGTGKTMLAKAVANETDAYFISVNGPEIMSKYYGESEKGIRDVFEDAEKNAPAIIFLDEIDSIAPKRAEVTGEVERRVVAQLLSLMDGLKARKNVIVIGSTNRPEAIDMALRRPGRFDREIELRVPDTEGRLEIFQIHTRGMPLAENVNLMDFAQITYGFVGADIAALCREAAMSSLRRILPKINLNEPEIPSEILDTLRVTREDFENALKDVQPSAIREILIEIPNVSWEDVGGLEGVKQLLKEAVEWPLKSPESYRDIGVEAPKGVLLYGPPGTGKTLLAKAIAHESEANFITAKGSDLLSKWYGESEKRIAEVFSRARQVAPSIIFLDELDSLAPIRGAAIGEPQVTARILNQLLSEMDGLEELRAVVVIGATNRPDIIDPALLRPGRFDELILVPVPDAGARKEIFRVHTAKMSLAEDVDIDKLVSMTDQYTGADIAAVCKKAGRDALREDLHAKEVKQKHFLQAIAETGPSVTPDTMKYYQAVQSGLRKRQSKEIETPFYT

SEQ ID NO: 120153 - DNA, 2193 bp, Moorella thermoacetica ATCC 39073
  CDS (1)..(2193): transl_table=11
atgcctggggatttgggtgtaaaactccgcgtgtgcgagggaatggttgaggatgcccgtaaaggtatagtacgggtactgaccccggttatggatgaattgggtttaaaacccaacgacgtcgttgctattaccggcaagcggactacggtagccaggataatgccggcttttcaagacggttgtcccccgggcaacatccagatggacggcctccagcgccagaatgcccaagtcggcatcggcgaaggagttactctatctcccgtggaatgggaaacagccaggacggtggttttggcgccggtcctgcccggctggaccctcggcggcgagcatgagattgtacatttaaagaagcacctcatcggccgggcggtggtaccgggtgatcaggtaaccatccctcagtttagcggtggtgatgaggcctttaccgttgaaggggctgcaccccggggagcggtggtaatcactcgtgatacagctgtacgctttaaaggcggggaagccaccgaaggccggggccagcgggtcacctatgaggatatcggcggtctggccagggaagtccaacgggtcagggaaattatcgaattgcccttaaaatacccacaactctttcaaaggttgggagtagaggctcccaagggcatcttgatgcacggggcacccggaacgggtaaaacccttattgcccgggccgtagcctcggaaacggaagcccactttatccacgtcaacggcccggagataatgcataaatactacggtgaaagcgaggcccgcctgcgccaggtttttgatgaggcccgcaggaaggcaccgagtattatcttcctggatgagattgacgccctggctccgcgccgggccgacgttcacggcgacgtggaaaaacgtgttgtcgcccagttgctggccttgatggacgggctggaatcccgcggcaacgtaattgtgatagcggccactaatatacccgaccttgtcgatccggccctgcgccgcccgggccgttttgaccgggagatagccatcaacgtcccggatcaaaggggccggcgggagatcctgcagatccatacccggggcatgtccctggcggaggacgtttccctggatcgcctggcagccatcacccacggctttgtcggtgctgatttggccgccctctgccgggaagccggcatgtatgccctgcgacgggcccttaaaagcttccagctgggcaacgagcgtacggaagacctgcaactccaggttactatgcgagactttctcgatgccctgacggaggtcgagccttcggccaccagggagttcgccatggagattcctacggcaacctgggaggatatcggtggcctggagaagattaaagaacgactgcaggctatggtcgagtggcccctacgctatccagaacttttccaacagtttggcctgcaaactcccaagggcattctgctctccggtccccccgggacaggtaagaccctggtagctaaagccctggcccgggagagcgggattaatttcataccggttaacagttccctcctcttttcccactggtggggagaggcggagaaaaccctacatgaggtttttcgcaaggcccgccaggcctctccctgcctgctgttttttgacgaactggacgccctggtaccggcccgcaaagctggcgaaggtagtagcattggcagccgcctggtatcccagttcctgatggagttagatggcctggaagaattgcgggaggtaatcgtcctgggagctaccaaccgtattgatatgattgacccggccgtcctgcggcccggtcgctttgaccagattctggagttcccgtatccggaccaggcagccaggaaagagattttccagatttacctgcgcaaccggccggttgacccgggcattaacctggatagtctggccggtgcggctgaagggctggtggggtcggagattgaagccctgtgcaagcgagcggccctgctggccgtatctgaagtgattaaccataaaggtgccggagcttacattaaaacgtgtcacctggaacaggccctggccgagatccaggccgaaaaacaacaggcacggaccggggcggagaaccataccctgcgccccgtctggaataatgttgtccccggagcaatatcacaggtggggaggtga

SEQ ID NO: 120154 - protein, 730 aa, Moorella thermoacetica ATCC 39073
MPGDLGVKLRVCEGMVEDARKGIVRVLTPVMDELGLKPNDVVAITGKRTTVARIMPAFQDGCPPGNIQMDGLQRQNAQVGIGEGVTLSPVEWETARTVVLAPVLPGWTLGGEHEIVHLKKHLIGRAVVPGDQVTIPQFSGGDEAFTVEGAAPRGAVVITRDTAVRFKGGEATEGRGQRVTYEDIGGLAREVQRVREIIELPLKYPQLFQRLGVEAPKGILMHGAPGTGKTLIARAVASETEAHFIHVNGPEIMHKYYGESEARLRQVFDEARRKAPSIIFLDEIDALAPRRADVHGDVEKRVVAQLLALMDGLESRGNVIVIAATNIPDLVDPALRRPGRFDREIAINVPDQRGRREILQIHTRGMSLAEDVSLDRLAAITHGFVGADLAALCREAGMYALRRALKSFQLGNERTEDLQLQVTMRDFLDALTEVEPSATREFAMEIPTATWEDIGGLEKIKERLQAMVEWPLRYPELFQQFGLQTPKGILLSGPPGTGKTLVAKALARESGINFIPVNSSLLFSHWWGEAEKTLHEVFRKARQASPCLLFFDELDALVPARKAGEGSSIGSRLVSQFLMELDGLEELREVIVLGATNRIDMIDPAVLRPGRFDQILEFPYPDQAARKEIFQIYLRNRPVDPGINLDSLAGAAEGLVGSEIEALCKRAALLAVSEVINHKGAGAYIKTCHLEQALAEIQAEKQQARTGAENHTLRPVWNNVVPGAISQVGR

SEQ ID NO: 120155 - DNA, 2319 bp, Novosphingobium aromaticivorans DSM 12444
  CDS (1)..(2319): transl_table=11
atggcagatgcggcaaccgaagcccggaccgaggggcgcaccgtgcgcctgcaggtggcgggcgcccgccaggaagaaagcggccacggcatcgctcgcatcagccggcatgtcatgtcgcagctcggcgtgaccgaaggcgacgtgatcgagatcgtcggcaagcgcgccaccgccgcgcgggtcatccagccctatcccgaggacgagggcctcgaactcattcgcctcgacgggctccagcgcgccaacgccgatgtcggctcgggcgagcatgtcgaagtgcgcaagatcgattcgcgccccgcccagcgcgtcgtcttcgcgccggcgcagaaggacctgcgcctccagggcccggcggttgcgctcaagcgcaatttcgcggggcgcccgctggtcaccggcgacctcgtcgcgacggcggggcagcagcaggtcaaccgcaccgacatgccgccgcaactgcgccagatgctcaatgcgccggcgtttgcgctcacccagatccgcctcaccgtcgtctcgaccagccccaagggcgtggtccacatcgacgagaacaccgaggtcgagttgcgccccgaatacgaggagccgcgcagctcgcgcgccgacgtcaactacgacgacgttggcggcatgggcgataccatccgccagctccgcgagatggtcgagctgccgctgcgctatcccgaactcttcacccgcctcggcgtcgatccgcccaagggggtgcttctccatggcccgccgggcaccggcaagacccgcctcgcccgcgccgtcgcgaacgagagcgacgcctcgttcttcaccatcaacgggcccgagatcatgggctcggcctatggcgagagcgagaagcgcctgcgcgaggtgttcgaggaggcaaccgccaactcgccgtcgatcatcttcatcgacgagatcgattcgatcgcgcccaagcgcagcgaagttcacggcgaggccgagaagcgcctcgtcgcgcagctcctcacgctgatggacggcctgcacagccgctcgaacctggtcgtcatcgccgccaccaaccggcccgacgcgatcgacgaggccttgcgccgtcccggtcgcttcgaccgcgagatcgtcgtcggcgttccggacgaaagcggccggcgcgagatcctcggcatccacacccgcgggatgccgctggccgaggatgtcgacctccaggagcttgcccgcaccacgcacggcttcgtcggcgcggatcttgcggctcttgcccgcgaagccgcgatcgaggctgtccgccgcatcatgccgcggctcgatttcgaacagcagaccattcctcaggacgtcctcgacagcctgcgggtggaacgcgacgatttcctcgaggcactgaagcgcgttcagccctcggccatgcgcgaagtcatggtccaggctccgaccatcggctgggccgacatcggcggtctggacgaagcgcaggaaaagctgcgcgaaggcgtcgagctgccgctgaagaaccccgaggccttccaccgcctcggcatccggccggccaagggcttcctgctctatggtccgcccggcaccggcaagaccctgctggccaaggccgtggcgaaggaggcggaagccaacttcatcgcgatcaagtcgtccgacctcctgtccaagtggtacggggagagcgaacagcagatcgcgcgcctcttcgcccgcgcccgccaggtcgcgccttgcgtggtattcatcgacgagatcgacagcctcgtccccgcgcgcggcagcgggcagggcgaacccaacgtcacagcgcgggtggtcaacaccatccttgccgagatggacgggctggaggaactgcaatccgtcgtcctgatcggcgcgaccaaccgacccaacctcgtcgatcctgcgctgctccgtccgggtcgtttcgacgaactggtctatgtcggcacgccgagcatgtccgggcgcgagcacatcctgggcatccacacccgcaacatgccgctcgcccccgacgtggacctcgccctggtcgcccgcgcgaccgaccgcttcaccggcgccgatctcgaggacgtggtgcgccgggcgggcctgaacgccatccgtcgcggcggcggcaacgtcgatcaggtcaaagcttccgacttcgacgaagccctcgaagactcgcgcgccacggtgaccgagcagatggaggaagagtacggccggatgaagggcgaactgaagaagcgcgcgatgaaccccggtccgctcggcttcatcgttcccggcatggtccagccgacgcgcgaatcgaagcacggctga

SEQ ID NO: 120156 - protein, 772 aa, Novosphingobium aromaticivorans DSM 12444
MADAATEARTEGRTVRLQVAGARQEESGHGIARISRHVMSQLGVTEGDVIEIVGKRATAARVIQPYPEDEGLELIRLDGLQRANADVGSGEHVEVRKIDSRPAQRVVFAPAQKDLRLQGPAVALKRNFAGRPLVTGDLVATAGQQQVNRTDMPPQLRQMLNAPAFALTQIRLTVVSTSPKGVVHIDENTEVELRPEYEEPRSSRADVNYDDVGGMGDTIRQLREMVELPLRYPELFTRLGVDPPKGVLLHGPPGTGKTRLARAVANESDASFFTINGPEIMGSAYGESEKRLREVFEEATANSPSIIFIDEIDSIAPKRSEVHGEAEKRLVAQLLTLMDGLHSRSNLVVIAATNRPDAIDEALRRPGRFDREIVVGVPDESGRREILGIHTRGMPLAEDVDLQELARTTHGFVGADLAALAREAAIEAVRRIMPRLDFEQQTIPQDVLDSLRVERDDFLEALKRVQPSAMREVMVQAPTIGWADIGGLDEAQEKLREGVELPLKNPEAFHRLGIRPAKGFLLYGPPGTGKTLLAKAVAKEAEANFIAIKSSDLLSKWYGESEQQIARLFARARQVAPCVVFIDEIDSLVPARGSGQGEPNVTARVVNTILAEMDGLEELQSVVLIGATNRPNLVDPALLRPGRFDELVYVGTPSMSGREHILGIHTRNMPLAPDVDLALVARATDRFTGADLEDVVRRAGLNAIRRGGGNVDQVKASDFDEALEDSRATVTEQMEEEYGRMKGELKKRAMNPGPLGFIVPGMVQPTRESKHG

SEQ ID NO: 120157 - DNA, 2211 bp, Methanococcoides burtonii DSM 6242
  CDS (1)..(2211): transl_table=11
atgtccgaagatatcacagtacgtgttgcagaagcaaaccaccgtgatgcgggaaggggtattgcccgacttccaaatgcccttatgcagaccatcgatgcaagaagcggagatataatcgagatcaggaacaagaaaaatacctacgcaagggtatatccggcaggtctggatgatgaagggaagaatattatacgtatcgacgggaatcttcgaggcaatgcaagagtcggtatcgatgacccggtgactgtaaaacggatacttgagaaagatgctgaaaagataactctcgccccaacacaccctgttctgaacgaaaggatatcacgttccgtacatcttagcttagagggaagacctgtcgataaaggacagcgcattcgtgtggagaacataaataacccgcttatttttgtagtaaaggctaccaaaccccatggcccggtagtggtcacacgaactaccaaaattgagatcgttgaacccattgctgaaacagatatgggagaggaagtatcttatgaagatattggcgggctgaagcgagaactcgggctgatgcgcgagatgatcgaactgccactgagacatcctgaacttttcgacaagcttggagttgatcctccaaaaggagttttgctttacggaccgccaggcacaggaaagacgatgatagccaaagctgtggcaagtgaaagtgaggcgaatttcatacccataagcgggccggaaataatttcaaaatattacggcgaaagtgagcaaaagcttcgcgagatctttgaggaagctgaaaaggaaggacctacaataatattcatcgatgagttagattccattgcaccaaaaagagatgatgttgtaggtgaagtcgaaaggagggttgtggcccaactgcttacattgatggatggattaacgagccggggaaaggtcatagtcattgctgcaaccaataggccaaattccattgaccaggcactgcgccgaggggggcgttttgacagggaaatagagatagggatacccgacagaggaggacggttgcaggtattgtacgtccacacccgagggatgcccatagaacagggacttaacctcgaaaacattgcggacatcacccacggatttgtcggagccgaccttgcctccctttgcaaggaagccgcaatgcatgccctgcgcaggatgctccccctgataagtatcgaagaggagatcccgcctgaaataatggaaacgcttgaggtgactgaaaccgatttcatagaggcgcatcgcaatattgaaccttctgctttaagggaggtctttgtggagataccccacgtgaggtgggaagatattggcggcctcaataaagtgaaacaggaactgatagaagcagttgaatggcctcttaaatatcccgagatgttcactgccctgaacaccacaccaccaaggggaatccttctattcggaccccccggcacaggtaagacccttttggcaaaagcagttgcaaatgaaagtgaggcaaatttcattagtatcaaaggaccggaacttctcagtaaatatgttggggaatctgaaaaagcggtaagggaaacgtttagaaaagccaagcaagcagctccaaccgttgttttctttgatgagcttgattcaatggtgccaaagcgcgggatgggatccgaccagcaagcaacagaacgcgttgtcagccagatattgaccgaaatagacggcattgaggaactgaaggatatagtcatagtggctgccactaacaggccggacataatcgaccccgccctattaagaccggggcgttttgacagacttatctatgtaaggccccctgataaagaggagcgtgccaagatacttgatattcatctttcaggtaagcctattgcagaagatgtaaaactggaagaacttgctgaacttaccgaagggtatgtaggagcggatattgaagccatctgcagagaagctgcaatgatgacacttcgagagatcatcaggccaggaatgacaaaggatgaggtctatgaaactgtaaagaacgttgtcattcaaagatcacactttagcacagcgataaaaagagtgagagcttcgacatccctggatgaaatgaagagatatgacgaaacggcacgaatgttctcgaatccggatgcagatgagaacaaggacttaagggaaaaggcataa

SEQ ID NO: 120158 - protein, 736 aa, Methanococcoides burtonii DSM 6242
MSEDITVRVAEANHRDAGRGIARLPNALMQTIDARSGDIIEIRNKKNTYARVYPAGLDDEGKNIIRIDGNLRGNARVGIDDPVTVKRILEKDAEKITLAPTHPVLNERISRSVHLSLEGRPVDKGQRIRVENINNPLIFVVKATKPHGPVVVTRTTKIEIVEPIAETDMGEEVSYEDIGGLKRELGLMREMIELPLRHPELFDKLGVDPPKGVLLYGPPGTGKTMIAKAVASESEANFIPISGPEIISKYYGESEQKLREIFEEAEKEGPTIIFIDELDSIAPKRDDVVGEVERRVVAQLLTLMDGLTSRGKVIVIAATNRPNSIDQALRRGGRFDREIEIGIPDRGGRLQVLYVHTRGMPIEQGLNLENIADITHGFVGADLASLCKEAAMHALRRMLPLISIEEEIPPEIMETLEVTETDFIEAHRNIEPSALREVFVEIPHVRWEDIGGLNKVKQELIEAVEWPLKYPEMFTALNTTPPRGILLFGPPGTGKTLLAKAVANESEANFISIKGPELLSKYVGESEKAVRETFRKAKQAAPTVVFFDELDSMVPKRGMGSDQQATERVVSQILTEIDGIEELKDIVIVAATNRPDIIDPALLRPGRFDRLIYVRPPDKEERAKILDIHLSGKPIAEDVKLEELAELTEGYVGADIEAICREAAMMTLREIIRPGMTKDEVYETVKNVVIQRSHFSTAIKRVRASTSLDEMKRYDETARMFSNPDADENKDLREKA

SEQ ID NO: 120159 - DNA, 2217 bp, Methanococcoides burtonii DSM 6242
  CDS (1)..(2217): transl_table=11
atggaagaactacagatcaaagtagaaaaagcacatccaatcgattttggacggggtatcatacgtcttgatccgagcactttgctcagtttacaactatcgccaggggacatagtggagatagttggtaaaaagaagactgcagcaaaggtctggcgtgcagaccgccaggattggggacaggggataggtcgcatcgatgggttcacccgtcaaaatgcaggagtaggaattggagaaaggatccatatccagagagccgaggtacttgtggcagagaaggtcgtactggcaccccctgaaggcgtgatgatggaatttgggggcaacataaacgctatcattaagcataatatattgaaacgtcctttcgtcgtaggggatgtaatcccaataacaagttcaatgacccaaacagcaccggggaatcaagccatacctcttgttgccattgaaagtgagcctgaagaaggcattttaatagtcagtgaaaatacagagatagaactgcgccagaaaccggtggaaggttatgaggatactgccacaggcattacatatgaggacattggaggtcttggggatgagatccagagggttcgcgagatgatagaactgcctctgaagcatcatgagatattccagaggcttaatgtagaaccacctaagggagtcatcctttatggtccgccaggcacgggaaagactttgatcgcaaaggccgttgccaatgaatcgagggcaaatttcctctatgttgcaggcccagagataatgggaaggttctatggggaaagtgaggaacgcctgagaaagatattcgaggaagcagcagagaatgcaccttccattatattcatagatgagatcgattccattgcaccaaaacgtgagaatgttacaggtgaggtcgaacgcagggtagttgcccagcttttgacacttatggacggtatggaagagagaggccagatagtcgttatcgcagctaccaaccgcctggattccatagaccctgctcttcgcagaccaggaagattcgaccgcgagatagagataggagtgccagatagcgatgacaggctggaagtgctccagatacatagccgtggcatgccgcttgcagaagatgtcgatctagaacatctcgccacctacacccagggttttgtgggtgctgacctgctttcacttgtgcaggaggcttcaatgcgagcactgcgaaggatcctcccggagataaatcttgatgaggaagagatatcacaggaagtgcttgaaaaactggttgtcacagcagaggattttgaggatgcacttaaggaagtggaaccctccgctatgagagaggtccttgtggaaataccatccattacctgggaagatgtgggaggtcttagtgatgcaaaacaggagatcattgaagctgtcgagtggccactgaaacatccggacaggatcattgagatggggatcaaagcgcccaaggggatcttactttatggaccacctggaacaggaaagaccctgatagcacaagctgtggcaaatgaagcaaatgctaattttattagtataaagggacctcaaatgctttcaaagttcgtgggagagtccgagaaggctgtgcgtgatacgttcaagaaagccagacaggtatccccatgtatcattttcttcgatgagatcgattccattgctacgacaaggatagcagatagtgagacaggaagaagctcacagcaggtcgttaatcaattacttacagaacttgacggactggaacccctaaaggaagtagttgttattgctgccaccaacaggccggacatgatcgatcctgccctgatgcgttcaggaaggttcgacagacttgtactggtaggcaattcaacgatccagggcagagaaagtatattcaatatccatacacgcgaaatgccactggatagtgaggtcagtatccagtcacttgctgccatgacagaaggatacgtgggagctgatattgaagcagtatgcagagaagctgcaatgcttgcactacgagaggattttgatgcggaaagcgtcaaagaacggcatttcctggctgcgatagagaaggtcaagcctactataacagaagatatggccgaattctatagcaagatacaggacaaactcaagggtggaactcataaacaagaaacaagttcttatatgggatacatgtaa

SEQ ID NO: 120160 - protein, 738 aa, Methanococcoides burtonii DSM 6242
MEELQIKVEKAHPIDFGRGIIRLDPSTLLSLQLSPGDIVEIVGKKKTAAKVWRADRQDWGQGIGRIDGFTRQNAGVGIGERIHIQRAEVLVAEKVVLAPPEGVMMEFGGNINAIIKHNILKRPFVVGDVIPITSSMTQTAPGNQAIPLVAIESEPEEGILIVSENTEIELRQKPVEGYEDTATGITYEDIGGLGDEIQRVREMIELPLKHHEIFQRLNVEPPKGVILYGPPGTGKTLIAKAVANESRANFLYVAGPEIMGRFYGESEERLRKIFEEAAENAPSIIFIDEIDSIAPKRENVTGEVERRVVAQLLTLMDGMEERGQIVVIAATNRLDSIDPALRRPGRFDREIEIGVPDSDDRLEVLQIHSRGMPLAEDVDLEHLATYTQGFVGADLLSLVQEASMRALRRILPEINLDEEEISQEVLEKLVVTAEDFEDALKEVEPSAMREVLVEIPSITWEDVGGLSDAKQEIIEAVEWPLKHPDRIIEMGIKAPKGILLYGPPGTGKTLIAQAVANEANANFISIKGPQMLSKFVGESEKAVRDTFKKARQVSPCIIFFDEIDSIATTRIADSETGRSSQQVVNQLLTELDGLEPLKEVVVIAATNRPDMIDPALMRSGRFDRLVLVGNSTIQGRESIFNIHTREMPLDSEVSIQSLAAMTEGYVGADIEAVCREAAMLALREDFDAESVKERHFLAAIEKVKPTITEDMAEFYSKIQDKLKGGTHKQETSSYMGYM

SEQ ID NO: 120161 - DNA, 2136 bp, Myxococcus xanthus DK 1622
  CDS (1)..(2136): transl_table=11
gtgaccgtcgcgacacgggaacatacgcggacgctgcgcgccgccgagtccctcggcaaagacctgggccgtggcctcgcccgcatggaccccgccgacatgaagcggctgggggcgcatgtcggcgacatcgtcacgctgtccggcaagcgccgcagcgcggccaaggtgatgccctcctacccggacgcccgggggcgcggaatcctccagattgacggtgtgacccgggccaacaccggggtgcagttggacgaaccggtgaagctgaccctggcccccgcccgacacgccgagaaggtcgtgctggcgcccctggagttcacccccgcgcagcgtgacctggcctacatcggcacgctgctggacggactgccggtggtgaagggagaccgggtccgcgcgctgctgttcggcagccgcacggccgacttccgcgtcgtcgagaccactcctgtgggggcggtggtgattcaccccaacaccctgctggaggtcgccaaggcgccggagaaggagaaggtgacgcacgagcgggcgcgcgccgtcagctacgaggacgtgggtgggctgaagcgggagctgggccgcatccgcgagatcgtggagctgccgctgcggtatccggaggtgttcgagcggctcgggatcgacgcccccaagggggtgctgctgtatggcccgccgggctgcggcaagacgctgatcgcccgggcggtggcccacgagacggcggcggcgttcttcaccatcaccggcccggagatcatgcacaagttctacggagagagtgaggcccacctccggcagatcttcgacgaggcccagcgcagggccccggccatcatcttcgtggacgagatagacgccatcgctccccggcgcgagaacgtgcagggcgaggtggagaagcgggtggtggcgcagttgctgtcgctgatggacggcctggcccaacgccggcacgtcatcgtgctggctgccaccaacatccccaacgtgctggacccggcgctgcgtcgcccggggcggttcgaccgcgagatcgccatctccatccccgaccgcacggcgcgcaaggagatcctcgccatccacagccggggcatgccgctggcagaggacgtggacctggaccatctggcggccgtgacgcatggcttcgtaggcgcagacctccaggccctgtgccgcgaggcggcgatgctctgcctgcgccggctgattccccacatcgacttcgcctcggccgagattccctacgacgagctgatacaggtccaggtgacgatggccgacttccaggcggcgctgcacgaggtggggccatcggcgatccgcgaggtgttcgtggagaccccggacgtgggctggaaggacgtgggcggactggggcagctcaagcagcggctcatcgaggcggtggagtggccactccggtaccccgaggagttcgcgcgggccaaggtccgcccccccaagggcgtgctgctgagcggccctcctggctgcggcaagacgctgatggccaaggccgccgcccacgagagccaggtcaacttcatctcggtcaagggcccggcgctgctcagcaagttcgtgggggagtccgagaggggggtgcgcgagacctttcagaaggcccgtcaagcggccccctgcatcatcttcttcgatgagatcgactcgctcgtgccgacgcgctccgccgggggaatggacgagcgcgtcacagagagggtcgtcagccagttcctggccgagatggatggcatcgaggagctgaccggcgtgctggtgctcgcggccaccaaccgcgcggacctgctcgaccctgcgctgctgcgcccgggacgcttcgacctgctcgtcgatgtgccgctgccggaccgcgaagcgcggcgcgacatcttccaggtccacctgcgcgacaagccggtggagaaggacctcgacctgggcggactcgctgcacgcagcgagtccttctccggcgccgacatccaggccgtgtgcaatcaggccgcctgggaagccgtgcgtcacgtcatcagcggcaagggaaagcggctcgtcatcacatccgagagcctgctcaaggcgatccgagggcacaaggaggcacgccggccatga

SEQ ID NO: 120162 - protein, 711 aa, Myxococcus xanthus DK 1622
MTVATREHTRTLRAAESLGKDLGRGLARMDPADMKRLGAHVGDIVTLSGKRRSAAKVMPSYPDARGRGILQIDGVTRANTGVQLDEPVKLTLAPARHAEKVVLAPLEFTPAQRDLAYIGTLLDGLPVVKGDRVRALLFGSRTADFRVVETTPVGAVVIHPNTLLEVAKAPEKEKVTHERARAVSYEDVGGLKRELGRIREIVELPLRYPEVFERLGIDAPKGVLLYGPPGCGKTLIARAVAHETAAAFFTITGPEIMHKFYGESEAHLRQIFDEAQRRAPAIIFVDEIDAIAPRRENVQGEVEKRVVAQLLSLMDGLAQRRHVIVLAATNIPNVLDPALRRPGRFDREIAISIPDRTARKEILAIHSRGMPLAEDVDLDHLAAVTHGFVGADLQALCREAAMLCLRRLIPHIDFASAEIPYDELIQVQVTMADFQAALHEVGPSAIREVFVETPDVGWKDVGGLGQLKQRLIEAVEWPLRYPEEFARAKVRPPKGVLLSGPPGCGKTLMAKAAAHESQVNFISVKGPALLSKFVGESERGVRETFQKARQAAPCIIFFDEIDSLVPTRSAGGMDERVTERVVSQFLAEMDGIEELTGVLVLAATNRADLLDPALLRPGRFDLLVDVPLPDREARRDIFQVHLRDKPVEKDLDLGGLAARSESFSGADIQAVCNQAAWEAVRHVISGKGKRLVITSESLLKAIRGHKEARRP

SEQ ID NO: 120163 - DNA, 2463 bp, Aspergillus niger
  CDS (1)..(2463)
atgagctcagaacccgatcacacccacgacaagaagagggtgaacctccatgacgcctccggcgccgacaagaaagaggaactcgacacctcgacggctatcttgaagaagaagaagaagcctaactccctcattgtcactgatgccgtcaacgatgacaactccgttatcgccctctccaacaacacaatggacaccctccagctgttccggggtgacaccgtcctcgtcaagggcaagaagcgcaaggacaccgttttgattgttttggccgatgatgatcttgatgatggaagcgctcgcatcaaccgtgttgtgagacacaacctccgtgtcaagcacggcgatatcatcaccgtccacccttgccccgacatcaaatacgccaagcgtattgccgttcttcccatcgccgacaccgttgagggcctgactggctccctcttcgatgtttacctcgccccctacttccgcgaagcctacagacccgtgagacagggagacctgttcacagtaagaggtggtatgagacaagtggaattcaaggttgttgaggtggaccccccagagtatggtattgtggctcaagataccatcatccactgcgagggtgagccgatccagcgcgaggatgaggagggcaacctcaacgaggtcggttacgacgacatcggtggctgcaggaagcagatggcacagatccgtgaattggtcgagctgccccttcgccaccctcagctcttcaagtccatcggtatcaagcctcctcgtggtatcctcatgtacggtcctccgggtaccggtaagactctgatggctcgtgccgtggccaacgagaccggcgctttcttcttcttgatcaacggtcccgagatcatgtccaagatggctggtgaatccgagtccaacctgcgcaaggccttcgaggaagccgagaagaactcccctgccatcatcttcattgatgagatcgattccatcgcccccaagcgtgagaagaccaacggtgaagtcgagcgccgtgtcgtctctcagcttctgaccctgatggacggtatgaaggcccgctccaacgttgttgtcatggccgccaccaaccgccccaactccatcgaccccgccctccgccgtttcggtcgtttcgatcgtgaggtcgacatcggtatccccgaccccactggccgtctggagatcctctcgatccacaccaagaacatgaagctgggtgatgatgtcgacttggagaccattgccgccgagacccacggttacgtcggttccgatcttgcctctctgtgctccgaggccgccatgcagcagatccgtgagaagatggatctgattgacctcgacgaggacaccattgacgctgaggtccttgactctcttggtgttaccatggagaacttccgttacgcccttggtgtctccaacccctccgctctgcgcgaggttgccgttgtcgaggtgcccaacgtccgttgggaggacattggtggtctggaggaggtcaagcgcgagctcatcgagagcgtccagtaccctgtcgaccaccccgagaagttccagaagtttggtctttcgccttcccgcggtgttttgttctatggccctcccggtactggtaaaaccatgcttgccaaggccgtggccaacgaatgtgctgccaacttcatctcggtcaagggtcctgagctgctgagcatgtggttcggtgagtccgagagcaacatccgtgatatcttcgacaaggctcgcgctgctgctccttgcgttgttttcctggatgagttggattccatcgcgaagtctcgtggtggctctgtcggtgatgccggcggtgcctctgaccgtgtcgtcaaccagctcctgaccgagatggacggtatgacctccaagaagaacgtcttcgtcatcggtgccacgaacagacccgagcagctcgatgccgctctggtccgtcctggtcgtcttgacaccctggtctacgttcctctgccggaccaggcctctcgtgagagcattctcaaagcccagctccgcaagacccctattgctggcgatatcgacctttccttcattgccagcaagacccacggattctccggtgctgatcttggcttcgtcactcagcgtgctgtcaagcttgccatcaagcagtccatcggcgctgacatcgaacgccagaagcagcgtgaggctcagggcgaggatgtcaagatggaggacgaggaggttgaggaggaggacccggtgccggagcttacccgggcacacttcgaggaggcgatgaagtcggccagacgctccgtcagcgacgtggagattcgccggtacgaggcgtttgctcagagcttgaagaactcgggcggcagcagcttcttccgcttcccgtcggcgggtgaggtgacggacaacaacacgttcggtgaagccggcaatgacgacagcctctatgactag

SEQ ID NO: 120164 - protein, 820 aa, Aspergillus niger
MSSEPDHTHDKKRVNLHDASGADKKEELDTSTAILKKKKKPNSLIVTDAVNDDNSVIALSNNTMDTLQLFRGDTVLVKGKKRKDTVLIVLADDDLDDGSARINRVVRHNLRVKHGDIITVHPCPDIKYAKRIAVLPIADTVEGLTGSLFDVYLAPYFREAYRPVRQGDLFTVRGGMRQVEFKVVEVDPPEYGIVAQDTIIHCEGEPIQREDEEGNLNEVGYDDIGGCRKQMAQIRELVELPLRHPQLFKSIGIKPPRGILMYGPPGTGKTLMARAVANETGAFFFLINGPEIMSKMAGESESNLRKAFEEAEKNSPAIIFIDEIDSIAPKREKTNGEVERRVVSQLLTLMDGMKARSNVVVMAATNRPNSIDPALRRFGRFDREVDIGIPDPTGRLEILSIHTKNMKLGDDVDLETIAAETHGYVGSDLASLCSEAAMQQIREKMDLIDLDEDTIDAEVLDSLGVTMENFRYALGVSNPSALREVAVVEVPNVRWEDIGGLEEVKRELIESVQYPVDHPEKFQKFGLSPSRGVLFYGPPGTGKTMLAKAVANECAANFISVKGPELLSMWFGESESNIRDIFDKARAAAPCVVFLDELDSIAKSRGGSVGDAGGASDRVVNQLLTEMDGMTSKKNVFVIGATNRPEQLDAALVRPGRLDTLVYVPLPDQASRESILKAQLRKTPIAGDIDLSFIASKTHGFSGADLGFVTQRAVKLAIKQSIGADIERQKQREAQGEDVKMEDEEVEEEDPVPELTRAHFEEAMKSARRSVSDVEIRRYEAFAQSLKNSGGSSFFRFPSAGEVTDNNTFGEAGNDDSLYD

SEQ ID NO: 120165 - DNA, 2406 bp, Drosophila melanogaster
  CDS (1)..(2406)
atggcagattccaagggtgaagatctggctacggcgatcctgaagcgcaaggaccgtcccaaccgactgattgtggaagaggcgcagaatgacgacaactctgtggtgtcgctatcgcaggcgaagatggatgagctgcagctcttccgtggcgacaccgtgattctgaagggcaagcgccgaaaggagacggtgtgcatcgtgctctcggacgacacctgtcccgacgagaagatccgcatgaaccgcgtggtgcgcaacaacctgtgcgtccatctttcagatgtggtttccgtgcagtcctgcccggacgtcaagtacggcaaacgggtgcgcatcctgcccatcgacgaaagcaccgaaggcgttaccggcaacctgttcgagatctatctgaagccgtacttcctagaggcctatcggccaatccacatgggcgacaactttattgtgcgcgccgccatgcgtcctattgagttcaaggtggtgctgaccgacccggagccctactgcatcgtagctcccgagactgtaatcttctgcgacggtgatccaatcaagcgcgaggaggaggaggagtccctaaacgccgttggctacgatgatatcggtggttgccgcaagcagctggcccagatcaaggagatggttgagttgcctttgcggcatccatcgctcttcaaggccattggtgtgaagccaccgcgtggtattcttatgtacggtcccccgggtaccggtaagaccctgattgccagggctgtggccaacgagaccggagcctttttcttcctgattaacggaccggagatcatgtccaaactggccggagagtcggaatcgaatctgcgtaaggccttcgaggaagccgagaaaaactcgccggctatcatcttcatcgatgagatcgacgctattgcccccaagcgtgacaagacccacggtgaggtggagcgtcgcattgtgtcgcagcttttgaccctgatggatggcatgaagaagagctcccatctgatcgttatggctgctaccaacaggcccaactccattgacccggccctgcgtcgctttggacgttttgatcgtgagattgacatcggcattccagatgccactggtcggctggaggtgctgcgcattcacaccaagaacatgaagctgcatgatgatgttgacctggagcagattgctgccgaatcccacggacatgtgggcgctgatctggcttcactctgctctgaggctgcccttcagcagatccgtgagaagatggacctcatcgatttggaagacgataagatcgatgccgaggtgctggcgtcgctggccgtgacaatggagaacttccgctacgctatgaccaagtccagtccatcggcgctgcgtgaaactgttgttgaggtgcccaacaccacctggacagacatcggcggtctggagagcgtcaagaaggaattgcaggagctggtgcaatacccagtggagcatccggacaagttcttgaagtttggcatgcagcccagtcgcggtgtccttttctacggaccccctggttgcggtaagacgctgctggccaaggccattgccaacgagtgccaggcgaacttcatctcagtcaagggtcccgagctgctgaccatgtggttcggcgagtctgaggccaacgtgcgcgacatcttcgataaggctcgctcggcggctccttgtgtgctcttctttgacgagctggactcgatcgccaaagcccgtggcggtaatgtcggcgatgctggcggcgccgctgatcgtgtgatcaatcagatccttaccgaaatggatggcatgggagccaagaagaatgtgttcatcatcggagccaccaatcgcccggacattatcgatccggccatcctccgtccgggccgtctggatcagttgatctatattccgctgcccgacgacaaatcgcgtgaggctatcctgaaggctaacttgcgcaagtccgcgctggccaaggaagtagaccttacctacatcgccaaggtgacgcagggcttctctggcgccgatctgaccgagatctgccagcgggcttgcaagctggccatccgacaggccatcgaggctgaaattcgtcgcgagaaggagcgcgccgaaaatcagaactccgcgatggacatggacgaggacgatccagtgccggagattaccagcgcccacttccaggaggccatgaagttcgctcgccgttcggtgtccgataatgacatcaggaagtacgagatgtttgcccagactttgcagcagtcccgtggattcggacagaacttcagattccccggtcaaaccggcaacacctcaggatctggtaacaacttgccagttaactcgcccggcgacaacggcgacgatgatctttacagttag

SEQ ID NO: 120166 - protein, 801 aa, Drosophila melanogaster
MADSKGEDLATAILKRKDRPNRLIVEEAQNDDNSVVSLSQAKMDELQLFRGDTVILKGKRRKETVCIVLSDDTCPDEKIRMNRVVRNNLCVHLSDVVSVQSCPDVKYGKRVRILPIDESTEGVTGNLFEIYLKPYFLEAYRPIHMGDNFIVRAAMRPIEFKVVLTDPEPYCIVAPETVIFCDGDPIKREEEEESLNAVGYDDIGGCRKQLAQIKEMVELPLRHPSLFKAIGVKPPRGILMYGPPGTGKTLIARAVANETGAFFFLINGPEIMSKLAGESESNLRKAFEEAEKNSPAIIFIDEIDAIAPKRDKTHGEVERRIVSQLLTLMDGMKKSSHLIVMAATNRPNSIDPALRRFGRFDREIDIGIPDATGRLEVLRIHTKNMKLHDDVDLEQIAAESHGHVGADLASLCSEAALQQIREKMDLIDLEDDKIDAEVLASLAVTMENFRYAMTKSSPSALRETVVEVPNTTWTDIGGLESVKKELQELVQYPVEHPDKFLKFGMQPSRGVLFYGPPGCGKTLLAKAIANECQANFISVKGPELLTMWFGESEANVRDIFDKARSAAPCVLFFDELDSIAKARGGNVGDAGGAADRVINQILTEMDGMGAKKNVFIIGATNRPDIIDPAILRPGRLDQLIYIPLPDDKSREAILKANLRKSALAKEVDLTYIAKVTQGFSGADLTEICQRACKLAIRQAIEAEIRREKERAENQNSAMDMDEDDPVPEITSAHFQEAMKFARRSVSDNDIRKYEMFAQTLQQSRGFGQNFRFPGQTGNTSGSGNNLPVNSPGDNGDDDLYS

SEQ ID NO: 120167 - DNA, 2427 bp, Nicotiana tabacum
  CDS (1)..(2427)
atgactaacaaagctgaatcctccgattcgaaagggacaaagcgggactatagtacggcgatattggagaggaagaagtcgccgaatcggcttgttgttgatgaggcaatcaacgatgacaactctgttgttgctcttcaccctgatactatggagaagcttcagctttttcgtggtgacactatcttgatcaagggtaagaagagaaaagatacaatctgcatagctcttgctgatgacacctgtgatgagccgaagatcaggatgaacaaggttgtcagaaataacctaagggttcgacttggtgatgttgtctctgtgcatcagtgtcctgatgtcaagtatggcaaacgtgtacacattcttcccattgatgataccattgaaggggtcactgggaatctctttgatgcttacttaaaaccctatttccttgaagcatacagaccggtgaggaagggtgatcttttcttggtaaggggagggatgagaagtgtagagttcaaggttattgaaactgatcctcctgaatactgtgttgtagcccctgatacggagatattttgtgagggtgaacctgtgagtagggaagacgagaataggctagatgaaatcggttatgatgatgttgggggcgtgcgtaaacaaatggctcaaatacgggagcttgttgagcttccactaaggcacccacaactcttcaaatctattggtgtcaaacctcctaaaggaattctgttgtatggacctcctggatcaggaaagactttaatagcccgagcagttgcaaatgagactggtgcgttcttcttctgtattaatggtccagagatcatgtcaaaattggctggagaaagtgaaagcaatcttaggaaggcatttgaggaagctgaaaagaatgcaccatcaatcatttttatcgatgaaattgactcaatagctcctaaacgtgagaagacacatggagaggttgagaggaggattgtctcccagcttttgacattgatggatggactcaaatcacgtgcccatgtaattgttatgggtgccactaatcgccccaacagcattgaccctgccctaagaaggtttggtagatttgatagggaaatagacattggtgttccagatgaagtggggcgtctcgaggtgcttcgtatccatacgaagaacatgaagcttgctgaagaagttgatttagaaagaattggcaaggacacacatggttatgtcggtgctgatttagcagctttgtgtaccgaggctgctcttcaatgcatcagagagaagatggacgtgattgatttggaggatgagaccattgatgcagagatactgaactctatggctgtgacaaatgagcacttccaaactgctcttggaacgagcaatccctctgccttgcgtgaaactgttgttgaagttcccaatgtttcctgggaggatattggaggccttgagaatgtcaagcgtgagctccaagagactgttcaatatccagtggaacatcctgagaaattcgagaagtttggtatgtctccgtcaaagggagtcctgttctacggcccacctggatgtgggaaaactttgctcgcgaaggccattgcaaatgaatgccaggccaacttcatcagtgttaagggtccagaattgctcaccatgtggtttggagagagtgaagccaatgttagagaaatatttgacaaggctcgacagtctgctccatgtgtcctattctttgatgaactggattccatcgccacacagagaggaagtagtgtgggagatgctgggggagctgctgatagggtattgaatcaactccttactgaaatggatggaatgaatgctaagaagactgtattcattattggtgcaaccaacaggcctgacattattgatcctgcacttctacggcctggtcgtcttgatcaattgatttatattcctctccctgatgaagactctcgtcaccaaattttcaaggcgtgtctacgaaagtcacccctctctaaggatatcgatttaagagctctagcgaagtacacacagggcttcagtggagctgacattacagaaatctgtcaacgtgcttgcaaatacgctatcagagaaaacattgagaaagacattgagagggagaaaaggagaagcgagaatcctgaggccatggaggaagacgttgatgatgaggtagccgagatcaagcctgctcattttgaggaatcaatgaagtatgctaggaggagtgttagtgacgcagatattcgcaagtaccaggcttttgctcagacgttgcagcagtctagaggttttggtactgaattccgattctcagagacaagcacggcaggagggacaactggaactgctgaccccttcgcaacttcagctggtggagcagatgaagatgacctgtatagttag

SEQ ID NO: 120168 - protein, 808 aa, Nicotiana tabacum
MTNKAESSDSKGTKRDYSTAILERKKSPNRLVVDEAINDDNSVVALHPDTMEKLQLFRGDTILIKGKKRKDTICIALADDTCDEPKIRMNKVVRNNLRVRLGDVVSVHQCPDVKYGKRVHILPIDDTIEGVTGNLFDAYLKPYFLEAYRPVRKGDLFLVRGGMRSVEFKVIETDPPEYCVVAPDTEIFCEGEPVSREDENRLDEIGYDDVGGVRKQMAQIRELVELPLRHPQLFKSIGVKPPKGILLYGPPGSGKTLIARAVANETGAFFFCINGPEIMSKLAGESESNLRKAFEEAEKNAPSIIFIDEIDSIAPKREKTHGEVERRIVSQLLTLMDGLKSRAHVIVMGATNRPNSIDPALRRFGRFDREIDIGVPDEVGRLEVLRIHTKNMKLAEEVDLERIGKDTHGYVGADLAALCTEAALQCIREKMDVIDLEDETIDAEILNSMAVTNEHFQTALGTSNPSALRETVVEVPNVSWEDIGGLENVKRELQETVQYPVEHPEKFEKFGMSPSKGVLFYGPPGCGKTLLAKAIANECQANFISVKGPELLTMWFGESEANVREIFDKARQSAPCVLFFDELDSIATQRGSSVGDAGGAADRVLNQLLTEMDGMNAKKTVFIIGATNRPDIIDPALLRPGRLDQLIYIPLPDEDSRHQIFKACLRKSPLSKDIDLRALAKYTQGFSGADITEICQRACKYAIRENIEKDIEREKRRSENPEAMEEDVDDEVAEIKPAHFEESMKYARRSVSDADIRKYQAFAQTLQQSRGFGTEFRFSETSTAGGTTGTADPFATSAGGADEDDLYS

SEQ ID NO: 120169 - DNA, 2466 bp, Aspergillus oryzae
  CDS (1)..(2466)
atgagcgcagaacccgaccatactcatgataagaagagggtgcacctccaggacgcctctggcgccgagaagaaagaggaactcgataccgcgacagccatcctaaagaagaagaagaagcccaactcattgattgtgaccgatgccgtcaacgatgataactccgttattgccctatccaacaacactatggaaactctccaactcttccgcggtgacacagttctggttaagggcaagaagcggaaagacaccgttctgattgtgttggcggatgatgatcttgacgatggaagtgcccgcatcaaccgtgtggtgaggcacaacctccgtgtcaagcacggcgatgtcatcactgttcacccatgccccgatattaaatatgccaagcgtattgccgttctccccatcgcagacactgttgagggtctcaccggctccttgttcgacgtcttccttgccccctacttccgcgaagcctacagacccgtgagacagggtgacctgttcacagtaagaggaggtatgagacaagtagaattcaaggtcgttgaggtggatcctccagagtacggcattgttgcacaagataccgtgatccactgtgagggtgagccaatccagcgcgaggatgaggagggtaacctcaacgaggtcggttacgatgacattggtggttgccggaaacagatggcacagatccgagaattggtggagctacccctccgtcatcctcagctgttcaagtccattggtatcaagcctcctcgcggtatcctcatgtacggtcctcccggtactggtaagactctgatggctcgtgccgtggcaaacgagaccggcgctttcttcttcttgatcaacggtcccgagatcatgtccaagatggccggtgagtccgaatcgaatctgcgcaaggcctttgaggaggctgagaagaactcccccgctatcatcttcattgatgaaattgattctatcgcccccaagcgtgagaagaccaatggtgaagttgagcgccgtgttgtctctcagctcctcaccctgatggacggcatgaaggctcgttccaacgttgtcgtcatggccgccactaaccgccccaactctatcgatcctgctctccgtcgtttcggtcgtttcgatcgtgaggtcgatattggtattcccgaccccactggccgcctggagattatgcagatccacaccaagaacatgaagctcggagaggacgttgacctggagaccatcgccgctgagacccatggttacgtcggctctgatcttgcttctctctgctctgaggctgccatgcaacagattcgtgagaagatggatttgatcgatctggacgaggataccattgatgctgaggtgctcgactctcttggtgtcaccatggagaacttccgttacgcccttggcgtctctaacccctccgcgcttcgcgaagtggctgttgtcgaggtgcccaacgttcggtgggaggacattggtggtctcgaggaggtcaagcgcgagctcatcgagagcgtgcagtaccccgtggaccaccccgagaagtaccaaaagttcggtctttcaccttctcgaggtgtgctgttctacggtcctcctggtactggtaagaccatgcttgccaaggctgtcgctaatgagtgcgctgccaacttcatctccgtcaagggccctgaactgctctctatgtggtttggtgagtctgagagcaacatccgggatatcttcgacaaggcccgtgctgccgctccttgtgtcgtcttcctggatgagttggattcgatcgccaagtctcgtggtggctctgttggcgatgctggtggtgcctctgaccgtgtcgtcaaccagctcctgaccgaaatggacggcatgacctccaagaagaatgtcttcgtcatcggtgccacaaacagacccgagcagcttgatgctgcccttgtccgtcctggtcgtctggacactcttgtctacgttcccctgcccgaccaggcttctcgtgagggtatcctcaaggcccagctgcgcaagacccctgtcgcacccgatgtcgacttgcccttcattgccagcaagacccacgggttctctggtgctgatcttggattcgttactcaacgtgctgttaagctggccatcaagcagtccatcactgctgatattgagcgccagaagcagcgtgaggccaatggcgaggacatcaagatggatgaagacgaggaggtcgacgaggaggatcctgtgccggagcttacgcgtgcgcatttcgaagaggccatgaagacggcccgtcggtccgtcagcgatgtggaaatccgccggtacgaggctttcgctcagagcctgaagaactcgggcggcagcagcttcttccgcttcccatctgcgggcgaggtccaggacaacaacacgttcggtgaagccggcaatgacgacagcctctatgactaa

SEQ ID NO: 120170 - protein, 821 aa, Aspergillus oryzae
MSAEPDHTHDKKRVHLQDASGAEKKEELDTATAILKKKKKPNSLIVTDAVNDDNSVIALSNNTMETLQLFRGDTVLVKGKKRKDTVLIVLADDDLDDGSARINRVVRHNLRVKHGDVITVHPCPDIKYAKRIAVLPIADTVEGLTGSLFDVFLAPYFREAYRPVRQGDLFTVRGGMRQVEFKVVEVDPPEYGIVAQDTVIHCEGEPIQREDEEGNLNEVGYDDIGGCRKQMAQIRELVELPLRHPQLFKSIGIKPPRGILMYGPPGTGKTLMARAVANETGAFFFLINGPEIMSKMAGESESNLRKAFEEAEKNSPAIIFIDEIDSIAPKREKTNGEVERRVVSQLLTLMDGMKARSNVVVMAATNRPNSIDPALRRFGRFDREVDIGIPDPTGRLEIMQIHTKNMKLGEDVDLETIAAETHGYVGSDLASLCSEAAMQQIREKMDLIDLDEDTIDAEVLDSLGVTMENFRYALGVSNPSALREVAVVEVPNVRWEDIGGLEEVKRELIESVQYPVDHPEKYQKFGLSPSRGVLFYGPPGTGKTMLAKAVANECAANFISVKGPELLSMWFGESESNIRDIFDKARAAAPCVVFLDELDSIAKSRGGSVGDAGGASDRVVNQLLTEMDGMTSKKNVFVIGATNRPEQLDAALVRPGRLDTLVYVPLPDQASREGILKAQLRKTPVAPDVDLPFIASKTHGFSGADLGFVTQRAVKLAIKQSITADIERQKQREANGEDIKMDEDEEVDEEDPVPELTRAHFEEAMKTARRSVSDVEIRRYEAFAQSLKNSGGSSFFRFPSAGEVQDNNTFGEAGNDDSLYD

SEQ ID NO: 120171 - DNA, 2427 bp, Eisenia foetida
  CDS (1)..(2427)
atggcggaagaccagaacagtgatgatcttgctaccgcaatcctgcgcaggaaggccaaaccgaaccgtcttctggttgaggaggccatcaatgaggacaactctgttgtctgtgtctctcagaacaagatggatgagcttcagttgtttcgtggtgactcggtcctgctgaagggcaagcgtcgacgtgaggctgtgtgcattgtcttatcagaagatactctcacagacgaaaagattcgcatcaatagaatcgttcgtaacaatctgcgcgtcagacttggcgacatcgtcagcatccagccatgccctgatgtaaagtatggaaagagggtgcacatcctaccaattgatgacacagttgaaggtcttactggtaacctttttgaggtctacctgaagccatatttcctggaggcttaccgtcctgttcacaaaggcgacatcttccttgtgcgaggcggtatgagagcagttgagttcaaggtcgttgagacggacccggctccctactgcatcgtggcacctgatacagtcatccactgtgaaggagagccagtgaagcgtgaagaagaggaggaggcactgaatgaggttggctacgatgacattggaggatgtcgtaagcagttggctcagatcaaggagatggtggaactgcctttgcgccatcctcagctcttcaaggccataggtgtcaagccacctcgcggaattctcctgtatggtccgccgggtactggcaagaccctgattgcccgtgccgttgccaatgagaccggtgcgttcttctttctgatcaatggtccggagatcatgagcaagctggctggcgaatctgagagcaacctgaggaaggcatttgaggaggcggaaaagaatgctccggcaatcatcttcattgatgaactggatgctattgcacctaaaagagagaagacccatggagaggtggagaggcgtattgtttcgcagttgcttactctgatggatggactgaagcagagagctcatgtgattgttatggcggccaccaatagacccaacagcattgatccagctctgagaagattcgggcgtttcgaccgagaggtggacatcggaattccagacactagtggtcgcttggaaattcttcgcattcatacgaagaacatgaagcttgcaaatgacgttgacttggaacagattgcttcagagactcatggtcacgttggttctgatcttgcggctctgtgctctgaggccgcccttcagcagattcgtgaaaagatggacgtcattgatcttgaagatgaagcgattgacgccgaggtcctcagctccttggctgtgtctcaggagaatttcagatgggcactcagtaagagcaatccaagtgctttgcgagagactgccgtggaagtacccacagtgacctgggaagatgttggcggtctggaaaatgtcaaacgggaactgcaagaacttgtgcaatacccggtagagcatccagacaagttcctgaaatttggaatgactccgtcaaagggggtgttgttctacggacccccaggttgcggcaaaacgcttcttgccaaggccattgcaaacgagtgccaggccaacttcatatccatcaaaggcccagagctgctgactatgtggttcggcgagtcggaggccaacgtcagagacatctttgataaggcgcgttctgcagctccgtgcgtgctgttttttgatgagctggactcgattgctaagtctcgtggtgggaatgttggggatggtggtggtgctgccgaccgtgtcataaaccagctgctgactgagatggatggaatgagctcaaagaagaacgtgttcatcattggagccacgaacagacctgacatcattgattcggccattctgcgtcctggccgtctcgaccaattgatctacatacctctcccagatgacaagtctcgtattcagattcttaaggccaatcttcgcaagtctcctgttgctaaggatgttgaccttgattatttggccaaagtgacacacggatttagtggtgccgacttgacagaaatctgccagagagcatgcaagctggccatccgtgaatcgatcgaactagagattcgcagggagaggactcgcgaccagaacccggatgcagcagagatggaggatgactacgatcccgtgccagagatcagaagggaccatttcgaggaagcaatgaagtttgcacgacgatctgtgaccgacaatgacattcgcaagtacgagatgtttgcccagactcttcagacaagcagaggaattggatcaaacttcagatttccaggtggccagcccccacgtggtggacagggttctggtgctggtgggcaaggaggcggcagcggtggaaacccgtatgaagagggcgaagaagacctgtacagttag

SEQ ID NO: 120172 - protein, 808 aa, Eisenia foetida
MAEDQNSDDLATAILRRKAKPNRLLVEEAINEDNSVVCVSQNKMDELQLFRGDSVLLKGKRRREAVCIVLSEDTLTDEKIRINRIVRNNLRVRLGDIVSIQPCPDVKYGKRVHILPIDDTVEGLTGNLFEVYLKPYFLEAYRPVHKGDIFLVRGGMRAVEFKVVETDPAPYCIVAPDTVIHCEGEPVKREEEEEALNEVGYDDIGGCRKQLAQIKEMVELPLRHPQLFKAIGVKPPRGILLYGPPGTGKTLIARAVANETGAFFFLINGPEIMSKLAGESESNLRKAFEEAEKNAPAIIFIDELDAIAPKREKTHGEVERRIVSQLLTLMDGLKQRAHVIVMAATNRPNSIDPALRRFGRFDREVDIGIPDTSGRLEILRIHTKNMKLANDVDLEQIASETHGHVGSDLAALCSEAALQQIREKMDVIDLEDEAIDAEVLSSLAVSQENFRWALSKSNPSALRETAVEVPTVTWEDVGGLENVKRELQELVQYPVEHPDKFLKFGMTPSKGVLFYGPPGCGKTLLAKAIANECQANFISIKGPELLTMWFGESEANVRDIFDKARSAAPCVLFFDELDSIAKSRGGNVGDGGGAADRVINQLLTEMDGMSSKKNVFIIGATNRPDIIDSAILRPGRLDQLIYIPLPDDKSRIQILKANLRKSPVAKDVDLDYLAKVTHGFSGADLTEICQRACKLAIRESIELEIRRERTRDQNPDAAEMEDDYDPVPEIRRDHFEEAMKFARRSVTDNDIRKYEMFAQTLQTSRGIGSNFRFPGGQPPRGGQGSGAGGQGGGSGGNPYEEGEEDLYS

SEQ ID NO: 120173 - DNA, 2406 bp, Drosophila erecta
  CDS (1)..(2406)
atggcagattccaagggtgaagatctggctacggcgatcctgaagcgcaaggaccgtcccaaccgactgattgtggaggaggcgcagaatgatgacaactctgtggtgtcgctgtcgcaggcgaagatggatgagctgcagctcttccgtggcgacaccgtcattctgaagggcaagcgccgaaaggagacggtgtgcatcgtgctctcggacgacacctgctccgacgagaagatccgcatgaaccgcgtggtgcgcaacaacttgtgcgtgcatctttcagatgtggtttccgtgcagtcctgcccggacgtgaagtacggcaagcgggtgcgcatcctgcccatcgacgacaccaccgaaggcatcactggcaaccttttcgagatctatctgaagccgtacttcctagaggcctatcggccaatccacatgggcgacaacttcattgtgcgcgccgccatgcgtccggttgagttcaaggtggtgctaaccgacccggagccctactgcattgtggcacccgagacggtaatcttctgcgacggtgatccgatcaagcgcgaggaggaggaggagtccctaaacgccgttggctacgacgatatcggtggttgtcgcaagcagctggcccagatcaaggagatggtggagttgcctttgcgccatccatcgctcttcaaggccatcggtgtgaagccaccgcgcggtatccttatgtacggacccccgggtaccggcaagaccctgattgccagggctgtggccaacgagaccggagcctttttcttcctgattaacgggccggagatcatgtccaagctggccggagagtcggaatcgaatctgcgcaaggccttcgaggaagccgagaaaaactcgccggccatcatcttcatcgatgagatcgacgccattgccccgaagcgtgacaagacccatggcgaggtggagcgtcgtattgtatcgcagcttttgaccctgatggacggcatgaagaagagctcccatctgatcgttatggctgccactaacaggcccaactccattgacccggccctgcgtcgctttggacgtttcgatcgtgagattgacatcggcattccagatgccactggtcgactggaggtgctgcgcattcacaccaagaacatgaagctgcacgatgatgttgacttggagcagattgctgccgagtcccacggacatgtgggcgctgatctggcttcactgtgctctgaggctgccctgcagcaaatccgtgagaagatggacctcatcgatttggatgatgacaagatcgatgccgaggtgctggcgtcgctggccgtgacaatggaaaacttccgctatgctatgaccaagtccagtccatcggcactgcgtgaaaccgttgtggaggtgcccaacaccacctggacagacatcggaggtctggagagcgtcaagaaggaattgcaggagctggtgcagtacccagtggagcacccggacaaattcttgaagttcggcatgcagcccagtcgcggtgtcctattctacggaccccctggttgcggtaagacgctgttggccaaggccattgccaacgagtgccaggcgaacttcatctcagtcaagggtcccgagctgctgaccatgtggttcggcgagtccgaggccaatgtgcgcgacatcttcgataaggcccgctctgcggctccttgtgtgctcttcttcgacgagctggactcgatcgccaaagcccgtggcggtaatgtcggcgatgctggcggcgccgctgatcgtgtgatcaatcagatccttaccgaaatggatggcatgggagccaagaagaacgtgttcatcatcggagccaccaatcgccccgacattatcgatccggcaatcctccgtccgggccgtctggatcagttgatctatattccgctgcccgacgacaagtcgcgtgaggctatcctgaaggctaacttgcgcaagtcgccgctggcgaaggaagtggacctttcctacatcgccaaggtgacgcagggcttctccggcgccgatctgaccgagatctgccagcgggcctgcaagctggccatccgacaggccatcgaggctgaaattcgtcgtgagaaggagcgcgccgaaaaccagaactcggcgatggacatggacgaggacgatccagtgccggagattaccagcgcccactttgaggaggccatgaagttcgctcgtcgttcggtctccgataatgacatcaggaaatacgagatgtttgcccagactttgcagcagtcccgtggattcggacagaacttcagattccccggtcaaaccggcaacacctcaggatctggtaacaacttgccagttaactcgccaggcgacaacggcgacgatgatctttacagttag

SEQ ID NO: 120174 - protein, 801 aa, Drosophila erecta
MADSKGEDLATAILKRKDRPNRLIVEEAQNDDNSVVSLSQAKMDELQLFRGDTVILKGKRRKETVCIVLSDDTCSDEKIRMNRVVRNNLCVHLSDVVSVQSCPDVKYGKRVRILPIDDTTEGITGNLFEIYLKPYFLEAYRPIHMGDNFIVRAAMRPVEFKVVLTDPEPYCIVAPETVIFCDGDPIKREEEEESLNAVGYDDIGGCRKQLAQIKEMVELPLRHPSLFKAIGVKPPRGILMYGPPGTGKTLIARAVANETGAFFFLINGPEIMSKLAGESESNLRKAFEEAEKNSPAIIFIDEIDAIAPKRDKTHGEVERRIVSQLLTLMDGMKKSSHLIVMAATNRPNSIDPALRRFGRFDREIDIGIPDATGRLEVLRIHTKNMKLHDDVDLEQIAAESHGHVGADLASLCSEAALQQIREKMDLIDLDDDKIDAEVLASLAVTMENFRYAMTKSSPSALRETVVEVPNTTWTDIGGLESVKKELQELVQYPVEHPDKFLKFGMQPSRGVLFYGPPGCGKTLLAKAIANECQANFISVKGPELLTMWFGESEANVRDIFDKARSAAPCVLFFDELDSIAKARGGNVGDAGGAADRVINQILTEMDGMGAKKNVFIIGATNRPDIIDPAILRPGRLDQLIYIPLPDDKSREAILKANLRKSPLAKEVDLSYIAKVTQGFSGADLTEICQRACKLAIRQAIEAEIRREKERAENQNSAMDMDEDDPVPEITSAHFEEAMKFARRSVSDNDIRKYEMFAQTLQQSRGFGQNFRFPGQTGNTSGSGNNLPVNSPGDNGDDDLYS

SEQ ID NO: 120175 - DNA, 2400 bp, Drosophila melanogaster
  CDS (1)..(2400)
atggcagattccaagggtgaagatctggctacggcgatcctgaagcgcaaggaccgtcccaaccgactgattgtggaagaggcgcagaatgacgacaactctgtggtgtcgctatcgcaggcgaagatggatgagctgcagctcttccgtggcgacaccgtgattctgaagggcaagcgccgaaaggagacggtgtgcatcgtgctctcggacgacacctgtcccgacgagaagatccgcatgaaccgcgtggtgcgcaacaacctgtgcgtccatctttcagatgtggtttccgtgcagtcctgcccggacgtcaagtacggcaaacgggtgcgcatcctgcccatcgacgaaagcaccgaaggcgttaccggcaacctgttcgagatctatctgaagccgtacttccctagaggcctatcggcaatccacatgggcgacaactttattgtgcgcgccgccatgcgtcctattgagttcaaggtggtgctgaccgacccggagccctactgcatcgtagctcccgagacggtaatcttctgcgacggtgatccaattaagcgcgaggaggaggaggagtccctaaacgccgttggctacgatgatatcggtggttgccgcaagcagctggcccagatcaaggagatggttgagttgcctttgcggcatccatcgctcttcaaggccattggtgtgaagccaccgcgtggtattcttatgtacggtcccccgggtaccggtaagaccctgattgccagggctgtggccaacgagaccggagcctttttcttcctgattaacggaccggagatcatgtccaaactggccggagagtcggaatcgaatctgcgcaaggccttcgaggaagccgagaaaaactcgccggctatcatcttcatcgatgagatcgacgctattgcccccaagcgtgacaagacccacggtgaggtggagcgtcgcattgtgtcgcagcttttgaccctgatggatggcatgaagaagagctcccatctgatcgttatggctgctaccaacaggcccaactccattgacccggccctgcgtcgctttggacgttttgatcgtgagattgacatcggcattccagatgccactggacggctggaagtgctgcgcattcacaccaagaacatgaagctgcatgatgatgttgacctggagcagattgctgccgaatcccacggacatgtgggcgctgatctggcttcactctgctctgaggctgcccttcagcaaatccgtgagaagatggacctcatcgatttggaagacgataagatcgatgccgaggtgctggcgtcgctggccgtgacaatggagaacttccgctacgctatgaccaagtccagtccatcggcgctgcgtgaaactgttgttgaagtgcccaacaccacctggacagacatcggaggtctggagagcgtcaagaaggaattgcaggagctggtgcaatacccagtggagcatccggacaagttcttgaagtttggcatgcagcccagtcgcggtgtccttttctacggaccccctggttgcggtaagacgctgcctgccaaggccattgccaacgagtgccaggcgaacttcatctcagtcaagggtcccgaactgctgaccatgtggttcggcgagtctgaggccaacgtgcgcgacatcttcgataaggggccctcggcggctccttgtgtgctcttcttcgacgagctggactcgatcgccaaaagccgttgcggtaatgtcggcgattgcggcgccgctgatcgtgtgatcaatcagatccttaccgaaatggatggcatgggagccaagaagaatgtgttcatcatcggagccaccaatcgcccggacattatcgatccggccatcctccgtccgggccgtctggatcagttgatctatattccgctgcccgacgacaaatcgcgtgaggctatcctgaaggctaacttgcgcaagttcgcgctggccaaggaagtagaccttacctacatcgccaaggtgacgcagggcttctctggcgccgatctgaccgagatctgccagcgggcttgcaagctggccatccgacaggccatcgaggctgaaattcgtcgcgagaaggagcgcgccgaaaatcagaactccgcgatggacgacgaggacgatccagtgccggagattactagcgcccacttcgaggaggccatgaagttcgctcgccgttcggtgtccgataatgacatcaggaagtacgagatgtttgccccagactttgagcagtcccgtggattcggacagaacttcagattccccggtcaaaccggcaacacctcaggatctggtaacaacttgccagttaactcgcccggcgacaacggcgacgatgatctttacagttag

SEQ ID NO: 120176 - protein, 799 aa, Drosophila melanogaster
MADSKGEDLATAILKRKDRPNRLIVEEAQNDDNSVVSLSQAKMDELQLFRGDTVILKGKRRKETVCIVLSDDTCPDEKIRMNRVVRNNLCVHLSDVVSVQSCPDVKYGKRVRILPIDESTEGVTGNLFEIYLKPYFPRGLSAIHMGDNFIVRAAMRPIEFKVVLTDPEPYCIVAPETVIFCDGDPIKREEEEESLNAVGYDDIGGCRKQLAQIKEMVELPLRHPSLFKAIGVKPPRGILMYGPPGTGKTLIARAVANETGAFFFLINGPEIMSKLAGESESNLRKAFEEAEKNSPAIIFIDEIDAIAPKRDKTHGEVERRIVSQLLTLMDGMKKSSHLIVMAATNRPNSIDPALRRFGRFDREIDIGIPDATGRLEVLRIHTKNMKLHDDVDLEQIAAESHGHVGADLASLCSEAALQQIREKMDLIDLEDDKIDAEVLASLAVTMENFRYAMTKSSPSALRETVVEVPNTTWTDIGGLESVKKELQELVQYPVEHPDKFLKFGMQPSRGVLFYGPPGCGKTLPAKAIANECQANFISVKGPELLTMWFGESEANVRDIFDKGPSAAPCVLFFDELDSIAKSRCGNVGDCGAADRVINQILTEMDGMGAKKNVFIIGATNRPDIIDPAILRPGRLDQLIYIPLPDDKSREAILKANLRKFALAKEVDLTYIAKVTQGFSGADLTEICQRACKLAIRQAIEAEIRREKERAENQNSAMDDEDDPVPEITSAHFEEAMKFARRSVSDNDIRKYEMFAPDFEQSRGFGQNFRFPGQTGNTSGSGNNLPVNSPGDNGDDDLYS

SEQ ID NO: 120177 - DNA, 2430 bp, Arabidopsis thaliana
  CDS (1)..(2430)
atgtctaccccagctgaatcttcagactcgaaatcgaagaaagatttcagtactgctattctcgagaggaagaagtctccgaaccgtctcgtcgtcgatgaggctatcaacgatgataactccgtcgtctctcttcaccctgcaaccatggagaagcttcagctcttccgtggtgataccattctcatcaagggtaagaagaggaaggacactgtctgcattgctcttgctgatgagacatgtgaggagccaaagatcagaatgaataaagtagtcagatctaacttgagggttagactgggagatgttatatctgttcaccaatgcccagacgtcaagtacggaaagcgtgttcacatcctgcctgttgatgatactgttgaaggagtgactggaaacctatttgatgcttacctgaaaccttatttccttgaggcataccgtccagtgaggaagggtgatctcttcctagtcagaggaggaatgaggagtgtggagttcaaagttatagagacagatcctgctgagtactgcgtggttgctccagacacagagattttctgtgagggtgagcctgtgaagagagaggatgaagaaaggctagatgatgtaggttatgatgatgttggtggtgtcaggaaacagatggctcagattagggaacttgttgaacttcccttgaggcatccacagctattcaagtcgattggtgttaagccaccgaagggaattcttctttatggaccacctgggtctggaaagactttgatcgctcgtgctgtggctaatgaaacgggtgcctttttcttctgtatcaacggacctgagatcatgtccaaattggctggtgagagtgagagcaacctcaggaaagcattcgaggaggctgagaaaaatgcgccttcaatcatattcattgatgagatcgactctattgcaccgaaaagagagaagactaatggagaggttgagaggaggattgtctctcagctccttacgctaatggatggactgaaatctcgtgctcatgttatcgtcatgggagcaaccaatcgccccaacagtatcgacccagctttgagaaggtttggaagatttgacagggagatcgatattggagttcctgacgaaattggacgtcttgaagttctgaggatccatacaaagaacatgaagctggctgaagatgtggatctcgaaaggatctcaaaggacacacacggttacgtcggtgctgatcttgcagctttgtgcacagaggccgccctgcaatgcatcagggagaagatggatgtgattgatctggaagatgactccatagacgctgaaatcctcaattccatggcagtcactaatgaacatttccacactgctctcgggaacagcaacccatctgcacttcgtgaaactgttgtggaggttcccaacgtctcttggaatgatattggaggtcttgagaatgtcaagagagagctccaggagactgttcaatacccagtcgagcacccagagaagtttgagaaattcgggatgtctccatcaaagggagtccttttctacggtcctcctggatgtgggaaaacccttttggccaaagctattgccaacgagtgccaagctaatttcatcagtgtcaagggtcccgagcttctgacaatgtggtttggagagagtgaagcaaatgttcgtgaaatcttcgacaaggcccgtcaatccgctccatgtgttcttttctttgatgagctcgactccattgcaactcagagaggaggtggaagtggtggcgatggaggtggtgctgcggacagagtcttgaaccagcttttgactgagatggacggaatgaatgccaagaaaaccgtcttcatcatcggagctaccaacagacctgacattatcgattcagctcttctccgtcctggaaggcttgaccagctcatttacattccactaccagatgaggattcccgtctcaatatcttcaaggccgccttgaggaaatctcctattgctaaagatgtagacatcggtgcacttgctaaatacactcagggtttcagtggtgctgatatcactgagatttgccagagagcttgcaagtacgccatcagagaaaacattgagaaggacattgaaaaggagaagaggaggagcgagaacccagaggcaatggaggaagatggagtggatgaagtatcagagatcaaagctgcacactttgaggagtcgatgaagtatgcgcgtaggagtgtgagtgatgcagacatcaggaagtaccaagcctttgctcagacgttgcagcagtctagagggttcggttctgagttcaggttcgagaattctgctggttcaggtgccaccactggagtcgcagatccgtttgccacgtctgcagccgctgctggggacgatgatgatctctacaattag

SEQ ID NO: 120178 - protein, 809 aa, Arabidopsis thaliana
MSTPAESSDSKSKKDFSTAILERKKSPNRLVVDEAINDDNSVVSLHPATMEKLQLFRGDTILIKGKKRKDTVCIALADETCEEPKIRMNKVVRSNLRVRLGDVISVHQCPDVKYGKRVHILPVDDTVEGVTGNLFDAYLKPYFLEAYRPVRKGDLFLVRGGMRSVEFKVIETDPAEYCVVAPDTEIFCEGEPVKREDEERLDDVGYDDVGGVRKQMAQIRELVELPLRHPQLFKSIGVKPPKGILLYGPPGSGKTLIARAVANETGAFFFCINGPEIMSKLAGESESNLRKAFEEAEKNAPSIIFIDEIDSIAPKREKTNGEVERRIVSQLLTLMDGLKSRAHVIVMGATNRPNSIDPALRRFGRFDREIDIGVPDEIGRLEVLRIHTKNMKLAEDVDLERISKDTHGYVGADLAALCTEAALQCIREKMDVIDLEDDSIDAEILNSMAVTNEHFHTALGNSNPSALRETVVEVPNVSWNDIGGLENVKRELQETVQYPVEHPEKFEKFGMSPSKGVLFYGPPGCGKTLLAKAIANECQANFISVKGPELLTMWFGESEANVREIFDKARQSAPCVLFFDELDSIATQRGGGSGGDGGGAADRVLNQLLTEMDGMNAKKTVFIIGATNRPDIIDSALLRPGRLDQLIYIPLPDEDSRLNIFKAALRKSPIAKDVDIGALAKYTQGFSGADITEICQRACKYAIRENIEKDIEKEKRRSENPEAMEEDGVDEVSEIKAAHFEESMKYARRSVSDADIRKYQAFAQTLQQSRGFGSEFRFENSAGSGATTGVADPFATSAAAAGDDDDLYN

SEQ ID NO: 120179 - DNA, 2672 bp, Arabidopsis thaliana
  CDS (42)..(2489)
ctctgcgaagctctctctctctctctactcgattatcaaacatggcgaatcaagctgaatcatctgattcgaaggggacgaagaaggattttagcaccgcgattctggagaaaaagaaggcagcgaatcgtttggttgtggatgaagccattaacgatgataactccgtcgtttctcttcaccctgataccatggagaagctacagctttttcgtggtgatactatcttaatcaagggaaagaagaggaaggatactgtgtgtattgctttagctgatgagacatgtgatgaaccaaaaattagaatgaacaaggttgttaggtctaatctcagagttaggcttggggatgttatttctgttcatcaatgtcctgatgtcaagtatgggaaccgtgttcacatcttacctttagatgataccattgaaggagtaagtggcaatatatttgatgcataccttaaaccttatttcttagaggcatatcgtccggtgaggaagggcgatcttttcctagttagaggagggatgagaagtattgagtttaaggttattgaaactgatcctgctgagtactgtgtggttgctccagatacagaaattttctgtgaaggtgaaccgataaagagagaggatgaggagaggttggatgaagttgggtatgatgatgttggtggtgtcaggaaacaaatggctcagattcgtgaacttgttgagctcccattgaggcatccacagctcttcaagtctattggtgtgaaacctcccaaaggaatcttgctctatggccctcctggttctgggaagacacttattgcccgtgctgttgctaatgagactggtgcatttttcttctgtatcaatggtcccgagatcatgtcgaagctagctggtgagagtgaaagtaacctcaggaaagcgtttgaggaagctgagaagaatgccccttcgatcatattcattgatgagatcgattcgattgctccaaaaagagagaagactcacggagaagttgaaagacggattgtatcccagctcttgacacttatggatggtcttaaatccagagcccatgtgattgttatgggagctaccaaccgtcccaacagcattgaccctgctttgagaagatttggacgttttgatagagaaattgatattggtgttcctgatgagattggtcgtcttgaagttctcaggattcacaccaagaacatgaagcttgcggaagatgttgatttggaaagagtatctaaagacacccatgggtatgttggtgctgatcttgcagcattatgcactgaagctgctctccaatgcattagggagaagatggatgtaattgacctagatgacgaggagatagatgctgaaattctcaattctatggctgtcagtaatgatcatttccagactgcccttggtaacagcaatccttcagctctacgtgagactgtcgttgaggtgcctaatgtgtcttgggaggacattggtggtcttgagaatgtcaagagggagctccaagagactgttcaatatccagtggagcatcctgagaaattcgagaagtttgggatgtcaccgtctaaaggagtcctattctatggcccccctggttgtggaaagaccctcttggctaaggctattgcgaacgagtgtcaagccaacttcattagtatcaagggtcctgagctcctcacaatgtggtttggagagagtgaagccaatgtgagagagatattcgacaaggcacgacagtctgccccttgtgttcttttctttgatgagctggactccatcgccactcagagagggaacagtgttggagatgctggtggtgcagcagatagagtattgaaccagcttcttacggagatggatggaatgaatgctaagaagacggtcttcatcatcggagctacaaacagaccagacattattgatcctgcacttctgcgtcctggtcgtctcgatcagctcatctacattcctcttcctgatgaggagtctcgttaccagatctttaagtcttgcttgaggaaatcacctgtggcgaaagatgttgacctgagggctcttgctaagtacacccaaggcttcagtggtgcggacatcacagagatttgccagcgttcttgcaagtatgcgatcagagaaaacatcgagaaggatattgagaaggagaggaagagagcagagtcgccagaagcaatggaagaggatgaggaggagattgcagagattaaagctggtcactttgaggaatccatgaaatacgctaggagatcagtgagtgatgcagacattcgcaagtatcaggcttttgctcagactctccagcaatcacgtgggtttggaagcgagttcaggtttccagatgcgccgacagggactactggagctttccctggagctgctgccacagttgggggagtcgacccgtttgccacatccggaggagcagcggatgatgatgatctctacagttgaaaggtctgatcagaccctgtgactactctctttagtctttaactttgttctgcttgaaaaactttcgatggtctttgttgtgttttatttataagtcttttgtatataatcgttgagactctagaacaatgatggtgtcatgatgaaataaatctagagaaatgagaacactgcattcatccc

SEQ ID NO: 120180 - protein, 815 aa, Arabidopsis thaliana
MANQAESSDSKGTKKDFSTAILEKKKAANRLVVDEAINDDNSVVSLHPDTMEKLQLFRGDTILIKGKKRKDTVCIALADETCDEPKIRMNKVVRSNLRVRLGDVISVHQCPDVKYGNRVHILPLDDTIEGVSGNIFDAYLKPYFLEAYRPVRKGDLFLVRGGMRSIEFKVIETDPAEYCVVAPDTEIFCEGEPIKREDEERLDEVGYDDVGGVRKQMAQIRELVELPLRHPQLFKSIGVKPPKGILLYGPPGSGKTLIARAVANETGAFFFCINGPEIMSKLAGESESNLRKAFEEAEKNAPSIIFIDEIDSIAPKREKTHGEVERRIVSQLLTLMDGLKSRAHVIVMGATNRPNSIDPALRRFGRFDREIDIGVPDEIGRLEVLRIHTKNMKLAEDVDLERVSKDTHGYVGADLAALCTEAALQCIREKMDVIDLDDEEIDAEILNSMAVSNDHFQTALGNSNPSALRETVVEVPNVSWEDIGGLENVKRELQETVQYPVEHPEKFEKFGMSPSKGVLFYGPPGCGKTLLAKAIANECQANFISIKGPELLTMWFGESEANVREIFDKARQSAPCVLFFDELDSIATQRGNSVGDAGGAADRVLNQLLTEMDGMNAKKTVFIIGATNRPDIIDPALLRPGRLDQLIYIPLPDEESRYQIFKSCLRKSPVAKDVDLRALAKYTQGFSGADITEICQRSCKYAIRENIEKDIEKERKRAESPEAMEEDEEEIAEIKAGHFEESMKYARRSVSDADIRKYQAFAQTLQQSRGFGSEFRFPDAPTGTTGAFPGAAATVGGVDPFATSGGAADDDDLYS

SEQ ID NO: 120181 - DNA, 2433 bp, Arabidopsis thaliana
  CDS (1)..(2433)
atgtcaaacgaaccggaatcctccgactcgaaaactaagaaggatttcagtactgcgattctagagaggaagaagtctccaaaccgacttgttgtcgatgaagctattaacgatgacaactctgttgtctctctccatcctactaccatggaaaaactccagcttttccgaggcgatacaattctcatcaagggtaagaagaggaaggacactgtatgcattgccctcgctgatgaaacatgtgaggaacccaagatcagaatgaataaggttgtaaggtctaacttgagggttaggctgggagatgttatttctgttcaccaatgcccagatgtcaagtatggaaagcgtgttcacatcttgcctgttgatgatacagttgaaggcgttactggaaacctctttgatgcttacctgaaaccttactttctggaggcgtaccgtccagtgaggaagggagatcttttcctagtgagaggaggaatgaggagtgtggagttcaaagtgatcgagactgatcctgctgagtactgtgtggtggctccagatacagagattttctgtgagggtgaaccagttaagagggaggacgaagaaaggcttgatgaggttggttatgacgatgttggtggtgtcaggaaacagatggctcagattagggaattggttgaacttcccttgaggcatccacaactctttaaatcaattggtgtgaagccaccaaagggaattctgctttacggacctcctggatccgggaagactcttattgctcgtgctgtggctaatgaaaccggagcattcttcttctgtatcaatggaccggaaatcatgtcgaaactagctggtgagagtgagagcaacctcaggaaagcatttgaggaggctgagaagaatgccccgtctatcatattcattgatgagattgactctattgcaccaaaaagagagaagacgaatggtgaggttgagaggaggattgtctctcagctccttacgcttatggatggactaaaatcacgtgcccatgttattgttatgggagcaacaaatcgtcccaacagtattgatccggctttgagaaggtttggaagattcgacagggaaattgatatcggtgttcctgatgaaattggacgtcttgaagttcttaggatccacacgaagaacatgaagctagctgaagatgttgatctagaaagaatctccaaggacacgcatggatatgttggagctgatcttgcagctctatgcactgaagctgcccttcaatgtatcagagagaagatggatgtgattgacttggaagatgactcaattgacgccgaaatcctcaattccatggctgtgtctaatgaacacttccacactgctcttggaaacagcaacccatccgcccttcgtgaaactgttgtggaggttccaaatgtctcctgggaggatattggaggtctcgagaatgttaagagagagcttcaggagactgttcaataccctgtggagcatccagagaaattcgagaagtttggtatgtctccatcaaagggagttcttttctacggtcctcctggatgtggtaaaaccctgttagccaaagctatagcaaacgagtgccaagcaaacttcatcagtgtcaagggacccgagcttctcacaatgtggtttggagaaagtgaagccaacgtccgagaaatctttgacaaggctcgtcaatctgctccttgtgttctgtttttcgatgagctagactccattgctactcagagagggaacagcgcgggtgatgccggcggtgcagctgacagagtgttgaatcagcttttgacagaaatggatggaatgaatgcaaagaagacggtattcattattggagcaactaacagaccggatatcatagattcagctcttcttcgacctggaagactcgaccagcttatctacattcctctacctgatgaagattcccgtctcaatatctttaaggcctgcttgagaaaatctcccgtcgctaaagatgtagatgttactgcactcgcaaagtacactcagggattcagtggtgctgatatcaccgagatctgccagagagcttgcaagtacgccatcagagaaaacatcgaaaaggatattgagaacgagcgtagaaggagccagaatccagaggccatggaggaagatatggtggatgatgaagtttcagagattagagctgctcatttcgaagagtcgatgaaatatgcaaggagaagtgtgagtgatgctgatattcgcaagtaccaagcttttgctcagacgctgcagcaatccagagggtttggatctgagttcaggtttgactcaaccgctggtgtcggacgcaccactggtgttgcagccgccgatccctttgccacttctgcagctgcagctgatgacgacgatctctacagttag

SEQ ID NO: 120182 - protein, 810 aa, Arabidopsis thaliana
MSNEPESSDSKTKKDFSTAILERKKSPNRLVVDEAINDDNSVVSLHPTTMEKLQLFRGDTILIKGKKRKDTVCIALADETCEEPKIRMNKVVRSNLRVRLGDVISVHQCPDVKYGKRVHILPVDDTVEGVTGNLFDAYLKPYFLEAYRPVRKGDLFLVRGGMRSVEFKVIETDPAEYCVVAPDTEIFCEGEPVKREDEERLDEVGYDDVGGVRKQMAQIRELVELPLRHPQLFKSIGVKPPKGILLYGPPGSGKTLIARAVANETGAFFFCINGPEIMSKLAGESESNLRKAFEEAEKNAPSIIFIDEIDSIAPKREKTNGEVERRIVSQLLTLMDGLKSRAHVIVMGATNRPNSIDPALRRFGRFDREIDIGVPDEIGRLEVLRIHTKNMKLAEDVDLERISKDTHGYVGADLAALCTEAALQCIREKMDVIDLEDDSIDAEILNSMAVSNEHFHTALGNSNPSALRETVVEVPNVSWEDIGGLENVKRELQETVQYPVEHPEKFEKFGMSPSKGVLFYGPPGCGKTLLAKAIANECQANFISVKGPELLTMWFGESEANVREIFDKARQSAPCVLFFDELDSIATQRGNSAGDAGGAADRVLNQLLTEMDGMNAKKTVFIIGATNRPDIIDSALLRPGRLDQLIYIPLPDEDSRLNIFKACLRKSPVAKDVDVTALAKYTQGFSGADITEICQRACKYAIRENIEKDIENERRRSQNPEAMEEDMVDDEVSEIRAAHFEESMKYARRSVSDADIRKYQAFAQTLQQSRGFGSEFRFDSTAGVGRTTGVAAADPFATSAAAADDDDLYS

SEQ ID NO: 120183 - DNA, 2682 bp, Capsicum annuum
  CDS (37)..(2454)
aatttccctttgcagatcgccaacgattcgccaaaaatgactgaccaagcggagtcatccgactcaaaaaatgcgaagaaggatttttcgacggcgattttggaaaggaagaaagcggcgaataggcttgttgtagatgaggcggttaatgatgataactctgttgttgctttgcatcctgctaccatggagaaacttcagctttttcgtggagatacaattcttattaagggaaagaagagaaaggatacagttgtcattgcccttgctgatgaaacatgtgatgagccaaagattaggatgaacaaggtggtccgttcaaatttgagggttcgtctaggagatgttgtatctgtccaccagtgtccagatgtcaagtatgggaagcgtgtgcacatacttcctatagatgatacaatagaaggcctcacaggggatctgtttgatgcattcctgaaaccttactttttggaggcatatcgtccattgaggaaaggggacaattttcttgttagaggagggatgagaagtgtggaattcaaggtcatagaaaccgaccctggggagtattgtgttgttgctccagacactgaaatcttttgtgagggtgagcctgtgaaaagagaggatgaggagagacttgatgaggtaggctatgatgatgtgggtggtgtgagaaagcagatggctcagattcgtgaactggtggaattaccgttgaggcatcctcaacttttcaaatctattggtgtgaaaccaccaaaggggattttactttatggcccccctggttctggaaagactttgatagccagagctgttgctaatgaaacaggtgcatttttcttttgcattaatggacctgaaatcatgtccaaattagctggagagagtgaaagtaatctcagaaaggcatttgaagaggctgaaaagaatgctccttctatcatatttattgatgaaattgattcaattgctcccaagcgagagaaaacacatggtgaagttgaaaggaggatcgtctcacaactcttgactctgatggatggactgaaatctcgcgctcatgtaatagtgatgggagctaccaaccgtccaaacagcattgaccctgctctgagaaggtttggtaggtttgatagagaaatagacattggtgttccagacgaagttggacgccttgaggttcttggtattcataccaagaatatgaagcttgcggaagaagtcgatttggaaagaatttcaaaagatacacatggatacgttggtgcagatcttgccgctctctgcacggaagctgcacttcagtgcattagggagaaaatggatgtacttgatctggaagatgacactattgatgctgaggtgttgaactcaatggctgtaacaaatgagcacttccaaactgctctcggtacaagcaatccgtctgcattgcgtgaaacagtggttgaagtgcctaatgtttcatgggaagacattggaggccttgaaaatgtcaaacgagagcttcaagagactgttcaatatccagtggaacccccagagaagtttgagaagtttggtatgtcaccttcgaaaggtgtacttttctatggtcccccaggatgtgggaaaactctacttgccaaggcaattgcaaatgaatgtcaagccaatttcatcagtgtcaaaggacctgaactgctcaccatgtggtttggagagagtgaggcgaatgttcgtgaaattttcgataaagcgagacaatccgctccctgcgtcctcttctttgatgagctcgactctattgctactcagagaggaagcagcagtggagatgctggaggagcagctgatcgggttctgaaccaacttttgactgaaatggatggcatgaatgcaaagaagactgtttttattattggggccacaaacagacctgatataattgaccctgcacttctgcgtcctggccgtcttgatcagttaatttatattcctctaccagatgaggattcacgccatcagattttcaaggcatgcctcagaaaatcccccttatcaaaggatattgatttgagagctctcgccaaacatactcagggatttagtggggctgatgtcactgagatttgtcaacgagcctgcaaatatgccattagggagaacatagagaaagacatagaaagggagaagagaagacaggaaaaccctgattcaatggatgaagatgtcgatgaagtaccagagatcaagcccgctcatttcgaggaatctatgaagtatgcacgacgtagtgtcagtgatgctgatatacgcaaataccaggcatttgctcagacattacagcagtccagaggtttcggaacagaatttcggtttgcagatactagtggcggtgcgactgctgcagctgacccatttgcaacttctaatgctgcagccgatgacgatgacctatatagctgaagtcctagattctccttgttattttgctgcaagtctccagttttgtcgggtcaaactcgaatatccggaaccaactggtttaacttctggtttcttctgttaacctttaacaatttacccttaaaaatgtttggggtttgctactggttatgacactttttagaaccttaagataatttaattttacagttcacacttatttaaaaaaaaaaaaaaaaaaaaaaaaaa

SEQ ID NO: 120184 - protein, 805 aa, Capsicum annuum
MTDQAESSDSKNAKKDFSTAILERKKAANRLVVDEAVNDDNSVVALHPATMEKLQLFRGDTILIKGKKRKDTVVIALADETCDEPKIRMNKVVRSNLRVRLGDVVSVHQCPDVKYGKRVHILPIDDTIEGLTGDLFDAFLKPYFLEAYRPLRKGDNFLVRGGMRSVEFKVIETDPGEYCVVAPDTEIFCEGEPVKREDEERLDEVGYDDVGGVRKQMAQIRELVELPLRHPQLFKSIGVKPPKGILLYGPPGSGKTLIARAVANETGAFFFCINGPEIMSKLAGESESNLRKAFEEAEKNAPSIIFIDEIDSIAPKREKTHGEVERRIVSQLLTLMDGLKSRAHVIVMGATNRPNSIDPALRRFGRFDREIDIGVPDEVGRLEVLGIHTKNMKLAEEVDLERISKDTHGYVGADLAALCTEAALQCIREKMDVLDLEDDTIDAEVLNSMAVTNEHFQTALGTSNPSALRETVVEVPNVSWEDIGGLENVKRELQETVQYPVEPPEKFEKFGMSPSKGVLFYGPPGCGKTLLAKAIANECQANFISVKGPELLTMWFGESEANVREIFDKARQSAPCVLFFDELDSIATQRGSSSGDAGGAADRVLNQLLTEMDGMNAKKTVFIIGATNRPDIIDPALLRPGRLDQLIYIPLPDEDSRHQIFKACLRKSPLSKDIDLRALAKHTQGFSGADVTEICQRACKYAIRENIEKDIEREKRRQENPDSMDEDVDEVPEIKPAHFEESMKYARRSVSDADIRKYQAFAQTLQQSRGFGTEFRFADTSGGATAAADPFATSNAAADDDDLYS

SEQ ID NO: 120185 - DNA, 2448 bp, Schizosaccharomyces pombe
  CDS (1)..(2448)
atgaacgcaccatccaccatgaccgataagaaaccagaagtggaacaccttcagggtgaaaaccctccaaaagatacatatagtgcagaagacacagcaacagctattcttcgtaaaaaaagaaaaccaaattctctagtggtcgatgacgctaccaacgatgataactcagtaatcacattgtcgtccaataccatggagactttacaacttttccgtggtgacacagttgtcgttaaaggaaagagacggaaagacactgtcttgattgttttaactgacgaagaaatggaagatggcgtagcaagaattaatcgtgttgttcgtaacaacttgcgcgtaaggttaggcgatattgtaacgatcaatccttgtccagatattaaatatgctgaacgaatttcagtactacccttggctgataccgtcgagggtcttactggttctctctttgatgtttaccttaagccgtactttgttgaagcgtatcgtcctattcgaaagggcgatcttttcgttgtacggggtagtatgcgtcaagttgaatttaaagttgttgatgttgctcctgatgaatttggcattgttagccaggatacaattattcattgggaaggtgaacccattaatcgtgaggatgaagaaagtagcttggcagaagttggctatgacgatatcggtggttgtcgtcgccagatggctcaaatccgtgagcttgtcgagcttcccctccgtcatccccaattattcaaaagtataggtatcaagccacctcgtggtatccttatgtatggtcctccaggtaccggtaaaactttaatggctcgcgcagttgctaatgaaacgggcgctttctttttcctgattaatggtcctgagattatgtcaaaaatggcaggcgaatctgagtctaatttgcggaaggcgtttgaagaagccgaaaaaaattcccctgctattatttttattgatgagatagattctattgctcccaagcgtgaaaaaacgaatggtgaagttgaacgacgtgttgtttcacaattattgactttaatggatggtatgaaagctcgtagtaatgttgtagtaatggccgctaccaatcgtcctaactctatcgatccggcattgagacgttttggtcgttttgatcgtgaagtcgatgttggtattcctgatcccaccggccgcttagagatccttcgtattcacacaaagaacatgaagcttgctgatgacgttgatcttgagcaaattgctgctgagactcatggttacgttggatctgatttggcatctttgtgttctgaagctgccatgcaacagattcgtgaaaagatggatatgattgacttggatgaagatgagattgatgccgaggttttagactctctaggtgttacaatggataacttcagatttgcccttggttccagcaatccttctgctttgcgtgaaaccgttgtggaagttcccaatgttcgttgggaagacattggtggattggaagaagttaagcgtgaattacgtgaaactgtccagatgcctgttatgtatgccgaaaagtttttgcgttttggtgtcactcccagcaaaggtgttttgtttttcggaccccctggtacaggtaagacattgttggcgaaagccattgccaacgaatgttctgccaactttatttcagtaaagggacccgaattgcttagcatgtggtttggtgagtctgaatcaaacgttcgtgatatatttgacaaggctcgtgctgcagctccttgtgtcgttttcttagatgagttggattctattgccaaagcacgtggcgcttctgctggtgactctggtggtggtgatcgtgttgtcaaccaacttcttactgagatggatggtgttaacagcaagaagaatgtatttgttattggtgctaccaaccgtcccgatcagattgatcctgccttgatgcgtcccggtcgtttggatcaattaatctacgttcccttacccgatgaagaagctcgcttcagcattttgcaaactcaattgagacatacgcctgttgctgaagatgttgacttgcgtgcagttgctaaggcgacccatggcttctcaggtgctgatttggagtttgttgtacaaagagctgttaaattggccatcaaggacagcattgaagaagacatcaagcgcgaaaatgagactggagaggctcctgctgacgatgttgttatggacgaagatgcatctgtgtctcaagttcagcgtcatcatgtggaggaggccatgaaaatggcacgccgctctgtcagtgatgcagaagtccgtcgttatgaagcttatgcccatcaactccttacctcgcgtggtcttacaggattccagtttgattcggctgatagtaatactaatggaccaagcttcggaaatgatggtgctgatgatttgtatgcatag

SEQ ID NO: 120186 - protein, 815 aa, Schizosaccharomyces pombe
MNAPSTMTDKKPEVEHLQGENPPKDTYSAEDTATAILRKKRKPNSLVVDDATNDDNSVITLSSNTMETLQLFRGDTVVVKGKRRKDTVLIVLTDEEMEDGVARINRVVRNNLRVRLGDIVTINPCPDIKYAERISVLPLADTVEGLTGSLFDVYLKPYFVEAYRPIRKGDLFVVRGSMRQVEFKVVDVAPDEFGIVSQDTIIHWEGEPINREDEESSLAEVGYDDIGGCRRQMAQIRELVELPLRHPQLFKSIGIKPPRGILMYGPPGTGKTLMARAVANETGAFFFLINGPEIMSKMAGESESNLRKAFEEAEKNSPAIIFIDEIDSIAPKREKTNGEVERRVVSQLLTLMDGMKARSNVVVMAATNRPNSIDPALRRFGRFDREVDVGIPDPTGRLEILRIHTKNMKLADDVDLEQIAAETHGYVGSDLASLCSEAAMQQIREKMDMIDLDEDEIDAEVLDSLGVTMDNFRFALGSSNPSALRETVVEVPNVRWEDIGGLEEVKRELRETVQMPVMYAEKFLRFGVTPSKGVLFFGPPGTGKTLLAKAIANECSANFISVKGPELLSMWFGESESNVRDIFDKARAAAPCVVFLDELDSIAKARGASAGDSGGGDRVVNQLLTEMDGVNSKKNVFVIGATNRPDQIDPALMRPGRLDQLIYVPLPDEEARFSILQTQLRHTPVAEDVDLRAVAKATHGFSGADLEFVVQRAVKLAIKDSIEEDIKRENETGEAPADDVVMDEDASVSQVQRHHVEEAMKMARRSVSDAEVRRYEAYAHQLLTSRGLTGFQFDSADSNTNGPSFGNDGADDLYA

SEQ ID NO: 120187 - DNA, 2628 bp, Glycine max
  CDS (49)..(2472)
tctgctctttgatcatcatcatcttcttcttcttcaatttaagcaagcatgtctcagcaaggcgaatcatcggacccgaaatcggggaagaaggacttctcaaccgcgattctggaacgcaaaaagtcgccgaaccggcttgtcgtggatgaggctgtcaacgacgacaactccgtggtcaccatgcatccccaaaccatggaaaagcttcagcttttccgaggggacactatcctcatcaagggtaagaaacggaaggataccatttgcatagctcttgctgatgagaactgtgaggagccgaagatcaggatgaataaagttgtgaggtcaaatttgcgggttcggcttggagatgttgtgtctgtgcaccagtgcccggatgttaaatatgggaaacgtgtgcacattctgcctattgatgataccattgaaggtgtcactggcaatctgtttgatgctttcttgaaaccctatttcttggaagcttaccgtcctgtcagaaaaggagatctatttcttgtccggggagggatgagaagtgtagagttcaaggtggttgaaaccgatcctggagaatattgtgttgttgctccagacactgaaattttctgtgagggggagcctttgaaaagagaagatgaagagagactggatgaagtcgggtatgatgatgtgggtggtgtcaggaaacaaatggctcagattcgtgagttggttgagcttccattgaggcatccacagctttttaaatcaattggtgtgaaaccacccaaaggaattttactttatggacccccaggttctgggaagacattaatagcaagagctgtagctaatgaaactggagcttttttcttttgtattaacggaccagagattatgtccaaacttgctggagagagtgaaagcaatctcaggaaagcgtttgaagaagcagaaaagaatgcaccatccattatcttcattgatgaaattgattccattgcccccaagcgggagaagacacatggtgaagttgaaaggaggattgtttcacaacttttgactcttatggatggattaaaatctcgtgctcatgttattgttattggagctactaatcgtccaaatagcattgacccagcattgagaaggtttggtagatttgatagggaaattgatattggtgttcccgatgaagttgggagacttgaagtccttcgcatacatactaaaaacatgaagctatctgatgatgttgatttagagagaattgcaaaagatactcatgggtatgttggtgctgaccttgctgccctttgcactgaagctgctttgcaatgcattagggagaagatggatgtaattgacttggaggatgagactattgatgcagaagtactgaattccatggcagttacaaatgagcatttccagactgcccttggaacaagcaacccatcagctttacgtgaaactgttgttgaagtgcctaatgtcagctgggaagacattggaggccttgaaaatgtcaagcgtgaactgcaagagactgtacaatatccagttgagcacccagaaaagtttgagaagtttggtatgtctccatctaaaggagtacttttctatggtcctccaggatgtgggaaaactttgttagccaaagcaattgctaatgaatgtcaagctaacttcatcagtgtgaaaggtccagaattgcttacaatgtggtttggtgaaagtgaagctaatgttagagaaatttttgacaaggccagacaatcggctccatgtgtcctcttctttgatgagcttgactctattgccactcagagaggaagcagtgttggggatgctggtggtgcggctgatagagttctaaatcaacttttgactgaaatggatggcatgtctgccaaaaagactgtgttcataattggggcaactaacagacctgacatcattgacccagcacttcttcgaccaggccgtctggatcaattgatctatattcctctccctgatgaggattcccggcatcaaatctttaaagcctgcttgaggaagtcacctatcgcaaaaaatgttgatttgagagcattggctaggcacactcaagggttcagtggtgctgatattacagaaatatgccagcgagcatgcaaatatgccataagagaaaacatagagaaggacattgagcgagagaggaagagtagggaaaaccctgaggccatggatgaagataccgtcgacgacgaagttgcggagatcaaggctgctcattttgaggagtcaatgaagtttgcacggaggagtgttagtgatgctgatattcgcaagtatcaggcatttgctcagaccttacagcaatcaagagggtttggaagtgaatttaggtttccagagtctggagataggactactactggatctgacccctttgcagcttctgctggtggggctgacgaagatgatctatatagttaggctttattatcacagtgatgtatgaaatcacatgtctacctcacctctcaggagggataactttgaagcctgtcttatattttgcttttcttgtactcaattatcctgaattgttaccgggttaaccttaaataccataaaaaaaaaaaaaaaaaa

SEQ ID NO: 120188 - protein, 807 aa, Glycine max
MSQQGESSDPKSGKKDFSTAILERKKSPNRLVVDEAVNDDNSVVTMHPQTMEKLQLFRGDTILIKGKKRKDTICIALADENCEEPKIRMNKVVRSNLRVRLGDVVSVHQCPDVKYGKRVHILPIDDTIEGVTGNLFDAFLKPYFLEAYRPVRKGDLFLVRGGMRSVEFKVVETDPGEYCVVAPDTEIFCEGEPLKREDEERLDEVGYDDVGGVRKQMAQIRELVELPLRHPQLFKSIGVKPPKGILLYGPPGSGKTLIARAVANETGAFFFCINGPEIMSKLAGESESNLRKAFEEAEKNAPSIIFIDEIDSIAPKREKTHGEVERRIVSQLLTLMDGLKSRAHVIVIGATNRPNSIDPALRRFGRFDREIDIGVPDEVGRLEVLRIHTKNMKLSDDVDLERIAKDTHGYVGADLAALCTEAALQCIREKMDVIDLEDETIDAEVLNSMAVTNEHFQTALGTSNPSALRETVVEVPNVSWEDIGGLENVKRELQETVQYPVEHPEKFEKFGMSPSKGVLFYGPPGCGKTLLAKAIANECQANFISVKGPELLTMWFGESEANVREIFDKARQSAPCVLFFDELDSIATQRGSSVGDAGGAADRVLNQLLTEMDGMSAKKTVFIIGATNRPDIIDPALLRPGRLDQLIYIPLPDEDSRHQIFKACLRKSPIAKNVDLRALARHTQGFSGADITEICQRACKYAIRENIEKDIERERKSRENPEAMDEDTVDDEVAEIKAAHFEESMKFARRSVSDADIRKYQAFAQTLQQSRGFGSEFRFPESGDRTTTGSDPFAASAGGADEDDLYS

SEQ ID NO: 120189 - DNA, 2343 bp, Sulfolobus acidocaldarius
  CDS (1)..(2343): transl_table=11
atgagaataaatatattgagggtggaatatcactcaaagactgcacacagtattttattacagttagacttatttaaaaaggttaaagtaatatgtcacatgagtcaaagtattaagtttagagttactgaagctagacagagagacgttggaaaaaaagtagctagaatttcagaaacttccatgagaaaattaaatgtagaagccggagattacatagaaattataggacaagatgggaattctgctttagctcaagtaatgcctgcatacgatatatccgatgacgaaattagaatagatggttacatcagaaagtctataaaagttggaataggagatgatgtaactgtcagaaaaaccaatgtgtcaccagcaagtaaagtagtgttagcacctacacaaccaattagatttgacaatagttttgtagaatatgtaaaagatacactaatggacaaaccattagctaaaggagagacacttccaataccaatctatacgggaaccttagaactgacagttgtgaatacacaaccctcaaattacgtttatgttacaggtagtacaaatattgaaataagagaagaaccagtaaaagagagctcattagcttatcctaaagtaagctgggaagatataggcgatctagaggaagcaaaacagaaaataagagaaattgtggaatggccaatgagacatccagaactattccagagactaggaattgacccacctaagggaatattattatacggtccaccaggtacaggtaaaaccttactagcaagagcgttagcaaatgagatcggagcctactttataaccgttaatggaccagagataatgagtaaattctatggagagagcgagcaaagaataagagagatatttaaagaagccgaagaaaatgcaccgtcaataatatttattgacgagatagatgccatagcaccaaaaagagaagatgttaccggagaagtagaaaaaagagtggtagcgcaactactgacacttatggatggaattaaaggcagaggtagagttatagttattggtgccacaaatagaccagacgcaatagatcctgcccttagaagaccaggtagattcgatagggaaattgaaataagaccacccgacaccaagggaagaaaggatatacttcaagttcacactagaaatatgcctattacagatgatgttgatctcgataaattagccgagatgacatatggttatactggagcagatttagcggctttggcaaaagaagctgcaatatatgcactaagaagattcgtagacgagaagaaattaaacctcgatcaaccaactattcctgcagaaataataaaggaactaaaagtatctatgaacgatttcctgaatgcactgaaatcaatacagccatctctattgagagaagtatatgtagaagttcctaaagtaaattggaatgatattggaggactggataacgttaagcaacaactaagagaagctgtggaatggcctttgagattccctgagttatttactaagtcaggtgtaacacctcctaagggtattttgttgtttggtcctcctggtactggtaagactatgcttgcaaaggctgttgcaacagagagtggtgcaaacttcatagcagtaaggggaccagaaatactatcaaaatgggttggtgaaagcgaaaaagcaataagagaaatattcagaaaagcaagacaagcagcaccaacagtaatattcttcgatgaaatagactcaatagcaccaataagaggactatcaacagacagcggagtaacagaaagaatagtaaaccaactactagcagaaatggacggaatagtaccattaaataaagtggttataattgcagctactaataggcctgatattttggatcctgctttgcttagaccaggtaggtttgataggttgatttatgttcctccacctgataagactgcaaggtttgagattttgaaggttcacactaaaaatgtgccattggctgaagatgtgtcacttgaggatattgcagaaaaagcagaaggatatacaggagcagacctagaggctttggttagagaagctactattaacgccatgagatctatttactctatgtgtgacaaacagtctagagacgaatgcaagggtaacatggaatgctaccaaaagcacataaaagaatgtatgaacaaaacctcatttaaggtaagtaaagaggatttcgaaaaagccttgaatgttgtaaaagcttcccttactcaagctgatatacaaagatacgagagattttcaaaggagctaaagagggcgatagcatga

SEQ ID NO: 120190 - protein, 780 aa, Sulfolobus acidocaldarius
MRINILRVEYHSKTAHSILLQLDLFKKVKVICHMSQSIKFRVTEARQRDVGKKVARISETSMRKLNVEAGDYIEIIGQDGNSALAQVMPAYDISDDEIRIDGYIRKSIKVGIGDDVTVRKTNVSPASKVVLAPTQPIRFDNSFVEYVKDTLMDKPLAKGETLPIPIYTGTLELTVVNTQPSNYVYVTGSTNIEIREEPVKESSLAYPKVSWEDIGDLEEAKQKIREIVEWPMRHPELFQRLGIDPPKGILLYGPPGTGKTLLARALANEIGAYFITVNGPEIMSKFYGESEQRIREIFKEAEENAPSIIFIDEIDAIAPKREDVTGEVEKRVVAQLLTLMDGIKGRGRVIVIGATNRPDAIDPALRRPGRFDREIEIRPPDTKGRKDILQVHTRNMPITDDVDLDKLAEMTYGYTGADLAALAKEAAIYALRRFVDEKKLNLDQPTIPAEIIKELKVSMNDFLNALKSIQPSLLREVYVEVPKVNWNDIGGLDNVKQQLREAVEWPLRFPELFTKSGVTPPKGILLFGPPGTGKTMLAKAVATESGANFIAVRGPEILSKWVGESEKAIREIFRKARQAAPTVIFFDEIDSIAPIRGLSTDSGVTERIVNQLLAEMDGIVPLNKVVIIAATNRPDILDPALLRPGRFDRLIYVPPPDKTARFEILKVHTKNVPLAEDVSLEDIAEKAEGYTGADLEALVREATINAMRSIYSMCDKQSRDECKGNMECYQKHIKECMNKTSFKVSKEDFEKALNVVKASLTQADIQRYERFSKELKRAIA

SEQ ID NO: 120191 - DNA, 2400 bp, Thermoplasma acidophilum
  CDS (109)..(2346): transl_table=11
tcattgttgttatggatccgtaatcaaattctgccacacattacgaaatcatagacctcctagcacaaaatcaacaaacttaaaatattgaagaagcaatatgccagtatggaatccaacaacggtatcatactcagggttgcagaagcaaactcaacagatccaggcatgtcaagagttcggctcgatgaatcatcgcgaaggttgcttgatgccgagatcggagatgtcgttgagatcgagaaggtcaggaaaacagtgggcagggtctacagggcaaggcctgaggacgaaaataaaggcatagtcaggatagacagcgtcatgcgaaataattgcggggcatccataggggacaaggtaaaggtcaggaaggttagaaccgagatcgccaagaaggtcacgcttgcaccgataataagaaaggatcagaggctgaaatttggtgaaggcattgaagaatatgtgcagcgcgcactcatcagaaggccaatgctggagcaggacaacataagtgtacccggcctaactctagccggccagacaggtctgctcttcaaggtcgtcaagacgctccccagcaaggttccggttgagataggcgaggagacaaagatcgagataagggaggaaccggcctctgaggttctcgaggaagtctctagaataagctatgaggatataggaggcctttcagagcagctaggaaagataagggagatgatcgagctgcctctcaagcatccagaactcttcgaaaggctagggataacgccacccaaaggtgtcatactgtatgggcctccaggaaccggtaagacgctgatagccagggcagtggccaatgaatccggtgcaaacttcctctcgataaatggcccagagataatgagcaaatactacggtcagagcgagcagaagctaagggaaatattctcaaaggcagaggagaccgcgccttcgataatattcatcgatgagatagattctatagcgccaaagagggaggaagttcagggtgaggtggagcgcagggtagtcgcgcagctgctcaccttgatggatggaatgaaggagaggggccatgtcatagtcataggcgccacaaaccgcatagatgccatagatcctgcgctcaggaggccgggccgctttgacagggagatagagataggcgttccggacaggaatggaagaaaggagatcctgatgatacacaccaggaacatgcctctagggatgagcgaagaggagaagaacaaattcctggaggagatggcagattacacctatggattcgtaggagccgatctggcggcgttggtcagggagagtgcaatgaatgcactgagaaggtacctcccggagatagatctggacaaacccattcctacggagatcctcgagaagatggtagtaacggaagacgacttcaagaatgccctgaaatccatcgaacccagcagcctcagagaggtcatggtggaggtgccaaacgttcactgggatgatataggagggcttgaggacgtcaagagggagataaaggagacggtggagcttccactgctcaagccagatgtgttcaagaggctcggaataaggccctcaaagggatttctactctacggaccgcctggtgttggaaaaaccctgctggcaaaggcagtggccacagagagcaacgccaacttcatatccattaagggcccggaggtactgagtaaatgggttggagagagtgaaaaagccataagagagattttcaagaaggcgaagcaggttgcgccagccatagttttccttgatgagatagattccatagctcccaggcgtgggacgactagcgattccggggtcacggagaggatcgtgaaccagctgttgacatcccttgatggcatagaggtcatgaacggtgttgtcgttattggcgcaacgaacagaccggatataatggatcctgcccttctcagggctggtagattcgacaagctcatctacataccaccacctgacaaagaggccaggctgagcatactgaaggtccacacaaagaatatgccgcttgcccctgacgtcgatctcaacgatatagcacagcggacagaggggtacgtcggcgcggatcttgaaaacctctgcagggaagctggaatgaatgcgtacagggagaatccagatgctacctccgtatcgcagaagaacttcctcgacgcactcaagaccataaggccatcagtggacgaagaggtcataaagttctacaggactctgtcggagaccatgagcaagtctgtgtccgagaggagaaagcagcttcaggatcaggggctttatctctgatctttctgcgccatttttactctgcaggatcgtccgatgctttccatcagagga

SEQ ID NO: 120192 - protein, 745 aa, Thermoplasma acidophilum
MESNNGIILRVAEANSTDPGMSRVRLDESSRRLLDAEIGDVVEIEKVRKTVGRVYRARPEDENKGIVRIDSVMRNNCGASIGDKVKVRKVRTEIAKKVTLAPIIRKDQRLKFGEGIEEYVQRALIRRPMLEQDNISVPGLTLAGQTGLLFKVVKTLPSKVPVEIGEETKIEIREEPASEVLEEVSRISYEDIGGLSEQLGKIREMIELPLKHPELFERLGITPPKGVILYGPPGTGKTLIARAVANESGANFLSINGPEIMSKYYGQSEQKLREIFSKAEETAPSIIFIDEIDSIAPKREEVQGEVERRVVAQLLTLMDGMKERGHVIVIGATNRIDAIDPALRRPGRFDREIEIGVPDRNGRKEILMIHTRNMPLGMSEEEKNKFLEEMADYTYGFVGADLAALVRESAMNALRRYLPEIDLDKPIPTEILEKMVVTEDDFKNALKSIEPSSLREVMVEVPNVHWDDIGGLEDVKREIKETVELPLLKPDVFKRLGIRPSKGFLLYGPPGVGKTLLAKAVATESNANFISIKGPEVLSKWVGESEKAIREIFKKAKQVAPAIVFLDEIDSIAPRRGTTSDSGVTERIVNQLLTSLDGIEVMNGVVVIGATNRPDIMDPALLRAGRFDKLIYIPPPDKEARLSILKVHTKNMPLAPDVDLNDIAQRTEGYVGADLENLCREAGMNAYRENPDATSVSQKNFLDALKTIRPSVDEEVIKFYRTLSETMSKSVSERRKQLQDQGLYL

SEQ ID NO: 120193 - DNA, 2712 bp, Methanococcus jannaschii
  CDS (1)..(2712): transl_table=11
atggttaaagaattaaaagttgctgaagcatatcaaggagatgtagggaggggtattgcaagaatagacccctacacaatggaagaacttggtttaaaaccaggagatgttattgaaattgaaggtccaaaaggaaaagcttatgccatagtttatagaggtttcttagaagatgctggaaaaggaattataagaattgacggttatttaaggcagaatgctggagtagctattggagatagagtaaaagttaagagagtagagattaaagaagctaaaaaggttgttttagcaccaactcaaccaattagattcggcccaggatttgaggactttgttaaaaggaagatattgggacaagtgttaagtaaaggttcaaaagttactattggagttttaggaactgctttaacatttgttgttgttagtacaacaccagctggacctgttagagtaactgacttcacacacgttgagttaaaagaagagccagtcagtgaaatcaaagaaaccaaagttccagatgttacctatgaagatattggtggtttaaaagaagaggttaagaaagttagagagatgatagaacttccaatgagacatccagagttatttgaaaaattaggaattgagccacctaaaggagttttattagttggaccaccaggaactggtaagacattattggctaaagcagttgctaacgaagctggagcaaacttctatgtaattaacggtccagaaataatgagtaagtatgttggagaaacagaggagaatttaagaaagatatttgaagaagctgaagagaatgctccaagtataatattcattgatgaaattgacgctatagctccaaagagagacgaagctacaggagaagtagagagaagattagttgctcagctcttaaccttaatggatggattgaagggaagagggcaagttgtagttattggagctactaacagaccaaacgcattagacccagctttaagaagaccaggaagattcgatagagagattgttattggcgtcccagacagagaaggtagaaaagaaatcttacagatacacacaagaaacatgccattagccgaagatgttgatttagactacttggcagatgtaacacacggatttgttggagctgatttagcagctttatgtaaagaggcagcaatgagagctttaagaagagtattgccaagtattgacttagaggcagaagaaattccaaaagaagttttagataacttaaaagtcacaatggatgacttcaaagaggcattgaaagatgttgagccatcagcaatgagagaagttttagttgaagttccaaatgttaagtgggaagatattggaggattagaagaggttaagcaagaattgagagaagctgttgaatggccattaaaagctaaagaagtatttgagaagataggtgtaagaccaccaaaaggagtgttgttatttggaccaccaggaactggtaagacattattagctaaagctgtagctaacgaaagtggagcaaacttcataagcgttaaagggccagaaatcttcagcaagtgggttggggaatcagagaaggcaataagagagatattcagaaaggcaagacagtcagcaccatgtataatattcttcgatgaaatcgatgctatagcaccaaaaagaggtagagacttgagctcagcagttactgataaagttgtaaatcagctattaactgaattggatggaatggaagagccaaaggatgttgttgttattgcagcaacaaacagaccagatatcattgacccagctttattgagaccgggaagattagatagagtcatattagttccagttccagatgaaaaggcaagattggatatattcaagatacacacaagaagtatgaacttagctgaagatgttaatttagaagaattagctaagaagactgaaggatatacaggagctgacattgaggcattgtgtagagaggcagcaatgttggcagttagagagagtataggaaaaccatgggatattgaagtaaaacttagagagttaattaactacttgcagagcatttcaggaacattcagagctgctgcagtagagttaaacagcgttattaaagctacaaaagagagagaatctgctgaagcaggagagtttagtgagttaaagaatgctattggaaagataattagcgttttatctccagctaaggagaaaattgaagcagtagagaaagaaatcgacaaattccttgaagttataaacaaagaggaattaaaaccatcagagaaagatgaagcacagaagttggcaaaatacttaaaggatatattaggcaagttaaaagaaatgatagacaacatctacgaattagagaacaagttaaataccttaaaagaacaagtttcagctgaagagattgatgagataattaaaacaacacaaaacattatccaaagattcacaacatcattggatgaactcaagaatatattgaaggacattgaaagtataagattgaaagtttcaacaaaagatgttaagattaagaaagaacacttcatgaaagcccttgagaaaattaaaccatctgtaagtaaggaggatatgagagtctatgagaaattagctcaagagtatggaagagctacgtcagttgaaaagaaaaaggaagaaggtaaagaagtgatttaa

SEQ ID NO: 120194 - protein, 903 aa, Methanococcus jannaschii
MVKELKVAEAYQGDVGRGIARIDPYTMEELGLKPGDVIEIEGPKGKAYAIVYRGFLEDAGKGIIRIDGYLRQNAGVAIGDRVKVKRVEIKEAKKVVLAPTQPIRFGPGFEDFVKRKILGQVLSKGSKVTIGVLGTALTFVVVSTTPAGPVRVTDFTHVELKEEPVSEIKETKVPDVTYEDIGGLKEEVKKVREMIELPMRHPELFEKLGIEPPKGVLLVGPPGTGKTLLAKAVANEAGANFYVINGPEIMSKYVGETEENLRKIFEEAEENAPSIIFIDEIDAIAPKRDEATGEVERRLVAQLLTLMDGLKGRGQVVVIGATNRPNALDPALRRPGRFDREIVIGVPDREGRKEILQIHTRNMPLAEDVDLDYLADVTHGFVGADLAALCKEAAMRALRRVLPSIDLEAEEIPKEVLDNLKVTMDDFKEALKDVEPSAMREVLVEVPNVKWEDIGGLEEVKQELREAVEWPLKAKEVFEKIGVRPPKGVLLFGPPGTGKTLLAKAVANESGANFISVKGPEIFSKWVGESEKAIREIFRKARQSAPCIIFFDEIDAIAPKRGRDLSSAVTDKVVNQLLTELDGMEEPKDVVVIAATNRPDIIDPALLRPGRLDRVILVPVPDEKARLDIFKIHTRSMNLAEDVNLEELAKKTEGYTGADIEALCREAAMLAVRESIGKPWDIEVKLRELINYLQSISGTFRAAAVELNSVIKATKERESAEAGEFSELKNAIGKIISVLSPAKEKIEAVEKEIDKFLEVINKEELKPSEKDEAQKLAKYLKDILGKLKEMIDNIYELENKLNTLKEQVSAEEIDEIIKTTQNIIQRFTTSLDELKNILKDIESIRLKVSTKDVKIKKEHFMKALEKIKPSVSKEDMRVYEKLAQEYGRATSVEKKKEEGKEVI

SEQ ID NO: 120195 - DNA, 2202 bp, Archaeoglobus fulgidus
  CDS (1)..(2202): transl_table=11
atgagtgataaaaaaggtgaggaaataacccttagagttgctgaagctttctatcgcgatgttggaaggggtgttgccagaatcgatccagcagtgatggaaaagtacggactgcagagcggtgacataatagagattataggaaagagcaccgttccagcaatagtctggccgagctatccggaggataggggaaccggaataataaggattgatggcagcattagaagcaacgcaggcgttggtattgatgacaaagtcagaataaggaaggttacagcaaagccagcagagaaagttacactcgctccaacagagccggtaaggctgatgggtggcgaggcgtatctgctgaggctgcttgaaggcagaccggtcatcaaaggtcagaaaatcagggttgaggttttcggtcacactctgacgttcgtaataaccgccaccaggccctcaggagtcgtcgttgtcacgagaaacactgcgatcgagcttaaggagaagccggccgaggaggtaaagagggctgttcctgacgtaacttatgaggacataggcggtctgaagagggagcttaggctggtcagagagatgatagagcttccattgaagcatcccgagctcttccagaggctcggaatcgagccgcccaagggtgtgctgctctacggtccgccgggaactggaaaaacgctgattgccaaggctgtggcgaatgaggtggacgcgcacttcatacccatcagcgggccggaaatcatgagcaagtactatggagagagcgagcagaggctgagggagattttcgaggaggctaaggagaacgctccgtcgataatcttcatagacgaaatcgactcaattgctcctaagagagaagaggtcaccggagaagttgagagaagggtcgtcgcccagctgctggcgctgatggacgggcttgaggcaagaggagacgtcatagtcattgccgctacaaacaggcctgacgcgatcgatcctgcactgagaaggccgggaaggttcgacagggagattgagatcggagttccggacaaggagggcaggaaggagattctcgagattcacaccagaaagatgcccctcgccgaggatgttgaccttgaagagcttgccgagctgacaaacggatttgttggagcggatctggaagcactgtgcaaggaagcagcgatgcacgccttgaggagagttctgccggagatagacatcgaggccgaggaaattcccgcagaggtcattgagaatctcaaagtcacgagggaggacttcatggaggctctgaagaacatcgagccgtctgcgatgagagaggtgctggtggaggtgcccaacgtcaagtgggaggacatcggtggacttgagcatgctaagcaggagctgatggaggcagttgaatggccattgaagtatccggaggtgttcagggcagcaaacatcaagccgccgaggggaatactgctgttcggcccacccggaacgggtaagaccttgctggctaaggctgtggcaaacgagagcaatgcgaacttcatcagcgtgaaggggcctgagctgctgagcaagtgggttggtgagagcgagaagcacgtcagggagatgttcaggaaggcaaggcaggtagctccgtgtgtcatattcttcgacgagatcgacagccttgcccccagaagaggcggaattggcgattcacacgtcactgagagagttgtgagccagctcctgacggagctcgacggactggaggagctcaaagatgtggtggtcatagccgccaccaacaggccggacatgattgatccagcgctgctcagacccggaaggcttgaaaggcacatctacatacctccacccgacaagaaggcgagagtggagatattcaagatacacctcagaggaaaaccgcttgcggatgacgtgaacatcgaagagcttgcggagaagacggagggatacagcggagcggacatcgaggcagtgtgcagggaggcaggaatgctcgcaatcagggagctcatcaagccgggtatgacgagagaggaggctaaagaggcggcgaagaagctcaagattacgaagaagcactttgaggaagcgctgaaaaaggtcaggccgagcctaaccaaggaggacgttgagaagtatgagaagttgattgaagatttccacaggatgtacgcttaa

SEQ ID NO: 120196 - protein, 733 aa, Archaeoglobus fulgidus
MSDKKGEEITLRVAEAFYRDVGRGVARIDPAVMEKYGLQSGDIIEIIGKSTVPAIVWPSYPEDRGTGIIRIDGSIRSNAGVGIDDKVRIRKVTAKPAEKVTLAPTEPVRLMGGEAYLLRLLEGRPVIKGQKIRVEVFGHTLTFVITATRPSGVVVVTRNTAIELKEKPAEEVKRAVPDVTYEDIGGLKRELRLVREMIELPLKHPELFQRLGIEPPKGVLLYGPPGTGKTLIAKAVANEVDAHFIPISGPEIMSKYYGESEQRLREIFEEAKENAPSIIFIDEIDSIAPKREEVTGEVERRVVAQLLALMDGLEARGDVIVIAATNRPDAIDPALRRPGRFDREIEIGVPDKEGRKEILEIHTRKMPLAEDVDLEELAELTNGFVGADLEALCKEAAMHALRRVLPEIDIEAEEIPAEVIENLKVTREDFMEALKNIEPSAMREVLVEVPNVKWEDIGGLEHAKQELMEAVEWPLKYPEVFRAANIKPPRGILLFGPPGTGKTLLAKAVANESNANFISVKGPELLSKWVGESEKHVREMFRKARQVAPCVIFFDEIDSLAPRRGGIGDSHVTERVVSQLLTELDGLEELKDVVVIAATNRPDMIDPALLRPGRLERHIYIPPPDKKARVEIFKIHLRGKPLADDVNIEELAEKTEGYSGADIEAVCREAGMLAIRELIKPGMTREEAKEAAKKLKITKKHFEEALKKVRPSLTKEDVEKYEKLIEDFHRMYA

SEQ ID NO: 120197 - DNA, 2427 bp, Brassica napus
  CDS (1)..(2427)
atgtcgaacccagctgaatcttcagactcgaaatcgaagaaggattttagtactgctattctggagaggaagaagtctcccaacagacttgtcgtcgatgaggccatcaacgatgataactccgttgtatctctccaccctgctaccatggagaagctccagctcttccgtggtgataccattctcatcaagggtaagaaaaggaaggacactatctgcatcgctcttgctgatgaatcatgtgaggagccgaagatcaggatgaacaaagtggtcaggtctaacttgagggttaggcttggtgatgttatctctgttcatcaatgccctgatgtcaagtacggacagcgtgtgcacatcttgcctgttgatgacaccgttgaaggagtcactggaaacctctttgatgcttacctcaaaccttatttcctggaggcataccgtccggtgcggaagggcgatctcttcctagtgagaggaggaatgaggagtgtggagttcaaggttattgagacggatcctgctgagtactgtgttgttgctccggacactgagattttctgtgagggagagccagtcaagagagaggacgaagagaggcttgatgaagtgggttatgatgatgttggtggtgtcaggaagcagatggctcagattagggagcttgttgagcttcccttgaggcatccacagctgttcaagtcaattggtgttaagccaccgaagggaattttgctttatggaccacctgggtctggaaagactttgatcgctcgtgctgttgctaatgaaactggtgcctttttcttctgtatcaatgggcctgagatcatgtccaagctggctggtgagagtgagagcaacctcaggaaagcgtttgaggaggctgagaagaacgctccttcgatcatattcattgatgagattgactctattgcaccgaaaagagagaagactaatggagaggttgagaggaggattgtgtctcagctccttacgctaatggatggacttaaatctcgtgctcatgttattgtcatgggagcaaccaatcgtcccaacagtatcgacccggctttgagaaggtttggaagatttgatagggagattgatattggtgttcctgatgagattggtcgtcttgaagttctcaggatccacacaaagaacatgaagcttgctgaagatgtggatctagaaaggatctcaaaggacactcacggttatgtcggtgctgatcttgcagctctgtgcactgaagctgccctgcaatgcatcagggagaagatggatgtgattgatttggaagatgactccatagatgctgaaatcctcaattccatggcagtgaccaatgaacacttccacactgctctagggaacagcaacccatctgcacttcgtgaaactgttgtggaggtacccaatgtttcttgggatgacattggaggtcttgagaatgtcaagagagagctccaggagactgttcaatacccggtcgagcacccagagaagtttgagaaattcggtatgtctccgtcaaagggagtccttttctacggtcctcctggatgtggtaaaactcttctggccaaaactatagccaacgagtgccaagcaaacttcatcagtgtcaaaggtcccgagcttctcaccatgtggtttggagagagtgaagctaatgcccgtgaaatctttgacaaggcccgtcagtctgctccatgtgttctcttctttgacgagctcgactccattgcgactcagagaggaggtggaagcggaggtgatggtggcggcgcagcagatagagtcctgaaccagcttttgactgagatggatggaatgaacgccaagaaaaccgtcttcatcatcggggcaaccaacaggcccgacattattgattctgctcttctccgtccaggaaggctcgaccagctcatttacattccactgccagacgaggactcacgtctcaacatcttcaaggcctgcttgaggaagtcacctatcgctaaagatgtggacatcaacgctctcgctaagtacacacagggattcagtggtgctgatatcactgagatttgccagagggcttgcaagtacgccatcagagaaaacatcgagaaggacattgaaaaggagaagaggaggagcgagaacccagaagccatggaggaagatatggatgaagtatcagagatcaaagctgcacacttcgaggagtcgatgaagtatgcacggaggagtgtgagcgatgcagacatcaggaagtaccaagcctttgctcagaccctgcagcagtctagagggtttggttccgagttcaggttcgagactaatgctggttcaggtgcaaccactggagtcgctgatccttttgccacgtctgcagctgctgctgcggacgatgatgatctctacaattag

SEQ ID NO: 120198 - protein, 808 aa, Brassica napus
MSNPAESSDSKSKKDFSTAILERKKSPNRLVVDEAINDDNSVVSLHPATMEKLQLFRGDTILIKGKKRKDTICIALADESCEEPKIRMNKVVRSNLRVRLGDVISVHQCPDVKYGQRVHILPVDDTVEGVTGNLFDAYLKPYFLEAYRPVRKGDLFLVRGGMRSVEFKVIETDPAEYCVVAPDTEIFCEGEPVKREDEERLDEVGYDDVGGVRKQMAQIRELVELPLRHPQLFKSIGVKPPKGILLYGPPGSGKTLIARAVANETGAFFFCINGPEIMSKLAGESESNLRKAFEEAEKNAPSIIFIDEIDSIAPKREKTNGEVERRIVSQLLTLMDGLKSRAHVIVMGATNRPNSIDPALRRFGRFDREIDIGVPDEIGRLEVLRIHTKNMKLAEDVDLERISKDTHGYVGADLAALCTEAALQCIREKMDVIDLEDDSIDAEILNSMAVTNEHFHTALGNSNPSALRETVVEVPNVSWDDIGGLENVKRELQETVQYPVEHPEKFEKFGMSPSKGVLFYGPPGCGKTLLAKTIANECQANFISVKGPELLTMWFGESEANAREIFDKARQSAPCVLFFDELDSIATQRGGGSGGDGGGAADRVLNQLLTEMDGMNAKKTVFIIGATNRPDIIDSALLRPGRLDQLIYIPLPDEDSRLNIFKACLRKSPIAKDVDINALAKYTQGFSGADITEICQRACKYAIRENIEKDIEKEKRRSENPEAMEEDMDEVSEIKAAHFEESMKYARRSVSDADIRKYQAFAQTLQQSRGFGSEFRFETNAGSGATTGVADPFATSAAAAADDDDLYN

SEQ ID NO: 120199 - DNA, 2433 bp, Brassica napus
  CDS (1)..(2433)
atgtcgaacccagctgaatcttcagactcgaaatcgaagaaagacttcagtactgctattctggagaggaagaagtctcctaacagactcgtcgtcgatgaggccatcaacgatgataactccgtcgtctctctccaccctgacaccatggagaagctccagctcttccgtggcgacaccattctcatcaagggaaagaaaaggaaggatactatttgcattgctcttgctgatgagtcatgtgaggagccaaagatcaggatgaacaaagtggttagatctaacttgagggttagacttggagatgttatctctgttcaccagtgccctgatgtcaagtacggacagcgtgtgcatatcttgcctgttgatgataccgttgaaggagtcactgaaaacctctttgatgcttacctcaaaccttatttcttggaggcataccgccccgtgaggaagggagatctcttcctagtcagaggaggaatgaggagtgtggagttcaaggttattgagacggatcctgctgagtactgtgtggtggctccggacactgagattttctgtgagggtgagccagtcaagagagaggacgaagaaaggctagatgaagtgggttatgatgatgttggtggcgtcaggaagcagatggctcagatcagggagcttgttgagcttcccttgaggcatccacagctgttcaagtcgattggtgtgaagccaccgaagggaattcttctttacggaccacctgggtctggaaagactctgattgctcgtgccgtggctaacgaaactggtgcctttttctcctgtatcaatggtcctgagattatgtctaagctggctggtgagagtgagagcaacctcaggaaagcgtttgaggaggctgagaagaacgcgccttcgattatatttattgatgagattgactctattgcaccgaaaagagagaagactaatggagaggttgagaggaggattgtgtctcagctccttacgctgatggatgggcttaaatctcgtgctcatgttattgtcatgggagcaaccaatcgccccaacagtattgatccagctttgagaaggtttggaagatttgatagggagattgatattggtgttcctgacgagattggacgtcttgaagttctcaggatccacacaaagaacatgaagcttgctgaagatgtggatcttgagaggatctcaaaggacacacacggttatgttggtgctgatcttgcagctctgtgcacagaagctgccctgcaatgtatcagggagaagatggatgtgattggtctggaagatgactccatagatgctgaaatcctcaactccatggcagtgaccaatgaacacttccacactgctctcggaaacagcaacccatctgcacttcgtgaaactgttgtggaggttccaaatgtttcttgggatgacattggaggtcttgagaatgtcaagagagagctccaggagactgtccaataccctgtggagcacccagagaagtttgagaagttcggtatgtctccatcaaagggagtccttttctacggtcctcctggatgcggtaaaacccttttggccaaagctatagccaacgagtgccaagccaacttcatcagcgtcaaaggtcctgagcttctcaccatgtggtttggtgagagtgaagcgaacgtccgtgaaatctttgacaaagcacgccagtctgctccatgtgttctcttctttgacgagctcgactccattgccactcagagaggaggtggaggcggaggtgatgccggcggcgcagcggacagagtcctgaaccagcttttgaccgagatggatgggatgaacgctaagaagaccgtcttcatcatcggagcgaccaacagacccgacattatcgactctgctcttcttcgaccaggaaggctcgaccagctcatttacattccgctcccggacgaggactcgcgtctcaatatcttcaaggcctgcttgaggaaatcacccgttgctaaagatgttgacatcaacgctctggctaagtacacgcaggggttcagtggtgctgatatcactgagatttgccagagggcttgcaaatacgccatcagagaaaacattgagaaggacattgaaaaggagaagaggaggagcgagaaccctgaggccatggaggaagatggagtggatgaagtgtctgagatcaaagctgcacactttgaggagtcgatgaagtatgcgcgcaggagtgtgagtgatgcagacatcaggaagtaccaagcgtttgctcagacgctgcagcagtctagagggtttggttctgagttcaggttcgagactaatgctgctggttcaggtgcaaccactggagtcgctgatccttttgccacctcggcagctgctgctgcggacgatgatgatctctacaattag

SEQ ID NO: 120200 - protein, 810 aa, Brassica napus
MSNPAESSDSKSKKDFSTAILERKKSPNRLVVDEAINDDNSVVSLHPDTMEKLQLFRGDTILIKGKKRKDTICIALADESCEEPKIRMNKVVRSNLRVRLGDVISVHQCPDVKYGQRVHILPVDDTVEGVTENLFDAYLKPYFLEAYRPVRKGDLFLVRGGMRSVEFKVIETDPAEYCVVAPDTEIFCEGEPVKREDEERLDEVGYDDVGGVRKQMAQIRELVELPLRHPQLFKSIGVKPPKGILLYGPPGSGKTLIARAVANETGAFFSCINGPEIMSKLAGESESNLRKAFEEAEKNAPSIIFIDEIDSIAPKREKTNGEVERRIVSQLLTLMDGLKSRAHVIVMGATNRPNSIDPALRRFGRFDREIDIGVPDEIGRLEVLRIHTKNMKLAEDVDLERISKDTHGYVGADLAALCTEAALQCIREKMDVIGLEDDSIDAEILNSMAVTNEHFHTALGNSNPSALRETVVEVPNVSWDDIGGLENVKRELQETVQYPVEHPEKFEKFGMSPSKGVLFYGPPGCGKTLLAKAIANECQANFISVKGPELLTMWFGESEANVREIFDKARQSAPCVLFFDELDSIATQRGGGGGGDAGGAADRVLNQLLTEMDGMNAKKTVFIIGATNRPDIIDSALLRPGRLDQLIYIPLPDEDSRLNIFKACLRKSPVAKDVDINALAKYTQGFSGADITEICQRACKYAIRENIEKDIEKEKRRSENPEAMEEDGVDEVSEIKAAHFEESMKYARRSVSDADIRKYQAFAQTLQQSRGFGSEFRFETNAAGSGATTGVADPFATSAAAAADDDDLYN

SEQ ID NO: 120201 - DNA, 2433 bp, Zea mays
  CDS (1)..(2433)
atggcgagccaaggcgagccgtcttcctccgatccgaaggggaagaaggattactctacggcgatcctggagaggaagaagtcgccgaaccggctggtggtcgacgaggccaccaatgatgacaactctgtcgtcgctctgcacccagacaccatggagaggctccagctcttccgcggtgacactgtcctgatcaagggtaagaagagaaaggacactgtctgcattgtgcttgcagatgagacatgtgaggagccaaaggttcggatgaacaagattgtcaggaagaacttgagggtacggcttggtgatgttgtatctgtccatcaatgcccagatgtcaaatacgggaagcgtgtgcacatacttccaattgatgacaccattgaaggcatcactggcaatttgtttgatgcctttctaaaaccatacttccttgaagcctatcgtcctttgaggaaaggagaccttttcctagtcaggggtggcatgagaagtgtagaattcaaagtcatagagactgatcctgcagagtattgtatcgttgcaccagatacagaaatattttgtgggggtgagcctattaagagggaggacgaggaaagactcgatgaggttggctatgacgatgttggtggagttagaaagcagatggcccaaatcagggaactggttgaacttccattgcgtcatccccagcttttcaagtctattggtgtgaaaccaccaaagggcatattgctgtttgggcctcctggctccggcaagacccttattgctagagctgtagctaatgagacaggtgctttcttctttttgatcaatggaccagaaatcatgtcaaagctagcaggagaaagtgaaagcaatctcagaaaggcatttgaagaagctgagaaaaatgcacctcccatcatttttattgatgagatagattccatagcacctaagagagagaagacccatggagaagttgaaaggcgtattgtttcacagctcttgactcttatggatgggctcaagtctcgtgcacatgtgattgttatgggtgccaccaaccgtccaaacagtatcgatcctgctcttagaaggtttggtaggtttgatcgcgagattgatattggtgttccagatgaagttggccgccttgaggttcttcggattcacacgaaaaacatgaagctggctgaagatgttgacttggagctcattgcgaaggatacccatgggtatgttggtgctgatcttgctgccctttgtactgaagctgctcttcaatgcattcgtgagaagatggatattatagaccttgaggatgagaccatagatgctgagatactgaactctatggctgtctcaaatgaccatttcaagaccgcacttggaacaagcaacccatctgctctgcgtgaaactgttgttgaagtcccaaatgtctcttgggaagatattggtggtctggaaaatgttaagagggagctacaggagactgttcaatatccagtggagcatccagataaatttgaaaagtttggcatgtctccttcgaagggcgttttgttttatggccctcctggctgtggcaagactctgttggccaaggcaattgctaacgaatgccaggctaacttcatcagtgtgaagggtcctgaactgctcaccatgtggtttggtgagagcgaggccaatgtccgtgagatttttgacaaggctaggcagtctgctccgtgtgtcctcttcttcgatgagctcgactccattgctactcagagaggaagcagtgttggtgacgcgggcggtgctgctgacagggtgttgaaccagctgcttactgagatggatggcatgaatgccaagaagacggttttcattatcggtgcgactaacagaccagatatcattgaccctgccttgctgaggccaggacgcctcgatcagcttatctacattcctctgcccgatgagcagtccaggcttcagatcttcaaagcctgcctcaggaagtctcctgtggctaaggacgttgacttgcatgctcttgccaagtacacccagggtttcagcggagcagatatcaccgagatctgccagcgtgcgtgcaagtatgccatcagggagaacatcgagaaggacatcgagcgggagaggcgcaggaaggacaacccagaggccatggaggaagacgaggtggacgacattgccgagatcatggctgcccacttcgaggagtccatgaagtacgcccgccgcagtgtcagtgatgccgacatccgcaagtaccaggccttcgcccagacactccagcagtcccgtgggtttggcagcgagttccggttctccgaccaaccgacggcagctgcaggctctgccggtgcggccgacccctttgcatccgctgcggctgcagccgacgatgacgacttatacagctaa

SEQ ID NO: 120202 - protein, 810 aa, Zea mays
MASQGEPSSSDPKGKKDYSTAILERKKSPNRLVVDEATNDDNSVVALHPDTMERLQLFRGDTVLIKGKKRKDTVCIVLADETCEEPKVRMNKIVRKNLRVRLGDVVSVHQCPDVKYGKRVHILPIDDTIEGITGNLFDAFLKPYFLEAYRPLRKGDLFLVRGGMRSVEFKVIETDPAEYCIVAPDTEIFCGGEPIKREDEERLDEVGYDDVGGVRKQMAQIRELVELPLRHPQLFKSIGVKPPKGILLFGPPGSGKTLIARAVANETGAFFFLINGPEIMSKLAGESESNLRKAFEEAEKNAPPIIFIDEIDSIAPKREKTHGEVERRIVSQLLTLMDGLKSRAHVIVMGATNRPNSIDPALRRFGRFDREIDIGVPDEVGRLEVLRIHTKNMKLAEDVDLELIAKDTHGYVGADLAALCTEAALQCIREKMDIIDLEDETIDAEILNSMAVSNDHFKTALGTSNPSALRETVVEVPNVSWEDIGGLENVKRELQETVQYPVEHPDKFEKFGMSPSKGVLFYGPPGCGKTLLAKAIANECQANFISVKGPELLTMWFGESEANVREIFDKARQSAPCVLFFDELDSIATQRGSSVGDAGGAADRVLNQLLTEMDGMNAKKTVFIIGATNRPDIIDPALLRPGRLDQLIYIPLPDEQSRLQIFKACLRKSPVAKDVDLHALAKYTQGFSGADITEICQRACKYAIRENIEKDIERERRRKDNPEAMEEDEVDDIAEIMAAHFEESMKYARRSVSDADIRKYQAFAQTLQQSRGFGSEFRFSDQPTAAAGSAGAADPFASAAAAADDDDLYS

SEQ ID NO: 120203 - DNA, 2430 bp, Brassica napus
  CDS (1)..(2430)
atgtcgaacccagctgaatcttcagactcgaaatcgaagaaagatttcagtactgctattctggagaggaagaagtctcctaacagactcgtcgtcgatgaggccatcaacgatgataactccgtcgtctctctccaccctgccaccatggagaagctccagctcttccgtggcgataccattctcatcaagggtaagaaaaggaaggacactatctgcattgctcttgctgatgaatcatgtgaggagccaaagatcaggatgaacaaagtggtcaggtctaacttgagggttagacttggagatgttatctctgttcaccagtgccctgatgtcaagtacggaaagcgtgtgcacatcttgcctgttgatgataccgttgaaggagtcactggaaacctctttgatgcttacctcaaaccttatttcttggaggcataccgcccggtgaggaagggagatctcttcctagtgagaggaggaatgaggagtgtggagttcaaggttattgagacggatcctgctgagtactgtgtggttgctccggacactgagattttctgtgagggtgagccagtcaagagagaggatgaagaaaggctagatgaagtgggttatgatgatgttggtggtgtcaggaagcagatggctcagatcagggagcttgttgagcttcccttgaggcatccacagctcttcaagtcgattggtgttaagccaccgaagggaattctgctttacggaccacctgggtccggaaagactttgattgctcgcgccgtggctaacgaaaccggtgcgtttttcttctgtatcaatgggcctgagatcatgtccaagctggctggtgagagtgagagcaacctcaggaaagcgtttgaggaggctgagaagaacgctccttcgatcatattcattgatgagattgactctattgcaccgaaaagagagaagacgaatggagaggttgagaggaggattgtgtctcagctcctcacgctgatggatggtctgaagtcacgtgctcatgtcattgtcatgggagcaaccaatcgccccaacagtattgatccggctttgagaaggtttggaagatttgatagggagattgatatcggtgttcctgatgagattggacgtcttgaagttctcaggatccacaccaagaacatgaagctcgctgaagatgttgatcttgaaaggatctcaaaggacacacacggttatgttggtgctgatcttgcagctctctgcactgaagctgccctgcaatgcatcagggagaagatggatgtgattgatttggaagatgactccatagatgctgaaatcctcaactccatggcagtgaccaatgaacacttccacactgctcttggaaacagcaacccatctgcacttcgtgaaactgttgtggaggttcctaatgtttcttgggatgacattggaggtcttgagaatgtcaagagagagctccaggagactgttcaatacccagtcgagcacccagagaagttcgagaaattcggtatgtctccatcaaagggagtcctattctacggtcctcctggatgtggtaaaacccttttggccaaagctatagccaacgagtgccaagcaaacttcatcagcgtcaaaggtcctgagcttctcaccatgtggtttggagagagtgaagccaacgtccgtgaaatctttgacaaggcacgtcagtctgctccatgtgttctcttctttgacgagctcgactccattgcgactcagagaggaggtggaagcggaggtgatgctggcggcgcagcggatagagtcctgaaccagcttttgactgagatggatggaatgaacgccaagaagactgtcttcatcatcggagcaaccaacagacccgacattattgattctgctcttctccgtccaggaaggctcgaccagctcatttacattccactaccagacgaggactcacgtctcaatatcttcaaggcctgcttgaggaaatcacctgttgctaaagatgtggacatcaacgctctcgctaagtacacgcaggggttcagtggtgctgatatcactgagatttgccagagggcttgcaaatacgccatcagagaaaacattgagaaggacattgaaaaggagaagaggaggagcgagaacccagaggcgatggaggaagatggagtggatgaagtgtcagagatcaaagctgcacattttgaggagtcgatgaagtatgcgcgcaggagtgtgagtgatgcagacatcaggaagtaccaagcctttgctcagacgctgcagcagtctagagggtttggttctgagttcaggttcgagactaatgctggttcaggtgcaaccactggagtcgctgatccttttgccacctctgcagctgctgctgcggacgatgatgatctctacaattag

SEQ ID NO: 120204 - protein, 809 aa, Brassica napus
MSNPAESSDSKSKKDFSTAILERKKSPNRLVVDEAINDDNSVVSLHPATMEKLQLFRGDTILIKGKKRKDTICIALADESCEEPKIRMNKVVRSNLRVRLGDVISVHQCPDVKYGKRVHILPVDDTVEGVTGNLFDAYLKPYFLEAYRPVRKGDLFLVRGGMRSVEFKVIETDPAEYCVVAPDTEIFCEGEPVKREDEERLDEVGYDDVGGVRKQMAQIRELVELPLRHPQLFKSIGVKPPKGILLYGPPGSGKTLIARAVANETGAFFFCINGPEIMSKLAGESESNLRKAFEEAEKNAPSIIFIDEIDSIAPKREKTNGEVERRIVSQLLTLMDGLKSRAHVIVMGATNRPNSIDPALRRFGRFDREIDIGVPDEIGRLEVLRIHTKNMKLAEDVDLERISKDTHGYVGADLAALCTEAALQCIREKMDVIDLEDDSIDAEILNSMAVTNEHFHTALGNSNPSALRETVVEVPNVSWDDIGGLENVKRELQETVQYPVEHPEKFEKFGMSPSKGVLFYGPPGCGKTLLAKAIANECQANFISVKGPELLTMWFGESEANVREIFDKARQSAPCVLFFDELDSIATQRGGGSGGDAGGAADRVLNQLLTEMDGMNAKKTVFIIGATNRPDIIDSALLRPGRLDQLIYIPLPDEDSRLNIFKACLRKSPVAKDVDINALAKYTQGFSGADITEICQRACKYAIRENIEKDIEKEKRRSENPEAMEEDGVDEVSEIKAAHFEESMKYARRSVSDADIRKYQAFAQTLQQSRGFGSEFRFETNAGSGATTGVADPFATSAAAAADDDDLYN

SEQ ID NO: 120205 - DNA, 2430 bp, Brassica napus
  CDS (1)..(2430)
atgtcgaacccagctgaatcttcagactcgaaatcgaagaaggatttcagtactgctattctggagaggaagaagtctccgaacagactcgtcgtcgatgaggccatcaacgatgataactccgtcgtgtctctccaccctgctaccatggagaagctccagctcttccgtggtgataccattctcatcaagggtaagaaaaggaaggacactatctgcattgctcttgctgatgaatcatgtgaggagccaaagatcaggatgaacaaagtggtcaggtctaacttgagggttagacttggtgatgttatctctgttcaccaatgccctgatgtcaagtacggacagcgtgtgcacatcttgcctgttgatgacaccgttgaaggagtcactggaaacctctttgatgcttacctcaaaccttatttcttggaggcgtaccgtccggtgaggaagggagatctcttcctagtgagaggaggaatgaggagtgtggagttcaaggttattgagacggatcctgctgagtactgtgtggttgctccggacactgagattttctgtgagggtgagccagtcaagagagaggatgaagaaaggctagatgaagtgggttatgatgatgttggtggtgtcaggaagcagatggctcagatcagggagcttgttgagcttcccttgaggcatccacagctgttcaagtcgattggtgttaagccaccgaagggaattctgctttacggaccacctgggtctggaaagactttgattgctcgtgccgtggctaacgaaaccggtgcctttttcttctgtatcaatgggcctgagatcatgtccaagctggctggtgagagtgagagcaacctcaggaaagcgtttgaggaggctgagaagaacgctccttcgatcatattcattgatgagattgactctattgcaccgaaaagagagaagacgaatggagaggttgagaggaggattgtgtctcagctcctcacgctgatggatggtcttaaatcacgtgctcatgtcattgtcatgggagcaaccaatcgccccaacagtattgatccggctttgagaaggtttggaagatttgatagggagattgatattggtgttcctgatgagattggacgtcttgaagttctcaggatccacaccaagaacatgaagctcgctgaagatgttgatcttgaaaggatctcaaaggacacacacggttatgtaggtgctgatcttgcagctctatgcactgaagctgccctgcaatgcatcagggagaagatggatgtgattgatctggaagatgactccatagatgctgaaatcctcaattccatggcagtgaccaatgaacacttccacactgctctcggaaacagcaacccatctgcacttcgtgaaactgttgtggaggttcccaatgtttcttgggatgacattggaggtcttgagaatgtcaagagagagctccaggagactgttcaatacccagtcgagcacccagagaagtttgagaagttcggtatgtctccatcaaagggagtccttttctacggtcctcctggatgtggtaaaacccttttggccaaagctatagccaacgagtgccaagcaaacttcatcagtgtcaaaggtcctgagcttctcaccatgtggtttggagagagtgaagcaaatgtccgtgaaatctttgacaaggcccgtcagtctgctccatgtgttctcttctttgacgagctcgactccattgcgactcagagaggaggtggaagcggaggtgatggtggcggcgcagcagatagagtcctgaaccagcttttgactgagatggatggaatgaacgccaagaagaccgtcttcatcatcggagcgaccaacagacccgacattattgattctgctcttctccgtccaggaaggctcgaccagctcatttacattccactcccggacgaggactcgcgtctcaatatcttcaaggcctgcttgaggaaatcacctgttgctaaagatgtggacatcaacgctctcgctaagtacacgcaggggttcagtggtgctgatatcactgagatttgccagagggcttgcaaatacgccatcagagaaaacatcgagaaggacattgaaaaggagaagaggaggagcgagaacccagaagccatggaggaagatagagtggatgaagtatcagagatcaaagctgcacactttgaggagtcgatgaagtatgcacgcaggagtgtgagtgatgcagacatcaggaagtaccaagcctttgctcagacgctgcagcagtctagagggtttggttccgagttcaggttcgagactaatgctggttcaggtgcaaccactggagtcgctgatccttttgccacctctgcagctgctgctgcggacgatgatgatctctacaattag

SEQ ID NO: 120206 - protein, 809 aa, Brassica napus
MSNPAESSDSKSKKDFSTAILERKKSPNRLVVDEAINDDNSVVSLHPATMEKLQLFRGDTILIKGKKRKDTICIALADESCEEPKIRMNKVVRSNLRVRLGDVISVHQCPDVKYGQRVHILPVDDTVEGVTGNLFDAYLKPYFLEAYRPVRKGDLFLVRGGMRSVEFKVIETDPAEYCVVAPDTEIFCEGEPVKREDEERLDEVGYDDVGGVRKQMAQIRELVELPLRHPQLFKSIGVKPPKGILLYGPPGSGKTLIARAVANETGAFFFCINGPEIMSKLAGESESNLRKAFEEAEKNAPSIIFIDEIDSIAPKREKTNGEVERRIVSQLLTLMDGLKSRAHVIVMGATNRPNSIDPALRRFGRFDREIDIGVPDEIGRLEVLRIHTKNMKLAEDVDLERISKDTHGYVGADLAALCTEAALQCIREKMDVIDLEDDSIDAEILNSMAVTNEHFHTALGNSNPSALRETVVEVPNVSWDDIGGLENVKRELQETVQYPVEHPEKFEKFGMSPSKGVLFYGPPGCGKTLLAKAIANECQANFISVKGPELLTMWFGESEANVREIFDKARQSAPCVLFFDELDSIATQRGGGSGGDGGGAADRVLNQLLTEMDGMNAKKTVFIIGATNRPDIIDSALLRPGRLDQLIYIPLPDEDSRLNIFKACLRKSPVAKDVDINALAKYTQGFSGADITEICQRACKYAIRENIEKDIEKEKRRSENPEAMEEDRVDEVSEIKAAHFEESMKYARRSVSDADIRKYQAFAQTLQQSRGFGSEFRFETNAGSGATTGVADPFATSAAAAADDDDLYN

SEQ ID NO: 120207 - DNA, 2427 bp, Brassica napus
  CDS (1)..(2427)
atgtcgaacccagctgaatcttcagactcgaaatcgaagaaggattttagtactgctattctggagaggaagaagtctcccaacagacttgtcgtcgatgaggccatcaacgatgataactccgttgtatctctccaccctgctaccatggagaagctccagctcttccgtggtgataccattctcatcaagggtaagaaaaggaaggacactatctgcatcgctcttgctgatgaatcatgtgaggagccgaagatcaggatgaacaaagtggtcaggtctaacttgagggttaggcttggtgatgttatctctgttcaccaatgccctgatgtcaagtacggacagcgtgtgcacatcttgcctgttgatgacaccgttgaaggagtcactggaaacctctttgatgcttacctcaaaccttatttcttggaggcataccgtccggtgaggaagggcgatctcttcctagtgagaggaggaatgaggagtgtggagttcaaggttattgagacggatcctgctgagtactgtgttgttgctccggacactgagattttctgtgagggagagccagtcaagagagaggatgaagaaaggcttgatgaagtgggttatgatgatgttggtggagtcaggaagcagatggctcagatcagggagcttgttgagcttcccttgaggcatccacagctgttcaagtcaattggtgttaagccaccgaagggaattttgctttatggaccacctgggtctggaaagactttgatcgctcgtgctgttgctaatgaaactggtgcctttttcttctgtatcaatggacctgagatcatgtccaagctggctggtgagagtgagagcaacctcaggaaagcgtttgaggaggctgagaagaacgctccttcgatcatattcattgatgagattgactctattgcaccgaaaagagagaagactaatggagaggttgagaggaggattgtgtctcagctccttacgctaatggatggacttaaatctcgtgctcatgttattgtcatgggagcaaccaatcgccccaacagtatcgacccggctttgagaaggtttggaagatttgatagggagattgatattggtgttcctgatgagattggtcgtcttgaagttctcaggatccacacaaagaacatgaagcttgctgaagatgtggatctagaaaggatctcaaaggacacacacggttatgtcggtgctgatcttgcagctctgtgcactgaagctgccctgcaatgcatcagggagaagatggatgtgattgatttggaagatgactccatagatgctgaaatcctcaattccatggcagtgaccaatgaacacttccacactgctctcgggaacagcaacccatctgcacttcgtgaaactgttgtggaggttcccaatgtttcttgggatgacattggaggtcttgagaatgtcaagagagagctccaggagactgttcaatacccggtcgagcacccagagaagtttgagaagttcggtatgtctccatcaaagggagtccttttctacggtcctcctggatgtggtaaaacccttttggccaaagctatagccaacgagtgccaagcaaacttcatcagtgtcaaaggtcccgagcttctcaccatgtggtttggagagagtgaagctaatgtccgtgaaatctttgacaaggcccgtcagtctgctccatgtgttctcttctttgacgagctcgactccattgcgactcagagaggaggtggaagcggaggtgatggtggcggcgcagcagatagagtcctgaaccagcttttgactgagatggatggaatgaacgccaagaaaaccgtcttcatcatcggggcaaccaacaggcccgacattattgattctgctcttctccgtccaggaaggctcgaccagctcatttacattccactgccagacgaggattcacgtctcaacatcttcaaggcctgcttgaggaagtcacctatcgctaaagatgtggacatcaacgctctcgctaagtacacacagggattcagtggtgctgatatcactgagatttgccagagggcttgcaagtacgccatcagagaaaacatcgagaaggacattgaaaaggagaagaggaggagcgagaacccagaagccatggaggaagatatggatgaagtatcagagatcaaagctgcacactttgaggagtcgatgaagtatgcacgcaggagtgtgagtgatgcagacatcaggaagtaccaagcctttgctcagacgctgcagcagtctagagggtttggttccgagttcaggttcgagactaatgctggttcaggtgcaaccactggagtcgctgatccttttgccacgtctgcagctgctgctgcggacgatgatgatctctacaattaa

SEQ ID NO: 120208 - protein, 808 aa, Brassica napus
MSNPAESSDSKSKKDFSTAILERKKSPNRLVVDEAINDDNSVVSLHPATMEKLQLFRGDTILIKGKKRKDTICIALADESCEEPKIRMNKVVRSNLRVRLGDVISVHQCPDVKYGQRVHILPVDDTVEGVTGNLFDAYLKPYFLEAYRPVRKGDLFLVRGGMRSVEFKVIETDPAEYCVVAPDTEIFCEGEPVKREDEERLDEVGYDDVGGVRKQMAQIRELVELPLRHPQLFKSIGVKPPKGILLYGPPGSGKTLIARAVANETGAFFFCINGPEIMSKLAGESESNLRKAFEEAEKNAPSIIFIDEIDSIAPKREKTNGEVERRIVSQLLTLMDGLKSRAHVIVMGATNRPNSIDPALRRFGRFDREIDIGVPDEIGRLEVLRIHTKNMKLAEDVDLERISKDTHGYVGADLAALCTEAALQCIREKMDVIDLEDDSIDAEILNSMAVTNEHFHTALGNSNPSALRETVVEVPNVSWDDIGGLENVKRELQETVQYPVEHPEKFEKFGMSPSKGVLFYGPPGCGKTLLAKAIANECQANFISVKGPELLTMWFGESEANVREIFDKARQSAPCVLFFDELDSIATQRGGGSGGDGGGAADRVLNQLLTEMDGMNAKKTVFIIGATNRPDIIDSALLRPGRLDQLIYIPLPDEDSRLNIFKACLRKSPIAKDVDINALAKYTQGFSGADITEICQRACKYAIRENIEKDIEKEKRRSENPEAMEEDMDEVSEIKAAHFEESMKYARRSVSDADIRKYQAFAQTLQQSRGFGSEFRFETNAGSGATTGVADPFATSAAAAADDDDLYN

SEQ ID NO: 120209 - DNA, 2430 bp, Brassica napus
  CDS (1)..(2430)
atgtcgaacccagctgaatcttcagactcgaaatcgaagaaagatttcagtactgctattctcgagaggaagaagtctcctaacagactcgtcgtcgatgaggccatcaacgatgataactccgtcgtctctctccaccctgacaccatggagaagctccagctcttccgtggcgataccattctcatcaagggtaagaaaaggaaggacactatctgcattgctcttgctgatgaatcatgtgaggagccaaagatcaggatgaacaaagtggtcagatctaacttgagggttagacttggagatgtcatctctgttcaccagtgccctgatgtcaagtacgggaatcgtgtgcacatcttgcctgttgatgataccgttgaaggagtcactggaaacctctttgatgcttacctgaaaccttattttctggaagcgtaccgcccggtgaggaagggcgatctcttcctagtcagaggaggaatgaggagtgtggagttcaaggttatagagacggatcctgctgagtactgtgtggttgctccagacactgagattttctgtgagggtgagcctgtgaagagagaggatgaggaaaggctagatgaagtgggttatgatgatgttggtggtgtgaggaagcagatggctcagatcagggagcttgttgagcttcccttgaggcatccacagctcttcaagtcgattggtgttaagccaccgaaggggattctgctttacggaccacctgggtccggaaagactttgattgctcgcgccgtggctaacgaaaccggcgcgtttttcttctgtatcaatgggcctgagatcatgtctaagttggctggtgagagtgagagcaacctcaggaaagcgtttgaggaggctgagaagaacgctccttcgatcatattcattgatgagattgactctattgcacccaaaagagagaagacgaatggagaggttgagaggaggattgtgtctcagctcctcacgctgatggatggtctgaagtcacgtgctcatgtcattgtcatgggagcaaccaatcgccccaacagtattgatccggctttgagaaggtttggaagatttgatagggagattgatatcggcgttcctgatgaaattggacgtcttgaagttctcaggatccacaccaagaacatgaagctcgctgaagatgttgatcttgagaggatctcaaaggacacacacggttatgtaggtgctgatcttgcagctctctgcacagaagctgccctgcaatgcatcagggagaagatggatgtgattgatctggaagatgactctattgatgctgagatcctcaattccatggcagtgactaatgaacacttccacaccgctcttggaaacagcaacccatctgcacttcgtgaaactgttgtggaggttcctaatgtttcttgggatgacattggaggtcttgagaatgtcaagagagagctccaggagactgttcaataccctgtggagcacccagagaagttcgagaaattcggtatgtctccttcaaagggagtcctattctacggtcctcctggatgtggtaaaacccttctggccaaagctatagccaacgagtgccaagcaaatttcataagtgtcaaaggtcctgagcttctcactatgtggtttggagagagtgaagccaatgtccgtgaaatcttcgacaaggctcgtcagtccgccccgtgtgttctcttctttgatgagctcgactccattgcgactcagagaggaggtggaggcggaggtgatgctggcggtgcggctgatagagtcctcaatcagcttttgactgagatggatggaatgaacgccaaaaagactgtcttcatcatcggagcgaccaacagacccgacattattgattctgctcttctacgtccaggaaggctcgaccagctcatttacattccactaccggacgaggactctcgcctcaatatcttcaaggcatgcttgaggaaatctcctgttgctaaagatgtggacatcaatgctctcgctaagtacacgcaggggttcagtggtgctgatatcactgagatttgccagagggcttgcaaatacgccataagagagaacattgagaaggacattgagagggagaagaggaggagcttgaacccagaggcgatggaggaagatggagtggatgaagtgtcagagatcaaagctgcacactttgaggagtcgatgaagtatgcacgcaggagtgtgagtgatgcagacatcaggaagtaccaagcctttgctcagacgctgcagcagtctagagggtttggttctgagttcaggtttgagactaatgctggttcaggtgcaaccactggagtcgctgatccttttgccacctctgcagctgctgctgcagatgatgacgatctctacaattag

SEQ ID NO: 120210 - protein, 809 aa, Brassica napus
MSNPAESSDSKSKKDFSTAILERKKSPNRLVVDEAINDDNSVVSLHPDTMEKLQLFRGDTILIKGKKRKDTICIALADESCEEPKIRMNKVVRSNLRVRLGDVISVHQCPDVKYGNRVHILPVDDTVEGVTGNLFDAYLKPYFLEAYRPVRKGDLFLVRGGMRSVEFKVIETDPAEYCVVAPDTEIFCEGEPVKREDEERLDEVGYDDVGGVRKQMAQIRELVELPLRHPQLFKSIGVKPPKGILLYGPPGSGKTLIARAVANETGAFFFCINGPEIMSKLAGESESNLRKAFEEAEKNAPSIIFIDEIDSIAPKREKTNGEVERRIVSQLLTLMDGLKSRAHVIVMGATNRPNSIDPALRRFGRFDREIDIGVPDEIGRLEVLRIHTKNMKLAEDVDLERISKDTHGYVGADLAALCTEAALQCIREKMDVIDLEDDSIDAEILNSMAVTNEHFHTALGNSNPSALRETVVEVPNVSWDDIGGLENVKRELQETVQYPVEHPEKFEKFGMSPSKGVLFYGPPGCGKTLLAKAIANECQANFISVKGPELLTMWFGESEANVREIFDKARQSAPCVLFFDELDSIATQRGGGGGGDAGGAADRVLNQLLTEMDGMNAKKTVFIIGATNRPDIIDSALLRPGRLDQLIYIPLPDEDSRLNIFKACLRKSPVAKDVDINALAKYTQGFSGADITEICQRACKYAIRENIEKDIEREKRRSLNPEAMEEDGVDEVSEIKAAHFEESMKYARRSVSDADIRKYQAFAQTLQQSRGFGSEFRFETNAGSGATTGVADPFATSAAAAADDDDLYN

SEQ ID NO: 120211 - DNA, 2424 bp, Glycine max
  CDS (1)..(2424)
atgtcacagcaaggcgaatcatcggacccgaaatcggggaagaaggacttctcgaccgcgattctggaacgtaaaaagtcgccgaaccggcttgttgtggatgaggctgtcaacgacgacaactccgtagtgaccatgcacccccaaaccatggaaaagcttcagcttttccgaggggacactatccctatcaaggataagaaacgaaaggatactatttgcatagctcttgctgatgagaactgtgaggagccaaagatcaggatgaacaaagttgtgaggtcgaatttgcgggttcggcttggagatgttgtgtctgtgcaccagtgcccggatgttaagtatgggaaacgtgtgcacattcttcctattgatgataccattgaaggtgtcaccggcaatctgtttgatgctttcttgaaaccctatttcttggaggcttatcgtcctgtcagaaaaggagatctatttcttgtccggggagggatgagaagtgtagagttcaaggtcattgagaccgatcctggggagtattgtgttgttgctccagacactgaaattttctgtgagggggagcctttgaaaagagaggatgaagaaagactggacgaagttgggtatgatgatgtgggtggtgtcaggaaacaaatggctcagattcgtgagttggttgagcttccattgaggcatccacagctttttaaatcaattggtgtgaagcctcccaagggaattttactttatggacccccaggttctgggaagacattaatagcaagagctgtagctaacgaaactggagcttttttcttttgtattaatggaccagagattatgtccaaacttgctggagagagtgaaagcaatctcaggaaagcgtttgaagaagctgaaaagaatgcaccgtccattatctttattgatgaaattgattccattgcccccaagcgggagaagacacatggtgaagttgaaaggaggattgtttcacaacttttgactcttatggatggattaaaatctcgtgctcatgttattgttattggagctactaatcgtccaaatagcattgacccagcattgagaaggtttggtagatttgatagggagattgatattggtgttcctgatgaagttgggcgacttgaagtccttcgcatacatactaaaaacatgaagctatctgatgatgttgatttagagagaattgcaaaagatactcatgggtatgttggtgctgaccttgctgccctttgcactgaagctgctttgcaatgcattagggagaagatggatgtaattgacttggaggatgagacaattgatgcagaagtactgaattccatggcagttacaaatgagcatttccagactgcccttggaacaagcaacccatcagctttacgtgaaactgttgttgaagtgcctaatgtcagctgggatgacattggaggcctcgaaaatgtcaagcgtgaactgcaagagactgtacaatatccagttgagcacccagaaaagtttgagaagtttggtatgtctccatcaaaaggagtactcttctatggtcctccgggatgtgggaaaactttgttagccaaagcaattgctaatgaatgtcaagctaacttcatcagtgtgaaaggtccagaactgcttacaatgtggtttggtgaaagtgaagctaatgttagagaaatttttgacaaggccagacaatcggctccatgtgtcctcttctttgatgagcttgactctattgccactcagagaggaagcagtgttggggatgctggtggtgctgctgatagagttctaaatcaacttctgactgaaatggatggcatgtctgccaaaaagactgtgttcataattggggcaactaacagacctgacattattgacccagcacttcttcggccaggccgtctggatcaattgatctatattcctctccctgatgaggattcccgtcatcaaatctttaaagcctgcttgaggaagtcacctgtcgcaaaaaatgttgatttgagaacattggctaggcatactcaagggttcagtggtgctgatattacagaaatatgccagcgagcatgcaaatatgcaataagagaaaacatagagaaggacattgagcgagagaggaagagtaaggaaaaccctgaggccatggatgaagacacagttgatgacgaagttgccgagatcaaggctgctcattttgaggagtcaatgaagtttgcacgtaggagtgttagtgatgctgatatacgcaaatatcaggcatttgctcagaccttacagcaatcaagagggtttggaagtgaatttaggtttccagagtctggagataggactactactggatctgacccctttgcaacttctgctggtggggctgatgaagatgatctgtatagttag

SEQ ID NO: 120212 - protein, 807 aa, Glycine max
MSQQGESSDPKSGKKDFSTAILERKKSPNRLVVDEAVNDDNSVVTMHPQTMEKLQLFRGDTIPIKDKKRKDTICIALADENCEEPKIRMNKVVRSNLRVRLGDVVSVHQCPDVKYGKRVHILPIDDTIEGVTGNLFDAFLKPYFLEAYRPVRKGDLFLVRGGMRSVEFKVIETDPGEYCVVAPDTEIFCEGEPLKREDEERLDEVGYDDVGGVRKQMAQIRELVELPLRHPQLFKSIGVKPPKGILLYGPPGSGKTLIARAVANETGAFFFCINGPEIMSKLAGESESNLRKAFEEAEKNAPSIIFIDEIDSIAPKREKTHGEVERRIVSQLLTLMDGLKSRAHVIVIGATNRPNSIDPALRRFGRFDREIDIGVPDEVGRLEVLRIHTKNMKLSDDVDLERIAKDTHGYVGADLAALCTEAALQCIREKMDVIDLEDETIDAEVLNSMAVTNEHFQTALGTSNPSALRETVVEVPNVSWDDIGGLENVKRELQETVQYPVEHPEKFEKFGMSPSKGVLFYGPPGCGKTLLAKAIANECQANFISVKGPELLTMWFGESEANVREIFDKARQSAPCVLFFDELDSIATQRGSSVGDAGGAADRVLNQLLTEMDGMSAKKTVFIIGATNRPDIIDPALLRPGRLDQLIYIPLPDEDSRHQIFKACLRKSPVAKNVDLRTLARHTQGFSGADITEICQRACKYAIRENIEKDIERERKSKENPEAMDEDTVDDEVAEIKAAHFEESMKFARRSVSDADIRKYQAFAQTLQQSRGFGSEFRFPESGDRTTTGSDPFATSAGGADEDDLYS

SEQ ID NO: 120213 - DNA, 2442 bp, Triticum aestivum
  CDS (1)..(2442)
atggccgccccgacgccgcagggcgaggcctcctcctccgatcccaagtcgaagaaggactactcgacggcgattctagagcggaagaagtcccctaaccgcctcgtcgtcgacgaggccaccaacgatgacaactccgtcgtcgccctccaccccgacaccatggagaagctccagctcttccgcggcgacacggtccttcttaagggtaagaaaaggaaggacacaatctgcattgtgcttgcagatgacacttgtgaggagccaaagatcagaatgaacaagaccgtcaggaagaacttgagagtgcgacttggtgacgtggtgtctgttcaccaatgccctgatgtcaaatacgggaagcgggtgcacacacttcctattgatgacacagttgaaggcattactggaaacttgtttgacgcgttcttgaaaccatacttccttgaagcttaccgtcctttgagaaagggagaccttttccttgtgaggggtggaatgagaagtgtggagttcaaagttatagagactgacccggcagagtattgcattgttgcaccagacactgagatcttctgtgatggtgagcctgttaagagggaggatgaggagaggcttgacgatgttggctacgatgatgttggtggagtcaggaagcaaatggcccagatcagagaactggttgaactcccactgcgtcaccctcaacttttcaagtctatcggtgtgaagcctccaaagggcatattgctgtttggaccacctggctctggcaagacccttattgcgagggctgttgccaatgagacgggtgcattcttctttctgatcaatggcccagaaattatgtccaagttagcaggagaaagtgagagcaatctcaggaaggcatttgaagaagcagagaagaatgcaccatcaatcatcttcattgatgagattgattcaatagccccaaagagagagaagaccaatggagaagttgaaaggcgtattgtgtctcagctgttgacccttatggatgggcttaagtcccgtgcgcatgttattgttatgggtgctacaaaccgcccaaacagtattgatcctgctctcagaagatttggtaggtttgaccgtgagattgacattggagtccctgatgaagttgggcgccttgaggttctcaggattcacaccaaaaacatgaagttggctgaagatgtggaactggaacatatttcaagagatactcatgggtatgttggtgctgatcttgctgctctttgcaccgaggctgctctccaatgcattcgtgagaagatggatattattgatcttgaggacgagacaatagatgctgagatactcaactctatggctgtgacaaatgaccatttcaagaccgccctgacgacaagcaacccgtctgctctccgtgaaactgttgttgaagttcccaatgtttcttgggaagatattggtgggctggagaatgtcaaaagggagttgcaggagactgttcaataccctgtggagcatccggagaaatttgagaagtttggcatgtctccttccaagggtgttttgttctatggccctcctggctgtggtaaaaccttattggccaaggcaattgcaaatgagtgccaggctaacttcatcagtatcaagggacctgagctgcttaccatgtggtttggtgagagtgaggccaatgtgcgtgagattttcgacaaggctagggggtcagcaccatgtgtgctcttctttgatgagcttgactctattgctacccagagaggaagcagcagtggggatgctggaggtgctgctgatagagtgctgaaccagctgctgactgagatggatggcatgaatgctaagaaaaccgtcttcatcattggtgctaccaacaggccagacattatagaccctgccctccttaggccagggcgtcttgatcagcttatctacatccctcttcctgatgtcgagtcgaggcaccagatcttcaaagcttgcctcagaaagtctcctttggccaaggatattgatctgagtgctcttgccaagtacactcaagggttcagcggtgctgatatcactgaaatttgccagcgtgcttgcaagtatgccatcagggagaacatcgagaaggacatcgagagggagaggcggaggaaggacaaccctgaagccatggaggaggacgagggtgatgaggttgctgagatcagggctgcccactttgaggagtcgatgaagtatgctcgccggagcgtgagcgacgctgacatccgcaagtaccaggcctttgctcagactctgcagcagtctcgtggattcggcagcgagttccggttccctgatcagccggctgcgggcgcttcctctgccactgcggccgacccttttgcttccgctgctgcagcagccgacgatgatgatttatatagctaa

SEQ ID NO: 120214 - protein, 813 aa, Triticum aestivum
MAAPTPQGEASSSDPKSKKDYSTAILERKKSPNRLVVDEATNDDNSVVALHPDTMEKLQLFRGDTVLLKGKKRKDTICIVLADDTCEEPKIRMNKTVRKNLRVRLGDVVSVHQCPDVKYGKRVHTLPIDDTVEGITGNLFDAFLKPYFLEAYRPLRKGDLFLVRGGMRSVEFKVIETDPAEYCIVAPDTEIFCDGEPVKREDEERLDDVGYDDVGGVRKQMAQIRELVELPLRHPQLFKSIGVKPPKGILLFGPPGSGKTLIARAVANETGAFFFLINGPEIMSKLAGESESNLRKAFEEAEKNAPSIIFIDEIDSIAPKREKTNGEVERRIVSQLLTLMDGLKSRAHVIVMGATNRPNSIDPALRRFGRFDREIDIGVPDEVGRLEVLRIHTKNMKLAEDVELEHISRDTHGYVGADLAALCTEAALQCIREKMDIIDLEDETIDAEILNSMAVTNDHFKTALTTSNPSALRETVVEVPNVSWEDIGGLENVKRELQETVQYPVEHPEKFEKFGMSPSKGVLFYGPPGCGKTLLAKAIANECQANFISIKGPELLTMWFGESEANVREIFDKARGSAPCVLFFDELDSIATQRGSSSGDAGGAADRVLNQLLTEMDGMNAKKTVFIIGATNRPDIIDPALLRPGRLDQLIYIPLPDVESRHQIFKACLRKSPLAKDIDLSALAKYTQGFSGADITEICQRACKYAIRENIEKDIERERRRKDNPEAMEEDEGDEVAEIRAAHFEESMKYARRSVSDADIRKYQAFAQTLQQSRGFGSEFRFPDQPAAGASSATAADPFASAAAAADDDDLYS

SEQ ID NO: 120215 - DNA, 2433 bp, Zea mays
  CDS (1)..(2433)
atggcgagccaaggcgagccgtcttcctccgatccgaaggggaagaaggattactctacggcgatcctggagaggaagaagtcgccgaaccggctggtggtcgacgaggccaccaatgatgacaactccgtcgtcgctctgcacccggacaccatggagaggctccagctcttccgcggtgacactgtcctgatcaagggtaagaagagaaaggacactatctgcattgtgctcgcagacgagacatgtgaggagccaaaggtccggatgaacaagattgtcaggaagaacttgagggtacggcttagtgatgtggtatctgtccatcaatgcccagatgtcaaatacgggaagcgtgtgcacatacttccaattgatgacaccattgaaggcatcactggcaacttatttgatgcctttctaaaaccatacttccttgaagcctatcgtcctttgaggaaaggagaccttttcctagtcaggggtggcatgagaagtgtagaattcaaagtcatagagactgatcctgcagagtattgtatcgttgcaccagatacagaaatattttgtgagggtgagcctattaagagggaggacgaggaaagactcgatgaggttggctatgacgatgttggtggagttagaaagcagatggcccaaatcagggaactggttgaacttccattgcgtcatccccagcttttcaagtctattggtgtgaaaccaccaaagggcatattgctgtttgggcctcctggctctggcaagacccttattgctagagctgtagctaatgagacaggtgctttcttctttttgatcaatggaccagaaatcatgtcaaagctagcaggagaaagtgaaagcaacctcagaaaggcatttgaagaagctgagaaaaatgcaccttcaatcatttttattgatgagatagattccatagcacccaagagagaaaagacccatggagaagttgaaaggcgtattgtttcacagctcttgactcttatggatggcctcaagtctcgtgcacatgttattgttatgggtgccacaaaccgtccaaacagtatcgatcctgctcttagaaggtttggtcggtttgatcgtgagattgatatcggtgttccagatgaagttgggcgccttgaggttcttcggattcacacgaaaaacatgaagcttgctgaagatgttgacttggagatcattgcgaaggatactcatggttatgttggtgctgatcttgctgccctttgtactgaagctgctcttcaatgcattcgtgagaagatggatattatagatcttgaggatgagacaatagatgcggagatactgaactctatggctgtctcaaatgaccatttcaagactgcacttgggacaagcaacccatctgctctgcgtgaaactgttgttgaagtcccaaatgtctcttgggaagatattggtggtctggaaaatgttaagagggagctacaggagactgttcaatatccagtggagcatccagataaatttgaaaagtttggcatgtctccttcgaagggtgttttgttttatggccctcctggctgtggcaagactctgttggccaaggcaatcgctaatgaatgccaggctaacttcatcagtgtgaagggtcctgaactgctcaccatgtggtttggtgagagcgaggccaatgtccgtgagatttttgacaaggctaggcagtctgctccgtgtgtcctcttctttgatgagctcgactccattgctactcagagaggaagcagtgttggtgacgcgggcggtgctgctgacagggtgttgaaccagctgcttactgagatggatggcatgaatgccaagaagacggttttcattatcggcgcgactaacagaccagatatcattgaccctgccttgctgaggccaggacgcctcgatcagcttatctacattcctctgcccgatgagcagtccaggcttcagatcttcaaagcctgcctcaggaagtctcctgtggctaaggacgttgacttgcatgctcttgccaagtacacccagggtttcagcggagcagatatcaccgagatctgccagcgtgcgtgcaagtatgccatcagggagaacatcgagaaggacatcgagcgggagaggcgcaggaaggacaaccctgaggccatggaggaagacgaggtggacgacattgccgagatcatggctgcccacttcgaggagtccatgaagtacgcccgccgcagtgtcagtgatgccgacatccgcaagtaccaggccttcgcccagacactccagcagtcccgtgggtttggcagcgagttccggttctccgaccaaccgacggcagctgcaggctctgccggtgcggccgacccctttgcatccgctgcggctgcagccgacgatgacgacttatacagctaa

SEQ ID NO: 120216 - protein, 810 aa, Zea mays
MASQGEPSSSDPKGKKDYSTAILERKKSPNRLVVDEATNDDNSVVALHPDTMERLQLFRGDTVLIKGKKRKDTICIVLADETCEEPKVRMNKIVRKNLRVRLSDVVSVHQCPDVKYGKRVHILPIDDTIEGITGNLFDAFLKPYFLEAYRPLRKGDLFLVRGGMRSVEFKVIETDPAEYCIVAPDTEIFCEGEPIKREDEERLDEVGYDDVGGVRKQMAQIRELVELPLRHPQLFKSIGVKPPKGILLFGPPGSGKTLIARAVANETGAFFFLINGPEIMSKLAGESESNLRKAFEEAEKNAPSIIFIDEIDSIAPKREKTHGEVERRIVSQLLTLMDGLKSRAHVIVMGATNRPNSIDPALRRFGRFDREIDIGVPDEVGRLEVLRIHTKNMKLAEDVDLEIIAKDTHGYVGADLAALCTEAALQCIREKMDIIDLEDETIDAEILNSMAVSNDHFKTALGTSNPSALRETVVEVPNVSWEDIGGLENVKRELQETVQYPVEHPDKFEKFGMSPSKGVLFYGPPGCGKTLLAKAIANECQANFISVKGPELLTMWFGESEANVREIFDKARQSAPCVLFFDELDSIATQRGSSVGDAGGAADRVLNQLLTEMDGMNAKKTVFIIGATNRPDIIDPALLRPGRLDQLIYIPLPDEQSRLQIFKACLRKSPVAKDVDLHALAKYTQGFSGADITEICQRACKYAIRENIEKDIERERRRKDNPEAMEEDEVDDIAEIMAAHFEESMKYARRSVSDADIRKYQAFAQTLQQSRGFGSEFRFSDQPTAAAGSAGAADPFASAAAAADDDDLYS

SEQ ID NO: 120217 - DNA, 2430 bp, Zea mays
  CDS (1)..(2430)
atggcgagccaaggggagccctcggcctctgcttccgatccgaaggagaagaaggacttctcgacggcgatcctggagaggaaaaagtcaccgaaccgccttgtcgtcgacgaggccaccaacgacgataactccgtcgtcgctctgcaccctgacaccatggagaggctgcagctcttccgcggcgacaccgtgctcctcaagggtaagaagaggaaagacactatttgcattgtccttgcggacgaaacctgtgaggagccaaaggttcggatgaacaaggttgtccgccagaacctaagggtgaggcttggtgatgtggtttctgtccaccagtgccaggatgtgaaatatgggaagcgtgtccacattcttccaattgatgatacagttgaaggcattacagggaacctgtttgatgccttcttgaaaccatatttcctagaagcatacaggccgttgaggaaaggagaccttttccttgtcagaggaggaatgagaagtgtggaattcaaagtgatagagactgatcctgctgaatattgtatcgttgcgccagatactgaaatattttgtgatggggagcctattaagagagaggatgaggagcgtcttgatgaagttggttatgatgatgttggtggagttagaaagcaaatggcccaaatcagagagcttgttgagcttccactacgccatcctcagcttttcaaatctattggtgtgaagccaccaaagggcatattgctgtacgggccacctggttcgggaaagactcttattgctcgtgctgttgcaaatgagactggagcctttttcttcctgatcaatggtccagagattatgtcaaagctggcaggggagagtgaaagcaatctcagaaaggcatttgaagaagcagagaagaatgctccatctatcattttcattgatgaaattgattccattgcacccaagagagaaaagaccaatggagaagtagaacgtcgtattgtttcacagctactgactcttatggatggactcaaatctcgttcccatgttattgttatgggtgctacaaaccgaccaaacagcattgatcctgctcttcgaagatttggaaggtttgatcgggaaattgacattggagttcctgatgaagttggccggctcgaggttctccgcattcacactaagaacatgaaactagctgaagatgttaatttggaactcatttcaaaggatacccatggatatgttggtgctgatcttgctgccctttgcactgaagctgctcttcaatgcattcgtgagaagatggacatcatagatcttgaggatgagacaatagatgcagagatactgaactcgatggctgtcacaaatgaccatttcaagactgcacttggaacaagcaacccatctgctctccgtgaaactgttgttgaagtcccaaatgtctcttgggaagatattggtggcctggaaaatgttaagagggagctacaggagactgttcaatatccagtggagcatccagagaaatttgaaaagtttggcatgtctccttcaaagggtgttttgttttatggccctcctggctgtggcaagactttgttggccaaggcaattgccaatgaatgccaagctaacttcattagtgtgaagggtcctgaactgcttaccatgtggtttggtgagagtgaggccaatgtccgtgagatttttgacaaggctaggcagtctgctccatgtgtcctcttttttgatgagctcgactccattgctactcagagaggaagcagtgttggtgacgccggtggtgctgctgatagggtgttgaaccagctgcttactgagatggatggcatgaatgccaagaagacggtttttattatcggtgcaactaacagaccggacatcattgacccagccttgctgaggcctgggcgtcttgatcagcttatctatattcctctgcccgatgagcagtccaggcttcagatcttcaaagcctgtctcaggaagtctcctgtggccaaggatgttgacttgaatgctctcgccaaatacacccagggtttcagcggtgcagatatcacagagatctgccagcgcgcgtgcaagtatgccatcagggagaacatcgagaaggatatcgagagggagaggcgcagcaaagacaaccccgaggctatggaggaagacgaggtagacgacatcgctgagatcaaggctgctcacttcgaggagtccatgaagtacgcccgtcgcagcgtgagtgacgccgacatccgcaagtaccaggccttcgcccagacactccagcagtcccgcgggtttggcagcgagttccggttccccgaccaaccgacggcagctgctgctgcggccgatcccttcgcatccgctgcagcagcagctgacgatgatgacttatacagttaa

SEQ ID NO: 120218 - protein, 809 aa, Zea mays
MASQGEPSASASDPKEKKDFSTAILERKKSPNRLVVDEATNDDNSVVALHPDTMERLQLFRGDTVLLKGKKRKDTICIVLADETCEEPKVRMNKVVRQNLRVRLGDVVSVHQCQDVKYGKRVHILPIDDTVEGITGNLFDAFLKPYFLEAYRPLRKGDLFLVRGGMRSVEFKVIETDPAEYCIVAPDTEIFCDGEPIKREDEERLDEVGYDDVGGVRKQMAQIRELVELPLRHPQLFKSIGVKPPKGILLYGPPGSGKTLIARAVANETGAFFFLINGPEIMSKLAGESESNLRKAFEEAEKNAPSIIFIDEIDSIAPKREKTNGEVERRIVSQLLTLMDGLKSRSHVIVMGATNRPNSIDPALRRFGRFDREIDIGVPDEVGRLEVLRIHTKNMKLAEDVNLELISKDTHGYVGADLAALCTEAALQCIREKMDIIDLEDETIDAEILNSMAVTNDHFKTALGTSNPSALRETVVEVPNVSWEDIGGLENVKRELQETVQYPVEHPEKFEKFGMSPSKGVLFYGPPGCGKTLLAKAIANECQANFISVKGPELLTMWFGESEANVREIFDKARQSAPCVLFFDELDSIATQRGSSVGDAGGAADRVLNQLLTEMDGMNAKKTVFIIGATNRPDIIDPALLRPGRLDQLIYIPLPDEQSRLQIFKACLRKSPVAKDVDLNALAKYTQGFSGADITEICQRACKYAIRENIEKDIERERRSKDNPEAMEEDEVDDIAEIKAAHFEESMKYARRSVSDADIRKYQAFAQTLQQSRGFGSEFRFPDQPTAAAAAADPFASAAAAADDDDLYS

SEQ ID NO: 120219 - DNA, 2433 bp, Zea mays
  CDS (1)..(2433)
atggcgagccaaggggagccctcggcctctgcttccgatccgaaggagaagaaggacttctcgacggcgatcctggagaggaaaaagtcaccgaaccgccttgtcgtcgacgaggccaccaacgacgataactccgtcgtcgctctgcaccctgacaccatggagaggctgcagctcttccgcggcgacaccgtgctcctcaagggtaagaagaggaaagacactatttgcattgtccttgcggacgaaacctgtgaggagccaaaggttcggatgaacaaggttgtccgccagaacctaagggtgaggcttggtgatgtggtttctgtccaccagtgccaggatgtgaaatatgggaagcgtgtccacattcttccaattgatgatacagttgaaggcattacagggaacctgtttgatgccttcttgaaaccatatttcctagaagcatacaggccgttgaggaaaggagaccttttccttgtcagaggaggaatgagaagtgtggaattcaaagtgatagagactgatcctgctgaatattgtatcgttgcgccagatactgaaatattttgtgatggggagcctattaagagagaggatgaggagcgtcttgatgaagttggttatgatgatgttggtggagttagaaagcaaatggcccaaatcagagagcttgttgagcttccactacgccatcctcaacttttcaaatctattggtgtgaagccaccaaagggcatattgctgtacgggccacctggttccggaaagactcttattgctcgtgctgttgcaaatgagactggagcctttttcttcctgatcaatggtccagagattatgtcaaagctggcaggggagagtgaaagcaatctcagaaaggcatttgaagaagcagagaagaatgctccatctatcattttcattgatgaaattgattccattgcacccaagagagaaaagaccaatggagaagtagaacgtcgtattgtttcacagctactgactcttatggatggactcaaatctcgttcccatgttattgttatgggtgctacaaaccgaccaaacagcattgatcctgctcttcgaagatttggaaggtttgatcgggaaattgacattggagttcctgatgaagttggccggctcgaggttctccgcattcacactaagaacatgaaactagctgaagatgttaatttggaactcatttcaaaagatacccatggatacgttggtgctgatcttgctgccctttgcactgaggctgctcttcagtgcattcgtgagaagatggacatcatagatcttgaggatgagacaatcgatgcagagatattgaactcaatggctgttacaaatgaccatttcaagactgcgcttggaacaagcaacccatctgctcttcgtgaaactgttgtcgaagtcccaaatgtctcttgggaggatattggtgggctggagaatgtcaagagggagctccaggagactgttcaatatcctgtggagcatccggagaagttcgagaagtttggcatgtctccatccaaaggagttctgttctatggtcctcctggttgtggtaaaaccttgttggcaaaggcaattgccaacgagtgccaggctaacttcatcagtgtcaagggtcctgaattgcttaccatgtggtttggtgagagtgaagccaacgtccgcgaaatttttgataaggctcgccaatctgctccttgtgtcctcttctttgatgagcttgactcaattgcaactcagagaggaagtagtgtgggtgatgctggaggcgcggctgatagagtgcttaatcagctactgaccgagatggatggcatgaacgccaagaaaactgtgtttattattggtgctacaaacaggcctgacatcattgatcctgctcttctgaggccagggcgtcttgaccagctgatctacattccactgcctgatgagcagtctaggctccagatcttcaaggcctgcctaaggaagtcccctgtggcaaaggatgtggacctgaatgctcttgctaagtacacacaagggttcagtggagcagatatcacagaaatttgccagcgtgcgtgcaaatatgcaatcagagagaacattgagaaggacattgagagggaaaggcggatgaaggacaaccctgaggcgatggaggaagatgaagtggacgagattgccgagatcaaagcagctcacttcgaggagtctatgaagtatgctcggcgcagtgtcagtgatgctgatatccgcaagtaccaggcgttcgcccagacgttgcagcagtcccgtgggttcggcagcgagttccgcttctcagagcaatcggcgacagctagtgctgctgcagccgatccgtttgcttcggccggtgccgcggctgacgatgacgatctatacagctag

SEQ ID NO: 120220 - protein, 810 aa, Zea mays
MASQGEPSASASDPKEKKDFSTAILERKKSPNRLVVDEATNDDNSVVALHPDTMERLQLFRGDTVLLKGKKRKDTICIVLADETCEEPKVRMNKVVRQNLRVRLGDVVSVHQCQDVKYGKRVHILPIDDTVEGITGNLFDAFLKPYFLEAYRPLRKGDLFLVRGGMRSVEFKVIETDPAEYCIVAPDTEIFCDGEPIKREDEERLDEVGYDDVGGVRKQMAQIRELVELPLRHPQLFKSIGVKPPKGILLYGPPGSGKTLIARAVANETGAFFFLINGPEIMSKLAGESESNLRKAFEEAEKNAPSIIFIDEIDSIAPKREKTNGEVERRIVSQLLTLMDGLKSRSHVIVMGATNRPNSIDPALRRFGRFDREIDIGVPDEVGRLEVLRIHTKNMKLAEDVNLELISKDTHGYVGADLAALCTEAALQCIREKMDIIDLEDETIDAEILNSMAVTNDHFKTALGTSNPSALRETVVEVPNVSWEDIGGLENVKRELQETVQYPVEHPEKFEKFGMSPSKGVLFYGPPGCGKTLLAKAIANECQANFISVKGPELLTMWFGESEANVREIFDKARQSAPCVLFFDELDSIATQRGSSVGDAGGAADRVLNQLLTEMDGMNAKKTVFIIGATNRPDIIDPALLRPGRLDQLIYIPLPDEQSRLQIFKACLRKSPVAKDVDLNALAKYTQGFSGADITEICQRACKYAIRENIEKDIERERRMKDNPEAMEEDEVDEIAEIKAAHFEESMKYARRSVSDADIRKYQAFAQTLQQSRGFGSEFRFSEQSATASAAAADPFASAGAAADDDDLYS

SEQ ID NO: 120221 - DNA, 2433 bp, Zea mays
  CDS (1)..(2433)
atggcgagccaaggcgagccgtcttcctccgatccgaaggggaagaaggattactcgacggcgatcctggagaggaagaagtcgccgaaccggctggtggtcgacgaggccaccaatgatgacaactccgtcgtcgctctgcacccggacaccatggagaggctccagctcttccgcggtgacacggtcctgctcaagggtaagaagagaaaggacactatctgcattgtgctcgcagacgagacgtgtgaggagccaaaggtccggatgaacaaggttgtcaggaagaacttgagggttcggcttagtgatgtggtatctgtccatcaatgcccagatgtcaaatacgggaagcgtgtgcacatacttccaattgatgacaccattgaaggcatcactggcaacttatttgatgcctttctgaaaccatactttcttgaagcctatcgtcctttgaggaaaggagaccttttcctagtcaggggtggcatgagaagtgtagaattcaaagttatagagactgatcctgcagagtattgtattgttgcaccagatacagaaatattctgtgagggtgagcctattaagagggaggatgaggaaagactcgatgaagttggctatgatgatgttggtggagttagaaagcagatggcccaaatcagagaactggttgaacttccccttcgtcacccccagcttttcaagtctattggtgtgaagccaccaaagggcatattgctgtatgggcctcctggctctggcaagacccttattgctagagctgtagctaatgagacaggtgctttcttctttttgatcaatggaccagaaatcatgtcaaagctagcaggagaaagtgaaagcaacctcagaaaggcatttgaagaagctgagaaaaatgcaccttcaatcatttttattgatgagatagattccatagcacccaagagagagaagacccatggagaagttgaaaggcgtattgtttcacagctcttgactcttatggatggcctcaagtctcgtgcacatgttattgttatgggtgccacaaaccgtccaaacagtatcgatcctgctcttagaaggtttggtcggtttgatcgtgagattgatatcggtgttccagatgaagttgggcgccttgaggttcttcggattcacacgaaaaacatgaagcttgctgaagatgttgacttggagctcattgcgaaggatactcatggttatgttggtgctgatcttgctgccctttgtactgaagctgctcttcaatgcattcgtgagaagatggatattatagatcttgaggatgagacaatagatgctgagatactgaactctatggctgtttcaaatgatcatttcaagactgcacttgggacaagcaacccatctgctctgcgtgaaactgttgttgaagtgccaaatgtctcttgggaagatattggtggcctggaaaatgttaagagggagctacaggagactgttcaatatccagtggagcatccagagaaatttgaaaagtttggcatgtctcccttcaagggtgttttgttttatggccctcctggctgtggcaagactttgttggccaaggcaattgccaatgaatgccaagctaacttcattagtgtgaagggtcctgaactgcttaccatgtggtttggtgagagtgaggccaatgtccgtgagatttttgacaaggctaggcagtctgctccatgtgtcctcttttttgatgagctcgactccattgctactcagagaggaagcagtgttggtgacgccggtggtgctgctgatagggtgttgaaccagctgcttactgagatggatggcatgaatgccaagaagacggtttttattatcggtgcaactaacagaccggacatcattgacccagccttgctgaggcctgggcgtcttgatcagcttatctatattcctctgcccgatgagcagtccaggcttcagatcttcaaagcctgtctcaggaagtctcctgtggccaaggatgttgacttgaatgctctcgccaaatacacccagggtttcagcggtgcagatatcacagagatctgccagcgcgcgtgcaagtatgccatcagggagaacatcgagaaggatatcgagagggagaggcgcaggaaagacaaccccgaggccatggaggaagacgaggtagacgacatcgctgagatcaaggctgctcacttcgaggagtccatgaagtacgcccgtcgcagcgtgagtgacgccgacatccgcaagtaccaggccttcgcccagacactccagcagtcccgcgggtttggcagcgagttccggttccccgaccaaccgacggcagctgcaggctctgctggtgcggccgatcccttcgcatccgctgcagcagcagctgacgatgatgacttatacagttaa

SEQ ID NO: 120222 - protein, 810 aa, Zea mays
MASQGEPSSSDPKGKKDYSTAILERKKSPNRLVVDEATNDDNSVVALHPDTMERLQLFRGDTVLLKGKKRKDTICIVLADETCEEPKVRMNKVVRKNLRVRLSDVVSVHQCPDVKYGKRVHILPIDDTIEGITGNLFDAFLKPYFLEAYRPLRKGDLFLVRGGMRSVEFKVIETDPAEYCIVAPDTEIFCEGEPIKREDEERLDEVGYDDVGGVRKQMAQIRELVELPLRHPQLFKSIGVKPPKGILLYGPPGSGKTLIARAVANETGAFFFLINGPEIMSKLAGESESNLRKAFEEAEKNAPSIIFIDEIDSIAPKREKTHGEVERRIVSQLLTLMDGLKSRAHVIVMGATNRPNSIDPALRRFGRFDREIDIGVPDEVGRLEVLRIHTKNMKLAEDVDLELIAKDTHGYVGADLAALCTEAALQCIREKMDIIDLEDETIDAEILNSMAVSNDHFKTALGTSNPSALRETVVEVPNVSWEDIGGLENVKRELQETVQYPVEHPEKFEKFGMSPFKGVLFYGPPGCGKTLLAKAIANECQANFISVKGPELLTMWFGESEANVREIFDKARQSAPCVLFFDELDSIATQRGSSVGDAGGAADRVLNQLLTEMDGMNAKKTVFIIGATNRPDIIDPALLRPGRLDQLIYIPLPDEQSRLQIFKACLRKSPVAKDVDLNALAKYTQGFSGADITEICQRACKYAIRENIEKDIERERRRKDNPEAMEEDEVDDIAEIKAAHFEESMKYARRSVSDADIRKYQAFAQTLQQSRGFGSEFRFPDQPTAAAGSAGAADPFASAAAAADDDDLYS

SEQ ID NO: 120223 - DNA, 2433 bp, Zea mays
  CDS (1)..(2433)
atggcgagccaaggcgagccgtcttcctccgatccgaaggggaagaaggattactctacggcgatcctggagaggaagaagtcgccgaaccggctggtggtcgacgaggccaccaatgatgacaactctgtcgtcgctctgcacccagacaccatggagaggctccagctcttccgcggtgacactgtcctgatcaagggtaagaagagaaaggacactgtctgcattgtgcttgcagatgagacatgtgaggagccaaaggttcggatgaacaagattgtcaggaagaacttgagggtacggcttggtgatgttgtatctgtccatcaatgcccagatgtcaaatacgggaagcgtgtgcacatacttccaattgatgacaccattgaaggcatcactggcaatttgtttgatgcctttctaaaaccatacttccttgaagcctatcgtcctttgaggaaaggagaccttttcctagtcaggggtggcatgagaagtgtagaattcaaagtcatagagactgatcctgcagagtattgtatcgttgcaccagatacagaaatattttgtgggggtgagcctattaagagggaggacgaggaaagactcgatgaggttggctatgacgatgttggtggagttagaaagcagatggcccaaatcagggaactggttgaacttccattgcgtcatccccagcttttcaagtctattggtgtgaaaccaccaaagggcatattgctgtttgggcctcctggctccggcaagacccttattgctagagctgtagctaatgagacaggtgctttcttctttttgatcaatggaccagaaatcatgtcaaagctagcaggagaaagtgaaagcaatctcagaaaggcatttgaagaagctgagaaaaatgcaccttccatcatttttattgatgagatagattccatagcacctaagagagagaagacccatggagaagttgaaaggcgtattgtttcacagctcttgactcttatggatgggctcaagtctcgtgcacatgtgattgttatgggtgccaccaaccgtccaaacagtatcgatcctgctcttagaaggtttggtaggtttgatcgcgagattgatattggtgttccagatgaagttggccgccttgaggttcttcggattcacacgaaaaacatgaagctggctgaagatgttgacttggagctcattgcgaaggatacccatgggtatgttggtgctgatcttgctgccctttgtactgaagctgctcttcaatgcattcgtgagaagatggatattatagaccttgaggatgagaccatagatgctgagatactgaactctatggctgtctcaaatgaccatttcaagaccgcacttggaacaagcaacccatctgctctgcgtgaaactgttgttgaagtcccaaatgtctcttgggaagatattggtggtctggaaaatgttaagagggagctacaggagactgttcaatatccagtggagcatccagataaatttgaaaagtttggcatgtctccttcgaagggcgttttgttttatggccctcctggctgtggcaagactctgttggccaaggcaattgctaacgaatgccaggctaacttcatcagtgtgaagggtcctgaactgctcaccatgtggtttggtgagagcgaggccaatgtccgtgagatttttgacaaggctaggcagtctgctccgtgtgtcctcttcttcgatgagctcgactccattgctactcagagaggaagcagtgttggtgacgcgggcggtgctgctgacagggtgttgaaccagctgcttactgagatggatggcatgaatgccaagaagacggttttcattatcggtgcgactaacagaccagatatcattgaccctgccttgctgaggccaggacgcctcgatcagcttatctacattcctctgcccgatgagcagtccaggcttcagatcttcaaagcctgcctcaggaagtctcctgtggctaaggacgttgacttgcatgctcttgccaagtacacccagggtttcagcggagcagatatcaccgagatctgccagcgtgcgtgcaagtatgccatcagggagaacatcgagaaggacatcgagcgggagaggcgcaggaaggacaacccagaggccatggaggaagacgaggtggacgacattgccgagatcatggctgcccacttcgaggagtccatgaagtacgcccgccgcagtgtcagtgatgccgacatccgcaagtaccaggccttcgcccagacactccagcagtcccgtgggtttggcagcgagttccggttctccgaccaaccgacggcagctgcaggctctgccggtgcggccgacccctttgcatccgctgcggctgcagccgacgatgacgacttatacagctaa

SEQ ID NO: 120224 - protein, 810 aa, Zea mays
MASQGEPSSSDPKGKKDYSTAILERKKSPNRLVVDEATNDDNSVVALHPDTMERLQLFRGDTVLIKGKKRKDTVCIVLADETCEEPKVRMNKIVRKNLRVRLGDVVSVHQCPDVKYGKRVHILPIDDTIEGITGNLFDAFLKPYFLEAYRPLRKGDLFLVRGGMRSVEFKVIETDPAEYCIVAPDTEIFCGGEPIKREDEERLDEVGYDDVGGVRKQMAQIRELVELPLRHPQLFKSIGVKPPKGILLFGPPGSGKTLIARAVANETGAFFFLINGPEIMSKLAGESESNLRKAFEEAEKNAPSIIFIDEIDSIAPKREKTHGEVERRIVSQLLTLMDGLKSRAHVIVMGATNRPNSIDPALRRFGRFDREIDIGVPDEVGRLEVLRIHTKNMKLAEDVDLELIAKDTHGYVGADLAALCTEAALQCIREKMDIIDLEDETIDAEILNSMAVSNDHFKTALGTSNPSALRETVVEVPNVSWEDIGGLENVKRELQETVQYPVEHPDKFEKFGMSPSKGVLFYGPPGCGKTLLAKAIANECQANFISVKGPELLTMWFGESEANVREIFDKARQSAPCVLFFDELDSIATQRGSSVGDAGGAADRVLNQLLTEMDGMNAKKTVFIIGATNRPDIIDPALLRPGRLDQLIYIPLPDEQSRLQIFKACLRKSPVAKDVDLHALAKYTQGFSGADITEICQRACKYAIRENIEKDIERERRRKDNPEAMEEDEVDDIAEIMAAHFEESMKYARRSVSDADIRKYQAFAQTLQQSRGFGSEFRFSDQPTAAAGSAGAADPFASAAAAADDDDLYS

SEQ ID NO: 120225 - DNA, 25 bp, Artificial sequence
  primer
atgggtgaagaacataaaccacttt

SEQ ID NO: 120226 - DNA, 26 bp, Artificial sequence
  primer
ctaactatacaaatcatcatcttcct

SEQ ID NO: 120227 - protein, 1006 aa, Artificial sequence
  consensus sequence
  Variant (2)..(2): Xaa in position 2 is any amino acid
  Variant (4)..(5): Xaa in position 4 to 5 is any amino acid
  Variant (7)..(22): Xaa in position 7 to 22 is any amino acid
  Variant (23)..(26): Xaa in position 23 to 26 is any or no amino acid
  Variant (28)..(31): Xaa in position 28 to 31 is any amino acid
  Variant (34)..(37): Xaa in position 34 to 37 is any amino acid
  Variant (38)..(38): Xaa in position 38 is any or no amino acid
  Variant (40)..(58): Xaa in position 40 to 58 is any amino acid
  Variant (59)..(64): Xaa in position 59 to 64 is any or no amino acid
  Variant (66)..(70): Xaa in position 66 to 70 is any amino acid
  Variant (72)..(72): Xaa in position 72 is any amino acid
  Variant (74)..(75): Xaa in position 74 to 75 is any amino acid
  Variant (77)..(79): Xaa in position 77 to 79 is any amino acid
  Variant (81)..(81): Xaa in position 81 is any amino acid
  Variant (83)..(98): Xaa in position 83 to 98 is any amino acid
  Variant (99)..(100): Xaa in position 99 to 100 is any or no amino acid
  Variant (102)..(118): Xaa in position 102 to 118 is any amino acid
  Variant (119)..(128): Xaa in position 119 to 128 is any or no amino acid
  Variant (131)..(133): Xaa in position 131 to 133 is any amino acid
  Variant (136)..(143): Xaa in position 136 to 143 is any amino acid
  Variant (144)..(179): Xaa in position 144 to 179 is any or no amino acid
  Variant (181)..(181): Xaa in position 181 is any amino acid
  Variant (183)..(186): Xaa in position 183 to 186 is any amino acid
  Variant (188)..(196): Xaa in position 188 to 196 is any amino acid
  Variant (197)..(201): Xaa in position 197 to 201 is any or no amino acid
  Variant (203)..(208): Xaa in position 203 to 208 is any amino acid
  Variant (209)..(210): Xaa in position 209 to 210 is any or no amino acid
  Variant (212)..(219): Xaa in position 212 to 219 is any amino acid
  Variant (220)..(231): Xaa in position 220 to 231 is any or no amino acid
  Variant (233)..(233): Xaa in position 233 is any amino acid
  Variant (235)..(235): Xaa in position 235 is any amino acid
  Variant (237)..(237): Xaa in position 237 is any amino acid
  Variant (240)..(247): Xaa in position 240 to 247 is any amino acid
  Variant (250)..(251): Xaa in position 250 to 251 is any amino acid
  Variant (256)..(256): Xaa in position 256 is any amino acid
  Variant (259)..(259): Xaa in position 259 is any amino acid
  Variant (262)..(264): Xaa in position 262 to 264 is any amino acid
  Variant (266)..(267): Xaa in position 266 to 267 is any amino acid
  Variant (270)..(270): Xaa in position 270 is any amino acid
  Variant (272)..(272): Xaa in position 272 is any amino acid
  Variant (274)..(275): Xaa in position 274 to 275 is any amino acid
  Variant (280)..(280): Xaa in position 280 is any amino acid
  Variant (285)..(285): Xaa in position 285 is any amino acid
  Variant (287)..(287): Xaa in position 287 is any amino acid
  Variant (293)..(294): Xaa in position 293 to 294 is any amino acid
  Variant (296)..(296): Xaa in position 296 is any amino acid
  Variant (298)..(299): Xaa in position 298 to 299 is any amino acid
  Variant (309)..(310): Xaa in position 309 to 310 is any amino acid
  Variant (315)..(316): Xaa in position 315 to 316 is any amino acid
  Variant (319)..(320): Xaa in position 319 to 320 is any amino acid
  Variant (326)..(326): Xaa in position 326 is any amino acid
  Variant (328)..(328): Xaa in position 328 is any amino acid
  Variant (330)..(330): Xaa in position 330 is any amino acid
  Variant (339)..(339): Xaa in position 339 is any amino acid
  Variant (345)..(348): Xaa in position 345 to 348 is any amino acid
  Variant (355)..(355): Xaa in position 355 is any amino acid
  Variant (357)..(357): Xaa in position 357 is any amino acid
  Variant (366)..(368): Xaa in position 366 to 368 is any amino acid
  Variant (370)..(371): Xaa in position 370 to 371 is any amino acid
  Variant (373)..(373): Xaa in position 373 is any amino acid
  Variant (375)..(376): Xaa in position 375 to 376 is any amino acid
  Variant (382)..(384): Xaa in position 382 to 384 is any amino acid
  Variant (391)..(391): Xaa in position 391 is any amino acid
  Variant (399)..(399): Xaa in position 399 is any amino acid
  Variant (402)..(402): Xaa in position 402 is any amino acid
  Variant (405)..(406): Xaa in position 405 to 406 is any amino acid
  Variant (409)..(409): Xaa in position 409 is any amino acid
  Variant (411)..(411): Xaa in position 411 is any amino acid
  Variant (413)..(413): Xaa in position 413 is any amino acid
  Variant (417)..(418): Xaa in position 417 to 418 is any amino acid
  Variant (420)..(420): Xaa in position 420 is any amino acid
  Variant (422)..(425): Xaa in position 422 to 425 is any amino acid
  Variant (426)..(490): Xaa in position 426 to 490 is any or no amino acid
  Variant (492)..(494): Xaa in position 492 to 494 is any amino acid
  Variant (496)..(497): Xaa in position 496 to 497 is any amino acid
  Variant (501)..(501): Xaa in position 501 is any amino acid
  Variant (508)..(508): Xaa in position 508 is any amino acid
  Variant (510)..(511): Xaa in position 510 to 511 is any amino acid
  Variant (515)..(518): Xaa in position 515 to 518 is any amino acid
  Variant (520)..(524): Xaa in position 520 to 524 is any amino acid
  Variant (525)..(526): Xaa in position 525 to 526 is any or no amino acid
  Variant (529)..(530): Xaa in position 529 to 530 is any amino acid
  Variant (531)..(533): Xaa in position 531 to 533 is any or no amino acid
  Variant (535)..(536): Xaa in position 535 to 536 is any amino acid
  Variant (538)..(538): Xaa in position 538 is any amino acid
  Variant (540)..(543): Xaa in position 540 to 543 is any amino acid
  Variant (546)..(548): Xaa in position 546 to 548 is any amino acid
  Variant (550)..(551): Xaa in position 550 to 551 is any amino acid
  Variant (554)..(557): Xaa in position 554 to 557 is any amino acid
  Variant (564)..(566): Xaa in position 564 to 566 is any amino acid
  Variant (567)..(567): Xaa in position 567 is any or no amino acid
  Variant (569)..(569): Xaa in position 569 is any amino acid
  Variant (571)..(571): Xaa in position 571 is any amino acid
  Variant (573)..(573): Xaa in position 573 is any amino acid
  Variant (575)..(575): Xaa in position 575 is any amino acid
  Variant (581)..(583): Xaa in position 581 to 583 is any amino acid
  Variant (585)..(586): Xaa in position 585 to 586 is any amino acid
  Variant (588)..(588): Xaa in position 588 is any amino acid
  Variant (590)..(590): Xaa in position 590 is any amino acid
  Variant (592)..(593): Xaa in position 592 to 593 is any amino acid
  Variant (595)..(597): Xaa in position 595 to 597 is any amino acid
  Variant (599)..(600): Xaa in position 599 to 600 is any amino acid
  Variant (602)..(604): Xaa in position 602 to 604 is any amino acid
  Variant (606)..(607): Xaa in position 606 to 607 is any amino acid
  Variant (609)..(610): Xaa in position 609 to 610 is any amino acid
  Variant (612)..(612): Xaa in position 612 is any amino acid
  Variant (614)..(615): Xaa in position 614 to 615 is any amino acid
  Variant (620)..(620): Xaa in position 620 is any amino acid
  Variant (629)..(629): Xaa in position 629 is any amino acid
  Variant (631)..(631): Xaa in position 631 is any amino acid
  Variant (633)..(634): Xaa in position 633 to 634 is any amino acid
  Variant (639)..(640): Xaa in position 639 to 640 is any amino acid
  Variant (645)..(645): Xaa in position 645 is any amino acid
  Variant (647)..(648): Xaa in position 647 to 648 is any amino acid
  Variant (650)..(650): Xaa in position 650 is any amino acid
  Variant (655)..(657): Xaa in position 655 to 657 is any amino acid
  Variant (659)..(660): Xaa in position 659 to 660 is any amino acid
  Variant (662)..(662): Xaa in position 662 is any amino acid
  Variant (666)..(667): Xaa in position 666 to 667 is any amino acid
  Variant (670)..(672): Xaa in position 670 to 672 is any amino acid
  Variant (674)..(674): Xaa in position 674 is any amino acid
  Variant (677)..(677): Xaa in position 677 is any amino acid
  Variant (679)..(679): Xaa in position 679 is any amino acid
  Variant (682)..(693): Xaa in position 682 to 693 is any amino acid
  Variant (694)..(697): Xaa in position 694 to 697 is any or no amino acid
  Variant (699)..(700): Xaa in position 699 to 700 is any amino acid
  Variant (703)..(703): Xaa in position 703 is any amino acid
  Variant (710)..(715): Xaa in position 710 to 715 is any amino acid
  Variant (716)..(716): Xaa in position 716 is any or no amino acid
  Variant (718)..(719): Xaa in position 718 to 719 is any amino acid
  Variant (721)..(721): Xaa in position 721 is any amino acid
  Variant (728)..(729): Xaa in position 728 to 729 is any amino acid
  Variant (733)..(733): Xaa in position 733 is any amino acid
  Variant (739)..(739): Xaa in position 739 is any amino acid
  Variant (741)..(741): Xaa in position 741 is any amino acid
  Variant (744)..(745): Xaa in position 744 to 745 is any amino acid
  Variant (747)..(747): Xaa in position 747 is any amino acid
  Variant (750)..(752): Xaa in position 750 to 752 is any amino acid
  Variant (754)..(755): Xaa in position 754 to 755 is any amino acid
  Variant (757)..(764): Xaa in position 757 to 764 is any amino acid
  Variant (766)..(768): Xaa in position 766 to 768 is any amino acid
  Variant (769)..(769): Xaa in position 769 is any or no amino acid
  Variant (773)..(775): Xaa in position 773 to 775 is any amino acid
  Variant (777)..(778): Xaa in position 777 to 778 is any amino acid
  Variant (780)..(780): Xaa in position 780 is any amino acid
  Variant (782)..(783): Xaa in position 782 to 783 is any amino acid
  Variant (787)..(793): Xaa in position 787 to 793 is any amino acid
  Variant (795)..(797): Xaa in position 795 to 797 is any amino acid
  Variant (799)..(799): Xaa in position 799 is any amino acid
  Variant (801)..(812): Xaa in position 801 to 812 is any amino acid
  Variant (813)..(986): Xaa in position 813 to 986 is any or no amino acid
  Variant (988)..(993): Xaa in position 988 to 993 is any amino acid
  Variant (994)..(996): Xaa in position 994 to 996 is any or no amino acid
  Variant (998)..(1005): Xaa in position 998 to 1005 is any amino acid
LXVXXAXXXXXXXXXXXXXXXXXXXXLXXXXGDXXXXXGXXXXXXXXXXXXXXXXXXXXXXXXXRXXXXXRXNXXVXXXDXVXXXXXXXXXXXXXXXXXXPXXXXXXXXXXXXXXXXXXXXXXXXXXXRPXXXGDXXXXXXXXXXXXXXXXXXXXXXXXXXXXXXXXXXXXXXXXXXXXFXVXXXXPXXXXXXXXXXXXXXTXXXXXXXXPXXXXXXXXXXXXXXXXXXXXVXYXDXGGXXXXXXXXREXXELPLXHPXLFXXXGXXPPXGXLXXGPPGXGKTLXAXAVANEXXAXFXXINGPEIMSKXXGESEXXLRXXFEEAEXNXPXIIFIDEIDXIAPKRXXXXGEVERRXVXQLLTLMDGXXXRXXVXVXXATNRPXXXDPALRRXGRFDREIXIGXPDXXGRXEXLXIHTXXMXLXXXXXXXXXXXXXXXXXXXXXXXXXXXXXXXXXXXXXXXXXXXXXXXXXXXXXXXXXXXXXXXXXXXXXLXXXAXXTHGXVGADLAXLXXEAAXXXXRXXXXXXXIDXXXXXIXXEXLXXXXVTXXXFXXALXXXXPSALREXXXXEXPXVXWXDIGGLXXXKXXLXEXVXXPXXXPXXFXXXGXXPXXGXLXXGPPGXGKTLLAKAXAXEXXANFIXXKGPEXLXXWXGESEXXXRXXFXKARXXAPXXXFXDEXDXIAXXXXXXXXXXXXXXXXRXXNQXLTEMDGXXXXXXXVXXIXATNRPDXXDPAXLRPGRXDXLIXXPXPDXXXRXXIXXXXXXXXPXXXXVDLXXXAXXTXGXXGADXXXXXXXAXXXAXRXXXXXXXXXXXXXXXXXXXXXXXXXXXXXXXXXXXXXXXXXXXXXXXXXXXXXXXXXXXXXXXXXXXXXXXXXXXXXXXXXXXXXXXXXXXXXXXXXXXXXXXXXXXXXXXXXXXXXXXXXXXXXXXXXXXXXXXXXXXXXXXXXXXXXXXXXXXXXXXXXXXXXXXXXXXXXXXXXXXXXXXXXXFXXXXXXXXXSXXXXXXXXY

SEQ ID NO: 120228 - protein, 59 aa, Artificial sequence
  protein pattern
  Variant (2)..(5): Xaa in position 2 to 5 is any amino acid
  Variant (10)..(10): Xaa in position 10 is Cys, Thr or Val
  Variant (15)..(15): Xaa in position 15 is any amino acid
  Variant (19)..(19): Xaa in position 19 is Ala, Ile or Val
  Variant (21)..(21): Xaa in position 21 is any amino acid
  Variant (23)..(23): Xaa in position 23 is Ala, Cys, Ser or Val
  Variant (24)..(24): Xaa in position 24 is any amino acid
  Variant (25)..(25): Xaa in position 25 is Ala, Ser or Val
  Variant (29)..(29): Xaa in position 29 is Ala, Ser or Thr
  Variant (30)..(30): Xaa in position 30 is Ala, Ile or Val
  Variant (31)..(31): Xaa in position 31 is Lys or Arg
  Variant (33)..(33): Xaa in position 33 is Gly, Pro or Ser
  Variant (34)..(34): Xaa in position 34 is Ala, Asp, Glu or Gln
  Variant (35)..(35): Xaa in position 35 is Ile, Leu or Val
  Variant (36)..(36): Xaa in position 36 is Phe or Leu
  Variant (37)..(37): Xaa in position 37 is Asn, Ser or Thr
  Variant (38)..(38): Xaa in position 38 is any amino acid
  Variant (39)..(39): Xaa in position 39 is Phe, Trp or Tyr
  Variant (40)..(40): Xaa in position 40 is any amino acid
  Variant (43)..(43): Xaa in position 43 is Ser or Thr
  Variant (45)..(46): Xaa in position 45 to 46 is any amino acid
  Variant (47)..(47): Xaa in position 47 is Ile or Val
  Variant (48)..(48): Xaa in position 48 is any amino acid
  Variant (49)..(49): Xaa in position 49 is Asp, Glu or Lys
  Variant (50)..(50): Xaa in position 50 is any amino acid
  Variant (52)..(56): Xaa in position 52 to 56 is any amino acid
  Variant (57)..(57): Xaa in position 57 is any or no amino acid
  Variant (59)..(59): Xaa in position 59 is Ala, Pro or Ser
GXXXXGPPGXGKTLXAKAXAXEXXXNFIXXXGXXXXXXXXGEXEXXXXXXFXXXXXXAX

SEQ ID NO: 120229 - protein, 60 aa, Artificial sequence
  protein pattern
  Variant (2)..(3): Xaa in position 2 to 3 is any amino acid
  Variant (6)..(6): Xaa in position 6 is any amino acid
  Variant (9)..(10): Xaa in position 9 to 10 is any amino acid
  Variant (11)..(11): Xaa in position 11 is Ile or Leu
  Variant (13)..(13): Xaa in position 13 is Ile or Val
  Variant (14)..(14): Xaa in position 14 is any amino acid
  Variant (17)..(17): Xaa in position 17 is Lys or Arg
  Variant (19)..(19): Xaa in position 19 is Ile or Val
  Variant (20)..(20): Xaa in position 20 is Ile or Leu
  Variant (21)..(21): Xaa in position 21 is Leu or Met
  Variant (22)..(22): Xaa in position 22 is any amino acid
  Variant (27)..(27): Xaa in position 27 is Asn, Ser, Thr or Val
  Variant (31)..(31): Xaa in position 31 is Ile, Leu, Met or Val
  Variant (32)..(32): Xaa in position 32 is Ile, Leu or Met
  Variant (34)..(34): Xaa in position 34 is Lys or Arg
  Variant (36)..(36): Xaa in position 36 is Ile, Leu or Val
  Variant (38)..(38): Xaa in position 38 is Ala, Asn or Ser
  Variant (40)..(41): Xaa in position 40 to 41 is any amino acid
  Variant (43)..(43): Xaa in position 43 is any amino acid
  Variant (45)..(46): Xaa in position 45 to 46 is any amino acid
  Variant (47)..(47): Xaa in position 47 is Ile or Val
  Variant (48)..(48): Xaa in position 48 is Asn or Ser
  Variant (52)..(52): Xaa in position 52 is Ile or Val
  Variant (53)..(53): Xaa in position 53 is Ile, Met or Val
  Variant (55)..(57): Xaa in position 55 to 57 is any amino acid
  Variant (59)..(59): Xaa in position 59 is Glu or Gln
  Variant (60)..(60): Xaa in position 60 is Ser or Thr
PXXHPXLFXXXGXXPPXGXXXXGPPGXGKTXXAXAXAXEXXAXFXXXXGPEXXSXXXGXX

SEQ ID NO: 120230 - protein, 60 aa, Artificial sequence
  protein pattern
  Variant (2)..(2): Xaa in position 2 is any amino acid
  Variant (8)..(8): Xaa in position 8 is Ala, Asp, Glu or Ser
  Variant (9)..(9): Xaa in position 9 is any amino acid
  Variant (10)..(10): Xaa in position 10 is Ala, Thr or Val
  Variant (11)..(11): Xaa in position 11 is any amino acid
  Variant (16)..(16): Xaa in position 16 is Lys or Arg
  Variant (18)..(18): Xaa in position 18 is Ile, Leu or Val
  Variant (20)..(20): Xaa in position 20 is Ala or Ser
  Variant (24)..(24): Xaa in position 24 is Ala, Ser or Thr
  Variant (29)..(29): Xaa in position 29 is Ile, Leu or Met
  Variant (30)..(31): Xaa in position 30 to 31 is any amino acid
  Variant (32)..(32): Xaa in position 32 is Arg or Ser
  Variant (33)..(35): Xaa in position 33 to 35 is any amino acid
  Variant (36)..(36): Xaa in position 36 is Ile or Val
  Variant (38)..(38): Xaa in position 38 is Ile or Met
  Variant (39)..(39): Xaa in position 39 is Ala or Gly
  Variant (44)..(44): Xaa in position 44 is Ile, Leu or Pro
  Variant (45)..(45): Xaa in position 45 is Asp, Glu, Asn or Ser
  Variant (46)..(46): Xaa in position 46 is Ala or Ser
  Variant (47)..(47): Xaa in position 47 is Ile, Leu or Val
  Variant (49)..(49): Xaa in position 49 is any amino acid
  Variant (54)..(54): Xaa in position 54 is any amino acid
DXIAPKRXXXXGEVEXRXVXQLLXLMDGXXXXXXXXVXXATNRXXXXDXALRRXGRFDRE

SEQ ID NO: 120231 - protein, 40 aa, Artificial sequence
  protein pattern
  Variant (2)..(2): Xaa in position 2 is any amino acid
  Variant (3)..(3): Xaa in position 3 is any or no amino acid
  Variant (10)..(10): Xaa in position 10 is any amino acid
  Variant (11)..(11): Xaa in position 11 is Ile, Leu, Met or Val
  Variant (13)..(13): Xaa in position 13 is Pro or Ser
  Variant (15)..(15): Xaa in position 15 is any or no amino acid
  Variant (17)..(17): Xaa in position 17 is any or no amino acid
  Variant (19)..(19): Xaa in position 19 is Ala or Pro
  Variant (22)..(22): Xaa in position 22 is Phe or Leu
  Variant (23)..(23): Xaa in position 23 is Asp or Glu
  Variant (24)..(25): Xaa in position 24 to 25 is any amino acid
  Variant (26)..(26): Xaa in position 26 is Ile, Met or Val
  Variant (27)..(27): Xaa in position 27 is any amino acid
  Variant (28)..(28): Xaa in position 28 is Ile or Val
  Variant (29)..(30): Xaa in position 29 to 30 is any amino acid
  Variant (32)..(32): Xaa in position 32 is Asp or Gly
  Variant (33)..(34): Xaa in position 33 to 34 is any amino acid
  Variant (35)..(35): Xaa in position 35 is Ala, Glu, Gly or Ser
  Variant (37)..(38): Xaa in position 37 to 38 is any amino acid
  Variant (40)..(40): Xaa in position 40 is Phe or Leu
IXXATNRPDXXDXAXLXRXGRXXXXXXXXXPXXXXRXXIX

SEQ ID NO: 120232 - protein, 31 aa, Artificial sequence
  protein pattern
  Variant (2)..(2): Xaa in position 2 is any amino acid
  Variant (3)..(5): Xaa in position 3 to 5 is any or no amino acid
  Variant (7)..(7): Xaa in position 7 is any amino acid
  Variant (9)..(9): Xaa in position 9 is Ile or Val
  Variant (13)..(13): Xaa in position 13 is Asp, Glu, Gly, Asn or Gln
  Variant (14)..(14): Xaa in position 14 is any amino acid
  Variant (15)..(15): Xaa in position 15 is Ala, Ile, Leu or Val
  Variant (17)..(18): Xaa in position 17 to 18 is any amino acid
  Variant (20)..(20): Xaa in position 20 is any amino acid
  Variant (22)..(22): Xaa in position 22 is any amino acid
  Variant (24)..(24): Xaa in position 24 is Glu, Gln or Ser
  Variant (25)..(25): Xaa in position 25 is any amino acid
  Variant (27)..(27): Xaa in position 27 is Leu or Val
  Variant (28)..(29): Xaa in position 28 to 29 is any amino acid
  Variant (31)..(31): Xaa in position 31 is Asp, Glu or Lys
VXXXXWXDXGGLXXXKXXLXEXVXXPXXXPX

SEQ ID NO: 120233 - protein, 38 aa, Artificial sequence
  protein pattern
  Variant (2)..(2): Xaa in position 2 is any amino acid
  Variant (4)..(4): Xaa in position 4 is any amino acid
  Variant (5)..(5): Xaa in position 5 is any or no amino acid
  Variant (7)..(7): Xaa in position 7 is any or no amino acid
  Variant (9)..(9): Xaa in position 9 is Asp, Glu, Asn or Ser
  Variant (11)..(12): Xaa in position 11 to 12 is any amino acid
  Variant (13)..(13): Xaa in position 13 is Phe, Ile, Leu or Val
  Variant (14)..(14): Xaa in position 14 is Ala, Gly or Ser
  Variant (15)..(16): Xaa in position 15 to 16 is any amino acid
  Variant (17)..(17): Xaa in position 17 is Ser or Thr
  Variant (18)..(18): Xaa in position 18 is any amino acid
  Variant (20)..(20): Xaa in position 20 is Phe, His or Tyr
  Variant (21)..(21): Xaa in position 21 is Ser, Thr or Val
  Variant (23)..(23): Xaa in position 23 is Ala or Ser
  Variant (25)..(25): Xaa in position 25 is Ile, Leu or Val
  Variant (26)..(26): Xaa in position 26 is any amino acid
  Variant (27)..(27): Xaa in position 27 is Ala, Asn or Ser
  Variant (28)..(28): Xaa in position 28 is Ile, Leu or Val
  Variant (29)..(29): Xaa in position 29 is Ala, Cys or Val
  Variant (30)..(30): Xaa in position 30 is any amino acid
  Variant (33)..(33): Xaa in position 33 is Ala, Gly, Ser or Val
  Variant (34)..(34): Xaa in position 34 is Ile, Leu or Met
  Variant (35)..(37): Xaa in position 35 to 37 is any amino acid
MXLXXDXVXLXXXXXXXXGXXGXDXXXXXXEAXXXXXR

SEQ ID NO: 120234 - protein, 30 aa, Artificial sequence
  protein pattern
  Variant (2)..(3): Xaa in position 2 to 3 is any amino acid
  Variant (4)..(5): Xaa in position 4 to 5 is any or no amino acid
  Variant (7)..(7): Xaa in position 7 is any amino acid
  Variant (9)..(9): Xaa in position 9 is Phe or Tyr
  Variant (10)..(10): Xaa in position 10 is Ser, Thr or Val
  Variant (14)..(14): Xaa in position 14 is Ile or Leu
  Variant (15)..(16): Xaa in position 15 to 16 is any amino acid
  Variant (17)..(17): Xaa in position 17 is Ile, Leu or Val
  Variant (18)..(18): Xaa in position 18 is Ala, Cys, Thr or Val
  Variant (19)..(19): Xaa in position 19 is Gln or Arg
  Variant (20)..(20): Xaa in position 20 is Glu or Arg
  Variant (21)..(21): Xaa in position 21 is Ala or Ser
  Variant (22)..(22): Xaa in position 22 is Ala, Cys, Gly, Thr or Val
  Variant (23)..(25): Xaa in position 23 to 25 is any amino acid
  Variant (26)..(26): Xaa in position 26 is Ile, Leu, Met or Val
  Variant (27)..(27): Xaa in position 27 is Lys or Arg
  Variant (28)..(29): Xaa in position 28 to 29 is any amino acid
  Variant (30)..(30): Xaa in position 30 is Phe, Ile, Leu, Met or Val
AXXXXTXGXXGADXXXXXXXXXXXXXXXXX

SEQ ID NO: 120235 - protein, 21 aa, Artificial sequence
  protein pattern
  Variant (3)..(3): Xaa in position 3 is Glu or Lys
  Variant (4)..(4): Xaa in position 4 is Ala, Ile or Val
  Variant (6)..(6): Xaa in position 6 is any amino acid
  Variant (7)..(7): Xaa in position 7 is Glu or Lys
  Variant (9)..(9): Xaa in position 9 is any amino acid
  Variant (10)..(10): Xaa in position 10 is Glu or Lys
  Variant (11)..(11): Xaa in position 11 is Asp, Glu, Asn or Thr
  Variant (12)..(12): Xaa in position 12 is Ala, Gly or Ser
  Variant (14)..(14): Xaa in position 14 is Ala, Pro, Ser or Thr
  Variant (21)..(21): Xaa in position 21 is Ile or Leu
LRXXFXXAXXXXPXIIFIDEX

SEQ ID NO: 120236 - protein, 18 aa, Artificial sequence
  protein pattern
  Variant (2)..(2): Xaa in position 2 is Ile or Val
  Variant (5)..(6): Xaa in position 5 to 6 is any amino acid
  Variant (7)..(7): Xaa in position 7 is Asp, Glu, Lys or Arg
  Variant (8)..(8): Xaa in position 8 is any amino acid
  Variant (9)..(9): Xaa in position 9 is Ile, Leu, Met or Val
  Variant (10)..(11): Xaa in position 10 to 11 is any amino acid
  Variant (12)..(12): Xaa in position 12 is Ile, Leu or Val
  Variant (13)..(13): Xaa in position 13 is Lys or Arg
  Variant (15)..(15): Xaa in position 15 is Ile, Leu, Met or Val
  Variant (16)..(16): Xaa in position 16 is Ile or Val
DXGGXXXXXXXXXEXXEL

SEQ ID NO: 120237 - protein, 16 aa, Artificial sequence
  protein pattern
  Variant (2)..(6): Xaa in position 2 to 6 is any or no amino acid
  Variant (9)..(9): Xaa in position 9 is Ile or Leu
  Variant (11)..(11): Xaa in position 11 is Ala, Ser or Thr
  Variant (13)..(13): Xaa in position 13 is Ile, Leu or Met
  Variant (16)..(16): Xaa in position 16 is Ile, Leu, Met or Val
VXXXXXNQXLXEXDGX

SEQ ID NO: 120238 - protein, 20 aa, Artificial sequence
  protein pattern
  Variant (2)..(2): Xaa in position 2 is Ser or Thr
  Variant (3)..(5): Xaa in position 3 to 5 is any amino acid
  Variant (7)..(8): Xaa in position 7 to 8 is any amino acid
  Variant (10)..(10): Xaa in position 10 is Leu or Met
  Variant (11)..(13): Xaa in position 11 to 13 is any amino acid
  Variant (14)..(14): Xaa in position 14 is Glu, Gly, Asn, Gln or Ser
  Variant (18)..(18): Xaa in position 18 is any amino acid
VXXXXFXXAXXXXXPSAXRE

SEQ ID NO: 120239 - protein, 14 aa, Artificial sequence
  protein pattern
  Variant (3)..(4): Xaa in position 3 to 4 is any amino acid
  Variant (5)..(5): Xaa in position 5 is Asp, Glu or Gly
  Variant (7)..(7): Xaa in position 7 is any amino acid
  Variant (9)..(9): Xaa in position 9 is Ile or Val
  Variant (11)..(11): Xaa in position 11 is any amino acid
PDXXXRXEXLXIHT

SEQ ID NO: 120240 - protein, 13 aa, Artificial sequence
  protein pattern
  Variant (2)..(2): Xaa in position 2 is Phe, Ile or Leu
  Variant (5)..(5): Xaa in position 5 is Ile or Leu
  Variant (7)..(7): Xaa in position 7 is Ala or Ser
  Variant (10)..(11): Xaa in position 10 to 11 is any amino acid
  Variant (13)..(13): Xaa in position 13 is Gly or Ser
FXDEXDXIAXXRX

SEQ ID NO: 120241 - DNA, 570 bp, Saccharomyces cerevisiae
  CDS (1)..(570)
atgggtaaagctaagaaaacaagaaagtttggcctcgtaaaaagaactttgaacaccaagaaagaccaaagattgaagaaaaaccaggaaaatatcaaaactaaagaagaccctgagctaaccaggaatataccacaagtatcaagtgcacttttctttcaatacaatcaagctataaagccaccttatcaagtactgatagataccaattttataaatttttctatccagaaaaaagtcgatattgttagaggaatgatggactgtctactcgcaaaatgtaacccgttaatcacagattgtgtgatggcagagttagaaaaattgggccccaagtaccgtatcgccttgaaactggctcgagatcctagaataaagagactaagctgttcgcacaagggtacgtacgcggatgactgtttagtgcatcgagtcttacaacataagtgttacatcgtagctacaaacgatgccggcctgaaacaaagaattagaaaaatccctggaattcctttgatgagcgtaggcggtcacgcatacgtcattgaaaaattgccagatgtcttttaa

SEQ ID NO: 120242 - protein, 189 aa, Saccharomyces cerevisiae
MGKAKKTRKFGLVKRTLNTKKDQRLKKNQENIKTKEDPELTRNIPQVSSALFFQYNQAIKPPYQVLIDTNFINFSIQKKVDIVRGMMDCLLAKCNPLITDCVMAELEKLGPKYRIALKLARDPRIKRLSCSHKGTYADDCLVHRVLQHKCYIVATNDAGLKQRIRKIPGIPLMSVGGHAYVIEKLPDVF

SEQ ID NO: 120243 - DNA, 600 bp, Zea mays subsp. mays
  CDS (1)..(600)
atggggaaggcaaagagcaagggccctaaattcgcggcggtgaagaagattatcaccaagaaaaccatcaataaatacaaggaggatgtgctgaaccacaagaagaaggacgtggacaaggagaaactcggccggaatgtgccgcaggtttcgtcggcgttgttcttcagctacaacacagcattggggccgccgtatcgggtgattgtggataccaacttcatcaatttctcgatacagaataagctggatttggagaagggaatgatggattgcctttatgcaaaatgtaccccatgtatcacggactgtgttatggctgagcttgaaaagctggggcagaagtatcgtgtggccttgagaattgccaaggaccctaggttccaaagattagcatgcacacacaagggaacctatgctgatgactgcattgtggagagggtcactcagcacaaatgctacatagttgctacttgtgatagagatttgaaaaggaggataagaaaggttcctggtgttccaatcatgtacatcacaagacataggtattcgatagaacggctccctgaggccacaattggtggagcaccaagaatctga

SEQ ID NO: 120244 - protein, 199 aa, Zea mays subsp. mays
MGKAKSKGPKFAAVKKIITKKTINKYKEDVLNHKKKDVDKEKLGRNVPQVSSALFFSYNTALGPPYRVIVDTNFINFSIQNKLDLEKGMMDCLYAKCTPCITDCVMAELEKLGQKYRVALRIAKDPRFQRLACTHKGTYADDCIVERVTQHKCYIVATCDRDLKRRIRKVPGVPIMYITRHRYSIERLPEATIGGAPRI

SEQ ID NO: 120245 - DNA, 984 bp, Arabidopsis thaliana
  CDS (1)..(726)
atgattgcatctccgtctctgatacccaattcgaaaaccacttctcagcctccgccgattcagacctcgcatattcagcttcccagtctttctctctgcgtcgttctagggtttttgttactctttgcttcgaagatgggaaaggcaaagaaacctcaaaagtttgctgtcgtgaagaagatgattagccacaaagctttgaagcattacaaggaagaggttctgaatccaaacaagaaggacctcacggaacttccgagaaacgtaccgagtgttcctgcagggcttttcttttcttacaactctacattggttcctccttaccgtgttttggtggatactaacttcatcaacttctctatccagaataagatcgatcttgagaagggaatgagagactgtctgtacgcaaattgcactccttgtatcacggattgtgtcatggctgagttagagaagttaggtcagaagtatcgtgtagctctaaggattgcgaaagatcctcacttcgaaagactaccttgtatacacaaagggacatatgctgatgactgtctcgttgacagagttactcagcataaatgcttcatagtggctacatgtgatagagacttaaagcgaaggattcgaaagattcctggtgtgcccatcatgtatgtgactaatcgcaagtactcaatagagaagttgcctgaagctacacttggtggagctccaaggtactgataatttattagagaccttatgaattccatgaagccctgaagcctcaagcctgagttggtatcggtttacgcgctgaatcaactgagttggaatggctatgttgtgagccattttgttctctatgttggtttctctgttgttaatttgatacaatgttaattaataactcaacagaaatctttattaagcttttacattctaaaaacacattcttaatctattacacagttttgttaatgatagaccaaaatcatgtct

SEQ ID NO: 120246 - protein, 241 aa, Arabidopsis thaliana
MIASPSLIPNSKTTSQPPPIQTSHIQLPSLSLCVVLGFLLLFASKMGKAKKPQKFAVVKKMISHKALKHYKEEVLNPNKKDLTELPRNVPSVPAGLFFSYNSTLVPPYRVLVDTNFINFSIQNKIDLEKGMRDCLYANCTPCITDCVMAELEKLGQKYRVALRIAKDPHFERLPCIHKGTYADDCLVDRVTQHKCFIVATCDRDLKRRIRKIPGVPIMYVTNRKYSIEKLPEATLGGAPRY

SEQ ID NO: 120247 - DNA, 1073 bp, Glycine max
  CDS (96)..(695)
agctatcatcccacggacccgccgccgccgccgtcgagcactcgagcgcagcggagcggaccgcagccggtggtagggcgtcgagtcgagggaggatggggaagtcgaagagcaagggcgccaagttcgccgccgtcaagaagatcatcagcaagaagaccatccagaagtacaaggaagatgtgctggacccgcggaagaaggacaccgagaaggagaagctcggccggaatgtgccgcaggtgtcgtcggcgctcttcttcagctacaacatggcgctcgggccgccctaccgggtcatcgtcgacaccaacttcatcaatttctccatccagaacaagttggatttggagaaaggaatgatggattgcctttatgcaaaatgtaccccttgcatcactgattgtgttatggctgagcttgaaaagttaggacaaaaatatcgtgtggctttgagaattgctaaggaccctaggttccagagattagcgtgcacacacaagggaacttatgctgatgactgtattgttgagagaattactcagcacaaatgctacattgttgccacctgcgatagagatttaaagaggagaataagaaaggttcctggtgtgccaatcatgtatatcacccaacacaggtactcgatagaacgactccctgaagctacaattggtggagcaccaagaatctgattagccctgagatggtaccaaacaccatcacacttgcccaggttccttgatttaggatggatacgagtactgccgtgctgaatcgaactgattgtaaccacttcaaaattgtgtaccagcctcctcagggcgtcgttttcataaattttgaaagaaactttagaagaaagtgtatggttgtcctttgttctgaactgaactatagccaacttcccagcttgctttgtgttgttaatgatgcagagtcaagaatatattttatgtaatatgtaagtgttgtcatatggttcaatgcttttgcatgcttctggttcattgcactcagttgccaagccaacacatgtgccgcgtgttggattttgtaaactatatgttctg

SEQ ID NO: 120248 - protein, 199 aa, Glycine max
MGKSKSKGAKFAAVKKIISKKTIQKYKEDVLDPRKKDTEKEKLGRNVPQVSSALFFSYNMALGPPYRVIVDTNFINFSIQNKLDLEKGMMDCLYAKCTPCITDCVMAELEKLGQKYRVALRIAKDPRFQRLACTHKGTYADDCIVERITQHKCYIVATCDRDLKRRIRKVPGVPIMYITQHRYSIERLPEATIGGAPRI

SEQ ID NO: 120249 - DNA, 1145 bp, Zea mays
  CDS (139)..(735)
attcggctcgagatttttccctagtaattttccccttgtgcggctattccaccccacgacgaacctgcgcatctctctctctctcgcgcgcgccgcttttctctcagccagccctgcagctctttttctccgcccacaatgggtaaagctaaaaagggaccaaagtttgctgttatgaagaagattgtcacttccaaagcaatcaaaagctacaaagaagaggttttgaacccagaaaagaagaatcttatgaaggaaaagttacccagaaatgttccaactcattcttcagcgcttttctttcaatacaacactgcactgggacccccttatcgtgttttggtggacaccaacttcatcaatttctcgatccaaaataaattggatctggagaaagggatgatggactgcttatatgcaaaatgcaccccttgtattacggactgtgtgatggcagaactcgagaagttaggccaaaaatatcgtgtagctctaaggattgccaaggatcctcgatttgagagaatactatgtactcataaagggacctatgctgatgactgccttgttgagagagttactcagcacaagtgctacattgttgcaacatgtgatcgggacttgaagaggagaattcggaagattcccggtgttccaataatgtacatcaccaaacgcaagtactcgattgagcgattgcctgaagcaacaattggtggagctccaagaatttgatgcagtaaaactaaaacaggcagagctggctataacaataatattgatactaatttcttggtcgtgaagtatgaaatcctgctacagtacctagcatattcggtcttttgctggctgggctgaattctatcggaagcttgagacttgaacaaaagcagcacttcaatggtttatacctgaaattttcttagtgtaagttggtagatttaggttctgtcaaattttgttttcctcatattgcctatctaatgtatcatggtaaaccttggagagtgtctgaactatgatgacattttcatagttctgggcttgtggcaattaactctcttgaaacgatactttttttgttgcaagagaaaaaccttattttccttgaatctaaattttattagtttcaagcttgacatgcc

SEQ ID NO: 120250 - protein, 198 aa, Zea mays
MGKAKKGPKFAVMKKIVTSKAIKSYKEEVLNPEKKNLMKEKLPRNVPTHSSALFFQYNTALGPPYRVLVDTNFINFSIQNKLDLEKGMMDCLYAKCTPCITDCVMAELEKLGQKYRVALRIAKDPRFERILCTHKGTYADDCLVERVTQHKCYIVATCDRDLKRRIRKIPGVPIMYITKRKYSIERLPEATIGGAPRI

SEQ ID NO: 120251 - DNA, 600 bp, Oryza sativa (japonica cultivar-group)
  CDS (1)..(600)
atggggagggcgaagagcaagggccctaagttcgccgccgtcaagaagatcatcaccaagaagaccatccagaagtacaaggaggatgtgttgaaccccaagaagaaggataacgagaaggagaagctcgggcggaatgtgcctcaggtctcttcggcgctgttcttcagctacaacacagcgctcgggccgccataccgggttattgtggatacaaacttcatcaatttctccatccagaacaagttggatttggagaaaggaatgatggactgcctttatgcaaaatgcacaccatgtatcacggattgtgttatggcggagcttgaaaagctgggacaaaagtatcgtgtagcattgagaattgcaaaggaccctaggttccagagattagcatgcacacacaagggaacttatgctgatgactgtatcgtagagagggttactcagcacaagtgctacatcgtcgcaacatgtgatagagatttgaaaaggaggataagaaaggttcctggtgttccaatcatgtatatcactcggcacaggtactcgatagaacgactccctgaagctacaatcggaggagcaccaagaatctga

SEQ ID NO: 120252 - protein, 199 aa, Oryza sativa (japonica cultivar-group)
MGRAKSKGPKFAAVKKIITKKTIQKYKEDVLNPKKKDNEKEKLGRNVPQVSSALFFSYNTALGPPYRVIVDTNFINFSIQNKLDLEKGMMDCLYAKCTPCITDCVMAELEKLGQKYRVALRIAKDPRFQRLACTHKGTYADDCIVERVTQHKCYIVATCDRDLKRRIRKVPGVPIMYITRHRYSIERLPEATIGGAPRI

SEQ ID NO: 120253 - DNA, 570 bp, Arabidopsis thaliana
  CDS (1)..(570)
atgggaaggacaaagaaacctcaaaagtttgcagtaatgaagatgatgataagccacaaagctttgaaacattacaaggaggaggttctgaatccaaacaagaaggacctcactgaacttccgagaaacgttccaagtgttccttcagggcttttcttttctcacaactctagtttggttcctccttaccgggttttggtggataccaatttcatcaacttctctatccagaataagctggagaagttaggtcagaagtatcgtgtagctctgaggattgcaaaagatccacgatttgaaagactaccttgtgtactcaaagggacatatgctgatgactgtcttgtggacagagttactcagcataaatgcttcatagtagctacttgtgatagagatctaaagcgaaggattcgcaagattcctggtgtaccaatcatgtatgtgacacaacgcaagtactcaatagagaaactgcctgaagcaacaatcggtggagatactgataaaggatccgacacccatgttgattccaagaagtttgggaagcctaagttagtgttggtttaa

SEQ ID NO: 120254 - protein, 189 aa, Arabidopsis thaliana
MGRTKKPQKFAVMKMMISHKALKHYKEEVLNPNKKDLTELPRNVPSVPSGLFFSHNSSLVPPYRVLVDTNFINFSIQNKLEKLGQKYRVALRIAKDPRFERLPCVLKGTYADDCLVDRVTQHKCFIVATCDRDLKRRIRKIPGVPIMYVTQRKYSIEKLPEATIGGDTDKGSDTHVDSKKFGKPKLVLV

SEQ ID NO: 120255 - DNA, 603 bp, Drosophila melanogaster
  CDS (1)..(603)
atgggaaaacacaagaaaacgcagaaggttaagaaacaacgtaatgcacagcttaaacgcatcataaaacccacagacgcgcggcttaaggatcagattcgagtgaaaagaaagaaggccgaggatccgcaccagatcaaggtgcacgaggccacccagcagagctccgctctgttcttccagtacaacacccagctgggaccgccgtaccacatcgttctggacacgaacttcattaactttagcattaagaacaaactggatattgtgcaaggtatgatggactgtctgtatgccaagtgcataccctatatctccgactgcgtgcgtgccgagctggagaagctgggcaacaagtacaagctggccctgcgcatcatctccgatcccagattcgagcgactgccgtgcctgcacaagggcacctatgcggacgattgcctcgtggagcgggtgcgccagcacaaatgctacattgtggccaccaacgacaaggaccttaagaatcgcatccggaagattcccggcgtgcccatcatgtacgtggctgcgcataagtacgcgattgagcgtatgccagaagcgtatggagtcaaggcgtag

SEQ ID NO: 120256 - protein, 200 aa, Drosophila melanogaster
MGKHKKTQKVKKQRNAQLKRIIKPTDARLKDQIRVKRKKAEDPHQIKVHEATQQSSALFFQYNTQLGPPYHIVLDTNFINFSIKNKLDIVQGMMDCLYAKCIPYISDCVRAELEKLGNKYKLALRIISDPRFERLPCLHKGTYADDCLVERVRQHKCYIVATNDKDLKNRIRKIPGVPIMYVAAHKYAIERMPEAYGVKA

SEQ ID NO: 120257 - DNA, 591 bp, Arabidopsis thaliana
  CDS (1)..(591)
atgggaaaggcaaagaaacctcaaaagtttgctgtcgtgaagaagatgattagccacaaagctttgaagcattacaaggaagaggttctgaatccaaacaagaaggacctcacggaacttccgagaaacgtaccgagtgttcctgcagggcttttcttttcttacaactctacattggttcctccttaccgtgttttggtggatactaacttcatcaacttctctatccagaataagatcgatcttgagaagggaatgagagactgtctgtacgcaaattgcactccttgtatcacggattgtgtcatggctgagttagagaagttaggtcagaagtatcgtgtagctctaaggattgcgaaagatcctcacttcgaaagactaccttgtatacacaaagggacatatgctgatgactgtctcgttgacagagttactcagcataaatgcttcatagtggctacatgtgatagagacttaaagcgaaggattcgaaagattcctggtgtgcccatcatgtatgtgactaatcgcaagtactcaatagagaagttgcctgaagctacacttggtggagctccaaggtactga

SEQ ID NO: 120258 - protein, 196 aa, Arabidopsis thaliana
MGKAKKPQKFAVVKKMISHKALKHYKEEVLNPNKKDLTELPRNVPSVPAGLFFSYNSTLVPPYRVLVDTNFINFSIQNKIDLEKGMRDCLYANCTPCITDCVMAELEKLGQKYRVALRIAKDPHFERLPCIHKGTYADDCLVDRVTQHKCFIVATCDRDLKRRIRKIPGVPIMYVTNRKYSIEKLPEATLGGAPRY

SEQ ID NO: 120259 - DNA, 579 bp, Schizosaccharomyces pombe 972h-
  CDS (1)..(579)
atgggtaaagcaaaaactacacgcaaatttgctcaggtaaagcgagtcataaaccttaaggatcaacgattgcaaaagaaagatcagaaaaaagagaaagagaaaactacaaagaatggagaattagttcgagaaattccacaaatggcttccaaccttttctttcagttcaatgagagtctaggacctccctaccatgttatcattgatacaaactttatcaacttttgtcttcagcaaaagattgatctttttgaaggactcatgacctgtctgtacgctaagaccattccttgtatttctgactgtgtaatggctgaattggaaaaattgggaattcgctatcgtattgcacttcgaattgccaaagatgaacgatttgaacgtcttccttgcactcacaaaggcacgtatgccgatgactgtatcgttcaacgtgtgatgcagcacaaatgctatttagttgctaccaatgataaaaatctgaagcaaaggattcgcaagattccaggtatccccattttgagtgttgcgaatcataaaattagagtagagcgtttggtggatgtggtggattga

SEQ ID NO: 120260 - protein, 192 aa, Schizosaccharomyces pombe 972h-
MGKAKTTRKFAQVKRVINLKDQRLQKKDQKKEKEKTTKNGELVREIPQMASNLFFQFNESLGPPYHVIIDTNFINFCLQQKIDLFEGLMTCLYAKTIPCISDCVMAELEKLGIRYRIALRIAKDERFERLPCTHKGTYADDCIVQRVMQHKCYLVATNDKNLKQRIRKIPGIPILSVANHKIRVERLVDVVD

SEQ ID NO: 120261 - DNA, 540 bp, Encephalitozoon cuniculi GB-M1
  CDS (1)..(540)
atgggggtgaggcatgccataaagagcaagagagtggccaatgtctgggacagaaagaagacaagagtaaaaagcccggaaaatgcctcgagcaccggtgagaacccaagaaataccgaggactttctgctgaaccacactctcagaccgccatacaacattattcttgacacaaacttcatcaatgactgtataaggaagaaatacgacatcagggagcagctgatgaaagcagtaaatgcaagcatcaagatatgcattccagactgtgtaattggggagctggaaagcctggggaggcctttccgcgttgcacttgcatcgataagagacagcgacgtccagaggctcgagtgtgatcacaagggaacctatgcagacgactgcatcttcaacagggtctctgcacaccggtgctacatcgttgcaacctcggatgtggcgctaaagcaaaggataaaggcaatccccggggttccactgataacatacagggggcaaagatgcttcattgagcgatttattcctgcgacgctctag

SEQ ID NO: 120262 - protein, 179 aa, Encephalitozoon cuniculi GB-M1
MGVRHAIKSKRVANVWDRKKTRVKSPENASSTGENPRNTEDFLLNHTLRPPYNIILDTNFINDCIRKKYDIREQLMKAVNASIKICIPDCVIGELESLGRPFRVALASIRDSDVQRLECDHKGTYADDCIFNRVSAHRCYIVATSDVALKQRIKAIPGVPLITYRGQRCFIERFIPATL

SEQ ID NO: 120263 - DNA, 696 bp, Nasonia vitripennis
  CDS (1)..(696)
atggtcaagggaaaaggcaagaagactaggaaggtggtcctccagaggtttgcacagatgaaaaagatgatcagtccgagcgatcctagaattaaggatagcaaacgagctcctccaaaaaagaagaagccagaagatccaaatgaactcaaagtcaaggaagtacctcagcagtcgtctgctctgttcttccaatacaacgaacaactgggtccaccttatcacatcatagtagataccaattttatcaatttttcgataaaaaacaaattggacgtcatacagaacatgatggaatgtctttacgccaagtgtattccctatgtcactgactgcgtcatgggtgaattggaaaaactaggtcagaaatacaagatagctttaaaaatcgtcaaagatccgaggttcgaaagaataccttgcatgcacaaaggtacttacgctgatgactgcattgtaaacagggtaacacagcacaaatgttacatcgtggcgacgaacgataaggatctaaagcgcaggatccgcaagataccaggagtgcccatcatgtacgtggcgcaacatcgcttctctatccttccctcccgttcatacagttctcctctgcgctccgtgcgcctgcagcggagtagaggaagaaagagagggagagacggagtgaaacgatcggctgcggccatcttgcatacctga

SEQ ID NO: 120264 - protein, 231 aa, Nasonia vitripennis
MVKGKGKKTRKVVLQRFAQMKKMISPSDPRIKDSKRAPPKKKKPEDPNELKVKEVPQQSSALFFQYNEQLGPPYHIIVDTNFINFSIKNKLDVIQNMMECLYAKCIPYVTDCVMGELEKLGQKYKIALKIVKDPRFERIPCMHKGTYADDCIVNRVTQHKCYIVATNDKDLKRRIRKIPGVPIMYVAQHRFSILPSRSYSSPLRSVRLQRSRGRKRGRDGVKRSAAAILHT

SEQ ID NO: 120265 - DNA, 606 bp, Magnaporthe grisea 70-15
  CDS (1)..(606)
atgggtgtcgcgaaaaagacaagaaagtttggcgcagtaaaacgcatgatcggaaagcgcgatgagcgcctaaagaagcccaaagtccccgaaggcggcagcggcaaggccaaggccggcccgagcacatccgcccccggcgccggcgagcccgtccgacaagtcacagccgcacctaagggtctcttcttcagccacaacgagaacatcgtgccgccatataacgtgctggtcgatacgtccttcatcacccacaccgtcggcgccaagatcgagctgctcgagggcctcatggactcgatgtacgccacttgccgacccatcatcaccgattgcgttatggctgagctcgagaagctggggccaaagtaccgcatagcgctcaggattgctcgcgacgagaggtgggagaggctcaagtgtgaccacaaggtttacgccgacgactgcttggtggacagagccgtcaagaaccgtatctacatagtggccaccaacgatagggatctcaagaggaggatacgcaagattccgggtgtgcctatagtcacttgcggccggaagaagtacttggtcgagggcctacctggtgcaccgacgaaatga

SEQ ID NO: 120266 - protein, 201 aa, Magnaporthe grisea 70-15
MGVAKKTRKFGAVKRMIGKRDERLKKPKVPEGGSGKAKAGPSTSAPGAGEPVRQVTAAPKGLFFSHNENIVPPYNVLVDTSFITHTVGAKIELLEGLMDSMYATCRPIITDCVMAELEKLGPKYRIALRIARDERWERLKCDHKVYADDCLVDRAVKNRIYIVATNDRDLKRRIRKIPGVPIVTCGRKKYLVEGLPGAPTK

SEQ ID NO: 120267 - DNA, 579 bp, Gibberella zeae PH-1
  CDS (1)..(579)
atgggtgtccagaaaaagactcgcaaattcgcagaggtcaagcgagttatcggtcgtcgcgatgccagattgaaggagaacaagctcaaggctgagctggcccagaaggagaaggagaagaagaccatcaatggcgaggttatccgagaagctccccaaatgcccagcaacatgttcttccagcacaacacagctctcgtcccgccctacagcgttctcgtcgataccaactttctcagtcactcagttcagcgaaagctctctcttctcgactccatgatggattgtctctatgccaagtgtaaccccatcatcacatcgtgtgtcatggctgagttggaaaagcttggacccaagtaccgactggcgctgagggttgcgcgagacgagcgatggacgcgacttgagtgcgaccacaaaggtgtatacgccgatgactgcttggtcgaccgagtgcagaaggacagaatctacattgtgggcacaaacgataaggcgctcaagcaacggctacgtaagattcctggtgtgcccatcatgagtgtggcgcgtgccaaggtagattgcagccgtggttga

SEQ ID NO: 120268 - protein, 192 aa, Gibberella zeae PH-1
MGVQKKTRKFAEVKRVIGRRDARLKENKLKAELAQKEKEKKTINGEVIREAPQMPSNMFFQHNTALVPPYSVLVDTNFLSHSVQRKLSLLDSMMDCLYAKCNPIITSCVMAELEKLGPKYRLALRVARDERWTRLECDHKGVYADDCLVDRVQKDRIYIVGTNDKALKQRLRKIPGVPIMSVARAKVDCSRG

SEQ ID NO: 120269 - DNA, 642 bp, Apis mellifera
  CDS (1)..(642)
atgtcagtatcagatcataaagaattaaaaatgggaaagaatcaaagaacacgaagagttgttatgcaaaaatttgcacaaatgaaaaaaatgataagtttaagggattcaagaataaaacctgagcatcgtataccaccaaaaaaaactaaaaaagaagatcctactcaattgaagataacagaagcgcctcaacaatcttctgcattattttttcaatataatacacaattgggaccaccatatcatattttggtagatacaaattttataaatttctcaattaaaaacaaattagatattatagaaaatatgatggaatgtctttatgcaaaatgtattccatatataacagattgtgtaataggtgaaatggaaaaactaggtcaaaaatatagaatagctttaaggattatgaaagatcctagatttgaaagattgaattgcatgcacaaaggtacctatgcagatgattgtattattaatagagtgactcaacacaaatgttacattgttgcaactaatgataaagatctaaagaagagaatacgaaaaataccaggtgtacctataatgtatgtttcgcaacataggtacactatagaaagaatgccggatgcatatggagcacctagaaaataa

SEQ ID NO: 120270 - protein, 213 aa, Apis mellifera
MSVSDHKELKMGKNQRTRRVVMQKFAQMKKMISLRDSRIKPEHRIPPKKTKKEDPTQLKITEAPQQSSALFFQYNTQLGPPYHILVDTNFINFSIKNKLDIIENMMECLYAKCIPYITDCVIGEMEKLGQKYRIALRIMKDPRFERLNCMHKGTYADDCIINRVTQHKCYIVATNDKDLKKRIRKIPGVPIMYVSQHRYTIERMPDAYGAPRK

SEQ ID NO: 120271 - DNA, 570 bp, Candida glabrata CBS 138
  CDS (1)..(570)
atgggtaaagctaagaagacaagaaagtttgcgctagtgaagaggacgctaaatgctaagaaagaccaacggttgaagggcaaccaggagaaacagaagagtcaggaggaccctgagttgacgagaaatataccacaggtgtctagtgcactgttcttccaatataacgaggcgatcaagccgccttaccaggtgctgatcgatacaaacttcatcaatttctccattcagaagaagatagacattgtgaaaggtatgatggactgtctgctcgctaagtgtaacccactaatcactgactgtgtgatagcagaactcgagaaactgggacctaaatacagaattgccttgaaactggcaagagaccccaggataaaacgtttgacttgcactcacaaaggtacatatgcggatgactgtatagtgaatagggttctacaacacaagtgttacatagtagccacgaatgatgcagggttgaagcagagagtaaggaaaatacctggtatccctttgatgagcgtaggtggccatgcctacgttatagaaaagttaccagacgtcttttaa

SEQ ID NO: 120272 - protein, 189 aa, Candida glabrata CBS 138
MGKAKKTRKFALVKRTLNAKKDQRLKGNQEKQKSQEDPELTRNIPQVSSALFFQYNEAIKPPYQVLIDTNFINFSIQKKIDIVKGMMDCLLAKCNPLITDCVIAELEKLGPKYRIALKLARDPRIKRLTCTHKGTYADDCIVNRVLQHKCYIVATNDAGLKQRVRKIPGIPLMSVGGHAYVIEKLPDVF

SEQ ID NO: 120273 - DNA, 570 bp, Kluyveromyces lactis NRRL Y-1140
  CDS (1)..(570)
atgggtaaggctaagaagaccagaaagtttgcgcttgtgaagcggacattgaatgcaaagaaggattcaagactcaaatcgaaccaggcaaaagaggttaagaaagatgatcctgagttgactaaaaacattccacaagtatccagtgcattgttcttccaatataatgaagctatcaagcctccatatcaggtactcatcgatacaaatttcatcaatttctctattcaaaagaagattgacatagtgaaaggtatgatggattgtcttttggccaagtgtaacatattgataacagactgtgtgatggctgaattagagaagttgggtcccaagtatcgtatagcgttgaagctagctcgtgatccgcgaatcaagaggctaagttgttcgcataagggtacttatgcggatgactgtattgttcatagagtgttgcagcacaagtgttacattgttgccacgaacgatgctggtttaaagcagagagtgaggaaagtgccggggatcccattgatgagtgttggaggacactcctatgtgattgagaagctaccgggtgtgttctag

SEQ ID NO: 120274 - protein, 189 aa, Kluyveromyces lactis NRRL Y-1140
MGKAKKTRKFALVKRTLNAKKDSRLKSNQAKEVKKDDPELTKNIPQVSSALFFQYNEAIKPPYQVLIDTNFINFSIQKKIDIVKGMMDCLLAKCNILITDCVMAELEKLGPKYRIALKLARDPRIKRLSCSHKGTYADDCIVHRVLQHKCYIVATNDAGLKQRVRKVPGIPLMSVGGHSYVIEKLPGVF

SEQ ID NO: 120275 - DNA, 570 bp, Debaryomyces hansenii CBS767
  CDS (1)..(570)
atgggaaaggctaagaagactagaaagtttgctttggttaagcgtacacttaatgcaaaggatccacgtataaataaaaataaggccgtagcgaagaaagatgaaaaagatccagagttaaccaaaagtgttccacaagtgtcatcatcattattcttccaattcaataagtcgatcaaaccaccctatcagattttgatagatacgaatttcataaattttagtattcagaagaaaatcgatattaccaaaggaatgatggatacgttatttgctaaatgtattccaatgataactgattgtgtaatggctgaattagagaagttaggccccaaatatagaattgctttgaagttagcaaaagatcctagaatccaacgtttaagctgctctcataagggaacatatgctgatgactgcctcgtgaatagagtaattcaacataagtgttacattgttgcgaccaacgatgccgatttgaagagaagaatacggaaggttcccggtgttcctataatgagtgttggtgggcacgcttacgttatagaaaggttacctgatgttttctaa

SEQ ID NO: 120276 - protein, 189 aa, Debaryomyces hansenii CBS767
MGKAKKTRKFALVKRTLNAKDPRINKNKAVAKKDEKDPELTKSVPQVSSSLFFQFNKSIKPPYQILIDTNFINFSIQKKIDITKGMMDTLFAKCIPMITDCVMAELEKLGPKYRIALKLAKDPRIQRLSCSHKGTYADDCLVNRVIQHKCYIVATNDADLKRRIRKVPGVPIMSVGGHAYVIERLPDVF

SEQ ID NO: 120277 - DNA, 582 bp, Yarrowia lipolytica CLIB122
  CDS (1)..(582)
atgggaaaagccgccaagacccgaaagtttgccgcgaccaagcggatgatcaaggccacggacccgcgactcaagaagaacaaggaggacattgaagcgcaggcagcaaagaagaacaaggaggaggagctggttcgagaggtgcctcgagtgtcgtcggcgctcttcttccaatacaacgaggccatcaagccgccctaccaggtgcttattgatacgaatttcataaacttcagcatccagaaaaagctggacattcacagagccatgatggactgtctgtacgccaaagccaaccccattgtcactgactgcgtcatggcggagttggagaagctggggcccaagtacagaattgcgctcaagctggcccgagacccccgaatcaaacggctcacgtgcacccacaagggcacctatgccgatgattgtctggtgaaccgagtgctgcagcacaagtgctacattgttgccaccaacgatcaggatctcaagcgacggctccgaaaggtgcccggtattccgctcatgggcgtgggaaacaagggatatgtcattgagcgtcttcccgatgttttctaa

SEQ ID NO: 120278 - protein, 193 aa, Yarrowia lipolytica CLIB122
MGKAAKTRKFAATKRMIKATDPRLKKNKEDIEAQAAKKNKEEELVREVPRVSSALFFQYNEAIKPPYQVLIDTNFINFSIQKKLDIHRAMMDCLYAKANPIVTDCVMAELEKLGPKYRIALKLARDPRIKRLTCTHKGTYADDCLVNRVLQHKCYIVATNDQDLKRRLRKVPGIPLMGVGNKGYVIERLPDVF

SEQ ID NO: 120279 - DNA, 606 bp, Candida albicans SC5314
  CDS (1)..(606): transl_table=12
atgggtaaagctaaaaagacaagaaagtttgctgctgtgaaaagaacattaaacacaaaaaaagaccaacgtctaactcaaaacaatgccaacaacaacaacactaacaaaaagaagggtggtggtagtggtggtgttgttgatgatccagaattaactcgatcggtcccacaagtatcatcagcattatttttcaaatataatgaatctataaaaccaccatatcaagtattaatcgatacaaattttataaatttttctattcaaaaaaaaatcgatataattcgaggattaatggattgtttaatggcaaaatgtattcccataataactgattgtgttattgccgaattagaaaaattgggatcaaaatatcgaattgctttaaaattagctaaagatccaagaattcaacgattgaaatgtagtcatgttggaacttatgctgatgattgtttagttaatcgagttatacaacataaatgttatattgttgctactaatgatgctgatttgaaaagaagaataagaaaaattcccgggattcctataatgagtgttggtggtcattcttatgttattgaaagattacctgatgttttttaa

SEQ ID NO: 120280 - protein, 201 aa, Candida albicans SC5314
MGKAKKTRKFAAVKRTLNTKKDQRLTQNNANNNNTNKKKGGGSGGVVDDPELTRSVPQVSSALFFKYNESIKPPYQVLIDTNFINFSIQKKIDIIRGLMDCLMAKCIPIITDCVIAELEKLGSKYRIALKLAKDPRIQRLKCSHVGTYADDCLVNRVIQHKCYIVATNDADLKRRIRKIPGIPIMSVGGHSYVIERLPDVF

SEQ ID NO: 120281 - DNA, 609 bp, Ustilago maydis 521
  CDS (1)..(609)
atgggcaagaagaagcaagttcgcaaattcggccaagtcaaacgcatgctcaacccgaaagatgatcgattgaaagccaactctacggtgcaaacagcggcgaaaaaagcgtcgtcgtcttcatccacaatcacaccagacggaacggtggttcgtcacatttccacaccagcctcatcgatgtttttcgaacacaacacgcaattaggacctccgtatagagtattggtggataccaactttatcaactttgcgctacagaacaagatcgaactggtacaaggaatgatggactgcttgtacgcaaagagcattccctgcatcacaagctgtgtaatcagcgaactggaaaagctcggtcccaagtatcgaatagctctcagagtcgcgcgagatccacgcttcgaaagactcgaatgcagtcacaagggtacatacgccgacgactgcatcatcgaaagaatcacaagtcacaaatgctacattgtagccacatgcgatagagagttgagaaggagagtcagaaaagtccccggtatcccactcatgtacatcgcaagtagacagttccgaatcgagcgactccctgatcaaggtatggcccaataa

SEQ ID NO: 120282 - protein, 202 aa, Ustilago maydis 521
MGKKKQVRKFGQVKRMLNPKDDRLKANSTVQTAAKKASSSSSTITPDGTVVRHISTPASSMFFEHNTQLGPPYRVLVDTNFINFALQNKIELVQGMMDCLYAKSIPCITSCVISELEKLGPKYRIALRVARDPRFERLECSHKGTYADDCIIERITSHKCYIVATCDRELRRRVRKVPGIPLMYIASRQFRIERLPDQGMAQ

SEQ ID NO: 120283 - DNA, 636 bp, Tribolium castaneum
  CDS (1)..(636)
atgtcgccttttaaaaatttcgagtcaggtaaggcgaagaagacgcgaaaaatcgcccagaagcggtttgcaaaaatgaaaacaatgatcagtcccagcgaccctcgcataaaagccagccagagggcccctcctcgcaagaaaaaacccgaagatccacacgaaatgaaagtgcgtgaggtgccccaagttagttcggcgctctttttccaatacaacacccaactggggcctccatatcacattttggttgatacgaactttattaatttttcgatcaagaacaagttggatattattcagaatatgatggactgcttgtatgctaagtgtattccgtatattacggattgtgttttgggcgaattagagaaattaggtcagaagtataaagtggcgttgaggataataaaggatccgaggtttgagaggattaagtgcatgcataaagggacgtacgctgatgattgcctagtccagagggtcacccaacacaagtgttacattgttgcgacgaatgataaggatttgaaacgcagaattcggaaaattccgggtgttcccatcatgtatgttgcacaacataggtatacaattgaacgcatgcctgatgcttacggggctccaaaaacataa

SEQ ID NO: 120284 - protein, 211 aa, Tribolium castaneum
MSPFKNFESGKAKKTRKIAQKRFAKMKTMISPSDPRIKASQRAPPRKKKPEDPHEMKVREVPQVSSALFFQYNTQLGPPYHILVDTNFINFSIKNKLDIIQNMMDCLYAKCIPYITDCVLGELEKLGQKYKVALRIIKDPRFERIKCMHKGTYADDCLVQRVTQHKCYIVATNDKDLKRRIRKIPGVPIMYVAQHRYTIERMPDAYGAPKT

SEQ ID NO: 120285 - DNA, 570 bp, Aspergillus niger
  CDS (1)..(570)
atgggtgtgcaaaagaagactcgcaagttcgcgcagatgaagcgcgccatcaaagcccgtgatgagcgactgaagaagccggaagcgaaaaaggagacgcccaaggaggatcagctgactcgacaagtcacccaagctccttcgaacatgttctttgccgcgaacactgcccttggccctccctaccacgtgctggtcgataccaactttgtttcccacgccattcgagccaagcaggacctacttacttcgatgatggacttgctgtacgcgaagtgtattccgaccttctcagactgcactatcgcggaattggaaaagctgggtgacaagtaccgcctcgcacttcgggttgccaaagaccctcggtggtctagggttaagtgctctcacaagggtacctatgcagatgactgtatcgtggatcgggtgaccaagcatagaatttacattgtggcgaccaatgatcaagatctgtgtcgccgcctgcgcaagattcctggtgttccgatcatgaaggttgctaggggcaaattcaccatcgagaagttgcccgatgctttggattaa

SEQ ID NO: 120286 - protein, 189 aa, Aspergillus niger
MGVQKKTRKFAQMKRAIKARDERLKKPEAKKETPKEDQLTRQVTQAPSNMFFAANTALGPPYHVLVDTNFVSHAIRAKQDLLTSMMDLLYAKCIPTFSDCTIAELEKLGDKYRLALRVAKDPRWSRVKCSHKGTYADDCIVDRVTKHRIYIVATNDQDLCRRLRKIPGVPIMKVARGKFTIEKLPDALD

SEQ ID NO: 120287 - DNA, 597 bp, Medicago truncatula
  CDS (1)..(597)
atgggtaaagctaagaaaggacccaaattcgctgttatgaagaagatggtcacttccaaagcaatcaaaagctataaagaagcggttttgaacccagaaaagaagaacactcttaaagaaaagttacccagaaacgttcctactcattcttcggcacttttctttcactacaacactgctttgggacctccttatcgtgttttggtcgataccaatttcatcaatttctccattcagaataaattggatttggagaaaggaatgatggactgcttatatgcaaaatgtaccccgtgtatcacagactgtgtgatggcagaactagagaagttgggcacaaaatatcgtgtagctctaaggattgcaaaggatcctcgatttgagagattactctgtactcataggggtacctatgctgatgactgccttgttgacagagttaccgagagtaaatgcttcattgtcgcgacatgtgatcgagacttgaagaggaggatccggaagattcctggtgtgccaataatgtacatcaccaaacatagatactcaatcgagcggttgcctgaagcaacaattggtggagcacctagaatctga

SEQ ID NO: 120288 - protein, 198 aa, Medicago truncatula
MGKAKKGPKFAVMKKMVTSKAIKSYKEAVLNPEKKNTLKEKLPRNVPTHSSALFFHYNTALGPPYRVLVDTNFINFSIQNKLDLEKGMMDCLYAKCTPCITDCVMAELEKLGTKYRVALRIAKDPRFERLLCTHRGTYADDCLVDRVTESKCFIVATCDRDLKRRIRKIPGVPIMYITKHRYSIERLPEATIGGAPRI

SEQ ID NO: 120289 - DNA, 576 bp, Aspergillus oryzae
  CDS (1)..(576)
atgggtgtccagaagaaaacccgcaagttcgcccaggttaaacgagccatcaaaaagcacgatgaccgcgccaaaaaagacaacaacgccccgaaacaagacaaggccaagggcgacgaggtagtccgggcgattccccaggctccgtcgaatatgttcttcgccgccaacacggccctcggacctccttaccatgtgctggtggataccaactttgtctcccactctattcgcgcgaagacggatatgctgaagtctatgatggacctgttatatgcgaagtgtatcccgacgtttacggattgtactattgcggaattggaaaagttgggtgataagttccggttggcgttgagggtggctaaggatccgagatgggcgcgcgtgcggtgtgatcaccccggtacctatgctgatgactgtttagttgatcggattacaaaacacagaatctacattgtggcgacgaacgataaggacctggttcgccgtattcgcaagattcccggtgtgccgatcatgaaggtcgcaagagcgaaatacgtcattgagagattgcccgaccactttgagtga

SEQ ID NO: 120290 - protein, 191 aa, Aspergillus oryzae
MGVQKKTRKFAQVKRAIKKHDDRAKKDNNAPKQDKAKGDEVVRAIPQAPSNMFFAANTALGPPYHVLVDTNFVSHSIRAKTDMLKSMMDLLYAKCIPTFTDCTIAELEKLGDKFRLALRVAKDPRWARVRCDHPGTYADDCLVDRITKHRIYIVATNDKDLVRRIRKIPGVPIMKVARAKYVIERLPDHFE

SEQ ID NO: 120291 - DNA, 591 bp, Brassica napus
  CDS (1)..(591)
atgggaagggcaaagaagcctcagaagtttgctgttatgaagaagacgataagccacaaagctctcaagcactacaaggaggaggttctgaatccaaacaagaaggacctcactgaacttcccagaaacgtaccaaatgttccatcagggatgttcttttctcacaacactaacatggttcctccttaccgagttctggtggatactaacttcatcaacttctctatccagaacaagattgatattgagcaggggatgatgttctgcttgaacgcaaaatgcactccttgtatcacggactgcgtcatggctgagcttgagaagttaggccagaagtatcgtgtcgctcttaggattgcgaaagatcctcgctttgagagactaccttgcgtacacaaagggacatatgctgatgactgcctcgttgacagagttactcagcataagtgcttcatggtggcgacctgtgatagagacttgaagcgaaggatccgaaaggttcctggagtgcctatcatgtacttggcggggcgcaagtactcagtagagaggctgcctgaagcaacacttggtagagctccaagatactga

SEQ ID NO: 120292 - protein, 196 aa, Brassica napus
MGRAKKPQKFAVMKKTISHKALKHYKEEVLNPNKKDLTELPRNVPNVPSGMFFSHNTNMVPPYRVLVDTNFINFSIQNKIDIEQGMMFCLNAKCTPCITDCVMAELEKLGQKYRVALRIAKDPRFERLPCVHKGTYADDCLVDRVTQHKCFMVATCDRDLKRRIRKVPGVPIMYLAGRKYSVERLPEATLGRAPRY

SEQ ID NO: 120293 - DNA, 621 bp, Brassica napus
  CDS (1)..(621)
atggtcgacgattacgtccttgcttcaaagatgggaagggcaaagaagcctcagaagtttgctgttatgaagaagacgataagccacaaagctctcaagcactacaaggaggaggttctgaatccaaacaagaaggacctcactgaacttcccagaaacgtaccaaatgttccatcagggatgttcttttctcacaacactaacatggttcctccttaccgagttctggtggatactaacttcatcaacttctctatccagaacaagattgatattgagcaggggatgatgttctgcttgaacgcaaaatgcactccttgtatcacggactgcgtcatggctgagcttgagaagttaggccagaagtatcgtgtcgctcttaggattgcgaaagatcctcgcttcgagagactaccttgtgtacacaaaggcacatatgctgatgactgcctcgttgacagagttactcagcataagtgtttcatggtggcgacctgtgatagagacttgaagcgaaggattcgaaaggttcctggagtgcctatcatgtacttggcggggcgcaagtactcagtagagaggctgcctgaggcaacacttggtagagctccaagatactga

SEQ ID NO: 120294 - protein, 206 aa, Brassica napus
MVDDYVLASKMGRAKKPQKFAVMKKTISHKALKHYKEEVLNPNKKDLTELPRNVPNVPSGMFFSHNTNMVPPYRVLVDTNFINFSIQNKIDIEQGMMFCLNAKCTPCITDCVMAELEKLGQKYRVALRIAKDPRFERLPCVHKGTYADDCLVDRVTQHKCFMVATCDRDLKRRIRKVPGVPIMYLAGRKYSVERLPEATLGRAPRY

SEQ ID NO: 120295 - DNA, 591 bp, Brassica napus
  CDS (1)..(591)
atgggaaaggcaaagaaacctcagaagtttgctgtcatgaagaagacgataagccacaaagctctcaagcactacaaggaggaggttctgaatccaaacaagaaggacctcactgaacttcccagaaacgttccaaatgttccatcagggatgttcttttctcacaacactaacatggttcctccttaccgagttctggtggatactaacttcatcaacttctctatccagaacaagattgatattgagcaggggatgatgttctgcttgaacgcaaaatgcactccttgtatcacggactgcgtcatggctgagcttgagaagttaggccagaagtatcgtgtcgctcttaggattgcgaaagatcctcgctttgagagactaccttgcgtacacaaagggacatatgctgatgactgcctcgttgacagagttactcagcataagtgtttcatggtggctacctgtgatagagacttgaagcgaaggattcgaaaggttcctggtgtgcctatcatgtacttggcggggcgcaagtactcagtagagaggctgcctgaggcaacacttggtagagctccaagatactga

SEQ ID NO: 120296 - protein, 196 aa, Brassica napus
MGKAKKPQKFAVMKKTISHKALKHYKEEVLNPNKKDLTELPRNVPNVPSGMFFSHNTNMVPPYRVLVDTNFINFSIQNKIDIEQGMMFCLNAKCTPCITDCVMAELEKLGQKYRVALRIAKDPRFERLPCVHKGTYADDCLVDRVTQHKCFMVATCDRDLKRRIRKVPGVPIMYLAGRKYSVERLPEATLGRAPRY

SEQ ID NO: 120297 - DNA, 612 bp, Hordeum vulgare
  CDS (1)..(612)
atggggaagtcgaagagcaagggcgccaagttcgccgccgtcaagaagatcatcagcaagaagaccatcaagaagcacaaggagaagctgctggaggaggtgctggacccccggaagaaggccgccgagaaggagaagctcggccggaatgtgccgcaggtgtcgtcggcgctcttcttcagctacaacatggcgctcgggccgccctaccgggtcatcgtcgacaccaacttcatcaatttctccatccagaacaagttagatttggagaaaggaatgatggattgcctttatgcaaaatgtaccccttgcatcactgattgtgttatggctgagcttgaaaagctaggacaaaaataccgtgttgcgttgagaattgcgaaggaccctaggttccagagattagcgtgcacacacaagggaacttatgctgatgactgtattgttgagagaattactcagcacaaatgctacattgttgccacttgcgatagagatttaaagaggagaataagaaaggttcctggtgttccaatcatgtatatcacccaacacaggtactcgatagaacgactccctgaagctacaattggtggagcaccaagaatctga

SEQ ID NO: 120298 - protein, 203 aa, Hordeum vulgare
MGKSKSKGAKFAAVKKIISKKTIKKHKEKLLEEVLDPRKKAAEKEKLGRNVPQVSSALFFSYNMALGPPYRVIVDTNFINFSIQNKLDLEKGMMDCLYAKCTPCITDCVMAELEKLGQKYRVALRIAKDPRFQRLACTHKGTYADDCIVERITQHKCYIVATCDRDLKRRIRKVPGVPIMYITQHRYSIERLPEATIGGAPRI

SEQ ID NO: 120299 - DNA, 600 bp, Triticum aestivum
  CDS (1)..(600)
atggggaagtcgaagagcaagggcgccaagttcgccgccgtcaagaagatcatcagcaagaagaccatcaagaagtacaaggaggaggtgctggacccccggaagaaggacaccgagaaggagaagctcggccggaatgtgccgcaggtgtcgtcggcgctcttcttcagctacaacatggcgctcgggccgccctaccgggttattgttgacaccaacttcatcaatttctccatccagaacaagttggatttggagaaaggaatgatggactgcctttatgcaaaatgtaccccctgcatcactgattgtgttatggctgagcttgaaaagttaggacaaaaatatcgtgtggctttgagaattgctaaggatcctaggttccagagattggcgtgcacacacaaaggaacttatgctgatgactgtattgttgagagaattactcagcacaaatgctacattgttgccacttgcgatagagatttaaagaggagaataagaaaggttcctggtgttccaatcatgtatatcacccaacacaggtactcaatagaacgactccctgaagccacaattggtggagcaccaagaatctaa

SEQ ID NO: 120300 - protein, 199 aa, Triticum aestivum
MGKSKSKGAKFAAVKKIISKKTIKKYKEEVLDPRKKDTEKEKLGRNVPQVSSALFFSYNMALGPPYRVIVDTNFINFSIQNKLDLEKGMMDCLYAKCTPCITDCVMAELEKLGQKYRVALRIAKDPRFQRLACTHKGTYADDCIVERITQHKCYIVATCDRDLKRRIRKVPGVPIMYITQHRYSIERLPEATIGGAPRI

SEQ ID NO: 120301 - DNA, 26 bp, Artificial sequence
  primer
atgggtaaagctaagaaaacaagaaa

SEQ ID NO: 120302 - DNA, 27 bp, Artificial sequence
  primer
ttaaaagacatctggcaatttttcaat

SEQ ID NO: 120303 - protein, 215 aa, Artificial sequence
  consensus sequence
  Variant (3)..(4): Xaa in position 3 to 4 is any amino acid
  Variant (6)..(6): Xaa in position 6 is any amino acid
  Variant (7)..(10): Xaa in position 7 to 10 is any or no amino acid
  Variant (12)..(13): Xaa in position 12 to 13 is any amino acid
  Variant (17)..(18): Xaa in position 17 to 18 is any amino acid
  Variant (20)..(42): Xaa in position 20 to 42 is any amino acid
  Variant (43)..(58): Xaa in position 43 to 58 is any or no amino acid
  Variant (60)..(61): Xaa in position 60 to 61 is any amino acid
  Variant (63)..(63): Xaa in position 63 is any amino acid
  Variant (64)..(65): Xaa in position 64 to 65 is any or no amino acid
  Variant (67)..(68): Xaa in position 67 to 68 is any amino acid
  Variant (71)..(72): Xaa in position 71 to 72 is any amino acid
  Variant (74)..(77): Xaa in position 74 to 77 is any amino acid
  Variant (81)..(81): Xaa in position 81 is any amino acid
  Variant (83)..(84): Xaa in position 83 to 84 is any amino acid
  Variant (94)..(95): Xaa in position 94 to 95 is any amino acid
  Variant (97)..(97): Xaa in position 97 is any amino acid
  Variant (99)..(102): Xaa in position 99 to 102 is any amino acid
  Variant (105)..(105): Xaa in position 105 is any amino acid
  Variant (108)..(108): Xaa in position 108 is any amino acid
  Variant (112)..(112): Xaa in position 112 is any amino acid
  Variant (114)..(114): Xaa in position 114 is any amino acid
  Variant (120)..(120): Xaa in position 120 is any amino acid
  Variant (128)..(128): Xaa in position 128 is any amino acid
  Variant (132)..(132): Xaa in position 132 is any amino acid
  Variant (135)..(136): Xaa in position 135 to 136 is any amino acid
  Variant (138)..(138): Xaa in position 138 is any amino acid
  Variant (142)..(143): Xaa in position 142 to 143 is any amino acid
  Variant (146)..(146): Xaa in position 146 is any amino acid
  Variant (148)..(148): Xaa in position 148 is any amino acid
  Variant (158)..(158): Xaa in position 158 is any amino acid
  Variant (160)..(160): Xaa in position 160 is any amino acid
  Variant (163)..(164): Xaa in position 163 to 164 is any amino acid
  Variant (168)..(168): Xaa in position 168 is any amino acid
  Variant (173)..(173): Xaa in position 173 is any amino acid
  Variant (175)..(176): Xaa in position 175 to 176 is any amino acid
  Variant (179)..(179): Xaa in position 179 is any amino acid
  Variant (184)..(184): Xaa in position 184 is any amino acid
  Variant (187)..(187): Xaa in position 187 is any amino acid
  Variant (191)..(196): Xaa in position 191 to 196 is any amino acid
  Variant (198)..(198): Xaa in position 198 is any amino acid
  Variant (201)..(201): Xaa in position 201 is any amino acid
  Variant (202)..(213): Xaa in position 202 to 213 is any or no amino acid
MGXXKXXXXXKXXKFAXXKXXXXXXXXXXXXXXXXXXXXXXXXXXXXXXXXXXXXXXXRXXPXXXSXXFFXXNXXXXPPYXVXXDTNFINFSIXXKXDXXXXMMXCLXAKCXPXITDCVXAELEKLGXKYRXALXXAXDPRXXRLXCXHKGTYADDCXVXRVXXHKCXIVATXDXXLKXRIRKXPGXPIMXXXXXXYXIEXXXXXXXXXXXXXLP

SEQ ID NO: 120304 - protein, 40 aa, Artificial sequence
  protein pattern
  Variant (9)..(9): Xaa in position 9 is Ile or Leu
  Variant (10)..(10): Xaa in position 10 is Phe, Ile or Val
  Variant (11)..(11): Xaa in position 11 is any amino acid
  Variant (13)..(13): Xaa in position 13 is Ile or Val
  Variant (14)..(14): Xaa in position 14 is any amino acid
  Variant (15)..(15): Xaa in position 15 is Ala, Gln or Ser
  Variant (17)..(17): Xaa in position 17 is Lys or Arg
  Variant (19)..(19): Xaa in position 19 is Phe or Tyr
  Variant (20)..(20): Xaa in position 20 is Ile, Leu or Met
  Variant (24)..(24): Xaa in position 24 is Cys, Asn or Ser
  Variant (26)..(26): Xaa in position 26 is any amino acid
  Variant (27)..(27): Xaa in position 27 is Ala, Asp, Glu, Gly or Asn
  Variant (29)..(29): Xaa in position 29 is any amino acid
  Variant (30)..(30): Xaa in position 30 is any or no amino acid
  Variant (32)..(32): Xaa in position 32 is Ile, Leu or Val
  Variant (33)..(33): Xaa in position 33 is Lys or Arg
  Variant (34)..(34): Xaa in position 34 is any amino acid
  Variant (35)..(35): Xaa in position 35 is Ile or Val
  Variant (38)..(38): Xaa in position 38 is Ile or Val
  Variant (40)..(40): Xaa in position 40 is Ile or Leu
KGTYADDCXXXRXXXHXCXXVATXDXXLXXRXXXXPGXPX

SEQ ID NO: 120305 - protein, 41 aa, Artificial sequence
  protein pattern
  Variant (3)..(4): Xaa in position 3 to 4 is any amino acid
  Variant (6)..(6): Xaa in position 6 is any amino acid
  Variant (7)..(7): Xaa in position 7 is Ala, Asn, Gln, Ser or Thr
  Variant (8)..(8): Xaa in position 8 is Ile, Leu or Met
  Variant (9)..(9): Xaa in position 9 is any amino acid
  Variant (13)..(13): Xaa in position 13 is any amino acid
  Variant (15)..(15): Xaa in position 15 is Ile or Leu
  Variant (16)..(16): Xaa in position 16 is Ile or Val
  Variant (19)..(19): Xaa in position 19 is Asn or Ser
  Variant (21)..(21): Xaa in position 21 is Ile, Leu or Val
  Variant (22)..(22): Xaa in position 22 is Asn, Ser or Thr
  Variant (23)..(23): Xaa in position 23 is Phe or His
  Variant (24)..(24): Xaa in position 24 is Ala, Cys, Ser or Thr
  Variant (25)..(25): Xaa in position 25 is Ile, Leu or Val
  Variant (26)..(27): Xaa in position 26 to 27 is any amino acid
  Variant (29)..(38): Xaa in position 29 to 38 is any amino acid
  Variant (39)..(40): Xaa in position 39 to 40 is any or no amino acid
FFXXNXXXXPPYXVXXDTXFXXXXXXXKXXXXXXXXXXXXA

SEQ ID NO: 120306 - protein, 20 aa, Artificial sequence
  protein pattern
  Variant (2)..(2): Xaa in position 2 is Asp or Ser
  Variant (4)..(4): Xaa in position 4 is Thr or Val
  Variant (5)..(5): Xaa in position 5 is Ile, Leu or Met
  Variant (6)..(6): Xaa in position 6 is Ala, Gly or Ser
  Variant (13)..(13): Xaa in position 13 is Asp, Pro, Gln, Ser or Thr
  Variant (15)..(15): Xaa in position 15 is Phe or Tyr
  Variant (16)..(16): Xaa in position 16 is Lys or Arg
  Variant (17)..(17): Xaa in position 17 is Ile, Leu or Val
  Variant (20)..(20): Xaa in position 20 is Lys or Arg
TXCXXXELEKLGXKXXXALX

SEQ ID NO: 120307 - protein, 15 aa, Artificial sequence
  protein pattern
  Variant (2)..(2): Xaa in position 2 is any amino acid
  Variant (3)..(3): Xaa in position 3 is Ile, Leu or Val
  Variant (4)..(4): Xaa in position 4 is Ala, Gly or Thr
  Variant (5)..(7): Xaa in position 5 to 7 is any amino acid
  Variant (8)..(8): Xaa in position 8 is Phe or Tyr
  Variant (9)..(9): Xaa in position 9 is any amino acid
  Variant (10)..(10): Xaa in position 10 is Ile or Val
  Variant (12)..(12): Xaa in position 12 is Lys or Arg
  Variant (13)..(13): Xaa in position 13 is Leu or Met
  Variant (15)..(15): Xaa in position 15 is Asp, Glu or Gly
MXXXXXXXXXEXXPX

SEQ ID NO: 120308 - protein, 11 aa, Artificial sequence
  protein pattern
  Variant (2)..(2): Xaa in position 2 is Lys or Arg
  Variant (4)..(4): Xaa in position 4 is Glu or Pro
  Variant (5)..(5): Xaa in position 5 is His or Arg
  Variant (6)..(7): Xaa in position 6 to 7 is any amino acid
  Variant (9)..(9): Xaa in position 9 is Leu or Val
  Variant (10)..(10): Xaa in position 10 is any amino acid
AXDXXXXRXXC

SEQ ID NO: 120309 - DNA, 1776 bp, Saccharomyces cerevisiae
  CDS (1)..(1776)
atgtctcacaaacaattcaaatcagatggaaacatcgttactccctacctacttggccttgctcgaagcaatcccggccttacagtgattaagcacgacagagtggttttccggactgcgtcagctcctaattcagggaaccctcctaaagtttcattggtttctggaggtggcagtggtcatgagccaacgcatgccggttttgttggtgaaggtgccttagatgcgattgcagcaggtgccatttttgcttctccttcaactaaacagatctattctgctattaaagctgttgaatctcctaagggtaccttgatcattgtaaaaaattacaccggtgatattatacattttggtctcgctgctgaaagagctaaagctgctggaatgaaagtcgaactggttgctgtaggagatgatgtctctgtcggtaagaagaaaggttctttagtcgggcgtcgaggtctcggagccaccgtattggtgcataaaattgctggggcagccgcttctcatggactggagttggcagaagttgccgaagttgctcagtcagtagttgacaatagtgtcacaattgcggcatctcttgatcactgcacggttcctggccacaaacctgaagccattttgggcgagaatgagtatgaaatcggtatgggtattcataacgagtctggtacctataagtcttctccgctgccatcgatttctgagctcgtttcccagatgcttcctcttcttctcgatgaggatgaagaccgttcttatgtgaagtttgagcccaaagaggacgtagttcttatggttaacaacatgggtggtatgtctaatctagaattgggttatgctgcagaggtcatttctgaacaattgattgataagtatcaaattgtgcccaagagaacgattactggagcattcattactgcattgaatggtcctgggtttggtatcactcttatgaacgcttcaaaagctggtggcgatatccttaagtatttcgattatcctaccacagcgagtggatggaatcaaatgtaccattctgccaaagattgggaggtacttgccaaagggcaggttcccaccgccccctctttaaagacattgaggaatgaaaaaggttcgggtgtgaaagctgattatgacacttttgctaaaattttgcttgctgggattgcaaaaattaacgaggttgaaccaaaggttacttggtacgataccattgcaggagatggtgattgcggaactactcttgtgtccggtggtgaagcattggaagaagctattaaaaaccatacgttgcgcctcgaggatgctgctcttggtatcgaagatattgcgtatatggttgaggattctatgggtggtacgtccggtggtctgtactctatctatctttctgctctcgcacaaggagttagggattctggggacaaggaacttactgcggaaactttcaaaaaggcatcaaacgttgcactagatgctttgtataagtatacgagagcccgtcctggttacaggactctgatcgatgctctgcaaccttttgtcgaagcgctgaaagccgggaagggtcccagagccgccgcccaagctgcttatgatggtgccgaaaagacaaggaagatggatgcccttgttgggcgtgcttcttacgtggctaaggaggagctgagaaaactcgacagcgaaggtggattaccagatccaggagcagttggtcttgctgcactactcgatggatttgttacagctgctgggtactag

SEQ ID NO: 120310 - protein, 591 aa, Saccharomyces cerevisiae
MSHKQFKSDGNIVTPYLLGLARSNPGLTVIKHDRVVFRTASAPNSGNPPKVSLVSGGGSGHEPTHAGFVGEGALDAIAAGAIFASPSTKQIYSAIKAVESPKGTLIIVKNYTGDIIHFGLAAERAKAAGMKVELVAVGDDVSVGKKKGSLVGRRGLGATVLVHKIAGAAASHGLELAEVAEVAQSVVDNSVTIAASLDHCTVPGHKPEAILGENEYEIGMGIHNESGTYKSSPLPSISELVSQMLPLLLDEDEDRSYVKFEPKEDVVLMVNNMGGMSNLELGYAAEVISEQLIDKYQIVPKRTITGAFITALNGPGFGITLMNASKAGGDILKYFDYPTTASGWNQMYHSAKDWEVLAKGQVPTAPSLKTLRNEKGSGVKADYDTFAKILLAGIAKINEVEPKVTWYDTIAGDGDCGTTLVSGGEALEEAIKNHTLRLEDAALGIEDIAYMVEDSMGGTSGGLYSIYLSALAQGVRDSGDKELTAETFKKASNVALDALYKYTRARPGYRTLIDALQPFVEALKAGKGPRAAAQAAYDGAEKTRKMDALVGRASYVAKEELRKLDSEGGLPDPGAVGLAALLDGFVTAAGY

SEQ ID NO: 120311 - DNA, 2173 bp, Zea mays
  CDS (138)..(1922)
gaattcccgggtcgacttcgctgtcgacgatttcgtcgacttcatactgctcgcctcgccgtctttcccccaatctgttgctcctccaagctgcgggcgatcgccgtaccccggccgccgcagggaaccccctcgccatggccttgcaggggaagaagctcatcaacaaccccgacgatgtggtgacggagttcatcgaagggttggtggagacttacccgggtctgcagtacctcgacgggttccctcagattaaggtcgttcttcgtgctgatgtcgagcgcggttcctatgacaaagttgcagtcatctcgggtggtggaagtggccatgaaccttcccatgctggatttgttgggccagggatgttgacagctgctgtttctggagatgttttcgcctctccacctgttgattctattttagctgctattcgagctgtaactggtcccatggggtgccttctaatagtaaagaactacactggtgatagactcaattttggattagctgctgagcaggcaaaatctgaaggctataagatggagatggtcattgttggagacgattgtgcccttcctccacctagagggatagctggtagaagaggtttagctggaacaattcttgtgcataaggttgctggggccgcagcagatgctggtttatctcttgcagaggttgccgcagaagcaaaacatgcatctgaggttgttggtacgatgggagttgcactttctgtttgcacattgcctgggcaaataacttctgatcgtctaggtccaaggcaaatggagcttggccttggaattcatggagaacctggagttgctgttgttgaactccagccagttgacgtagtggtagaacatgtccttaaacagatattgtcacaggaaactcagtatcttcctgtcacaagaggttgcaatgctgttctcctagtgaatggattaggagccactcctatcatggaacttatgattgcagcgagaaaagcagttcctgagttgcaattggtgtatggcattgctgttgacagagtctacactggcacacttatgacatcacttgatatggcaggattatctattaccattatgaagtccggcgaaagcattttgaagagacttgatgctcccactaaagctccagcttggcctgttggttctgaaggaaaccgtccaccagcaaagtttcctgttcctctaccaccatcaccttcaatgaaggatgacgagattcttgctccatctcaggagctgagcaagcaagggtgtatcctggaggctgttattgaagcaagtgctactgaaattatcaatctcatggatagcctaaatgaatgggacagtaaagtgggcgatggtgactgtggaagcacaatgtatagaggtgcaacagctattcttgaagatatgaaaaagcgttaccctatgaatgatgcagcgggaacaataaatgaaattggggcaacaatccgaagggtgatgggtggaacaagtggaatcttgtatgccatactctgcaaggctgcgtatgcaagcttaaagcagagctcaactgtcactgcgaataaatgggctgatgctttagaggcctccattgctgctgttagcaaatatggtggtgccagcgcaggataccgcacaatgttggatgccctaattcctgcttctgctgttctgaaacagagacttgaggctggggatgatcccgtgactgctttcatcgcgtcttctgaagcagcatcagctggcgctgaatccaccaaacaaatgcaagcgaaggctggacggtcatcatacatcgctccagatctcctggcctcaatccctgatcctggtgcaatggctgcagctgcatggtacagagctgctgcccttgcagtgaagaacaaagtgcacggttcaaagagctagtagcatacgcaatgcttcattgctagacccaaaatagactgacaggaaaaatcactggggcattttctcactccccttagatttggtttccgcttgtgcttttgcatgggccgagaaaaaaaatgacttccatattgtctcacccttctcacatcatacaaagagatgttcaaagagttcgtcgtccgtacaagttaagggaagctatgcttttgcactgccgtgaaaaaaaaaaaaaaaaaagcggccgc

SEQ ID NO: 120312 - protein, 594 aa, Zea mays
MALQGKKLINNPDDVVTEFIEGLVETYPGLQYLDGFPQIKVVLRADVERGSYDKVAVISGGGSGHEPSHAGFVGPGMLTAAVSGDVFASPPVDSILAAIRAVTGPMGCLLIVKNYTGDRLNFGLAAEQAKSEGYKMEMVIVGDDCALPPPRGIAGRRGLAGTILVHKVAGAAADAGLSLAEVAAEAKHASEVVGTMGVALSVCTLPGQITSDRLGPRQMELGLGIHGEPGVAVVELQPVDVVVEHVLKQILSQETQYLPVTRGCNAVLLVNGLGATPIMELMIAARKAVPELQLVYGIAVDRVYTGTLMTSLDMAGLSITIMKSGESILKRLDAPTKAPAWPVGSEGNRPPAKFPVPLPPSPSMKDDEILAPSQELSKQGCILEAVIEASATEIINLMDSLNEWDSKVGDGDCGSTMYRGATAILEDMKKRYPMNDAAGTINEIGATIRRVMGGTSGILYAILCKAAYASLKQSSTVTANKWADALEASIAAVSKYGGASAGYRTMLDALIPASAVLKQRLEAGDDPVTAFIASSEAASAGAESTKQMQAKAGRSSYIAPDLLASIPDPGAMAAAAWYRAAALAVKNKVHGSKS

SEQ ID NO: 120313 - DNA, 3269 bp, Schizosaccharomyces pombe
  CDS (922)..(2697)
gaattcaatctagaatttggtcttgttgatgttctagaacgagcttcttggtttttttgagatattttttctaccacagaattaccaaggacgtggggcaaaggaccgctcaaactccatactggtttattgggtttacttccaacatttagctcttcgtagagtggatcaacataatttggacgagaacttcctgagttatcttcaagctttccagctaaatatccttcgagccaatgttgtgattccggatcagcagaattgtttaggtccttgaggtttggagaagaaaatgctacctttaaagcatctttggtttttgattgattaggcaaagtcgtatttattttttttggtatattttgttgagttgatgggccaccatgaacgctctcagtctctgagtctgagggcgatgacgatggcgacggaatgtgtgaagaagtgttcatataaattggattgaaaacgagaataacctcagcttatatggaaattttttatatggattcggttacgtccgagaatgctctattggtttgagaacaaggcggggaaaaaggatacggtgtcaacgtttttttttacattctgataataaattattcaacatatcaaacgtcaatggcaacatggatgtggggaattatattaagtgacgaactcgataaaagcggagtagtctatctacaagaatttactttatgattgtccctcaaactccactttttagtttccacaataagctccacttttaactaaagggggctagttccaagtttccggtcgatctcgaataatgattggttatacaagccgatcacccgcatcccgcaaatctcagaacataccgtgcgcggggtaaggtgattcaagagaataggtttaaaagaagaaagaaacgttccttttcaattaaaaatgtctgtaaaacaatttgtatctgaaggacatatagtacgcccatacttgcttggacttgctagaagtaaccctggcctaactgttattgaacatgatcgtgtaatttacaggacagcctctgccccgggttctggtgatccgcctaaagtaactttagtgtctggtggtggtagtgggcacgagcctacacatgctggttttgttggtgatggagccttggacgccgtagcttgtggagacatttttgcttctccctctactaaacaaatttactctgctctcaaagctgttgcatctcctaagggaactttaattattgtcaaaaattacacaggtgatattattcattttggcttggcagctgagagagccaaggcagctggaatgaacgttgagcttgttgccgtaggagatgatgtttctgtaggcaaaaagagaggtgcactcgtaggacgaagaggtttaggagccactgtgctagtacacaaaattgcgggatctgcagcagcattaggactggatctgcatcaagttgctcaagtggcccaatcagtgattgacaatgctgctaccatagcagcttcattggatcactgcgccgttcccggtcgcaaatttgaaacaaacttgggtccagacgagtatgagattggaatgggtattcataacgagcctggaaccttcaaatcatcaccacttccatctattcccgagctagttacagagatgctttcgattttgtttggtgagaaaaacccggacaatagtttcgtagagttttcttcaaaagacgatgttattcttctagtaaacaatatgggtggtatgtccaacttagagttgggatatgctactgaagtagtttcggaacaattagccaaacgaggtatcattcctaaaagaaccatgtctggtacttttgtaaccgcattgaacggaccgggttttggaattacattggtcaatgcttctaaggctactccagatattttcaaatattttgacttgccaacaactgctagtggatggaacgtttcttatcataacgcaaaggactgggaggttttggctgacggcaaggtgccaacagctcccgctttggagcatacccgtaatgagaagcacagcggtgtaaaggctgacccaaagatgtttactaaaattttaaaagctgccgttgacgctatcaatgaatttgagccaaagacaacttggtacgatacgattgcaggagatggtgattgtggaacaacccttgtgaatggtggagaggccatcataaaggctattaatgataaatcaattcgattggatgatggtgtaaatggtattgacgatttggcctatattgttgaggattcgatgggaggtacatcgggtggtctttactcgatttatttgtctgcgctagccaaaggagttcgtgagtcaggcgattccgaattatccgtgcatacgtttgcgtttgcaagcaagtatgcacttgacgctcttttcaaatacactagggcccgtaaaggattccgtactctgatcgatgctattcaaccatttgttgaaactttaaatgaaggtaagggacttgatgctgctgcgaaagctgccacggaaggttctgaacaaactagaaaaatggatgctgtcgttggaagagcgtcttatgttgctaaagaggaacttcataagcttgatagtgagggaggcttaccggatcctggtgcctttgcgttagcggcgatcttgaaagcaattgttgaggctagtgaacattaaaacgttttctatagctatctcaggtttgactcatgttgatcatgcacagaagtgatatcgtaaaggcatatcgtgtgagcggagattttaaaatttgttttggctttctcctaaagtttttgccacagtatgcttgactaaattctttgttcattaccttttacaacttttctttattagtcaatatattgtgaataaaaagccttaaattaaacgattacttatgtattatgtacatttttgctcctgtcgtctagtgttaatttataagcaagcgtcgtattatgatataaagtcatgttgaaaaaagtgttattactttagggattctaacaaatattctgtccatatgcagttagaagtggtaatgtaacttgagatcgccattagaattagacgactgaaagaatccacggtttagcatagtcaatgtggacagtgtcgttttgatcgacggtcgatcgcgggattgatcagttgacgtatatttgtgccacttttgttgttcgttaaccaaaacagtcagtaatagcgataaattaaatgcgttccattctctgatttcaataata

SEQ ID NO: 120314 - protein, 591 aa, Schizosaccharomyces pombe
MSVKQFVSEGHIVRPYLLGLARSNPGLTVIEHDRVIYRTASAPGSGDPPKVTLVSGGGSGHEPTHAGFVGDGALDAVACGDIFASPSTKQIYSALKAVASPKGTLIIVKNYTGDIIHFGLAAERAKAAGMNVELVAVGDDVSVGKKRGALVGRRGLGATVLVHKIAGSAAALGLDLHQVAQVAQSVIDNAATIAASLDHCAVPGRKFETNLGPDEYEIGMGIHNEPGTFKSSPLPSIPELVTEMLSILFGEKNPDNSFVEFSSKDDVILLVNNMGGMSNLELGYATEVVSEQLAKRGIIPKRTMSGTFVTALNGPGFGITLVNASKATPDIFKYFDLPTTASGWNVSYHNAKDWEVLADGKVPTAPALEHTRNEKHSGVKADPKMFTKILKAAVDAINEFEPKTTWYDTIAGDGDCGTTLVNGGEAIIKAINDKSIRLDDGVNGIDDLAYIVEDSMGGTSGGLYSIYLSALAKGVRESGDSELSVHTFAFASKYALDALFKYTRARKGFRTLIDAIQPFVETLNEGKGLDAAAKAATEGSEQTRKMDAVVGRASYVAKEELHKLDSEGGLPDPGAFALAAILKAIVEASEH

SEQ ID NO: 120315 - DNA, 1767 bp, Ashbya gossypii
  CDS (1)..(1767)
atgtctgttaataaatcttttgagttagataattcgctgcgctacagtctccatgggttttcattggccaacccatctgtaactctaattgaaagggagaagatcctatacaggaaattaacaaaggagtctgtggcactagtttcgggtggggggtgcggacatgagcctgcgcacagcgggtatgttggggagggcatgttagccgcggctgtcgcaggagacatttttgcgtcgccgtcgacggctcagattttgactgcaataaggattgctacaaagcaagcagctggagcattgctgatcgtgaagaactatactggcgacgttcttcactttggcctggcagctgagcgtgctcggtctatgggcattgattgccgcgtggttattgttggtgatgacgtagctgttggtcgtaccaagggtgcaggagttggacgtcgggggctggcggggactgtgctcgtgcacaaaatcgcaggggagtttgccagaagctattctgcggactatgggctagacgaagtcgctaatgtcgcggagatagtcaatgacaatttagttacgatcggcgcgtctctatcccactgcaaggtgcccggcagagacttcgagtccagtttgacggattctcagatggaacttggcatgggcatccacaacgagcccggcgttcaagtactcgagccaattccgtccacagatgagctaatagaagaacacatgttgccgaagttgttgagtaaggatgacaatgagagatactatgtcgacttttcacccgatgacgaggtcattctgttggtcaataatttgggcgggatctctaactacatgatggcagcccttaccgccaaggtgtccgaatccttagccaaatatggcatacgtcccgttcgtaccgtgtacggctccgtaatgaccgcgttcaatgggaacggctttagcattaccttgttgaatgtgactcgcagtgaggcaaggttgcaggacttgttgcagtctccaatctcattactcgagctgtttgatgcacccacctctgctcctgcttggccgcggatagataccggcaacgacgcccacgcttccggggaaactgacctggtgctcaacactccatctgctgcaccttttgggcgctttgactacgatttttttgccgcactagttagagcaggcagcaagcaggttcgcgaaagcgagccgcacattacccatttagacaacattgtcggtgacggggattgtggaactacacttgccgccggcgctcaggctatagaggatgccctggagcaactacgcggtctttcgttttctgaggcgataggccaagcttcccagatcatagaggcctcaatgggtggcacctcgggtgccctatattctattttgctttccggaatttgccacgagattgcagaactttgtagcagccctgatgatgaagtaacgctggagcttcttggggccgctttgcaacgtgctctgcatgccttgtacaagtattcaggtgcccgtcccggcgattgcactatgatcgatgcactagaacctttcattagcagcttgtaccaagaaagggactttgccaaggccgttgaagcagcggaagagggtgcccgggctacggccaagatgtctgctaagtttggccgagcatcctacgtctctgacactactgacgttcctgatcctggggcagtagggtttgtcgcatttttacgtggtatgcgcgccgctttcgagaaatggaactga

SEQ ID NO: 120316 - protein, 588 aa, Ashbya gossypii
MSVNKSFELDNSLRYSLHGFSLANPSVTLIEREKILYRKLTKESVALVSGGGCGHEPAHSGYVGEGMLAAAVAGDIFASPSTAQILTAIRIATKQAAGALLIVKNYTGDVLHFGLAAERARSMGIDCRVVIVGDDVAVGRTKGAGVGRRGLAGTVLVHKIAGEFARSYSADYGLDEVANVAEIVNDNLVTIGASLSHCKVPGRDFESSLTDSQMELGMGIHNEPGVQVLEPIPSTDELIEEHMLPKLLSKDDNERYYVDFSPDDEVILLVNNLGGISNYMMAALTAKVSESLAKYGIRPVRTVYGSVMTAFNGNGFSITLLNVTRSEARLQDLLQSPISLLELFDAPTSAPAWPRIDTGNDAHASGETDLVLNTPSAAPFGRFDYDFFAALVRAGSKQVRESEPHITHLDNIVGDGDCGTTLAAGAQAIEDALEQLRGLSFSEAIGQASQIIEASMGGTSGALYSILLSGICHEIAELCSSPDDEVTLELLGAALQRALHALYKYSGARPGDCTMIDALEPFISSLYQERDFAKAVEAAEEGARATAKMSAKFGRASYVSDTTDVPDPGAVGFVAFLRGMRAAFEKWN

SEQ ID NO: 120317 - DNA, 1785 bp, Oryza sativa (japonica cultivar-group)
  CDS (1)..(1785)
atggcgttgcaggggaagaagctcatcaatgacccgaacgatgtggtgacggagttcatcgaggggctggtggagacgtacccgggcctgcagtacttggacgggttccctcagattaaggttgttcttcgtgctgatgtcgtacagggcgcctatgataaggtcgcggttatctcaggtggtggaagtggccatgagccaacccatgctggatttgttgggccaggaatgttgacagctgccgtttctggagatgttttcacttctccgcccgttgattctattttagctgctattcgagctgtaactggtcccatggggtgccttctaatagtaaagaactacactggtgatagactcaattttggactagctgctgagcaggcaaaatctgaaggctataagatggagatggttattgttggagacgattgtgccctccctccacctcgaggaatagctggtagaagaggtttagcagggactatccttgtgcacaaggttgctggggctgctgcagatgctggcttatctcttgcagaagttgctgcagaagcaaaacatgcatctgaggttgttggtacaatgggagttgcactttctgtttgcacattgcctggtcaggtgacatctgatcgcttgggtcctaagcaaatggagcttggccttggaattcatggagaacctggtgttgctgttgttgagctccagcccattgatgtagtagtagaacatgttcttaagcagatattgtcacaggaaactcagtatcttcctatcacaagagggagcaatgttgtcctcctaatcaatggattgggtgcaactcctatcatggaacttatgattgcagcaagaaaagcagttcctgaattacaattggagtatgggattgctgttgacagagtctacactggcacacttatgacttcacttgatatggctgggttctctatcactattatgagatcagatgaaaacattttgcagcgacttgatgctccaactaaagctccggcttggcctgttggatctgaaggaaatcgtccaccagcaaaaattcctgttccagtaccaccatcaccatcagggaaggatgatgagattctcactgaacctcaggagttaagcaagcaagggtgtattctggaggctgctattgaagcaggggctaaagaaattatcaatatcaaggataacttaaatgaatgggatagtaaagtgggtgatggtgactgtggaaccacgatgtatagaggtgcaacaactattcttgaagatctgaagaagcgctacccaatgaatgatgcagctggaacaattaatgagattgggtcaacagtccggagagtgatgggtggaacaagtggaatcttgtatgacatactttgcaaagctgcatatgcaagcttaaaacagaacacaagtattggtgcaaatgaatgggctgatgctttggaggcctctgttgctgcggttagcaaatatggtggtgctagtgcagggtaccgcacaatgttggatgctctaattcctgcatgtacagttctgaaacagtctctcaaagccggggacgatcctgtgactgcctttatcgcgtcttctgaagcagcatcagctggtgctgaatccactaaacagatgcaagcgaaggcaggacggtcgtcatacattgcacccgacctggtggcatcagttcctgatccaggagcagttgctgcagcagcatggtaccgtgcggcggctcatgcagtgaagagtaagctgcacgcctcggatagctag

SEQ ID NO: 120318 - protein, 594 aa, Oryza sativa (japonica cultivar-group)
MALQGKKLINDPNDVVTEFIEGLVETYPGLQYLDGFPQIKVVLRADVVQGAYDKVAVISGGGSGHEPTHAGFVGPGMLTAAVSGDVFTSPPVDSILAAIRAVTGPMGCLLIVKNYTGDRLNFGLAAEQAKSEGYKMEMVIVGDDCALPPPRGIAGRRGLAGTILVHKVAGAAADAGLSLAEVAAEAKHASEVVGTMGVALSVCTLPGQVTSDRLGPKQMELGLGIHGEPGVAVVELQPIDVVVEHVLKQILSQETQYLPITRGSNVVLLINGLGATPIMELMIAARKAVPELQLEYGIAVDRVYTGTLMTSLDMAGFSITIMRSDENILQRLDAPTKAPAWPVGSEGNRPPAKIPVPVPPSPSGKDDEILTEPQELSKQGCILEAAIEAGAKEIINIKDNLNEWDSKVGDGDCGTTMYRGATTILEDLKKRYPMNDAAGTINEIGSTVRRVMGGTSGILYDILCKAAYASLKQNTSIGANEWADALEASVAAVSKYGGASAGYRTMLDALIPACTVLKQSLKAGDDPVTAFIASSEAASAGAESTKQMQAKAGRSSYIAPDLVASVPDPGAVAAAAWYRAAAHAVKSKLHASDS

SEQ ID NO: 120319 - DNA, 1644 bp, Mesorhizobium loti MAFF303099
  CDS (1)..(1644): transl_table=11
atgaagcactttttcaaccgcagggaaacgatcgtcaccgaggcgctggacggcctgttgcgcaccatcggctcaggcgatctcgcgcgcctcgacggctatcccgagatcaaggtcgtgctgcgcgccgactgggacaagtcgagggtcagcgtcgtttccggcggcggcgccgggcatgagccttcgcatgccggctttgtcggcaagggcatgctgacggcggcggtctcgggcgagatcttcgcctcgccgagcgtcgaagcggtgctcgctgccatccgcgcggtcaccggcccggccggctgtctgcttatcgtcaagaactacaccggcgaccggctcaatttcggcctagcggcggaaaaggcgcgcgccgagggctttcgcgtcgagatggtgatcgttgccgacgacatcgcgctgcccgatatcgcccagccgcgcggcgtcgccggtaccctgttcgtgcacaagatttccggccatctgtcggaggccggccacaatctggctgatatcgcggcggcggcacgggcggcggcaaaggatatcgtttcgctcggcatgtcgctgtcctcctgttccatccccggccagccgcatgaagacaggtttggcgcggacgacggcgaacttggccttggcattcatggcgagccgggcgtcgagcggattgccttgcaaagcgtcgacaggctggtcgcgatcatggcggagcgcctcgcagcagggctcgacccgaaggcgagccatgccttgctgatcaacaatctcggcgcggtgccgcccctcgaaatgtcgctgattgccaatgcggtgctagcctcgccactggccaagactgtcaagctgacgatcggccccggcccgctgatgacggcgctcaacatgaacggcttctcgttgtcgctgatccggctcgatgcggcgcgcgaagcagccctgctggcgccggtcggcccgcatgcctggatgccggccaagccggtcgcggcacctgtcatcgtgccgatggcgaaggcagccggacaaagtgttgcgcacaaggccagccaggatgccagcagcaggcgcctgatcgtcacggtctgcgaaaaattgatctcgctcgaagcgtcattgaacgggctcgacgccaaggcgggcgacggcgacaccggctcgacggtggcgaccggcgcgcgcagcatcctggaacggctcgacgtcctgccgctggcgaaccctgcggcgacgcttggcgcaatcggcgacatattgagttcgtcgatgggcggctcgagcggggtgctgctgtcgatcttcttcacggcggcggcacaggtcctcggtggcggcgccagtctgtccaaggcactgcttgccgggctcgagcggatgactttctacggcggcgccaaaccgggtgatcgcaccatggtcgatgcgctggagcccgcgctaaaagcgctcgacgccgatggcctggaggaggcagcggccgccgcccagcgcggggccgaggcgacagccgccatggaaaaggcgaaggccggacggtcggcctatgtcggcaccaaattgcaaggcgtggtcgaccccggcgcccatgcggtggccgaggtgttttcggccgccgccacgctgctcgtcacggcctga

SEQ ID NO: 120320 - protein, 547 aa, Mesorhizobium loti MAFF303099
MKHFFNRRETIVTEALDGLLRTIGSGDLARLDGYPEIKVVLRADWDKSRVSVVSGGGAGHEPSHAGFVGKGMLTAAVSGEIFASPSVEAVLAAIRAVTGPAGCLLIVKNYTGDRLNFGLAAEKARAEGFRVEMVIVADDIALPDIAQPRGVAGTLFVHKISGHLSEAGHNLADIAAAARAAAKDIVSLGMSLSSCSIPGQPHEDRFGADDGELGLGIHGEPGVERIALQSVDRLVAIMAERLAAGLDPKASHALLINNLGAVPPLEMSLIANAVLASPLAKTVKLTIGPGPLMTALNMNGFSLSLIRLDAAREAALLAPVGPHAWMPAKPVAAPVIVPMAKAAGQSVAHKASQDASSRRLIVTVCEKLISLEASLNGLDAKAGDGDTGSTVATGARSILERLDVLPLANPAATLGAIGDILSSSMGGSSGVLLSIFFTAAAQVLGGGASLSKALLAGLERMTFYGGAKPGDRTMVDALEPALKALDADGLEEAAAAAQRGAEATAAMEKAKAGRSAYVGTKLQGVVDPGAHAVAEVFSAAATLLVTA

SEQ ID NO: 120321 - DNA, 1782 bp, Arabidopsis thaliana
  CDS (1)..(1782)
atggttcctccggctaaaaaattcatcaacaaccccaacgatgttgtaaccgagttcatcgaaggtctcgtcgaaacttatcctggacttcagtatttggatggtcttcccgagatcaaagttgtactaagagctgatgtctcagctgcaaattatgacaaggttgccgttatatcaggaggaggaagtgggcatgaaccagcacaagctgggtatgttggagaaggaatgctcacagctgctatttgtggagatgtttttgcttcgccaactgttgattccatcctagctaggattcgtgctgtaactggtccaaaaggatgcctcttggttgtcacgaactatactggtgaccgcttgaactttggcctggcagctgagcaagcaaaaactgagggtttcgatatagagactgtaattgttggagatgattgtgctctacccccgccgcgtggcgtagctgggcgcagaggtttagcgggaacagttcttgtccataaggttgctggagcagcagctgctgctggactttctctagcagaagttgcagcagaagcaaaacatgcatctgaaatggttggaaccatgggtgttgcactatctgtctgtgcgcttccaggacaggttacatcagatcgtttgggtccagagaaaatggaacttgggcttggagttcatggggagcctggtgctgctgtagtcgacattcaacctgtggaagttgtagtgtcccatgttcttcaacagatactgagtccagagacaaattatgttccaattacacgtggtaacagtgtggttctgatgattaatggcttaggtggtacacctctaatggaacttatgattgctgctggaaaagcagtcccaaaattacagttggaatatgggcttgccgttgatagggtgtatactggatcatttatgacgtctcttgatatggcagggttctcgatatcgatcatgaaggccgaccagtcaattttagagcgtttggatgctccgaccaatgctcctagttggccagttggcacagatggaagccgcccaccagcaaagatccccgttccacttcccttccgatcaaccaaaaacgaagagtctcgataccgacctcaggagcttagtcaacaggggcgaattcttgaggcagctattgaagcagcagcaactgtagtcatcaatctgaaggatagtttgaacgaatgggatggaaaagtaggtgatggggattgtggatcaacaatgtgcagaggtgcaacagctattctggaggacatgaagaagtattatccgctcaacgatgctgcggaaacagtgagtgagattggttcatcgattagaagagtcatggggggaacaagtggaataatttacaatctcctctgtaaggcagcatatgcggagttaaaagctaacagtcaatcagaaaccacttccaaacactggtctgaagcactcaagtcatcaatctctgctgtcagtaaatatggtggagcaactgccggttatagaacgatgttagatgcgctcatccccgcttcaaaagtccttgaggagaagctgagtgttggggaggaccctattgctgcttttgttctgtctgctgaagctgcgaccgcaggagctgaatctaccattcatatgaaagcacaggccgggagatcaagctatgtatcagctgagatttttgcatcaattcctgatccaggagcaatggctgcagcggcatggtacagcgccgctgcaagagccgtgaaagagcagaggcagaggttttga

SEQ ID NO: 120322 - protein, 593 aa, Arabidopsis thaliana
MVPPAKKFINNPNDVVTEFIEGLVETYPGLQYLDGLPEIKVVLRADVSAANYDKVAVISGGGSGHEPAQAGYVGEGMLTAAICGDVFASPTVDSILARIRAVTGPKGCLLVVTNYTGDRLNFGLAAEQAKTEGFDIETVIVGDDCALPPPRGVAGRRGLAGTVLVHKVAGAAAAAGLSLAEVAAEAKHASEMVGTMGVALSVCALPGQVTSDRLGPEKMELGLGVHGEPGAAVVDIQPVEVVVSHVLQQILSPETNYVPITRGNSVVLMINGLGGTPLMELMIAAGKAVPKLQLEYGLAVDRVYTGSFMTSLDMAGFSISIMKADQSILERLDAPTNAPSWPVGTDGSRPPAKIPVPLPFRSTKNEESRYRPQELSQQGRILEAAIEAAATVVINLKDSLNEWDGKVGDGDCGSTMCRGATAILEDMKKYYPLNDAAETVSEIGSSIRRVMGGTSGIIYNLLCKAAYAELKANSQSETTSKHWSEALKSSISAVSKYGGATAGYRTMLDALIPASKVLEEKLSVGEDPIAAFVLSAEAATAGAESTIHMKAQAGRSSYVSAEIFASIPDPGAMAAAAWYSAAARAVKEQRQRF

SEQ ID NO: 120323 - DNA, 1788 bp, Arabidopsis thaliana
  CDS (1)..(1788)
atggatttcgcagccaagaaattcatcaacaaccccaacgatgttgtaactgagttcatagagggtctggtagaaacttatcctggactccagtatttggatggttttcctgaggttaaggtggtgctacgagctgatgtctcggctgcaaaatatgacaaggttgccgttatctcaggtggaggcagtgggcatgagccagcacatgctggatacgttggagaaggaatgctaacagctgctatttgtggagatgtctttgcctccccaccagttgattctatccttgctggaattcgagctgtaactggtactgagggatgtctattgattgtcaagaattatacgggtgatcgcttgaactttggtttggctgctgaacaagcaaaatctgaaggttacaaagttgagactgtaattgttggagaggattgcgctttacccccgccacgtggcatcgctggacgcagagggttagcaggaacagttcttgtccataaggttgcgggggcagcagcagctgctggtctttctctagaaaaagttgctgctgaggcaaaatgtgcgtcagagatggttggtaccatgggtgttgcattatccgtctgtacacttcctggacaggttacatcagatcgtcttggcgcacagaagatggaactcgggcttggaattcatggagaacctggtgctgctgtggttgacgttgaacctgtggatgtggtggtgtcccatgttcttcagcaaatacttagtcctgagaccaattatgttccaattactcgtggtaacagagtggttctcatggtcaatggtttgggaggcacacctttaatggaacttatgattgctgctggaaaagcagtccctaaactgcagttggaatttggacttgccgttgatagggtgtatacaggcttttttatgacttctcttgatatggcaggattctcgatttcaatcatgaaggctgaccattcgattttagaccgattggatgctccaaccaaggctccaaattggccagttggcactgatggcaaccggccaccagcgaagattcctgttcctgttcctccttctcgatcaataaaaagcatggagtctcaaagccgacctctagagctgagtaaagaaggtcaagttcttgaggcagctattcaagcagcagcaactgtgatcatcagccttaaggatagtttgaatgaatgggatggaaaagtaggcgatggtgattgtgggtcaacaatgtacagaggtgcaacagctattctggaggacatgaaaaactattatccactcaatgatgctgcggaaacagtgaatgagattggtctatcaatcaaaagagccatggggggcacaagcggaataatttaccatctcctctgcaaggcagcatacgcggagctaaaagctaacgctcagtcagaagtcactcccaaaaattggtctgaagcactcaagtcatcaatcgcttcagtcagcaaatatggtggagcaactgcgggctacagaacgatgctagatgcgctcatcccagcttcacaagttcttgaggagaaactgagcgctggagaggatccaatatctgctttcattctatcaggcgaagcggcaactgccggagcggaatcaaccatacagatgcaagcacaggctgggagatcaagctatgtatctgcagagaatcttgcaacggttccagatccaggtgcaatggcagcagcgggatggtacaatgcggcagcaagagccgtaaaggagcagtatgagggctcgtcatga

SEQ ID NO: 120324 - protein, 595 aa, Arabidopsis thaliana
MDFAAKKFINNPNDVVTEFIEGLVETYPGLQYLDGFPEVKVVLRADVSAAKYDKVAVISGGGSGHEPAHAGYVGEGMLTAAICGDVFASPPVDSILAGIRAVTGTEGCLLIVKNYTGDRLNFGLAAEQAKSEGYKVETVIVGEDCALPPPRGIAGRRGLAGTVLVHKVAGAAAAAGLSLEKVAAEAKCASEMVGTMGVALSVCTLPGQVTSDRLGAQKMELGLGIHGEPGAAVVDVEPVDVVVSHVLQQILSPETNYVPITRGNRVVLMVNGLGGTPLMELMIAAGKAVPKLQLEFGLAVDRVYTGFFMTSLDMAGFSISIMKADHSILDRLDAPTKAPNWPVGTDGNRPPAKIPVPVPPSRSIKSMESQSRPLELSKEGQVLEAAIQAAATVIISLKDSLNEWDGKVGDGDCGSTMYRGATAILEDMKNYYPLNDAAETVNEIGLSIKRAMGGTSGIIYHLLCKAAYAELKANAQSEVTPKNWSEALKSSIASVSKYGGATAGYRTMLDALIPASQVLEEKLSAGEDPISAFILSGEAATAGAESTIQMQAQAGRSSYVSAENLATVPDPGAMAAAGWYNAAARAVKEQYEGSS

SEQ ID NO: 120325 - DNA, 1695 bp, Agrobacterium tumefaciens str. C58
  CDS (1)..(1695): transl_table=11
atgaagaagctcatcaacgatccatccaccgttgtccgggacatgctggagggcatcgtggcgctcagccccgaaaccattctgcttcaggatgagaacgtggtcataaggtccggcctgcctgaagcggaaaagcgcaaggttgcagtgctttcgggcggtggcagcggacatgagccggcccacgccggttatgtcggcacgggcatgttgacggttgcggtggcgggcgatgtcttcacttcgccgagcaccgacgcggttctcgccggcatcagggccgcggccggccctgccggtgcgctggtcatcgtcaagaactataccggcgaccggctgaatttcggcttggcggcggagctggcgagggccgaaggaatccctgtcgagatcgttgtcgtcgccgacgacgttgccttgaaggatacggttcccgccgagcgccgccgcgggattgcggggacggtgctcgtgcacaagctcgcgggggccgcagcggaaaagggccttcctcttcaagaggtggcccgcatcgcccgggacgctgccgccaagctatcttccatgggtgtctcgctgggatcctgcacgctgccggctgtcggcaagccgggcttcgtgcttggcgagaccgaaatcgaagtcgggctcggtatccatggcgagcagggcgtgcagcggatgcccattgcctcggctgacgcgctcgtgcagctggtgatcgaaacgatcgaagccgacggcaagctcgccggcggcaatcgcgtcgctctgctggtcaacggcctgggggcaacgccgccgatggaactcgccatcgtcgcacggtcggcagtcgcgcggctggaggcgaaaggcatcgtcgtggaacgtgcctgggccggcaccttcctttcagccctcgatatgcccgggttttcgttgtcggtcatgcaggttgacgacgcagcgctcagcctcatcgacgcgccaaccgaggctggcgcatggccgcgcggcggtgcggtgaaccgcaagcgggttctgccttcggcaaacgccgaaaagaccgtggttgcgacaaacaagatgacggcggccggcgagcggcttcgttcgggcgcggaacggtccgcgagagccctgatcgctgcggagcccaggctgacgcaactcgatagcgttgcaggtgacggcgacctcggcgccagcatggtgcgtggcggcgaggcgatccttgcgctgccgaaagagagtttcggcgacgtctccgatggattgatggcgatggccaatgcgatgcgcaaggccatcggcggaagctcggggccgttctatgcgacaggcctcatgcgcgcttcgcgacagctggcagggatcgatgagccagcggcccagcagatggcggaagcattcgtggcggctgttgcggcggtctcggaacttggcggtgcgaaaccgggcgatcgcacgatgatcgatgcgctttatccggcagcgaaaaccttcagggacaagcttgtgacaggcgcttcggcagaagaagcctggcaatccgcggtggcggcgggcgaggtgggcgcagaggcgacagcgtccatgaagccacggctcgggcgcgcaagttacctcggtgagcgggccgtcggccatcccgatgggggcgcggtcgccgttggcatctggctcaaagctatcgaggctgcgatctcgtga

SEQ ID NO: 120326 - protein, 564 aa, Agrobacterium tumefaciens str. C58
MKKLINDPSTVVRDMLEGIVALSPETILLQDENVVIRSGLPEAEKRKVAVLSGGGSGHEPAHAGYVGTGMLTVAVAGDVFTSPSTDAVLAGIRAAAGPAGALVIVKNYTGDRLNFGLAAELARAEGIPVEIVVVADDVALKDTVPAERRRGIAGTVLVHKLAGAAAEKGLPLQEVARIARDAAAKLSSMGVSLGSCTLPAVGKPGFVLGETEIEVGLGIHGEQGVQRMPIASADALVQLVIETIEADGKLAGGNRVALLVNGLGATPPMELAIVARSAVARLEAKGIVVERAWAGTFLSALDMPGFSLSVMQVDDAALSLIDAPTEAGAWPRGGAVNRKRVLPSANAEKTVVATNKMTAAGERLRSGAERSARALIAAEPRLTQLDSVAGDGDLGASMVRGGEAILALPKESFGDVSDGLMAMANAMRKAIGGSSGPFYATGLMRASRQLAGIDEPAAQQMAEAFVAAVAAVSELGGAKPGDRTMIDALYPAAKTFRDKLVTGASAEEAWQSAVAAGEVGAEATASMKPRLGRASYLGERAVGHPDGGAVAVGIWLKAIEAAIS

SEQ ID NO: 120327 - DNA, 1719 bp, Sinorhizobium meliloti 1021
  CDS (1)..(1719): transl_table=11
atgaccacgatctttgacgctccggaagatttcgccacgaccgcactcgccggtttcgcagcgatctatcagcgcaacgtccgcctggtgaagggcggcgtcgtgcgctcgaccaaggtgccgaagggcaaggtcgccgtcgtggtcggcggcggctcgggacattacccggcctttgccggttatgtcgggccggggctcgccgacgcggcggtcgccggcgatgtctttgcctcgccctcgactgccgcggtagcccgcgtctgccgccatgccgaccagggcggcggagtgcttctcggcttcggcaattacgccggcgacgtcctgaatttcggggttgctgccgaacggcttcgctccgaaggcatcgacgtgcgcatcctgccggtgaccgacgacgtggcgagtgcgcccgcggaaacgtctgccaagcgccgcgggattgccggcgacctcgtcgtcttcaagattgccggcgcggcagccgaagccggcaagtcgctcgacgaggtcgaacggctcgcgcgtcatgccaatgatcggacggtatccttcggcgtcgccttcggcggctgcacgcttccgggtgctgccggcccgctcttcaccgtgccgaagggccagatggcgctcgggctcggcattcacggcgaaccgggcgtcagcgaggagacgatcgcgacggcgagcgatctcgcaaagctccttaccggcaagcttcttgccgagcgccccgagggctccaggaaggtggccgccgtgctgaacggcctcggctcgaccaaatatgaagaactcttcgtgctctggacggcggtcgccagacagctcaatgacgcgggtcttgaaatcgtcgaccccgaatgcggcgaattcgtcaccagcctcgacatgcagggctgctcgctcacccttctctggctggacgaagagctggaggcgctctggcgcgcgcccacggatgcgccggtgctgcgcaagggcgtgatcattgccgccgaaccggcgaccgacgagatcgtagacgccgacggaccgcagtctttcggccctgcatcggacgcctcgaaggaaagcggcaaatgcatcgcccggctgatcggcaatattgccgaggcgctcaaggaggcggaagaggagctcggccgcatcgacgcctttgccggcgacggcgatcacggccagggcatgcgccgcggttctgccgccgcattcgacgcagcacagaccgcggtcgtggcgggggcaggggctgcaagcgtacttgctgccgcgggcgacgcctgggcggaccgcgccggcggcacctcgggcgccatctggggcctggctctgcgctcctggagcaatgccctcagcgatgaggaaaaggtgagcgacgcggcgatcgtgaagggctcccgcctcgcactcgacggcgtcacgcgcctcggccgcgcgcgcgtgggcgacaagacgctggtcgacgcgctggtgcctttcgtggagacgctggaaagggaatccgccgccggcaggccgcttgtcgaagcctgggatgcggcggccaaggccgcacaagaggccgccgatgcgacctccgcgctgaccccgaaactcggccgggcgcggccgctggccgaaaagagcatcggccacccggatgcgggtgcggtctcgctggcgctggtggcacgggtcgcgggtgcgtttttgagggaagctgcggcgggttga

SEQ ID NO: 120328 - protein, 572 aa, Sinorhizobium meliloti 1021
MTTIFDAPEDFATTALAGFAAIYQRNVRLVKGGVVRSTKVPKGKVAVVVGGGSGHYPAFAGYVGPGLADAAVAGDVFASPSTAAVARVCRHADQGGGVLLGFGNYAGDVLNFGVAAERLRSEGIDVRILPVTDDVASAPAETSAKRRGIAGDLVVFKIAGAAAEAGKSLDEVERLARHANDRTVSFGVAFGGCTLPGAAGPLFTVPKGQMALGLGIHGEPGVSEETIATASDLAKLLTGKLLAERPEGSRKVAAVLNGLGSTKYEELFVLWTAVARQLNDAGLEIVDPECGEFVTSLDMQGCSLTLLWLDEELEALWRAPTDAPVLRKGVIIAAEPATDEIVDADGPQSFGPASDASKESGKCIARLIGNIAEALKEAEEELGRIDAFAGDGDHGQGMRRGSAAAFDAAQTAVVAGAGAASVLAAAGDAWADRAGGTSGAIWGLALRSWSNALSDEEKVSDAAIVKGSRLALDGVTRLGRARVGDKTLVDALVPFVETLERESAAGRPLVEAWDAAAKAAQEAADATSALTPKLGRARPLAEKSIGHPDAGAVSLALVARVAGAFLREAAAG

SEQ ID NO: 120329 - DNA, 1749 bp, Clostridium perfringens str. 13
  CDS (1)..(1749): transl_table=11
atgaagaaaataatgaattcagcagaaacactagtaagagaaatgtgtaacggaatggttatggcacacccagagttagaatttttaaacaagtataaggttgttaaaaagaaagatattaatgaagataaggtaacacttataagtggtggtggaagtggtcatgaaccagcacatgcagggtttataggaaaaggtatgttagatgtagctgtatgtggagatgtatttgcttcaccttcacaaatacaaatttatcaagcgataaaagcatctaagagcaataaaggtacacttcttataatcaagaattatagtggtgatatgatgaactttaaaaatgcagctcaccttgctacagaagatggaataaaagttgattacataaaggttgatgatgacatagctgttgaagatagtctttatactgtaggacgtagaggggttgcagggactgttttagtacataaaatagcaggagcagctgctgaaagaggaaatagcttagaagaagttaaaagaatagctaagaaagctgctagcagtgtaaaaagtataggatttgctttcacatcttgtactgttccagctaaaggaactccaacatttgaattaggtgaagatgaaatggaatatggagttggaatacatggagagcctggaattcgtagagaaaaaatagctacagcagatgaattagctgaaagaatggttaatcaacttataaatgaattagattataaagatgaagaattagttgtacttgtaaatggatttggagctactcctcttcaagagttatatttattaaacaactcagtatttagagaattacataaaagaggaattaaggtttgtaaaaacttcgttggcaactatatgacaagtatagatatggctggagcttcattatcaataatgaaacttgatgacgagttaaaagagttaatgaaagatgagtgtgatactctagcatttaaagttagtaatcatatggatatgaatgaatatgaagaagtagtaattgaagaaaaagaaattccagtatcatataaagttgaaacttgtgaatcattcaaagaaataaagaacgaaaagatttcacttgagaatatgatttacatattagataaaatgagtgaagtaataattgataatgaagtacctttctgtgaattagactctcatgcaggtgatggagactttggaatgagtgttgccaaaggatttagaatacttaaaagagagtggaaagatatattagaaatagaaaatttaaatatatcagagttcttaaatgcttgttcattagttataatggagcactgtggtggagcatcaggtccaatatggggatcagctttcagagcagcaagcaaaaatgttataaacaaagatgaattaacagttaaagattttgcagaaatgatgcaagaagcagtattaggaattcaaaaaactggagagcgttcatttggaagaggagctgtagttggtgataaaacattaatagatgctttagtaccttgtgcagattcttggacaaacagtgctgaagaaggattaagtttcaaagaagcatttaaaaatggtgcagaagcagcagttttaggagctaagaaaacagaagaaatagtagctcgtatgggtagagctggtacagtaggtgaaagaagtattggttatccagatgcaggagcatatggtttaggtgtaatcttcactgaaatatcaaatgatattaaataa

SEQ ID NO: 120330 - protein, 582 aa, Clostridium perfringens str. 13
MKKIMNSAETLVREMCNGMVMAHPELEFLNKYKVVKKKDINEDKVTLISGGGSGHEPAHAGFIGKGMLDVAVCGDVFASPSQIQIYQAIKASKSNKGTLLIIKNYSGDMMNFKNAAHLATEDGIKVDYIKVDDDIAVEDSLYTVGRRGVAGTVLVHKIAGAAAERGNSLEEVKRIAKKAASSVKSIGFAFTSCTVPAKGTPTFELGEDEMEYGVGIHGEPGIRREKIATADELAERMVNQLINELDYKDEELVVLVNGFGATPLQELYLLNNSVFRELHKRGIKVCKNFVGNYMTSIDMAGASLSIMKLDDELKELMKDECDTLAFKVSNHMDMNEYEEVVIEEKEIPVSYKVETCESFKEIKNEKISLENMIYILDKMSEVIIDNEVPFCELDSHAGDGDFGMSVAKGFRILKREWKDILEIENLNISEFLNACSLVIMEHCGGASGPIWGSAFRAASKNVINKDELTVKDFAEMMQEAVLGIQKTGERSFGRGAVVGDKTLIDALVPCADSWTNSAEEGLSFKEAFKNGAEAAVLGAKKTEEIVARMGRAGTVGERSIGYPDAGAYGLGVIFTEISNDIK

SEQ ID NO: 120331 - DNA, 1782 bp, Streptomyces coelicolor A3(2)
  CDS (1)..(1782): transl_table=11
atgacccgcctgttcaacgacccggccgccttcgccgacgaggcgctggagggcttcaccgccgcgcaccggcgctgggtccggccggtcaccggcggcgtcgtccgggccaccgccaccccggccggccaggtcgccgtggtgatcggcggcggttccggccactaccccgcgttctccggcctggtcggccgcggtctggcacacggcgcggccgtcgggaacgtcttcgcctcgccctccgcccggcagatccactccgtggccaccgccgcgcacgggggcgggggagtcctgctgatgtacggcaactacgccggtgacgtcctgcacttcggacaggccgccgagcgactcgccgccgacggcatcgagacccggacgttcgccgtcgccgacgacatctccagcgcgggccccgacgaatccgccaagcgccgcggcatagccggtgacctgcccgtcttcaaggcggcggccgccgcggccgagcagggcctgcccctggaggaggtgctgcgcgtcgccgaacgggcgggcgtccgcacccgctccttcggcatcgccttctccggctgcaccctgcccggcgccgaccatcccctgttcaccgtgcccgaggcccggatggccgtgggcctcggcatccacggcgagcccggcatcggcgaggaggccctgcccaccgccgacgaggcggccctgctgctcgtcgagacactgctcaaggaactccccgacgacgtcgccgacccggcgggccggcgcgccgccgtgattctcaacggcctcggctcggtcaagtacgaggagctgttcgtcgtctaccgcaaggtcgccgccctgctcggcgacgccggtgtggagatcgtcgacccggaggtcggcgaactggtcaccagcttcgacatggccggcatctcgctgacgctgacctggctggacgaccggctggaggagctgtggcgggccccggccgacacgcccgcctaccgcaagggcgccctcggcgacccggagcccgaccaggaccgggcggccgcgaccgcgggccaggacacggccgcggcccaggacaccgccgtgtccgacgcggccgcctccggcaccacggccgtacccgtcgcctcggacgcctcccgccgggccgccggcaccgtcctggccgcgctggacgcggtggcccgagtcgtcgacgcccacgccggcgaactcggccggatcgacgccgtggcgggcgacggcgaccacggcatcggcatgcggcgcggctccagcgcggcgcaccgggccgcccacgacgcccaccgggtcggcgcgggcgccggaaccgtcctcacccgcgccgccgacgactgggccgacaaggcgggcggcacctccggcgccctgtggggcacgatcctgcgctcactcggcacggccctcggcgaccgggacgcccccgacgccgcccgcgtcgccgaaggggtcacggaggcctccgccgccgtacgcagactgggcggggccgaggtcggcgacaagaccatggtcgacgtcctggtccccttcgccgacgcgctggccgccgccacggccgagggcctgcccctcgccgaggcctgggaccgcgccgccaccaccgccaccgcggccgccgccgggaccgccgacctgctgccccgccggggccgggcccgcccgcacgccgagaagtccctcggcacccccgacgcgggcgcccactccctcgccctgatcacccgcgccgtccacggcgcactgctcgaccaccactga

SEQ ID NO: 120332 - protein, 593 aa, Streptomyces coelicolor A3(2)
MTRLFNDPAAFADEALEGFTAAHRRWVRPVTGGVVRATATPAGQVAVVIGGGSGHYPAFSGLVGRGLAHGAAVGNVFASPSARQIHSVATAAHGGGGVLLMYGNYAGDVLHFGQAAERLAADGIETRTFAVADDISSAGPDESAKRRGIAGDLPVFKAAAAAAEQGLPLEEVLRVAERAGVRTRSFGIAFSGCTLPGADHPLFTVPEARMAVGLGIHGEPGIGEEALPTADEAALLLVETLLKELPDDVADPAGRRAAVILNGLGSVKYEELFVVYRKVAALLGDAGVEIVDPEVGELVTSFDMAGISLTLTWLDDRLEELWRAPADTPAYRKGALGDPEPDQDRAAATAGQDTAAAQDTAVSDAAASGTTAVPVASDASRRAAGTVLAALDAVARVVDAHAGELGRIDAVAGDGDHGIGMRRGSSAAHRAAHDAHRVGAGAGTVLTRAADDWADKAGGTSGALWGTILRSLGTALGDRDAPDAARVAEGVTEASAAVRRLGGAEVGDKTMVDVLVPFADALAAATAEGLPLAEAWDRAATTATAAAAGTADLLPRRGRARPHAEKSLGTPDAGAHSLALITRAVHGALLDHH

SEQ ID NO: 120333 - DNA, 1731 bp, Nasonia vitripennis
  CDS (1)..(1731)
atggcagggaaaagtttgcttaactctctcgctgacgcagtgaacgaatccttaactggttgcattttaacgtatccacaccttgaacttcatgcgtcaaagagagttgttttgaagcccacatggaatgaaccaagtgataaagtgtctgtgataagcggaggaggaagtggtcatgaacctttttcagcaggctttgttggagatggcatgttatcagcatcagtctctggctcgatctatgctgcgcccccttctggtcatgttctttacgcgatccagtcagtctcaacaaataacaaagctggatgtcttgttattattccaaactacacaggggactgcttgaatttcggattagccattgaaaaagccagatacttgggcataaaagtctcacaagttattgtcggagaggactgcagtattccggatgacgaagtgggcagagcaggaaaacgcgctttacctggtattgtcctagtgctgaaggttgcaggtgccgtggcgcaagaaggtcatagtcttgaagaggtcaccaatttcgctcaaatggtagcggataatatggcgtcttgttcagtcggactaacagcctgtacaattcctggtcaaggacgcatgttcgaactaccagaagacgaaatagaattcgggcaaggcttacacggagaagctggctacaaaagaatcaaattacagtcttcctccaaaactacagccattatgatcgacactattgtcaaagctctcaaactcgttaaggggaattctgtggctgttctagttaataattttggcggtttgagccaattggagcaaggagtcgttgttaaagacgttgttactcagcttgaaaacatggaaatcttaccattacgagtgtacgcgggacttgtaatgacatccctagacagcgtaggagtacacatcactatcctgaagattccggaaaatcacaaaacggcggtgatcaacgcactcgatgaaaaaacagatgctccaagatggcccgggtgttcgtacagtctaccttcaaaatattacaacgctcctgctaaagaggaaaaactaagtaaaactctcgttggtccatctttgaccagtgagcaagagaagttattaaaaatttgtttggaaaaagcttgtcgcgaaataattgagagggaaaagataattaatgatctggatcgaggctgcggagatggagactgtggaatgacgctcaagcatcttggtgaaggaatactttcaacgattgataaactgccgctatcgcatctttcgtctctattatccgaattagcaaatattgcagaggaccacatgggaggtacatcaggagctatttacagtttgatgttcaccgccgctgcagttgaaatgtccaagattaacaatgccgaaaattggttgaaggtttgggcgcaagtttggcgtgcgggaatcaacggtattatgaaatatagcaaagccaaattaggagataaaacaatgattgatgtattagagccatcgttaaacgagctcgataaaaacttatatctttcctacaaagaagcagctagaaaagtcgctatttgtgctgagcagcgatctgaagccacaaaacacatggtcccgagagcggggcgagcaagctatgtgaaacaagcggaatatttgaaaggaattgatgcaggagcttttgctgtggccacttggataaatgcaatatcagaagctctatga

SEQ ID NO: 120334 - protein, 576 aa, Nasonia vitripennis
MAGKSLLNSLADAVNESLTGCILTYPHLELHASKRVVLKPTWNEPSDKVSVISGGGSGHEPFSAGFVGDGMLSASVSGSIYAAPPSGHVLYAIQSVSTNNKAGCLVIIPNYTGDCLNFGLAIEKARYLGIKVSQVIVGEDCSIPDDEVGRAGKRALPGIVLVLKVAGAVAQEGHSLEEVTNFAQMVADNMASCSVGLTACTIPGQGRMFELPEDEIEFGQGLHGEAGYKRIKLQSSSKTTAIMIDTIVKALKLVKGNSVAVLVNNFGGLSQLEQGVVVKDVVTQLENMEILPLRVYAGLVMTSLDSVGVHITILKIPENHKTAVINALDEKTDAPRWPGCSYSLPSKYYNAPAKEEKLSKTLVGPSLTSEQEKLLKICLEKACREIIEREKIINDLDRGCGDGDCGMTLKHLGEGILSTIDKLPLSHLSSLLSELANIAEDHMGGTSGAIYSLMFTAAAVEMSKINNAENWLKVWAQVWRAGINGIMKYSKAKLGDKTMIDVLEPSLNELDKNLYLSYKEAARKVAICAEQRSEATKHMVPRAGRASYVKQAEYLKGIDAGAFAVATWINAISEAL

SEQ ID NO: 120335 - DNA, 1782 bp, Magnaporthe grisea 70-15
  CDS (1)..(1782)
atgtctgctagacactttgtcaacgacccaacccacctggtcaacacggccctgcacgccatcaccatcaccaatccctcggtagcatgcgacgccgagaacaagataatctacgtgcggccggactcgcgccgcccaagacagcccgtcgccatcatctccggcggcggctccggtcatgaaccgtcctttggcggcatggtaggccgtggcctactttcggccgccgtggccggcacaatattcgccagcccgtccaccgagcaggtccgcaccgccatcacgtcgagggtagaggtcggcgacagggcagacgggggcggcgtgctcatcaccgtcatgaactacacaggcgacatactcaactttggcgtcgcagccgaaaaggcgcgtgcggccggcatcaacgtcgagatggtcgtcatcggggatgacgttggcgtcggccgtgcaaagggtggtaaggtcggccgtcgcggcatcgccggcaccgtcctggtggataagatcgccggtgccctggccgcgcggggcgccaacctgtccgaggtgacccacgtcgctcgtcttgtcgcatccaacgttgccagtatcggcgccagcctcgaacacgttcacgtccccggccgcaaggcagcagaccaggaggacaccttggccgagggcgaggtcgagatcggcatgggcatccacaacgaacctggatcgggtcgtgagaaggaccttgagctgcccgcgcttgtggagcggatgctggcgcagctgctcgaccagaaggacgctgaccgcgcgtatacgcaggtcggcagcggcgacaagttcgtcctgctagtcaacaacctcggcggtgtgagcgttttggaaatgggcggcattaccgcagaggtggcgaagcagctagggacgacgtgggccatcaagccggtgcgagttctcgccgggacctttatgaccagcctcaacgggctgggttttagcatctcactgctgaaggtagttgatactggcagttctgcaacaatggtgcagttgttggacgacccctgcgaggccactggatggtctgcccctatcgctaccgagacatgggactcgccgcctacggcaaccaaagagggcaacttgaaggaggagagagatctcaagcctactgggctgaggttggatgccgccgttgctcaaaacgctatcactgcagcattggaaaatgtcattgccgttgagcctgaggtcaccaagtacgacacggtggttggcgatggcgactgtggtattggcttgaggaggggcgctgaagccgtactcaaacaccttgcgagcaacccactaagtggcgatgccgcggtcgacgtggcaagcatagtgccggtcgtggagaatcacatggacggcacatctggcgctctgtactccatcttcctaaatgcaatgctccgatcactgcgcgacaacgctccttcatcgggcgagtcgacagcctcccctgagctgtgggccaaagtactgaaggagagctgcaaggcgctcggaaactactcgcaggcacaagtgggcgaccgaactctgatcgatgctctccacccattcgtaaacacgctcgcagagaccggcaatgtaggcactgccgccagcgcagcccaaaagggagctgaaagcaccaagggcatgaagcccagctttggcaggtcgacatacgtgggaggaaccggtttcgaacaggtacccgacgctggagcttggggacttgctgccttctttaatgggttagcaagacaatcttaa

SEQ ID NO: 120336 - protein, 593 aa, Magnaporthe grisea 70-15
MSARHFVNDPTHLVNTALHAITITNPSVACDAENKIIYVRPDSRRPRQPVAIISGGGSGHEPSFGGMVGRGLLSAAVAGTIFASPSTEQVRTAITSRVEVGDRADGGGVLITVMNYTGDILNFGVAAEKARAAGINVEMVVIGDDVGVGRAKGGKVGRRGIAGTVLVDKIAGALAARGANLSEVTHVARLVASNVASIGASLEHVHVPGRKAADQEDTLAEGEVEIGMGIHNEPGSGREKDLELPALVERMLAQLLDQKDADRAYTQVGSGDKFVLLVNNLGGVSVLEMGGITAEVAKQLGTTWAIKPVRVLAGTFMTSLNGLGFSISLLKVVDTGSSATMVQLLDDPCEATGWSAPIATETWDSPPTATKEGNLKEERDLKPTGLRLDAAVAQNAITAALENVIAVEPEVTKYDTVVGDGDCGIGLRRGAEAVLKHLASNPLSGDAAVDVASIVPVVENHMDGTSGALYSIFLNAMLRSLRDNAPSSGESTASPELWAKVLKESCKALGNYSQAQVGDRTLIDALHPFVNTLAETGNVGTAASAAQKGAESTKGMKPSFGRSTYVGGTGFEQVPDAGAWGLAAFFNGLARQS

SEQ ID NO: 120337 - DNA, 1770 bp, Magnaporthe grisea 70-15
  CDS (1)..(1770)
atgtccaaacgacatttattcccctcatcaacgggcctcgtccccaaagccctccgtggcatagtcgcttacaacccctccctatccctcgacgagaccaaccgcgtcgtctttgacacaacacatcctacctcacaagtctcactcatcagcggcggcggctcaggacacgagcccgcctggtccggctatgtcggcaccaacatgctggccgcctcggtggcgggcgacatctttgccagcccgtccaccaagcagatcctcgcgggaatcgccgccgtcccgtccgacaagggctccatcctcgtcatcaccaactacacgggcgactgtctgcactttggcctggcggcggaaaaggccggccccaagtgcagggtgctgatctgcggcgacgacgtctcggtcggacgcagaggcagcctggtcggccgccgcgggctggcgggccagatcggcgtgctcaaggtcatgggcggcgcggccggccgcggcgactccctcgacgacgtctacgacctcggcgccgcctttgccgaccagatcgtctccatcgccgccaccctcgaccactgccacgtccccggccgcgccgagcacggcatgctggatccggacgaggtcgagatcggaacgggcccgcacaacgagcccggataccgcaagatctcgccgcatccctcgccggagcagctcgtggccgaggtgctgcgctactgcctcgacgaaaaggaccccgagagggcgtacgtcaagttcgcgccgggcgacgagaccttcctcctggtcagcaactttggcggcatgtcgcacctcgagatgggcgcgctggtcgacgagctgctggagcagctggcgcgggactggaacctccacccggcgcgcgtctactgcggcccgctcgagacctcgctcaacgccccggccttttccgtctcggtcgtcaacgtgacggcggccgccgcggcgtgcaagtatagcgtcgacgacatcaaggcctttgccgacgtcaagaccagcacgcactgggagtcgtacgccggatcccaatcggcgcggcggccccgggcggagcagtttgtcaagccgcccgccgaggcgcagcgcaccgtcgacccggcgcgcgacctcacggcggacgcggcgacgctcgaggcgatgctgcgccgcgcgtgcgagcagctcgcgcgcgccgagcccgacctcaccaagtgggacatggtcatgggcgacggcgactgcggcgagacgctcaagacgggcgcggaccacctcctcgcggcgctggacaaggggctggcgcgcggcgggtccgtcgtcgccgtcctgcacgagctcgaggacatagtggagagcaagatgggcggcacgctgggcggcatcctgggcatcctgtttgtggcgttccgcaacggcgtcgagcgccgcgccgcggagggtgcggcggcggcgcaggcggatctggtggggagcctggcggcggcgctgctcgagggtctcgcgtcgctggagcgctacacgccggccaaggttggtgatcgcaccgtcatggacacgctcatcccgtttgcgcaggcgctgcagaaggatgggttcgaggcggcggccaaggcggccgtcgagggcagcgaggctacaaggggcatgaagccgaggttgggcagggcgacgtacgtcggggctggtagcgaaggcggcgagctgcctcctgatcctggagcgtggggtgcccgggttgctattgaggggttattttcagggtggaaatag

SEQ ID NO: 120338 - protein, 589 aa, Magnaporthe grisea 70-15
MSKRHLFPSSTGLVPKALRGIVAYNPSLSLDETNRVVFDTTHPTSQVSLISGGGSGHEPAWSGYVGTNMLAASVAGDIFASPSTKQILAGIAAVPSDKGSILVITNYTGDCLHFGLAAEKAGPKCRVLICGDDVSVGRRGSLVGRRGLAGQIGVLKVMGGAAGRGDSLDDVYDLGAAFADQIVSIAATLDHCHVPGRAEHGMLDPDEVEIGTGPHNEPGYRKISPHPSPEQLVAEVLRYCLDEKDPERAYVKFAPGDETFLLVSNFGGMSHLEMGALVDELLEQLARDWNLHPARVYCGPLETSLNAPAFSVSVVNVTAAAAACKYSVDDIKAFADVKTSTHWESYAGSQSARRPRAEQFVKPPAEAQRTVDPARDLTADAATLEAMLRRACEQLARAEPDLTKWDMVMGDGDCGETLKTGADHLLAALDKGLARGGSVVAVLHELEDIVESKMGGTLGGILGILFVAFRNGVERRAAEGAAAAQADLVGSLAAALLEGLASLERYTPAKVGDRTVMDTLIPFAQALQKDGFEAAAKAAVEGSEATRGMKPRLGRATYVGAGSEGGELPPDPGAWGARVAIEGLFSGWK

SEQ ID NO: 120339 - DNA, 1740 bp, Gibberella zeae PH-1
  CDS (1)..(1740)
atgtcagccaaacactttgttaacgatccaacccacctcgtctcctcagctctccacagtctcactctcaccaacccctcagttgctctagatccagaattcaaagtcatataccgtcgtcctgattccaatgtcaaacctcaagtatccatcatctcaggcggcggctctggccatgagccttccttcgcaggtatggtcggccaaggcatgctctctgctgctgtagccggtaccatatttgcctccccttcagcggagcagatacgcgcagccattacttctcgcgtcgacacgtccaagggtgtgttggtcaccgtaatgaactacactggtgatgtcctcaactttggcatggctgtcgaaaagggaaaagctgcagggcttgacgttgaaatggtcgttgtaggcgacgatgttggagttggccgcgccaaagctggaaaggttggacgtcgtggaatcgcgggcaccgttcttgtccacaagatctcaggtgccctcgctgctctaggaaagcctctggagcaggtagccaaatatgcccagcttactgcagacaaccttgtcagcgtgggcgccagtctggaacacgtgcatgttcctggtcgcaaggtcgatacagaggcaagtctcgcagcagacgaagtggaattggggatgggcattcataacgagcctggttctggacgcgaaaaggttgaattgcctgaccttgtgactaaaatgcttcaacaattgctcgacgccaacgacaaagaccgagcgttcgtcaacgtcagctctaaacaagtcatcctcatgatcaacaatctgggaggagttagtgttctagagatgggcggtatcacagcagaggttgcgagccaacttgagtctaagtacgatattcatcccgtcagagtactcagcggcacatacatgactagtctcaacggtctcggtttcagcatttctcttctcaacgttgtggctcccgattttgacgctccgagtatgattgagctgcttgatactcccagcgaggtcgttggttggtctgctcctatcaaaaccagcacttgggaggccaaaaacactagcacgagaaccgatcgtgttagtgcgaccgaggacatcaagtctagtgatcttaaaacagatgcaagcagcgctcaatcagcattaaagaatgcgctgcaaaaggtcatcgatgctgagcctgaagtcacgcgttatgatactgtcgttggggacggtgactgcggtatcggattgaagcgaggcgccgaagcaattctgaaacatatggaacagcgctctctcactggtgatgttgttgtggaccttgctcgcatcgtgacaatcgtggaaacagccatggatggaacctcgggtgctctgtatgccatcttccttaacgccctggtcaaggctcttcgagagctggcaccgggcaatgcatctccggaagtctggggcaaagctcttaggaaaagcagcgatgctctggccagatacacacccgctcgcccgggcgaccgtactctggtcgacgctctccacccctttgtggaagtgctgaaccagacaggagatgtcaagaaggcagctgaggcagccttggaaggggctaacaagaccaagggtatgcaagctagtttgggccgaaccgtttatatcggaggtggtggatatcaggaggttcccgatcctggtgcttggggactggcctgcttcttccttggtctggctggttag

SEQ ID NO: 120340 - protein, 579 aa, Gibberella zeae PH-1
MSAKHFVNDPTHLVSSALHSLTLTNPSVALDPEFKVIYRRPDSNVKPQVSIISGGGSGHEPSFAGMVGQGMLSAAVAGTIFASPSAEQIRAAITSRVDTSKGVLVTVMNYTGDVLNFGMAVEKGKAAGLDVEMVVVGDDVGVGRAKAGKVGRRGIAGTVLVHKISGALAALGKPLEQVAKYAQLTADNLVSVGASLEHVHVPGRKVDTEASLAADEVELGMGIHNEPGSGREKVELPDLVTKMLQQLLDANDKDRAFVNVSSKQVILMINNLGGVSVLEMGGITAEVASQLESKYDIHPVRVLSGTYMTSLNGLGFSISLLNVVAPDFDAPSMIELLDTPSEVVGWSAPIKTSTWEAKNTSTRTDRVSATEDIKSSDLKTDASSAQSALKNALQKVIDAEPEVTRYDTVVGDGDCGIGLKRGAEAILKHMEQRSLTGDVVVDLARIVTIVETAMDGTSGALYAIFLNALVKALRELAPGNASPEVWGKALRKSSDALARYTPARPGDRTLVDALHPFVEVLNQTGDVKKAAEAALEGANKTKGMQASLGRTVYIGGGGYQEVPDPGAWGLACFFLGLAG

SEQ ID NO: 120341 - DNA, 1785 bp, Gibberella zeae PH-1
  CDS (1)..(1785)
atggtgaaacactatttttcagaggcggctgccaatcacttagtgcctcgagcactgcgttcccttgtcgctgcaaacccccatctcatcctcaacgaagccgagagagtcgtagccaatggctatcacgacccttcaaaagtcgcaatcatcagtggtggcggttcaggtcatgaaccttcatggagcggttttgtaggcgaaggtctactatctgcagtagcatgcggtgatatctttgcgtcgccaagtacaaagcagatcttggccgctagaaggcttgcaccttcgaccaagggaacaatattccttatcaccaactacactggagatagacttcactttggtcttgctgctgaaaggtcaaaggcggatggatcaggggaagattatctcgtcctccctgcgacagatgatgtttctatcgggaggagcagatctgaacgcgtcggcaggagaggaatgcccggccatgtgttaacgatgaagaccctttgcgctgcagccgcagagaactggtctttcgaacaatgcgtatccctcggccgagccgtcaacgatcatacagtctcaattggctcgtcccttgaccactgccacgttcccggtcgacagtaccaaaagatctccgatgatgtctgcgttatcggagctgggattcacaacgagccaggacaacaacttgtatctccttttccgcctgttgaggaagtcatcaagtccctgttggacctactatgcagccagaacgaccacgaaagagccttttgtaaatttgacaacgacgacgaggttttactgcttgttaataactacggcggtctttccaatcttgagcttggtgctttgttggacgagattcaacagcaactcgcatcaacatggtcgatcaaaccagttcgatgcttgtcggggtcttttgagacatctctaaatgcccccggattctccatctccctctgcaacatatcagctgctgcaaaacagtgtcaatcaacaacttccacattactcgaattattcgaccgacctacgactgctgtttcctggcccaacctcgtcagaccgtcgccaaagcaaactcccactgttcaacaccaagcgaatggccacgtcaatggaaaggttgcagccacttctgtcgaaaagtacgattcagtggacccatcagtgcttgaggctagcatccgaagagcttgcgaaaaagccattgctgctgaaccaaagctcactaaatgggacataatgatgggcgatggagactgcggagacgccgtcaagggtctctgtgaatctgtccttcgcaaactagacgaaggtgttggcacctctggttccgttgtgtccttcctagaagcaatcaccgatactgttgatgatatgggcggcacgctgggagctatcttgggtattctcctcacagctttcaacaacgcccttaagaggcgcctgaaagaagttggacaagaaggactttcagaaacatacgcccccgctctcaacacagccgtcgaatcacttaagacatgcactacagcaagagaaggagatcgtactgttatggatgttctgatgccgtttacggatgagtttgtcaagaccaaaagctttggaatggcagtttcaaaagcgcaggaaaaagcagaagcgacggcgtttctaagaccaaagcttgggagggcattgtatgtaggcgaggcgagtgaacagcaggtacctgatccaggagcttgggcgttatatgagatgttgtcagggatgcaagaagtcttagggaagaactag

SEQ ID NO: 120342 - protein, 594 aa, Gibberella zeae PH-1
MVKHYFSEAAANHLVPRALRSLVAANPHLILNEAERVVANGYHDPSKVAIISGGGSGHEPSWSGFVGEGLLSAVACGDIFASPSTKQILAARRLAPSTKGTIFLITNYTGDRLHFGLAAERSKADGSGEDYLVLPATDDVSIGRSRSERVGRRGMPGHVLTMKTLCAAAAENWSFEQCVSLGRAVNDHTVSIGSSLDHCHVPGRQYQKISDDVCVIGAGIHNEPGQQLVSPFPPVEEVIKSLLDLLCSQNDHERAFCKFDNDDEVLLLVNNYGGLSNLELGALLDEIQQQLASTWSIKPVRCLSGSFETSLNAPGFSISLCNISAAAKQCQSTTSTLLELFDRPTTAVSWPNLVRPSPKQTPTVQHQANGHVNGKVAATSVEKYDSVDPSVLEASIRRACEKAIAAEPKLTKWDIMMGDGDCGDAVKGLCESVLRKLDEGVGTSGSVVSFLEAITDTVDDMGGTLGAILGILLTAFNNALKRRLKEVGQEGLSETYAPALNTAVESLKTCTTAREGDRTVMDVLMPFTDEFVKTKSFGMAVSKAQEKAEATAFLRPKLGRALYVGEASEQQVPDPGAWALYEMLSGMQEVLGKN

SEQ ID NO: 120343 - DNA, 1884 bp, Apis mellifera
  CDS (1)..(1884)
atgcgtgctatacaattattatcaaaggccattaagacatgtcattgcaattttcctgtgtacagaattgtaccgaacgaggttcgtatgactcattacgaatatttcggtcagtcaaattctacaaagattttattaagaatgatgaaaaccttacataataatgtcaacgataccgtcaaggaatctctttacggtgtaacatatgcatttccgcaattggaatatcaagtagctcacaaagttgttcttatgccaaagcttcgagatcgaagaaaagtatctttaatatgtggtggcggaagtggacatgaaccttttgcgtcaggttacgttggtaatggtatgttagctgcagctgtagcaggttcaatatattctgcaccaccatcagaacacgtttcttatgctatcaatcgcgtttctgaatacaataatactggtgtcttagtaatcgctccgaattatactggcgattgtcttaattttggaatagcaatcgagaaagctaaacaaaaaggtataaaggttgcaaatataaatgtaaacgaagactgtagtataccggaaaaagatcaaagtcgagctggtaaacgtggtttaactggaattgtatttgtgattaaaatagctggtgcagtagcggaagaaggatcatcacttgaaacagtctataaaactgcacacgatgttttggataatttagctactacttcggttggattgactgcatgtgcaataccaggtcaacgtcgaatgttcgaacttgcagacgatgagatcgaagttgggatgggaattcacggagaggctggatatgaaaaaacgaaattaaaaccatcgtatgagatagcttcattgatgttggaccgcataaccaccgtattatctttaaaaagtggagattcagttgcagttatgattaataattttggagcattaagtcaattggaacaagggatagttgctcacgatgtggtcaaagtactccgcaatatgaatataaatcctgttcgaatatattggggaatgataatgacatcgttaaatagcgctggagtacacgttacgcttttaaaattacctgacaagcataaaagtttttttcttaaatgtctcgatgcaccaactgatgcaccaaagtggctaggtagcaagtttagcattcctttagaaccgccagaaccgatcattcaacatgaagtaatacgaaaagtagataaaactggtatagaactttcttcagatttacaaaatttattaaaaaattgtttaaaaaatgcttgcgacaatgcgattaaagaagaagaacatctgaacgatttagatagaggatgcggagacagtgatgcaggatcaacgcttaagagacttgccatgagaactttgttaaatttagatacaatacaattttcacatccagcgtcggcatttcttgaattagcgcatatagccgaagaagaaatgggtggtgcatctggagcattgtattgtctattttttactagtattagtacgcaattaatttcacctacagacaaaagttggacagaaatttgggctcgtgcgtttcgtaccgctttaaatagtttaacgcaatatggaaaagcgatgccaggagatagatctttgattgatccacttaatgctctttgcaacacctttgacagaatggtgcacaaaccattaggagaaatttgtgacgcgttacgtacatcaacttcgcaagcgtgtgaagccacaaaacatatgaaacctatggtaggccgtgctagttatgtaaaacaagctaaatatttacaaaacgtcgatgctggtgcatatgcagttgtaacttgtgtcaatgctgttacagatgtaattaaaactttctattcttcctaa

SEQ ID NO: 120344 - protein, 627 aa, Apis mellifera
MRAIQLLSKAIKTCHCNFPVYRIVPNEVRMTHYEYFGQSNSTKILLRMMKTLHNNVNDTVKESLYGVTYAFPQLEYQVAHKVVLMPKLRDRRKVSLICGGGSGHEPFASGYVGNGMLAAAVAGSIYSAPPSEHVSYAINRVSEYNNTGVLVIAPNYTGDCLNFGIAIEKAKQKGIKVANINVNEDCSIPEKDQSRAGKRGLTGIVFVIKIAGAVAEEGSSLETVYKTAHDVLDNLATTSVGLTACAIPGQRRMFELADDEIEVGMGIHGEAGYEKTKLKPSYEIASLMLDRITTVLSLKSGDSVAVMINNFGALSQLEQGIVAHDVVKVLRNMNINPVRIYWGMIMTSLNSAGVHVTLLKLPDKHKSFFLKCLDAPTDAPKWLGSKFSIPLEPPEPIIQHEVIRKVDKTGIELSSDLQNLLKNCLKNACDNAIKEEEHLNDLDRGCGDSDAGSTLKRLAMRTLLNLDTIQFSHPASAFLELAHIAEEEMGGASGALYCLFFTSISTQLISPTDKSWTEIWARAFRTALNSLTQYGKAMPGDRSLIDPLNALCNTFDRMVHKPLGEICDALRTSTSQACEATKHMKPMVGRASYVKQAKYLQNVDAGAYAVVTCVNAVTDVIKTFYSS

SEQ ID NO: 120345 - DNA, 1749 bp, Candida glabrata CBS 138
  CDS (1)..(1749)
atgaagtcatttgaagttcaagagccattgcaaaagagcattgaagggtttgcccagagcaatccctctctggcagttgtgccggaggacagagtgttctacagagctggggacaagagccaagtggcactgatctctggtggtggtgcaggtcatgaacccgctcatgcaggtttcatcggtaaaggtatgttgaccggtgctgttgttggtgacatattcgcttctccttcgacaagacagattctgcacggtatcaaactgattgccaaggactctaatgggatcctattgatattgatgaactacaccggtgatgttctgcattttggtctttccgctgagagagctagagcactgggcattgactgccgtgtcatcgctgttggtgatgatgtcgcagtcggcagggaaaagggtggtaaagttggtagaagaggtctagcaggcaccattctggtcgagaagttgacaggtgctttcgtgactcgttttgctggccaacacaatcttgcagatgcttacaaggttgctgacatctctcgtaatgctttggttacaattggttcctcaattgaccattgcaaagtcccaggaaggaaatttgagagtgaattgggtgaaaactcaatggaactgggtatgggtatacacaacgaacctggtgctcacgtcttgactccaattccagccacagaggacttgattgagaaccaaatgcttccaaaactgttagatccatcagacaaggacagatactttgttccattcgagaaagatgatgaggttgtgttattagtgaacaatctgggaggtgtctccaacttgatcatgagttccattgctgctatcaccaccgatttattgaagaagaagtatggcatcgtccctaagcagacaattactggttgtttgatgacttcttttaacatggatggtttcagtattaccttgatgaacgttagtaagatctccaaggagatgaaggctgctttcccagacaaagaaattgacgtcatgcaattactaagagaccctaccgatgcaccaggttggccaattagcagctatgagctgccaccaactgtggatcatgaactattgaaagatgaagaaatccctcatggtgttggtcactacgattttgacagctttgccaaatggatgaagggtgctgccgcaaatgttgagaaagaagaaccaagaatcactcaattggataccctagttggtgatggtgattgtggttacactttgctcgctggttgcaagggtattacagataacttggacaagatctcaaagactcatttgtctagtgccatggataagatttcggagtatgtcgaagcatccatgggtggtacctctggtggattatactctatcttgatttcaggttttgtgcacggcttgcaagctacttgtaaagacagcagtgaaaaggttacccccgaggtattggccaaatcattccaaattgctctagacaccttatatcattacactaatgctagaccaggtgcatcaacaatgatcgacgctctagtgccatttattgatgagtttgcaaagactcatgatttcaagaaggccgttgaagcagcagataaaggtgctcaatccaccgcagacattgtcgctgaattcggaagagcttcatacgtggaaaactctcaaggtatcccagaccctggtgctgttggtctagtagcatttttgaagggtgttgaaggcactatgcaatga

SEQ ID NO: 120346 - protein, 582 aa, Candida glabrata CBS 138
MKSFEVQEPLQKSIEGFAQSNPSLAVVPEDRVFYRAGDKSQVALISGGGAGHEPAHAGFIGKGMLTGAVVGDIFASPSTRQILHGIKLIAKDSNGILLILMNYTGDVLHFGLSAERARALGIDCRVIAVGDDVAVGREKGGKVGRRGLAGTILVEKLTGAFVTRFAGQHNLADAYKVADISRNALVTIGSSIDHCKVPGRKFESELGENSMELGMGIHNEPGAHVLTPIPATEDLIENQMLPKLLDPSDKDRYFVPFEKDDEVVLLVNNLGGVSNLIMSSIAAITTDLLKKKYGIVPKQTITGCLMTSFNMDGFSITLMNVSKISKEMKAAFPDKEIDVMQLLRDPTDAPGWPISSYELPPTVDHELLKDEEIPHGVGHYDFDSFAKWMKGAAANVEKEEPRITQLDTLVGDGDCGYTLLAGCKGITDNLDKISKTHLSSAMDKISEYVEASMGGTSGGLYSILISGFVHGLQATCKDSSEKVTPEVLAKSFQIALDTLYHYTNARPGASTMIDALVPFIDEFAKTHDFKKAVEAADKGAQSTADIVAEFGRASYVENSQGIPDPGAVGLVAFLKGVEGTMQ

SEQ ID NO: 120347 - DNA, 1758 bp, Kluyveromyces lactis NRRL Y-1140
  CDS (1)..(1758)
atgtctgtcgaaatcaaatcctttgaactttccgatccattaactgctagcttgaaaggttttgcagacactaatcccaatgttgagttgatcttgaaagagaagatcatcttccgaaacaccgaaaaagacaaggtagctttaatttctggtggcggttgcggtcacgagcctacccatgctggttttgtcggtaaaggatgtttgagtgctgctgtatgtggtgatatctttgcatctccatcaaccaaacagatcttaaatgctattaaaattgtttcgaagaacagtaacggagttctattaattgttaagaactatacgggcgatgtattacatttcggtttggctgctgaaagggccagagcccttggaattaattgctctgttgctgttattggagatgacgttgctgttggtcgtaacaaaggtgggttagtcggtagaagagctctagcaggaactaccttggttcataaaattgtcggtgcatttgctgagaagtattcaggcaagtatggtctcgatggtgtcagcaaggtagctcaagtcatcaatgaaaatctagttacgattggctcatcattagatcattgtaaggtaccaggaagaccatttgagacggaattaaatgaaaagcaaatggaagtcggtatgggtatccataatgaaccaggtgttcaagtcttggacagcattccacctttggagcagttgattgagaaatatatgctacccaagttacttgattcagaggatgaagacagacattttgtatcttttgataaaaaagacgaggtagttctccttgtcaacaatttaggtggtgtgtctaacttcatcttaactgccatcgttgatatcacgaaatcttttttacaaaagaattatgacattactccagttcaaagtatttgcggaactttaatgacatctttcaatggaaatggattcagtatcacgttgttcaatgcgtcaaagtcatctggagctatcaagaaggagttcagcgaagtaaaatctgtgcttgacttattaaacgaccatacagaggcgccagcatggccaataaaagatgtcgaaatgggtaaatctcctacatatgacgagggtattctcgaggatgttattgacgttaaaaaggctggaacatacgacttcgagaaattatcggagctgttgaaggcaggtgccgatcaattgattaaaagtgaacctcatattacacatttggataaccaagttggtgacggtgactgtggttatacgttagtagctggcgctaaggcaatcactgaaaacttggataaaatatcctccaagtatttgtctcagacccttgcagaaatttctgatcatattgaatccgcaatgggtggtacatccggtggtttgtactctatattcatttcgggcctttcaaaaggaattattgaacaatgcggagaaaatgatgcggtggacaaagaagccttcgccaaatcgctagaagttgcatacgagacattgtgtaaatatactagagctaggccaggtgattctactatgatcgatgccttggagccattcgtgaaagagtttagttcaactcaggacttccataaggccttttccaaggcggaaggaggtgcagaatctacaggaaacttagaagccaagttcggccgtgcatcttacgtggaagacactgaagcaattccggacccaggagctatcggtttggtcgaattcctcaggggtgttgattccaaattgtag

SEQ ID NO: 120348 - protein, 585 aa, Kluyveromyces lactis NRRL Y-1140
MSVEIKSFELSDPLTASLKGFADTNPNVELILKEKIIFRNTEKDKVALISGGGCGHEPTHAGFVGKGCLSAAVCGDIFASPSTKQILNAIKIVSKNSNGVLLIVKNYTGDVLHFGLAAERARALGINCSVAVIGDDVAVGRNKGGLVGRRALAGTTLVHKIVGAFAEKYSGKYGLDGVSKVAQVINENLVTIGSSLDHCKVPGRPFETELNEKQMEVGMGIHNEPGVQVLDSIPPLEQLIEKYMLPKLLDSEDEDRHFVSFDKKDEVVLLVNNLGGVSNFILTAIVDITKSFLQKNYDITPVQSICGTLMTSFNGNGFSITLFNASKSSGAIKKEFSEVKSVLDLLNDHTEAPAWPIKDVEMGKSPTYDEGILEDVIDVKKAGTYDFEKLSELLKAGADQLIKSEPHITHLDNQVGDGDCGYTLVAGAKAITENLDKISSKYLSQTLAEISDHIESAMGGTSGGLYSIFISGLSKGIIEQCGENDAVDKEAFAKSLEVAYETLCKYTRARPGDSTMIDALEPFVKEFSSTQDFHKAFSKAEGGAESTGNLEAKFGRASYVEDTEAIPDPGAIGLVEFLRGVDSKL

SEQ ID NO: 120349 - DNA, 1785 bp, Debaryomyces hansenii CBS767
  CDS (1)..(1785)
atgacattagcaaaacactggaagtttaataaggatgaagacatagttttgtctaaccttaagggattgtgccactctaacccagcagttggattgatcccgtccgaaaaggttatctacaacctcaattccgacacatccaagaaggttaaattgataagtggaggaggagcaggtcatgaaccattgcacggagggtttgtaggtgaaaacttgcttgatgccgcagttagtggtgcaatttttgcatcaccatcgactaagcagatcatggcagcagtgaagaccaagtccaacaaggacaaaggaacgttaataatagttaagaattatacgggagatgtgttgcattttgggttggtggtagagagggccaagagtgaagggtataatattgatattcttcccgtgagtgacgatgttgcggttggcagaagacaaaatgagatggttggaagaagaggtttggccggaactgcattgattcataaggttttaggagcatcatcttcagacggttctgatttgaagtcaattgctgaacttgggcaccttgtgaacgacaacttggttaccattggtgcttcgttagaccgtacttcagttcctggaaaggctggtgaagaagtagagttcacaggtccggatgaagcggaattgggtttgggtattcataatgaacctggacacaaaatgagccctatcccaaatattgatgacttagttaaggacatgttcaacaaattattgtcacccgaagataaagatcgtcattacgttgattttgatttgaaaaatgatgaatacattttagttattaataatattggtggtacttcatctttcgaattgtatgctatcgctgagcatgtggttctgaatttaccattatccaaaagaccaaagcgtattttgatcagtgacttcgtcacatcattgaactctccaggtttctctatcacgttattgaacttgtcaaatatcgctaagtccaactcgaagtattcagaatcaaaggtattaggctatttggatcttccaactgatgcgccaggctggaaaccaaaactgtttgacgcaaaacaatggtcaaacgaaagcaaatacattgattcaccaatgattcatgagcaaagggtcacctcgtccttgaagatggattccggtttatttgaaaaggcgttgactagtgccttacaaaaattattaaaggctgaaccagatatcactcactatgatactctcgtcggagatggcgattgtggtgaaaccttagctaaaggtgcaaatgcgatattagatgctttgaagaatgacaagtctttcaaagataacttaagtgatcctgcttctacgttgtctaccattactgaaatagttgaagataatatgggcggcacatctggtggtatatattctattttcttaactgctttagtgaaacacattcaagatgcacaagaaataacaactgaagctttaggtaaagcattccacggcgcattatatgatgggttatttaaatacactaaagctcgtactggtggcagaacccttgttgataccttacagccattcgttgattcattttctaagtttggtaatgtccaagaggctgtaaaggcagccaaaaagggttgtgaggctaccaaggatttacaagctaaatttggtagagcaagctatgttagtgatgaagaatttaaagacggtgaaattccagaccctggtgctattggattattagctatcattgaaggttatgctgaagctttatctaagtag

SEQ ID NO: 120350 - protein, 594 aa, Debaryomyces hansenii CBS767
MTLAKHWKFNKDEDIVLSNLKGLCHSNPAVGLIPSEKVIYNLNSDTSKKVKLISGGGAGHEPLHGGFVGENLLDAAVSGAIFASPSTKQIMAAVKTKSNKDKGTLIIVKNYTGDVLHFGLVVERAKSEGYNIDILPVSDDVAVGRRQNEMVGRRGLAGTALIHKVLGASSSDGSDLKSIAELGHLVNDNLVTIGASLDRTSVPGKAGEEVEFTGPDEAELGLGIHNEPGHKMSPIPNIDDLVKDMFNKLLSPEDKDRHYVDFDLKNDEYILVINNIGGTSSFELYAIAEHVVLNLPLSKRPKRILISDFVTSLNSPGFSITLLNLSNIAKSNSKYSESKVLGYLDLPTDAPGWKPKLFDAKQWSNESKYIDSPMIHEQRVTSSLKMDSGLFEKALTSALQKLLKAEPDITHYDTLVGDGDCGETLAKGANAILDALKNDKSFKDNLSDPASTLSTITEIVEDNMGGTSGGIYSIFLTALVKHIQDAQEITTEALGKAFHGALYDGLFKYTKARTGGRTLVDTLQPFVDSFSKFGNVQEAVKAAKKGCEATKDLQAKFGRASYVSDEEFKDGEIPDPGAIGLLAIIEGYAEALSK

SEQ ID NO: 120351 - DNA, 1818 bp, Debaryomyces hansenii CBS767
  CDS (1)..(1818)
atgtccgacaaacacttcttaccatcagacacaggaaagcttgttccaaattgtttaagagccatcacatacgaatatgaatttctatccttattagataaagaaaaagtcatttacaacaatgaatttgatagatcaaaagttgctttaatcagtgggggtggctctggtcatgaacctggcttttatggtttagttggttcaggtatgctttcagcagctgctcaaggtgatatttttgcttccccaaattataaaaacgtgaaggctgcagagaaagtttgtcacgaacttggagattcaggtgaatgggctggttgtatcttcattatcacaaactatactggtgataatctttattttggtatggctgctcaagacttaattgctagatatggcaatgaaaaaattcgtattcttagagttacagatgatgttgcaattaaaaaaagttctaattcattagttggtagacgtaccttagcgggtattaccattgtatccaaacttgctggcgcagcctctcaaaacggtcacaacaaagatgaagtttttgaatttggtcaaaaagtcattgcttccactgcgtctgttaatgctggtttggaccatgttcatattcctggtcacagaatggatgtagaattcggaaaattaggcaaaactcaattagaaattggtttaggtattcacaatgaacctggagctcagaaattagattacattccaagtaacgaagaattagtttttaccttgttagatatgattttaaataaagaagatgaaggtcgtggtttctttaattattctaatggggataaatttgttttattaattaacaacctaggtggtattccaattatcgaagaaaagaatattttacacaccactttagaaaccttaaaagaaaaatatgatattataccagctagaatttacacaggcaccttctttacttcttttaacgctcaaatctttactattactcttttcaatgctaccactgctgcaaccaagacctttacgactgataaaatattcgaactcttggatgaacgaactaatgcaacctgttggccaaacactatatttactggcaatgaatccattcaaaatgacagaatcatcagggactttgttggatacgacgatgatgctcctaacactgttaaagaaagatcgcaagatttacgaattgatccagaaaaattagaaaagattattcgtactgctgctgaaagagttattaagaaggaaccagaattaactgattgggatactaagatgggtgatggtgattgtggttatggtttaagaactggagctgaaaaagtattacataaattagaggtagataaaattgcatcctctggttcaattctcaaagtattacatgttgtattaaatgttttaaaagatgatatgggtggtaccttaggtgctattattttcatcttcatgaaatctgtcattaatgaggttgaagaattcctaagagaaaattctaatctaactattaatcaattgtttgcctttgctttgccagttggtcttgaaaccttatatacttacactaaagccagacaaggtcacagaactgttatggatgtattgattccatttgttcatagttttagtgaaactcaagatattaataaggcagtacgagtagcatacaatgctgctgaaggtacaagaagcttgaaaccaaagcttggacgtgctacttacgttggtggattagctgacaaaaccattttcccaccagatcctggcgcttatggtatatacgagattatttctgcattaacgttatag

SEQ ID NO: 120352 - protein, 605 aa, Debaryomyces hansenii CBS767
MSDKHFLPSDTGKLVPNCLRAITYEYEFLSLLDKEKVIYNNEFDRSKVALISGGGSGHEPGFYGLVGSGMLSAAAQGDIFASPNYKNVKAAEKVCHELGDSGEWAGCIFIITNYTGDNLYFGMAAQDLIARYGNEKIRILRVTDDVAIKKSSNSLVGRRTLAGITIVSKLAGAASQNGHNKDEVFEFGQKVIASTASVNAGLDHVHIPGHRMDVEFGKLGKTQLEIGLGIHNEPGAQKLDYIPSNEELVFTLLDMILNKEDEGRGFFNYSNGDKFVLLINNLGGIPIIEEKNILHTTLETLKEKYDIIPARIYTGTFFTSFNAQIFTITLFNATTAATKTFTTDKIFELLDERTNATCWPNTIFTGNESIQNDRIIRDFVGYDDDAPNTVKERSQDLRIDPEKLEKIIRTAAERVIKKEPELTDWDTKMGDGDCGYGLRTGAEKVLHKLEVDKIASSGSILKVLHVVLNVLKDDMGGTLGAIIFIFMKSVINEVEEFLRENSNLTINQLFAFALPVGLETLYTYTKARQGHRTVMDVLIPFVHSFSETQDINKAVRVAYNAAEGTRSLKPKLGRATYVGGLADKTIFPPDPGAYGIYEIISALTL

SEQ ID NO: 120353 - DNA, 1791 bp, Debaryomyces hansenii CBS767
  CDS (1)..(1791)
atgcctaagcattttcttccaaaagacccaaacgatcttgttaaccactgtttgaaagcttatatctatgaaaatgatagtctatcccttctagagaaagagaaagtaattttcaacaatagacatgatctgaaaaaagtctccttaattagtggtggtggttcaggtcatgaaccagggtggattggctttgttggatcaggtatgttaacagcttcagcacaaggtgatatttttgcaagtccaaactataaaaatatcaagtcagccgagaaggctacacattcagaggctggtactatatttcttattacaaactatacaggggacaatctttattttggtatggcagcccaagagcttatttcaaagttcggtgaatcaaaaattaggttgcttcgtactactgatgatgtagctgtcagcagaacgactgggaaacttgttggtcgccgaacgttggccggttgtatctttattatgaagattttaggtgcagcaagtgaaaagggatataacattgaacaaatctataatttaggtatttctgctaacaagtgcattgcttctgtcaatgctgggttagatcacacgcatattcctgggcatgcaaacaacgcagattatggtaaattagaagagaaccaaatagaaattggccttggtatacacaatgagcccggtgtgatgaagacgaagagtataccttccaacgaagaactcatacctgatttattaaagctaattcttgataaaaatgacaaagacagaggctttttagactatgaagataatgaccaatttatcctactattcaataatcttggtggtttacctgttatagaggaaaaggccttattatattgtactataaagaatcttgctgattcttataatataacgccgtctagggtttattctggatcttatataacatctattaatgctccaattttcacaatctcattgttcaatgttacaaaagctgctaataccgattttactgaactaaacatttttgatctcttcgacgctcctacagaagcgactaactttccgaagagtcactacgttctgtctcaaattttaaatcctgaaagtagaattattgataatttccaagggtacgaagagcttgatgaaagcatagacattcagcgggatattatgtatgattcgtctgtgctcgaaagaattattcgtacggcagcacagaatataattgataaagagccagaaataactgactgggacactaagatgggagatggagattgtggaactaccttagaaactggtgcaagggcaattattaaatcattagacaatggtgtggccaaaagtggatcattaagaaatgttcttcatgctattcttaaagtcttaaaagacgatatgggcggcactttaggtgccattctttttattttcatgaaggcatttatcaataaacttgaaagtaatcttaatgacaatatcagcagcgataataatgatatcattgctatcgctttagatcatgggattgatactttaggcgaatttacaaaagcaagagaaggtcatagaacagttatggatgttttaatcccgttttgtcgttcattttctgaatataagaatattcattcagcagttgaagcagcaagaaaggcagcagagggtaccagaaggcttcgaccaaagttaggccgtgccacatatgtaggtggagtgtcagagaaaactgaatttccaccagatcctggtgcctatggggtgtatgagatacttgctgcattaagcgaatag

SEQ ID NO: 120354 - protein, 596 aa, Debaryomyces hansenii CBS767
MPKHFLPKDPNDLVNHCLKAYIYENDSLSLLEKEKVIFNNRHDLKKVSLISGGGSGHEPGWIGFVGSGMLTASAQGDIFASPNYKNIKSAEKATHSEAGTIFLITNYTGDNLYFGMAAQELISKFGESKIRLLRTTDDVAVSRTTGKLVGRRTLAGCIFIMKILGAASEKGYNIEQIYNLGISANKCIASVNAGLDHTHIPGHANNADYGKLEENQIEIGLGIHNEPGVMKTKSIPSNEELIPDLLKLILDKNDKDRGFLDYEDNDQFILLFNNLGGLPVIEEKALLYCTIKNLADSYNITPSRVYSGSYITSINAPIFTISLFNVTKAANTDFTELNIFDLFDAPTEATNFPKSHYVLSQILNPESRIIDNFQGYEELDESIDIQRDIMYDSSVLERIIRTAAQNIIDKEPEITDWDTKMGDGDCGTTLETGARAIIKSLDNGVAKSGSLRNVLHAILKVLKDDMGGTLGAILFIFMKAFINKLESNLNDNISSDNNDIIAIALDHGIDTLGEFTKAREGHRTVMDVLIPFCRSFSEYKNIHSAVEAARKAAEGTRRLRPKLGRATYVGGVSEKTEFPPDPGAYGVYEILAALSE

SEQ ID NO: 120355 - DNA, 1824 bp, Debaryomyces hansenii CBS767
  CDS (1)..(1824)
atgtcgttagctaaacactggggatactcaaaggatttggttttggaaaatttaaagggtttggctgctgcaaaccccaaaatttctcttataccagcagaaaaaacagtcgtgtataatgattccttacaatctaaaggaaacaagaatattaatcgtataatggttatttctggaggaggttcaggccatgaaccgttacatgcgggatttgttggtgtaaatgcattagatgctgctgtatctggttcaatatttgcctccccttcagccaagcagatttttgcagccattaagtcaattagctccaaacaaaacaattctaaaggtactttggtaattgtcaaaaattatacaggagatgttctacattttggacttgctgtcgaaagagcaaaagcacatggctacaaaatagacatgataattgttggtgatgacgcagctgtaggtaggtcaaagggtggaatggttggaagaagagcattggcagccactgcattggttcacaaaattgttggatctgctgcttctgaaattgaagatctaagcagacttaaaatattgggtgattccgttgcgaataatacggtgaccattggtgccaccttagatcattgctctgttcctgggcgtgatattgcaaactttgagcctattggccagaatgatgctgaaataggtctagggatacataacgaaacttcggtcaagaaggtaaaccctgtaccaatgatagactcattagttcaggacttattagaattcctattaaacgaaaatgacaaagatcgttactttgtaccatttgatctcagtaatgatgaaacggtcttgcttgtcaacaatctcgggggtacatctactttagaaatgtatgctattacaaattgcgttatcgaaacattataccaacaatacagtttgagaccaaaaaaagtgatagtgggagaatttgctacgtctttaaatgcccctgggttttcgattaccttacttaacgtctcttgtgcatctaaacaatcccaaatttccatttcacatataatgagttacttggatttgccaacagatgcccctggttggaaggcacatccgtgtgggtttggacttgaaagagacatcaatattgagacatcaatcaatggtattgattcttttgtcaagtcacaattaaagctttccagagaacaacagacggactttagaagcagtctagttaatgggttggaaaaattattagacaaagaaccaagcattacattttatgatactgttgctggtgatggtgactgtggtgaaaccttagcgtctggtgcaaatggaatattggaatcattaaggaacaacgaaatctgctttgaagatccagtttattccatatctcaaatagcaaacattgtagaggataaaatgggcggaacttcaggaggcttatattcaattttcttaacctcgttgataaaacaccttcaagattgtactacattgaacttatgtgaaatgtttgctagttctttgcataatgcgctatatcagggcttatataaatacactagggcacgagtgggtggaagaactttgattgatgctttagagccgtttgtgaataccttcaacgacactctaaatttctcaaaggctgcccaggctgctatcgatggatctgaatcgactaggaaattagctgcaaaatttgggagagcgtcttatgtcaatgaacaagaatttaaacagttcgacgaagaaggaggcttaccggatccgggagctattggattagccaccttaattgctgggtttgccggtgttgactataattaa

SEQ ID NO: 120356 - protein, 607 aa, Debaryomyces hansenii CBS767
MSLAKHWGYSKDLVLENLKGLAAANPKISLIPAEKTVVYNDSLQSKGNKNINRIMVISGGGSGHEPLHAGFVGVNALDAAVSGSIFASPSAKQIFAAIKSISSKQNNSKGTLVIVKNYTGDVLHFGLAVERAKAHGYKIDMIIVGDDAAVGRSKGGMVGRRALAATALVHKIVGSAASEIEDLSRLKILGDSVANNTVTIGATLDHCSVPGRDIANFEPIGQNDAEIGLGIHNETSVKKVNPVPMIDSLVQDLLEFLLNENDKDRYFVPFDLSNDETVLLVNNLGGTSTLEMYAITNCVIETLYQQYSLRPKKVIVGEFATSLNAPGFSITLLNVSCASKQSQISISHIMSYLDLPTDAPGWKAHPCGFGLERDINIETSINGIDSFVKSQLKLSREQQTDFRSSLVNGLEKLLDKEPSITFYDTVAGDGDCGETLASGANGILESLRNNEICFEDPVYSISQIANIVEDKMGGTSGGLYSIFLTSLIKHLQDCTTLNLCEMFASSLHNALYQGLYKYTRARVGGRTLIDALEPFVNTFNDTLNFSKAAQAAIDGSESTRKLAAKFGRASYVNEQEFKQFDEEGGLPDPGAIGLATLIAGFAGVDYN

SEQ ID NO: 120357 - DNA, 1692 bp, Yarrowia lipolytica CLIB122
  CDS (1)..(1692)
atgaaacacttcgccaaaacgaatctcgtcaatctctacctcgaatctctcctggctagcaacccgcaactgggtctagtggaagatcagagaatcatttattacaagaagaaaaagtcggacaaggtccgagttatttcgggcggcggatcgggccatgagcccagctggagcggtcttgtgggctcgggactactagatgctgctgtctgtggagacatttttgcatctccttcggccagacaggttatggccggtatcagagcctcggaacccgacagtggcgttattctggcaatcacaaactacacgggcgacaagctgcactttggactggcccaagagaagttccaggccgagtctggaggcatgcaggtggcagtcatccctgtgactgatgatgtcgctctcggacgaacccggtcctcaaaggtcggaagacggggactggcgggaaacctgcttgttctcaagtccatgggagcctgtgctgaggctggaggttcctttgatcacgtctccaatgtaggacgggcagtgaacgacggactggtcacggtgggatgttctctggaccactgcagtgttcctggtcgaacagacgtggactttcatatccctcatgacaaggctgtacttggaatgggtattcacaacgaacgaggacttgttgaggtcgacattcccgaacggcctgaagatctcatcaaacagatgttgactcttttgctagaccccaacgacaaggagcgagcctttgtgtccttcaaggagaaggacgaggttattctgctggtcaacaactttggtgggctgtctaatctcgagaatggagccctaactcaagtggccctgtctgttctggagcaggattataacattgttccctgtcgagtcctgtctggagcctttgagacgtcgctagacggcccaggcttttcaatcactctttacaacccttcatactctgcaactctcgttgaaaaattatctagcaaacagcttctagagctcatcgatgctccaactgatgctcctgcttggccaagggtcggtgtcaacgagcccaagaaacagaaggtgctctccaagcaggaggagctagcggccaaggactgcgaagagtcgccttatgacgagcttgtttcgcgtatttgcaaacatgtcatttcaatcgagccttctctcaccacctgggatactgtaatgggtgatggagactgcggtatggcagccaaagacgcggcacttcacattcaaaaggagtggaattcccgcaagcagtcttctttaaagggaactcttaatctcctctcgtcctgcctggatgacatgggtggctctctgggagccattctgggcatctttgttagtgctctcatctacaacctgcaaaaggaaggagttgaacaggctccaaaggcggttggattggcttcaaaatctctccagacacacacacaggctcgcaagggtgaccgaacggtcatggactctctgattcccttctgtgaagtctacgcctcgtctggaagtcttcaacatgcagccaaagccgctcaggagggagcagaaagcacaaagaccctcaaagctcagtatggacgagccagttatgtttcaaagaccgcagatgttcccgatcccggagcctggctgtttgccgcagttgttgaccagctttccaagtag

SEQ ID NO: 120358 - protein, 563 aa, Yarrowia lipolytica CLIB122
MKHFAKTNLVNLYLESLLASNPQLGLVEDQRIIYYKKKKSDKVRVISGGGSGHEPSWSGLVGSGLLDAAVCGDIFASPSARQVMAGIRASEPDSGVILAITNYTGDKLHFGLAQEKFQAESGGMQVAVIPVTDDVALGRTRSSKVGRRGLAGNLLVLKSMGACAEAGGSFDHVSNVGRAVNDGLVTVGCSLDHCSVPGRTDVDFHIPHDKAVLGMGIHNERGLVEVDIPERPEDLIKQMLTLLLDPNDKERAFVSFKEKDEVILLVNNFGGLSNLENGALTQVALSVLEQDYNIVPCRVLSGAFETSLDGPGFSITLYNPSYSATLVEKLSSKQLLELIDAPTDAPAWPRVGVNEPKKQKVLSKQEELAAKDCEESPYDELVSRICKHVISIEPSLTTWDTVMGDGDCGMAAKDAALHIQKEWNSRKQSSLKGTLNLLSSCLDDMGGSLGAILGIFVSALIYNLQKEGVEQAPKAVGLASKSLQTHTQARKGDRTVMDSLIPFCEVYASSGSLQHAAKAAQEGAESTKTLKAQYGRASYVSKTADVPDPGAWLFAAVVDQLSK

SEQ ID NO: 120359 - DNA, 1761 bp, Yarrowia lipolytica CLIB122
  CDS (1)..(1761)
atgtccacaaaacatctgttcaacgagactgacgagctcgtgctcaagtctctcgagggagttcaggcttcccgatcagcgtccattctctcccacagattcaaggtgctctacaacggaacccattccgctgaccgagttgcagttctttctggaggaggctctggccacgagcctgcccacgccggctttgtgggagacaacatgctgaccggtgccatctgtggccccgtcttcgcgtctccttcagccaagcaggtcgaggccggctgcaagctcgtgccctccgacaagggtcatattctggtcgtcaccaactacaccggcgacatgttgcattttggtctcgcggccgagaagctcaagtctcagggccacaaggtcggcatcattaagtctgccgacgatgtggctgtcgaccgaaagagcggtggtctggtcggtcgacgaggactggctggaactgtgcttctggacaagattgtcggaggagctgcctgggacaagctgtcctttgatgaatgcatggccattggaaccgaggtggccgagaacaccgcaaccgcctcaattggactggactactgccacgttcctggtcgatccgttgagaaccacgtctcgctcgaccagaacgagtgtcaattcggcctgggtattcacaatgagcccggagtcaagaccatcaaccccgtgcctgcccctgagtccatggttgatactctgctcaagtacctagtttcgcaggacgaccccgagcgatccttcgtaaagttcaaggagggcgacgaggtcattctcctggccaacaacctcggtggaatttccaccattgagatgcgggctgctgtccagcttgcccgagagcaactcgagaagacccacaagatcaagtctgtgcgagttctgtgcggcaccttcatgagctctctcaacgctcccggcttctctatcaccctggtgaacctgtctaacggctcccacagcaagaacgtgctcaagtacctggacgctgtgtccgacgcccctgcctgggtcaatgtggcccctcctacctcggtcaagccctttatcaacgaggacaagatcttcgacgacgagacctccaacattaaggctcccacactggacattcctgaacagaccgtggttgctgctctcactcaggcctcccagaacattatcaaggccgagcctcagcttactgcatgggataccgaaatgggagacggagactgtggacacaccattgaacatggctgccgagctcttctcgagtacctcaacaagaacaagagcgacccaaaggctctcgagatcatccccattgtgcgggctgtcgttcacatcaccgaggaggatatgggaggcaccctgggagctatcttcggcattttttttgcctctttccttaacgctcttctgctggaccctctgtcccataagactgatgtcaatgtgactgataagctcgtcaacgctgctaacaccggtctggaaagtctcatgaaccacactcctgctcgacctggtgaccgaactgtcatggacgtgttgatcccctacgtgcagtctctggtgtccaccaaggatatcaaggaggccgctctcaaggccaagcaggctgccgagggcaccaagaagatcaagcctcgtcttggacgagcagtctatgttggggagaaggacggtgagcttcctcccgaccctggagcttgggctgtctacgagctggttgatggttttgccaaccacaagtag

SEQ ID NO: 120360 - protein, 586 aa, Yarrowia lipolytica CLIB122
MSTKHLFNETDELVLKSLEGVQASRSASILSHRFKVLYNGTHSADRVAVLSGGGSGHEPAHAGFVGDNMLTGAICGPVFASPSAKQVEAGCKLVPSDKGHILVVTNYTGDMLHFGLAAEKLKSQGHKVGIIKSADDVAVDRKSGGLVGRRGLAGTVLLDKIVGGAAWDKLSFDECMAIGTEVAENTATASIGLDYCHVPGRSVENHVSLDQNECQFGLGIHNEPGVKTINPVPAPESMVDTLLKYLVSQDDPERSFVKFKEGDEVILLANNLGGISTIEMRAAVQLAREQLEKTHKIKSVRVLCGTFMSSLNAPGFSITLVNLSNGSHSKNVLKYLDAVSDAPAWVNVAPPTSVKPFINEDKIFDDETSNIKAPTLDIPEQTVVAALTQASQNIIKAEPQLTAWDTEMGDGDCGHTIEHGCRALLEYLNKNKSDPKALEIIPIVRAVVHITEEDMGGTLGAIFGIFFASFLNALLLDPLSHKTDVNVTDKLVNAANTGLESLMNHTPARPGDRTVMDVLIPYVQSLVSTKDIKEAALKAKQAAEGTKKIKPRLGRAVYVGEKDGELPPDPGAWAVYELVDGFANHK

SEQ ID NO: 120361 - DNA, 1719 bp, Yarrowia lipolytica CLIB122
  CDS (1)..(1719)
atgaccactaaacagttccaattcgactcggatccgctcaattctgcccttgccgccaccgcggaggcctcaggcctcgcttacctccccaagagcaaggtcatctactaccctctgaccaacgacaaggtgacgttgatttcaggtggaggagctggccacgagcctgctcagaccgggtttgtgggtcccggactgctggatgcggccgtgtcgggccagatctttgcctcaccttccaccaaacagatcattgccggagtcaatgccgtcaagtcgcaacggggctccatcattatcgtcatgaactacactggcgatgtgatccactttggaatggccgccgagcagctgcggtcccgatatgactaccacgccgaactggtgtccattggcgacgacatttccgtcaacaagaaggccggacgacgaggtctggcaggaaccgttcttgttcacaagatcgcaggccatcttgcccgagatggctgggacgtcggagtgcttgctgaagctctgcgaaccaccgccgccaacctggccaccgtggctgcgtctctggaacactgcactgtacctggcagaaagttcgagaccgaactggcggccgatgagatggagattggcatgggtatccacaacgagcccggtgtcaagaccatcaagattggcaaggttgagtctctgctggacgaattggtcgacaagttcgagccctccaagcaggactttgtgcccttcaacaagggcgacgaggtggtgctgctggtcaattccctcggaggagtctcttctctggaactccacgccattgccaacattgcccagacaaagttcgagaaggtgctgggcgtcaagaccgtgcgacttattgttggcaacttcatggctgccttcaacggtcctggcttctctttgactctgctcaacgtcaccacgaccgccaagaagggcaactttgacgttctgggagccctggacgctcccgtgtccaccgccgcctggccctctctgcagcagaaggacaagcctgccaacggcggtgtccaggaggagaaggagaccgactcggacaagcctgctgagcctactggaatcaaggccgacggaaagctgttcaaggccatgattgagagtgctgttgacgatctcaagaaggaggagccccagattaccaaatacgacactattgctggcgatggagactgtggagagactctgttggctggaggcgacggtattctggacgctatcaagaacaagaagattgaccttgatgatgccgctggagtggctgatatttctcacatcgtcgagaactccatgggaggcacctcgggaggtctctactccatcttcttctccggtctcgtggtcggtatcaaggagaccaaggccaaggagctgtctgtcgatgtgtttgccaaggcatgtgagactgctctggagactctttctaagtacacccaggcccgagtcggcgaccgaaccctcatggacgcacttgttccctttgtagagaccctcagcaagaccaaggacttcgccaaggccgtagaggctgctcggaagggcgccgacgagacttccaagctgcctgccaattttggccgtgcctcgtatgtgaacgaggagggattggagaacattcctgaccctggagctcttggactggccgtcattttcgaaggtcttctcaaggcctgggagaagaagtag

SEQ ID NO: 120362 - protein, 572 aa, Yarrowia lipolytica CLIB122
MTTKQFQFDSDPLNSALAATAEASGLAYLPKSKVIYYPLTNDKVTLISGGGAGHEPAQTGFVGPGLLDAAVSGQIFASPSTKQIIAGVNAVKSQRGSIIIVMNYTGDVIHFGMAAEQLRSRYDYHAELVSIGDDISVNKKAGRRGLAGTVLVHKIAGHLARDGWDVGVLAEALRTTAANLATVAASLEHCTVPGRKFETELAADEMEIGMGIHNEPGVKTIKIGKVESLLDELVDKFEPSKQDFVPFNKGDEVVLLVNSLGGVSSLELHAIANIAQTKFEKVLGVKTVRLIVGNFMAAFNGPGFSLTLLNVTTTAKKGNFDVLGALDAPVSTAAWPSLQQKDKPANGGVQEEKETDSDKPAEPTGIKADGKLFKAMIESAVDDLKKEEPQITKYDTIAGDGDCGETLLAGGDGILDAIKNKKIDLDDAAGVADISHIVENSMGGTSGGLYSIFFSGLVVGIKETKAKELSVDVFAKACETALETLSKYTQARVGDRTLMDALVPFVETLSKTKDFAKAVEAARKGADETSKLPANFGRASYVNEEGLENIPDPGALGLAVIFEGLLKAWEKK

SEQ ID NO: 120363 - DNA, 1773 bp, Aspergillus nidulans FGSC A4
  CDS (1)..(1773)
atggcgcagacaaaacacttcttctcagaccccacccatctggttcacacggcgctcaattcgctgacgctcactaacccgtcactcgcgttcgaccgcgagaataagatcatcttccgtcgtcccgatgtcgtgaggaaggggaaagtcgccatcatatcgggtggagggtctggtcacgaacccgcgttcgcggggttcgtcggccagggtctcctggatgcatcggcggcaggcaccatctttgcgtctccgaacgcagagcagattcgtatcgctgcaatggagcgtgttaacaatgaacaaggagtgctcatcattcctatgaactacaccggcgacgtcctcaatttcggtatggccgcggagaagtcgcgcgctgccggaatcaagaccgagttcttcgccatcaatgacgatgccggtgttggcaaaaccaagggcggcaaggttggtcgccgcggtattggaggcggtgtcctgatcctgaagatcgtcggcgcgctggcagaggctggtggctcgcttgaagaggtctacaagaccgctcagttggcaaatgagaatcttgcctcggtcggctcatcattggagcacgtccatgttcctggtcgagagccatcggatgaccacatcccagagggcgaggttgagatcggcatgggtatccataacgagccaggatctacccgcaccaagactactctcgtcgatctagttgcgacgatgctcctccagatcctggaccacaacgaccctgaccgatcatatatcacgcattcgccaggggacaaatttgtgctgctggttaacaaccttggtgggctcagcactctcgagctgtccggtatcaccgatgaggtctaccgccagctcggtaaatcgtatcagatcaagcccgagcgagttatccagggcaccttcctcaccagtctgaatggactcgggttcagcatctcactgctcaagctggcagacaccgggctgggccccggcaagtcgttccttgagctcctcgacgctcccgctgaggcggtcggctggtccgcgcctatcaagcctgcgacgtgggaataccgcaatgcccccggaattgaagtcaagagagccaagccagccgagcagcctcccagcaacgtcaagctggatatcgcaaaggttcgcaaagtcctcggggccgctcttaagcgcatgatcgatgcggagccccagatcacccgctacgacaccatcgtcggcgacggcgactgcggcgtcgggctcaagcgcggcgcccaggctgttctcgacctcctcaacgacgcctctgcaaacctcaacgacgatatcgtccacacagttaatcgcatcgtcaccgtcgttgaaaacactatggacggcacctctggcgccatctacgccatcttccttaatgcccttgtccacggcctccgtgagcaagacaagggtaccgaaacgcctgctgataccgacgtctggggcactgcgttgaaatactctatctccgcgcttgggaagtacacccctgcccaggtcggtgaccgtaccatgattgacgccctcgtaccgtttgcgcaaactctagcggacaagcgggatgtgcatgctgctgccaaggccgcggaggagggcaccgaggccacaaagcacatgaaggcgtcgctggggcgggcggtgtatgttggaggcgagcaggaatgggttggcaaggtgccggatccaggcgcctacgggctcagtgagttctttactgggctggcgggcgctctatag

SEQ ID NO: 120364 - protein, 590 aa, Aspergillus nidulans FGSC A4
MAQTKHFFSDPTHLVHTALNSLTLTNPSLAFDRENKIIFRRPDVVRKGKVAIISGGGSGHEPAFAGFVGQGLLDASAAGTIFASPNAEQIRIAAMERVNNEQGVLIIPMNYTGDVLNFGMAAEKSRAAGIKTEFFAINDDAGVGKTKGGKVGRRGIGGGVLILKIVGALAEAGGSLEEVYKTAQLANENLASVGSSLEHVHVPGREPSDDHIPEGEVEIGMGIHNEPGSTRTKTTLVDLVATMLLQILDHNDPDRSYITHSPGDKFVLLVNNLGGLSTLELSGITDEVYRQLGKSYQIKPERVIQGTFLTSLNGLGFSISLLKLADTGLGPGKSFLELLDAPAEAVGWSAPIKPATWEYRNAPGIEVKRAKPAEQPPSNVKLDIAKVRKVLGAALKRMIDAEPQITRYDTIVGDGDCGVGLKRGAQAVLDLLNDASANLNDDIVHTVNRIVTVVENTMDGTSGAIYAIFLNALVHGLREQDKGTETPADTDVWGTALKYSISALGKYTPAQVGDRTMIDALVPFAQTLADKRDVHAAAKAAEEGTEATKHMKASLGRAVYVGGEQEWVGKVPDPGAYGLSEFFTGLAGAL

SEQ ID NO: 120365 - DNA, 1788 bp, Candida albicans SC5314
  CDS (1)..(1788): transl_table=12
atgacattagctaaacattggaaatacggtaaagacgaagacattgtggttacccaattgagagggttagtagcttctaatccttatgtgaatttaatcccaagtgaaaaagttgtatttaaccctcattcggatacttccaaaaaaattaccattatcagtggtggtggtgctggacatgaacctatgcatggaggatttgttggagagaatttattagatgctgcagttagtggatcggtttttgctagtccttcaacaaaacaaatcatggcagccattaaaaccaaatctaataaagaaaaaggtaccattattgtaattaaaaactatactggagatattttacattttggtttagttgcagaaagagctaaaagtgaaggttataaagttgaattagtgattgtgagtgatgatgttgctgttggaagagaacaaaataagatggtggggagaagaggattggctgggacagcttttattcataaaatcttgggttctgctagtgctactagtccagatgttgatttgaaatcattgagtgatttaggtcatgccatcaataagaatttagtaactttgggagcaagtttggatcgtacttcagttccggggaaattggaagaagaaattgaattcacaggaaatgatgaaatggaattgggattgggtattcataatgaacctggtactaaaattaaaccaattcctaatatcgatgaattgatccaaaaaatgtatcatcaattattatctccagaagataaagaccgccattatgttgattttgatttcgaaaatgatgaatatgtgttattgattaataatattggtgggacttcatcatttgaattatatgccattgctgaacacgcattagctaatttgcctttgaaaaggaaaccaaagagagtttatgtcagtgatttcgtcacatctttcaattcaccaggattttcaataacattgttgaacttgtcaaatttgaagaaagaagatatttcattcactagtgaagatgtgttgaagtttttggatactccaactaatgccccaggttggaagccaaaaatctataattcagaaatttggaatctgcaaaataaagaaattgaatcacctatgaaaaatgaaactttaacatcttcagatcttaaaattgacggccaaaaatttgaatcacaattggttaatgccttgaaagttttattggatgaagaaccaaaaatcacccgttatgatactgttgttggtgatggagattgtggtcaaactttagccgatggagcaaactccattttgaaagcattaaaagaagatgatgattttaaatcaaatttgaatgatccagtttatactcttgggaaaatcacagaatatgttgaagatagtatgggtgggacttctggaggtctttattctattttcttaactgctttagtgaaacagttgaagcaaaccaaagaaatcagtgtacaatccgttggtgatgccttataccatgctttgtacgatgggttgttcaagtataccagagcaagagttggtggaagaactttgattgatacattgcaaccatttgtggatgccttacataaaactggcgatttaactaaagcagttgaagcagctaataaaggttgtgaagaaactaagaatttacatgcttcatttggtagagcaagttatgttaatgaggaagaatttaaagcagaaggtggtatcccagatccaggtgctgttggtgtattggcattaatcaaagggtttacagagaagttatga

SEQ ID NO: 120366 - protein, 595 aa, Candida albicans SC5314
MTLAKHWKYGKDEDIVVTQLRGLVASNPYVNLIPSEKVVFNPHSDTSKKITIISGGGAGHEPMHGGFVGENLLDAAVSGSVFASPSTKQIMAAIKTKSNKEKGTIIVIKNYTGDILHFGLVAERAKSEGYKVELVIVSDDVAVGREQNKMVGRRGLAGTAFIHKILGSASATSPDVDLKSLSDLGHAINKNLVTLGASLDRTSVPGKLEEEIEFTGNDEMELGLGIHNEPGTKIKPIPNIDELIQKMYHQLLSPEDKDRHYVDFDFENDEYVLLINNIGGTSSFELYAIAEHALANLPLKRKPKRVYVSDFVTSFNSPGFSITLLNLSNLKKEDISFTSEDVLKFLDTPTNAPGWKPKIYNSEIWNSQNKEIESPMKNETLTSSDLKIDGQKFESQLVNALKVLLDEEPKITRYDTVVGDGDCGQTLADGANSILKALKEDDDFKSNLNDPVYTLGKITEYVEDSMGGTSGGLYSIFLTALVKQLKQTKEISVQSVGDALYHALYDGLFKYTRARVGGRTLIDTLQPFVDALHKTGDLTKAVEAANKGCEETKNLHASFGRASYVNEEEFKAEGGIPDPGAVGVLALIKGFTEKL

SEQ ID NO: 120367 - DNA, 1788 bp, Candida albicans SC5314
  CDS (1)..(1788): transl_table=12
atgacattagctaaacattggaaatacggtaaagacgaagacattgtggttacccaattgagagggttagtagcttctaatccttatgtgaatttaatcccaagtgaaaaagttgtatttaaccctcattcggatacttccaaaaaaattaccattatcagtggtggtggtgctggacatgaacctatgcatggaggatttgttggagagaatttattagatgctgcagttagtggatcggtttttgctagtccttcaacaaaacaaatcatggcagccattaaaaccaaatctaataaagaaaaaggtaccattattgtaattaaaaactatactggagatattttacattttggtttagttgcagaaagagctaaaagtgaaggttataaagttgaattagtgattgtgagtgatgatgttgctgttggaagagaacaaaataagatggtggggagaagaggattggctgggacagcttttattcataaaatcttgggttctgctagtgctactagtccagatgttgatttgaaatcattgagtgatttaggtcatgccatcaataagaatttagtaactttgggagcaagtttggatcgtacttcagttccggggaaattggaagaagaaattgaattcacaggaaatgatgaaatggaattgggattgggtattcataatgaacctggtactaaaattaaaccaattcctaatatcgatgaattgatccaaaaaatgtatcatcaattattatctccagaagataaagaccgccattatgttgattttgatttcgaaaatgatgaatatgtgttattgattaataatattggtggaacttcatcatttgaattatatgccattgctgaacacgcattggctaatttgcctttgaaaaagaaaccaaagagagtttatgtcagtgatttcgtcacatctttcaattcaccaggattttcaataacattgttgaacttgtcaaatttgaagaaagaagatatctcattcactgatgaagatgtgttgaagtttttggatactccaactaatgctccaggttggaaaccaaaaatctatgattcagaaatttgggatctgcaaaataaagaaattgaatcgcctatgaaaaatgaaactttaacatcttcagatcttaaaattgacggccaaaaatttgaatctcaattagttaatgccttgaaagttttattggatgaagaaccaaaaatcacccgttatgatactgttgttggtgatggagattgtggtcaaactttagctgatggagcaaactccattttgaaagcattaaaagaagatgatgattttaaatcaaatttaaatgatccagtttatactcttgggaaaatcacagaatatgttgaagatagtatgggtgggacttctggaggtctttattctattttcttaactgctttagtgaaacagttgaagcaaaccaaagaaatcagtgtacaatccgttggtgatgccttataccatgctttgtacgatgggttgttcaagtataccagagcaagagttggtggaagaactttgattgatacattgcaaccatttgtggatgccttacataaaactggcgatttaactaaagcagttgaagcagctaataaaggttgtgaagaaactaagaatttacatgcttcatttggtagagcaagttatgttaatgaggaagaatttaaagcagaaggtggtatcccagatccaggtgctgttggtgtattggcattaatcaaagggtttacagagaagttatga

SEQ ID NO: 120368 - protein, 595 aa, Candida albicans SC5314
MTLAKHWKYGKDEDIVVTQLRGLVASNPYVNLIPSEKVVFNPHSDTSKKITIISGGGAGHEPMHGGFVGENLLDAAVSGSVFASPSTKQIMAAIKTKSNKEKGTIIVIKNYTGDILHFGLVAERAKSEGYKVELVIVSDDVAVGREQNKMVGRRGLAGTAFIHKILGSASATSPDVDLKSLSDLGHAINKNLVTLGASLDRTSVPGKLEEEIEFTGNDEMELGLGIHNEPGTKIKPIPNIDELIQKMYHQLLSPEDKDRHYVDFDFENDEYVLLINNIGGTSSFELYAIAEHALANLPLKKKPKRVYVSDFVTSFNSPGFSITLLNLSNLKKEDISFTDEDVLKFLDTPTNAPGWKPKIYDSEIWDSQNKEIESPMKNETLTSSDLKIDGQKFESQLVNALKVLLDEEPKITRYDTVVGDGDCGQTLADGANSILKALKEDDDFKSNLNDPVYTLGKITEYVEDSMGGTSGGLYSIFLTALVKQLKQTKEISVQSVGDALYHALYDGLFKYTRARVGGRTLIDTLQPFVDALHKTGDLTKAVEAANKGCEETKNLHASFGRASYVNEEEFKAEGGIPDPGAVGVLALIKGFTEKL

SEQ ID NO: 120369 - DNA, 1851 bp, Ustilago maydis 521
  CDS (1)..(1851)
atggcaacgaagcatttgttcgacaccgctcagggcctcgtagaccgcaatcttcgcggcaccgttgcgcagaatcctgctctgcgatattatgctcctcacaaggtcgtctacgacccttcgcacgacaacaagaaggtcgctgtgatctcaggaggcggtgccggccacgagcccgctcaggcaggcttcgtcggcaagggcatgttggccgcttgtatttctggtgacatttttgcttcaccctcagctgcccaaatctgctctggtattgacctgattaatcacgatgctggtgtggtcatggttgttaacaactacactggtgattgcctccactttggtctagctgccgagaaggctcgtgctgctatggcatacgctgacaagcaaggcggtggcgttgaggcggtaattgtggctgatgatgtcgccgtcggccgaaagcgcggcggtctcgttggccgacgaggtctggcaggtaacatctttacttgcaagattctcggtgcggcgtcggacaagggcatggatgtcaagcggatcggcgagctcggtcgcaacttgatggacaacatggtctcgatcggcacatcgctcgaccactgccacgtcccaggtcgtcccaaaggtgcagaggaacgtggcgccctcgccgaagacgcagccgagcttggaatgggtattcacaacgagcccggttttaagcacatggacaagaagccagaacctgaggcgctgctcggtgagatgctcgacctgctcctcgaccccaacgacgctgatcgagcatacactcctttcgacaaggatgacgcacccgttctgtttgtgaacaacctcggtggcatgagccagctcgagatgaacgctatcgtcgatctcaccatcgagttgctcgagaacaagtggaacctgcatccttgtcgtgtcctctgcggtccttacatgacctcgctcaatgcccctggctttggtgtctcgctcatcaaccagaaacgattccagaaaaacaccgggcaggatttgctcgagcttctcgattatcctaccaccgcctactcgtggctaggtgtgcagcatggctggggtggcacaagcggccacccacgtgaccgccttgccgaggagaaagaagctgctgaccatctccagaccgttcgtaaggctggtggctcggtcagtggtctcgccgaccctggagcgtcgtccaatggacctgccaatcctgatccggagctggttaagaaggccatcatctctgcatgtaacgccaccgtcgagattgagcctgttttgacgcgctacgacaccatcgtcggtgacggtgactgcggcgagacgcttgcccaggccggtagtgaagtcaagaaggccctcgaaaagggcgagattcccctggacaatgctgctggcaccctcatcgccattggtgaggtgctcgagtatgctatgggtggtacttcgggtgccatctatgcactcttcttcgctggtcttgtgcagtccctgttgtcgaaccccaagggtacgcaggcagatgcgaaggtgtggggcaaggctgcgctggatgcgctcgagaacctgggtcgttacacccctgctcgccccggtgaccgaacactggtggatgctcttgaccccttctgccgcgctctaggtgcaggcaagtcgctcgccgaagctgtcgatgcatccaaggtgggtgctgagaagacgcaggccatgacgccacgtcttggacgagccacgtatgtgggcagcaaggaccagggcgagatgccccctgacccgggtgcatggggtgtctgggcgctcactgatggtcttcgaaaaggtcttggtcagtag

SEQ ID NO: 120370 - protein, 616 aa, Ustilago maydis 521
MATKHLFDTAQGLVDRNLRGTVAQNPALRYYAPHKVVYDPSHDNKKVAVISGGGAGHEPAQAGFVGKGMLAACISGDIFASPSAAQICSGIDLINHDAGVVMVVNNYTGDCLHFGLAAEKARAAMAYADKQGGGVEAVIVADDVAVGRKRGGLVGRRGLAGNIFTCKILGAASDKGMDVKRIGELGRNLMDNMVSIGTSLDHCHVPGRPKGAEERGALAEDAAELGMGIHNEPGFKHMDKKPEPEALLGEMLDLLLDPNDADRAYTPFDKDDAPVLFVNNLGGMSQLEMNAIVDLTIELLENKWNLHPCRVLCGPYMTSLNAPGFGVSLINQKRFQKNTGQDLLELLDYPTTAYSWLGVQHGWGGTSGHPRDRLAEEKEAADHLQTVRKAGGSVSGLADPGASSNGPANPDPELVKKAIISACNATVEIEPVLTRYDTIVGDGDCGETLAQAGSEVKKALEKGEIPLDNAAGTLIAIGEVLEYAMGGTSGAIYALFFAGLVQSLLSNPKGTQADAKVWGKAALDALENLGRYTPARPGDRTLVDALDPFCRALGAGKSLAEAVDASKVGAEKTQAMTPRLGRATYVGSKDQGEMPPDPGAWGVWALTDGLRKGLGQ

SEQ ID NO: 120371 - DNA, 1812 bp, Cryptococcus neoformans var. neoformans B-3501A
  CDS (1)..(1812)
atggctcccgctctgctaactgacgacatcaccacaataccacctccagagaaacaccttctcaacactcctcagacccttgtggtcgattcactcaagggcctggccaccctcaatcccaacgtgaaacttgacgaggcccaaagagtaatctacacacctccgactgaacctaaagtcgctcttctctcgggaggggggtccggtcatgagcccgcccatgccgcttttgtgggacctggattgttatcggctgcaatctgcggaaacatctttgcttctccgaacgtcgctcagatccgtcgaggactcgagttggtgacacgcgaaaagggtggtcttgtcgtagtcatgaactacacgggtgacgctttgcactttggcttggctgccgagcagcacaggagtgcaggaaaagttggggatgttcgagtcttgatggttggggatgatgtggctgttggcagggaacagggaagcatcgttggtagacgagggctcgccggtacgattctggtgtacaaagtggctgctgctctttccgataaaggcgccgatcttgactctgtagaaaacattgccaaatatgtggcttctcggctagggactcttggtgtcggccttgaacactgtcacgtcccaggaactcgtgctggtacctcccaccttggagccaacgaagttgaagttggcatgggcattcacaacgaagctggtacttacaagcttgagatgacgactgcatctgagcttgtgggaagaatgctcacccaaatcactgatactatcgacaaggacaagtcattcgtgcctttcaaaggtgatggctctgatgaggtggtgttgttggtgaacgacttgggagccataagtgagcttgaaatgggtggcctcacaaacgaagctgtcaagtggcttcagtcaaggaagatcaaagttcgtcgagtccttgctggaacttatatgacatctctcaacatgcctggtttctcccttactcttcttctcctcccttctgcttctgaaaaagcaccttactctgccaatgagatccttgagtaccttgacacccccgctagtgctccaggttggaagtggcatgcgggtagggaacctggaacgcttgatgtgaaggctgaagaggcacctatccccgtgcaaaaagacaacgctgttttaccctccactgatgcaaaaggcttccttgctgctatcgctcgggcgtgcaaggctcttattgccgccgaacctgaactcactgaacaagaccagatcgccggagatggggatgcaggtctcactttggaggccggcgccaagggtgtgttgaaggcgattgaggagggccgattgaagggcgagaatgtagtgcaggatgtcaaggttattgccgaaatcgtggaggatgacatgggcggcacttcgggtgccctctactcgatattctttgcgggattgggcaaatccttgagagatgctgctacaaatggtgccaagagcacatcccccgaggtttggagcaaagctgctgctgaagccctggccactctttacaaatacactcgtgcccggcctccttcccgaaccctcgttgacccccttgatgcctttgttgcctctttaccttcaaaaggactttcctccgcggcggaggacgctcttgcagcagctgacaagaccaaggagcttgtggctaaggctggtcgaggagcatatgtgaatcaggaggatttgaagaagcgtgaagtccccgaccctggagcttggggtatctggcgaattttggatggtttgcgaggttttgaggcttaa

SEQ ID NO: 120372 - protein, 603 aa, Cryptococcus neoformans var. neoformans B-3501A
MAPALLTDDITTIPPPEKHLLNTPQTLVVDSLKGLATLNPNVKLDEAQRVIYTPPTEPKVALLSGGGSGHEPAHAAFVGPGLLSAAICGNIFASPNVAQIRRGLELVTREKGGLVVVMNYTGDALHFGLAAEQHRSAGKVGDVRVLMVGDDVAVGREQGSIVGRRGLAGTILVYKVAAALSDKGADLDSVENIAKYVASRLGTLGVGLEHCHVPGTRAGTSHLGANEVEVGMGIHNEAGTYKLEMTTASELVGRMLTQITDTIDKDKSFVPFKGDGSDEVVLLVNDLGAISELEMGGLTNEAVKWLQSRKIKVRRVLAGTYMTSLNMPGFSLTLLLLPSASEKAPYSANEILEYLDTPASAPGWKWHAGREPGTLDVKAEEAPIPVQKDNAVLPSTDAKGFLAAIARACKALIAAEPELTEQDQIAGDGDAGLTLEAGAKGVLKAIEEGRLKGENVVQDVKVIAEIVEDDMGGTSGALYSIFFAGLGKSLRDAATNGAKSTSPEVWSKAAAEALATLYKYTRARPPSRTLVDPLDAFVASLPSKGLSSAAEDALAAADKTKELVAKAGRGAYVNQEDLKKREVPDPGAWGIWRILDGLRGFEA

SEQ ID NO: 120373 - DNA, 1803 bp, Cryptococcus neoformans var. neoformans B-3501A
  CDS (1)..(1803)
atgacagaccgacacatcttcccagaccacaagactctggttttcagatccctccgaggtcttgttgcctctcatccttatctctccctgatcccctcccagaaagtcgtctatcgcgcagaccacgacccttccaaggtttctcttatttgcggtggtggttccggccacgagcctggtactgtcggattcgttggagctggtttgctcacagcgagtgtcgccggcgatgtgtttgccagtcctagtgcaagacaggttatggaggctatcaagcgcgtccacagcgacaagggtaccattctgattattacaaactacactggcgacaaccttcatttcgggctagcgaagctcatggctcaatcagctggtttgaaaaacgtcgagctcgtggtcgtcggcgatgacgtctcagtgccgaaatctcgcggaaagtatgttggccgaaggtgtcttgcgggtataactcttgtctgcaagattctcggcgccgcctcggaagtcgatgtggaattccaaaacctcgtgacgctcggtcgctccctttcggccaacactgcctccgtcgccatggccttggaccactgtcacgtcccaggcaggtcgggggaagccgactggcacttgcccgaaggtaaaatcgagattggtctcggtttccacaacgaaactggtgttttcagcattcctcagccgccgcctgatgttctcatcaacaagcttttggatctcttgctcaagcaagacgaccccgagaggtcttttgtcaagttcaaggatggtgatgagctcgttttgctcgtgaacaatatgggcggtatgagtgtcctcgagatgggctctgtcgtcgatgaagtccttattcagctcgaatcccgaggtatcgtccccacacgaatcctcaacggccccttcatgggctccatgaacatgcccggtatctctctctccctcctcaacctcaccaacgttgccgaagaatgtccctttgtagacacttcaaagctggctgaattccttgatgctccacacaactctgtcgcttggcctgcaacgagccaggtttaccccttgcccgaaaagctggcaaacaggaagagagaggataagtttgtggatgtggaagaggagaagaaggaggaggttactggtgggcctcagttgttcggtaacgaggagcttattcgcaaggctatgaagcaagcagctgaggatgtgcttgctagcgaacccaaacttaccaagtgggataccattgtcggtgacggtgactgtggagaaacatgtgcccttggtgcccaagcgacccttaaagctctcgaacaaggccttggctctgacggcgaacttgtccactttttccgagtcttgactgaagtcatcgacggttcaatgggcggtaccctcggcgccatcttctccatcttcctcgccggtctcactaccgccctcatcgatgccgcctcctcccctaacggtgcccccgaactcacccctgccttcttcggccaagtcacttcctctgccctcgaaactctcaaagctcgtactgccgcgcgagtcggtcaccgaactgtcatggacgcgcttattccctttggggagacacttgccgagagtggagatttgaagaaggctgtggaggcgtgtaggaaaggtggggatagcacggtggacttgcaggccaagttgggtagagcgacgtatgtaggccagttggagggcgacatgccacccgaccctggagcgatggcgtttgtgactgtggtggaaggtattctcaaggcttatagttcttag

SEQ ID NO: 120374 - protein, 600 aa, Cryptococcus neoformans var. neoformans B-3501A
MTDRHIFPDHKTLVFRSLRGLVASHPYLSLIPSQKVVYRADHDPSKVSLICGGGSGHEPGTVGFVGAGLLTASVAGDVFASPSARQVMEAIKRVHSDKGTILIITNYTGDNLHFGLAKLMAQSAGLKNVELVVVGDDVSVPKSRGKYVGRRCLAGITLVCKILGAASEVDVEFQNLVTLGRSLSANTASVAMALDHCHVPGRSGEADWHLPEGKIEIGLGFHNETGVFSIPQPPPDVLINKLLDLLLKQDDPERSFVKFKDGDELVLLVNNMGGMSVLEMGSVVDEVLIQLESRGIVPTRILNGPFMGSMNMPGISLSLLNLTNVAEECPFVDTSKLAEFLDAPHNSVAWPATSQVYPLPEKLANRKREDKFVDVEEEKKEEVTGGPQLFGNEELIRKAMKQAAEDVLASEPKLTKWDTIVGDGDCGETCALGAQATLKALEQGLGSDGELVHFFRVLTEVIDGSMGGTLGAIFSIFLAGLTTALIDAASSPNGAPELTPAFFGQVTSSALETLKARTAARVGHRTVMDALIPFGETLAESGDLKKAVEACRKGGDSTVDLQAKLGRATYVGQLEGDMPPDPGAMAFVTVVEGILKAYSS

SEQ ID NO: 120375 - DNA, 1635 bp, Mycobacterium sp. JLS
  CDS (1)..(1635): transl_table=11
atgcagcggtacttcctcgactcggccgactccttcctgcccggcgcgctacgcggcttcgtcgcggccaacccggaggtggtctggcaccgtgaccccggcttcctcgcgcgccggacgccgacgccgtcgggacgggtggcggtgatctcgggtggcgggtcgggtcacgagccgatgcactccgggctgatcgggaccgggttgctcgacgcggtgtgtccgggtccggtgttcacctcgccgaacgcgctgcagatcgccggcgcgacgcgccacgtcgactccggtgccggtgtgctgcacatcgtgaagaactacaccggcgacgtgatgaacttccgcatcgcgcgagacatcgtgcaggacgagggaatcgaaaccgacgtggtggtggtggccgacgacgtggcgtcccactccgaggacggcggacccgggcgccgcggcaccggcgcgacgatcatcgtcgagaaggtgtgctgtgccgccgccgaggcgggtgcgaccctcgccgaagtcaccgcgctcggccggcgcgtcgcggaccgcgcgcgcagcatgtcggtggcgctggacccgtgcacggtgcccggatcggatcagccgtcgttcgacctcgggccggacgagatggagctcggcatcggcatccacggcgaatccggtacggagcgaacgcaatggcgtcccgcggcggagatcgtgcggatgctgctggagcggatcctcggctccctcgaagcgccggcgggcgagcaggtgatcgtggtggtcaacggtctcggcagcacccatccgctggaactgaatctggtgttcggccatgtgctcgaacaattgcgggccgcggatgtgcgggtggtccgcagcctggtgggcacgatggtgaccgcactcgacatgcgcggggcgtcggtgacggtggccccggtcgatgacgagatggtccggttgtgggatgcgccgaccgatgcgccggcatggccgcgactcgccgcctcggagccgggcgagctgaccgatgccacggtcgccgaaccggacaacgccgtcgattcgggacccgaatgtgcttggctgtcagtcttcgtcgagcgggtgcagggcgccgtcgacgagctgaccgccctcgaccggcaggtcggtgacggcgacttcggcgtcaacatgtcggcggcgctcggcggtttcgacctaccgctgcggggttccgacgccgaggtcctcgacgccatcgcgcgcagcttcttcgtgcggtccggcggtacgtctggtgcggtgttcggcacgctgttccgcgagctgtcgaaggcgttctccgacaccgacgaattcggtgaggcgttggcggcgggcacccgggacgggctggagtcggtggtcgatctcggcggcgccgaggtgggcgaccacaccgtggtggatgcgctgcacccggcgaatgaggcgctacagcaaggtgtttcgctcgccgaggcggcgcgggcggcggccgagggtgcggagtcgacgcgtgaccagatcgctcgcaaggggcgcgcaagctatgtcggcgatgcggcgcgcggcgcggtcgaccctggcgcgctggtgatctcgtggttgttcgaggcggcggccgaccgccgataa

SEQ ID NO: 120376 - protein, 544 aa, Mycobacterium sp. JLS
MQRYFLDSADSFLPGALRGFVAANPEVVWHRDPGFLARRTPTPSGRVAVISGGGSGHEPMHSGLIGTGLLDAVCPGPVFTSPNALQIAGATRHVDSGAGVLHIVKNYTGDVMNFRIARDIVQDEGIETDVVVVADDVASHSEDGGPGRRGTGATIIVEKVCCAAAEAGATLAEVTALGRRVADRARSMSVALDPCTVPGSDQPSFDLGPDEMELGIGIHGESGTERTQWRPAAEIVRMLLERILGSLEAPAGEQVIVVVNGLGSTHPLELNLVFGHVLEQLRAADVRVVRSLVGTMVTALDMRGASVTVAPVDDEMVRLWDAPTDAPAWPRLAASEPGELTDATVAEPDNAVDSGPECAWLSVFVERVQGAVDELTALDRQVGDGDFGVNMSAALGGFDLPLRGSDAEVLDAIARSFFVRSGGTSGAVFGTLFRELSKAFSDTDEFGEALAAGTRDGLESVVDLGGAEVGDHTVVDALHPANEALQQGVSLAEAARAAAEGAESTRDQIARKGRASYVGDAARGAVDPGALVISWLFEAAADRR

SEQ ID NO: 120377 - DNA, 1773 bp, Erwinia carotovora subsp. atroseptica SCRI1043
  CDS (1)..(1773): transl_table=11
atgacgtatttgttcaaccaaccttcctcctttgctcgggaactgaccgaaggctttgtggcggcgcatgctgacaaagtgcgtcaggtacctggcggcgtggtcagaagtactcgcagtcgtgaaggtggggtcgccattgtggtcgggggtggctccggccactacccggcgtttgccgggctggtcgggcaggggctggcgcacggtgcggcgatgggtaacctgtttgcatcgccatcagcccagcaaatctgctccgtcgcccgagcggcacacaatggcggtggcgtgctgctgacgttcggtaactatgcgggcgatgtgcttcatttcggacaggccaaggcacgtctgaatgcggaaggtattccgtgtgagctgctggcggttaccgatgacatttccagtgcgccactgaacgaatggcaaaagcgtcgcggagtcgccggcgatctgatggtcttcaaggcagtctctgcggcggcggaagcgggttacgatttggccgccgtgcttgaggttgccgaacgtgccaaccagcgtacccgctcgctcggcgtggccttttctggctgcaccttgccgggcgcggaacacccgctgttcaccgttcctgaaggaatgatggcggtgggcatggggattcatggcgagccgggcatccgtgacgtccccatctcaaccgccgatgaactggctgagctattggtcagttcactgttgaaagaggtgccgcacggtattacgacgctctccggacagcggatcagcgtggtactcaacggcctcggtggcgtgaaatacgaagagttgtttgtggtttatcgccgcgtttcacaactgctggttgagcaggggctgacggtggtcgaaccggaagtcggtgagctggtaaccagcttcaacatggcgggtctatcgctcacgctgttctggctggatgaggaattggaacgtttctggcgtgcgcctgccgatgcacccgcatttcgtaaaggcagtatgtctcccggcgaaccgcttgctgagcggacattcgtggcagaactcgaggtgatcccaaacgctacggcggcatcgaaagcggcagcacactgtgttgctgcggcgttgaatgcggcgcgtgacattgtgctggctaacgtcaccgaactgggccgtatcgatgcgattgccggagatggcgatcacggtattggcatggagcgcggggtgattgccgccgcggacaaagccacggagatgctggaacggcaggcgggtgccggtacgttattacaacgtgcggcagatgcttgggccgatcaggctggggggacgtctggcgcaatctggggcgttgcgttaaatgcgctgggaaccgtgttgggtgatgaacaacggcctgacggtcgccgtgtggcagatggcgtgcgtcaggccaaagagagcgtgatgcatttcggtaaagcaaaaccgggggataaaacgctggtggatgcactcatcccctttagtttggcattgacgcaacgagtagagacgggaatgagcttgccagaagcctggcagcaggccgcgcagtgtgcccaacaggcagctgacgacacggcacagctgttacccaaaattggccgcgcccgcccgctggcagaaaaaagtctgggaacacccgatgcgggggcgatatcgctagccatgatccttgatgcggtgtcggccgtgttgaacagcgatacgacgtcgacttcttcgcatcagacggcgacgcaagcggagagtgagcgatga

SEQ ID NO: 120378 - protein, 590 aa, Erwinia carotovora subsp. atroseptica SCRI1043
MTYLFNQPSSFARELTEGFVAAHADKVRQVPGGVVRSTRSREGGVAIVVGGGSGHYPAFAGLVGQGLAHGAAMGNLFASPSAQQICSVARAAHNGGGVLLTFGNYAGDVLHFGQAKARLNAEGIPCELLAVTDDISSAPLNEWQKRRGVAGDLMVFKAVSAAAEAGYDLAAVLEVAERANQRTRSLGVAFSGCTLPGAEHPLFTVPEGMMAVGMGIHGEPGIRDVPISTADELAELLVSSLLKEVPHGITTLSGQRISVVLNGLGGVKYEELFVVYRRVSQLLVEQGLTVVEPEVGELVTSFNMAGLSLTLFWLDEELERFWRAPADAPAFRKGSMSPGEPLAERTFVAELEVIPNATAASKAAAHCVAAALNAARDIVLANVTELGRIDAIAGDGDHGIGMERGVIAAADKATEMLERQAGAGTLLQRAADAWADQAGGTSGAIWGVALNALGTVLGDEQRPDGRRVADGVRQAKESVMHFGKAKPGDKTLVDALIPFSLALTQRVETGMSLPEAWQQAAQCAQQAADDTAQLLPKIGRARPLAEKSLGTPDAGAISLAMILDAVSAVLNSDTTSTSSHQTATQAESER

SEQ ID NO: 120379 - DNA, 1731 bp, Propionibacterium acnes KPA171202
  CDS (1)..(1731): transl_table=11
atgacccgacttgtgaataatcccgataatttcccatctcaggcggtcgcggggcttgtcagcgctttcccgaaccatctgaggccggtattcgggggagttgttcgcgccgcccgtaccgatcgcaaggttgccctcgtcgtcggtgggggatcgggacattacccggcctttgcaggttgggtcggtcctggcttcgctgatggtgctgtgtgcgggaacatcttctcctctccctcggcctcccaggcttatgcagtgtgcaaagccgctgatcgtggcgccgggctcctcattggattcggcaactacgccggggacgtcctgcactttgggcaagcagcagagcggcttcgtagcgaggggatcgacgcgcgttgcctgctcgttactgacgacattgcttcggcgccggaccatctcaagcgtcggggaattgctggcgacctgccggtcttcaaggtcacagcggcggcctgtgaggagggccgggacattgacgaggtcgtcgcgatatttgaccgggttaacgatcgcactcggtccctcggagtggcctttgcaggctgcactttgccgggagccgacgagcctctattccgagtcgaggcaggccagatgggcgtgggcatggggatccacggtgagcccggcattcacgatgagaccttgggcaccgcagacgaggtggctgccatgctcgttaacagattgctggctgaccggcccgagaatcctgggactcgagtggtgccgatcgttaacgggctgggcagtactaaatacgaggagctcttcgtactgtggaatgacatcagccgtcatcttgagaaagctggcctggcaattgtcgatccgcaggtgggagaatttgtcaccagcctcgacatggccggagtctccctgactctggtgtggctcgacgacgtcatcgagccgttgtggttggcagcatgcgacactcccgcgtaccgacgcggaactgtcggtcaggtggattttgataccacgccgctgccccaggaggttgagcgggtcatggttgctaacccgggatctcgagcttcccggagtcttgcgggcgttatcgtcgaagctctggaagtggtggcgacgaggttgtcggaacgcagtagcgagttgggccgtctcgattctgtggctggcgacggtgaccacggtattggcatggcacgtgggtcccgggctgcccttgctgaggcacgacgggtgagcggggacggtgccggtgcggcaacgactctcaatgcggccggctcagcatggtctgagcatgctggagggacctcaggtgcgttatggggagcagtgctgaccgccatcggagcggtacttggtgacgaggacccggcaggcgaggacaccatccctcgggcggctcgagcagccctcgacgctgttatccggctgggaggggctagcgtcggcgataaaacgatggttgatgccatggaccccttcgtcacgaccctcgagtcctcgtctgatccgctgccgcaggcttgggaatcagcctgtcatgctgccgacatggcagctcaggcgacctccgaggtgacagccacggtcggtcgggcgcgcccgctgggggacaagtcgctgggaacgcctgatccgggagcagtgtccttccacgaggtggtcgtcgcagtcggatccgtgctgtcgaagtcagcgttgagcaacgggaggtttcgcgctcaacgttga

SEQ ID NO: 120380 - protein, 576 aa, Propionibacterium acnes KPA171202
MTRLVNNPDNFPSQAVAGLVSAFPNHLRPVFGGVVRAARTDRKVALVVGGGSGHYPAFAGWVGPGFADGAVCGNIFSSPSASQAYAVCKAADRGAGLLIGFGNYAGDVLHFGQAAERLRSEGIDARCLLVTDDIASAPDHLKRRGIAGDLPVFKVTAAACEEGRDIDEVVAIFDRVNDRTRSLGVAFAGCTLPGADEPLFRVEAGQMGVGMGIHGEPGIHDETLGTADEVAAMLVNRLLADRPENPGTRVVPIVNGLGSTKYEELFVLWNDISRHLEKAGLAIVDPQVGEFVTSLDMAGVSLTLVWLDDVIEPLWLAACDTPAYRRGTVGQVDFDTTPLPQEVERVMVANPGSRASRSLAGVIVEALEVVATRLSERSSELGRLDSVAGDGDHGIGMARGSRAALAEARRVSGDGAGAATTLNAAGSAWSEHAGGTSGALWGAVLTAIGAVLGDEDPAGEDTIPRAARAALDAVIRLGGASVGDKTMVDAMDPFVTTLESSSDPLPQAWESACHAADMAAQATSEVTATVGRARPLGDKSLGTPDPGAVSFHEVVVAVGSVLSKSALSNGRFRAQR

SEQ ID NO: 120381 - DNA, 1752 bp, Bacillus cereus E33L
  CDS (1)..(1752): transl_table=11
atgaaaaagattataaataaaccagaaacattagtaatggaaatgtgtaatggaatggttatggctcatccagagcttgagcttttgaaaaaatataaagtcattaagaagaaagaaatgaacgaaaataaggtaacgttaattagtggcggcggtagtggtcatgagccggcacatgcaggattagtcggaaaaggaatgttagatgcggcagtgtgcggagatgtgtttgcgtcaccttcacaaattcaggtatatcaagcaattaaagaaacagctagtaaaaaaggtacgttattaattattaaaaattatagcggcgatattatgaatttcaaaaacggtgcgcatttagcgacggaagatggaattgaagtagactacgtaaaagtggacgatgatattgcggtagaagatagtttgtatacagtaggacgccgcggtgttgcgggcgttattttagtccataaaattgccggtgcagcagcggaagcaggtatggatttaggagcggtgaaagctgtagcggaaaaagcagctgctaacgtgcgcacaatcggtttagcattaacttcttgtaccgttccagcgagcggatcacctactttcacacttgcggaagatgaaatggaatacggcgtaggtattcacggcgaaccaggaattaagcgtgaaaaaatgttgtcagcggatgaattagcgaaccgtatgacaaatgatcttgtaaaagatttaggagtaaaagatggcgaggaaatcgcacttctagttaacggttttggcggtacgccactacaagaactttacctattcaacaatgcagttacgagagaattagctgctagaaacattaaaattaatagagtattcgtcggtaactatatgacgagtattgatatggctggtatgtctttaactgtaatgaagttagatggtgagttaaaaacgttattatctaaagaatgtaatacaccagcgtttaaagtagatggaccagttgaaagtgtagagtatgtaaatgtacttgaagaaacagaagagaaagaagtttcatttgaactagaaacagcggaagagcacgctgttataaaagataatgtcattacattaaacaacatgatttatctcgttgataaaatgagcgatattattattaaaaatgaagtaccgttctgtgagttagacacgcatgcaggtgacggcgatttcggaatgagtgtggcaaaaggatttaagcaattaaaacgtgagtggcattcgattgtagaacaagagaacgtaacgatcggatcattccttgacggttgctccatgatcattatggaacattgcggcggcgcatctggtccaatttggggcggtgcattccgcgcagctagtaaggcagcaggcgaaaaacgtgagttaacagtgaaagaattcgctgaaatgttgcaagcagctctgcaaggcatacaatcgatcggtgaaagatcattcggaagaggagcagtagttggtgataaaacacttgttgacgcacttgctccatgtgtagactcttggttagctagcgcttcagacgaagtagacatgaaaactgcctttgaaaaaggagcagaagcagcggtcaaaggagcagagtatacgaaagaaatcgtagctcgcatgggccgcgccggtacagttggtgaaagaagtttaggatatcctgatgcaggtgcgcatgcacttggagttatctttacggagattgcgggtagtttgaaatag

SEQ ID NO: 120382 - protein, 583 aa, Bacillus cereus E33L
MKKIINKPETLVMEMCNGMVMAHPELELLKKYKVIKKKEMNENKVTLISGGGSGHEPAHAGLVGKGMLDAAVCGDVFASPSQIQVYQAIKETASKKGTLLIIKNYSGDIMNFKNGAHLATEDGIEVDYVKVDDDIAVEDSLYTVGRRGVAGVILVHKIAGAAAEAGMDLGAVKAVAEKAAANVRTIGLALTSCTVPASGSPTFTLAEDEMEYGVGIHGEPGIKREKMLSADELANRMTNDLVKDLGVKDGEEIALLVNGFGGTPLQELYLFNNAVTRELAARNIKINRVFVGNYMTSIDMAGMSLTVMKLDGELKTLLSKECNTPAFKVDGPVESVEYVNVLEETEEKEVSFELETAEEHAVIKDNVITLNNMIYLVDKMSDIIIKNEVPFCELDTHAGDGDFGMSVAKGFKQLKREWHSIVEQENVTIGSFLDGCSMIIMEHCGGASGPIWGGAFRAASKAAGEKRELTVKEFAEMLQAALQGIQSIGERSFGRGAVVGDKTLVDALAPCVDSWLASASDEVDMKTAFEKGAEAAVKGAEYTKEIVARMGRAGTVGERSLGYPDAGAHALGVIFTEIAGSLK

SEQ ID NO: 120383 - DNA, 1713 bp, Burkholderia pseudomallei K96243
  CDS (1)..(1713): transl_table=11
atgaaaaagctcgtcaaccatccgtccgacgtcgtgcgcgaaatgctggaaggcatcgcgcggcaatcgccgcatgtcgccatgctcggcgacgaacacgtgctgatccggcgcccgctgccggagccggccaagcgcgcggtcgcggtcatctccggcggcggcagcggccacgagccggcgcatggcggctatgtcggcgcgggaatgctgagcgcggccgtgtgcggcgaagtcttcacgtcgccgtccgccgacgcggtgctcgccgcgattcgcgcgacggcgggcccgcacggcgcgttgctcatcgtgaagaactacacgggcgaccgcctcaatttcggtctcgcggccgagctcgcgcgcgcggacggcattccggtcgagatcgtcgtcgtcgcggacgacgtgtcgctgcgcgcgctcaccgagcgcgggcgccgccgcggcatcgccggcaccgtgctcgtgcacaagctcgccggcgcggccgccgagcgcggcctcacgctggcgcaggtggccgccgccgcgaacgcggcggcggcgcggctcggcacgatgggcgtcgcgctcgacggctgcacgatgccgggcgccgagcaatccggctttcgcctggccgatcacgaaatcgagctcgggctgggcatacacggcgaaaagggcgtacagcgcacggcgccgatgccggccgacgcgctggccgaaacgctcgtcgcggcgatcgtcgacgatcagtcgatcgcgcgcggcgaccgggtcgcgctgctcgtgaacgggctcggcgcgacgcccgacatggagctcggcatcgtgctgcgcgcggcgtacgacagcctgagccggcgcggcgtcgaggtggcgcgtgcatgggcgggcaccttcctgtccgcgctcgacatgccgggttgctcgatttcgctgctcaagctgaacgacgacctgctcgagctgctcgacgcgccgacgcaggcgcgcgcgtggcccggcggcggcgcggtgaaccgggacattcgcgtggcgtgcgccgaagccggcccggccgacggcccgccgcaatgggcgacggcgagcatggcgagcgcgatgggcgccgacgtgctgcaacccgcgctgcatgcggtcgccgccgcgctgatcgaccacgagccggtgttgaccgaactcgatgccgtcgcgggcgacggcgatctgggcgcgagcatgcggcgcgcggcgaacgcgatgctcgcgctgcccgccgacgcgtatcgggggccggccgtcctgctcgccgcgctcggcgccgcgctgcgccgggcgatcgcgggcagctccgggccgttctacgcgacggcgctggtgcgtgcggcccgccggctcgccgaggcgccggatcccggcgcgcgcgactgggcgagcgcgtttcgcagcggcgtcgacgcgatcggcgaactgggcggcgcgaagcccggcgatcgcacgatgctcgacgcattggtgcccgccgccgatgcgttcgagcgcgaactgtcggcgggcggcagcgcgcgtgccgcatgggcggcggccgtgcgcgcggccgacgaaggcgcggcgcgcaccgcgggcatgacgccgcgcgcggggcgcgcgagctatctgggcgcgcgcgcggtgggcgcgcccgacggcggtgcggtcgccgtcgcgtgctggctgcgcgcgttgcagccgcacgtggcgtag

SEQ ID NO: 120384 - protein, 570 aa, Burkholderia pseudomallei K96243
MKKLVNHPSDVVREMLEGIARQSPHVAMLGDEHVLIRRPLPEPAKRAVAVISGGGSGHEPAHGGYVGAGMLSAAVCGEVFTSPSADAVLAAIRATAGPHGALLIVKNYTGDRLNFGLAAELARADGIPVEIVVVADDVSLRALTERGRRRGIAGTVLVHKLAGAAAERGLTLAQVAAAANAAAARLGTMGVALDGCTMPGAEQSGFRLADHEIELGLGIHGEKGVQRTAPMPADALAETLVAAIVDDQSIARGDRVALLVNGLGATPDMELGIVLRAAYDSLSRRGVEVARAWAGTFLSALDMPGCSISLLKLNDDLLELLDAPTQARAWPGGGAVNRDIRVACAEAGPADGPPQWATASMASAMGADVLQPALHAVAAALIDHEPVLTELDAVAGDGDLGASMRRAANAMLALPADAYRGPAVLLAALGAALRRAIAGSSGPFYATALVRAARRLAEAPDPGARDWASAFRSGVDAIGELGGAKPGDRTMLDALVPAADAFERELSAGGSARAAWAAAVRAADEGAARTAGMTPRAGRASYLGARAVGAPDGGAVAVACWLRALQPHVA

SEQ ID NO: 120385 - DNA, 1710 bp, Thermobifida fusca YX
  CDS (1)..(1710): transl_table=11
gtggcattgaaaaagatcatcaacaaccccgacgacttcgtcgacgagttgaccgagtcactgctcctggcccaccccgaccggctgcgcgcggcttccccaaaccggcgcgctctcgtccgcgcggacgcgcccgtgccagggaaagtcgggatcgtgaccggcggcggctcgggtcacctgcccctttttctcggctatgtcggccaagggctggcgaccggtgtcgcaatcggcaacgtcttctcttctccctccgccgaacagatcgccgcagccacccgcgcctcccacggcgggaaaggcgtgctctacctgtacggcaactatgggggtgacatctacaacttcgacttggccgctgacatcgtcgccgccgaaggaatccgcacagcgaccgtgctgggcactgacgacatcatgtcggcgccgaaaggcaaggaggcgacgcggcgcggggtggccgggctgttcttcgcctacaagaccgcgggtgcggctgccgaacgcggcgatgacctggaccgtgtccgggccatcgcgcaacgcacagtcgacgccacccggactatgggggtggggctctcaccgacgatcctgcccgcagcgggggagcccaccttcaccctggccgacggtgagatggagatcggtatcggcatccacggcgagccgggcagctaccggggcccgttggagaccgcggacgaaatcaccgaccggtttctcaccgaaattcttgctgaactggaccccgccccgaaccagcgggtcgcggtcttggtcaacgggctgggggctactccgctcgaggagctctacctcatctaccggcgggcccaccagatcctcaccgaacgcggagtgatcatccaccgccgctacattggcgagttcgccaccagcctggagatggcgggagcgtccctgtcgctgctgctgctcgacgacgagctggcggaactcctggatgcgcctgccgcttccccgttcttctctcaaggacagaccgcgcccgtagagccggtcgagtccgccaccgatgttcctggtgcccaagcgaccgcggcaaccgacacgcaggtacggcgcaccgggcgggccagcaccctgcgcaccctgctcctcgatgtcctggctgacctgcccaggcacgctgaagaactccgtgccctggacgcccgcctcggcgacggtgacctgggaatcaccgtgtccgccggtgcggacgcggtccgcgaggcactgctggctttgccggaggatgtccacccggccgacctgctgcgggccgcaggggtggcgttcgcttctgctaacccctccacttttgccgcgctggtcggcgccggactcttgggggctgcggccgaagctgaagacctcaccgaactcaccctggcacacgccatgccgatcaccacggctatggcccggcgcgtccaggaacgcggcggcgcccagcgcggcgacaagaccttcctggatgtgctgtgggcggtcgtcgacgcgctgcctgccgcgtctgatgcgcggacagccgccgcagccgcggccaacgctgcggaacgcacggtctctgagacccggaacctggtttcggctcggggtcgggctgcttgggtgggccagcgcagcgccggagaactcgatcccgggtcggtggcagtgctgcgtttcctggaggatctgcgcgaccggatcaactga

SEQ ID NO: 120386 - protein, 569 aa, Thermobifida fusca YX
MALKKIINNPDDFVDELTESLLLAHPDRLRAASPNRRALVRADAPVPGKVGIVTGGGSGHLPLFLGYVGQGLATGVAIGNVFSSPSAEQIAAATRASHGGKGVLYLYGNYGGDIYNFDLAADIVAAEGIRTATVLGTDDIMSAPKGKEATRRGVAGLFFAYKTAGAAAERGDDLDRVRAIAQRTVDATRTMGVGLSPTILPAAGEPTFTLADGEMEIGIGIHGEPGSYRGPLETADEITDRFLTEILAELDPAPNQRVAVLVNGLGATPLEELYLIYRRAHQILTERGVIIHRRYIGEFATSLEMAGASLSLLLLDDELAELLDAPAASPFFSQGQTAPVEPVESATDVPGAQATAATDTQVRRTGRASTLRTLLLDVLADLPRHAEELRALDARLGDGDLGITVSAGADAVREALLALPEDVHPADLLRAAGVAFASANPSTFAALVGAGLLGAAAEAEDLTELTLAHAMPITTAMARRVQERGGAQRGDKTFLDVLWAVVDALPAASDARTAAAAAANAAERTVSETRNLVSARGRAAWVGQRSAGELDPGSVAVLRFLEDLRDRIN

SEQ ID NO: 120387 - DNA, 1701 bp, Myxococcus xanthus DK 1622
  CDS (1)..(1701): transl_table=11
atgaagaagctggtcaacgcccctcgcgcggtggtgcgggagatgctggaggggttggtctcgctcgcccccgggcaggtgctgctggacggggagtcggtggtgctccgcgccgacacgccttccgacgtccgcgcgcgcaaggtggctgtcatctccggtggcggcagcggccatgagccggcgcacgcgggctacgtgggcgcgggcatgctggacgcggcggtggccggtgacgtcttcacctcgcccagcaccgatgccgtgctggccgccatccgcgccgtcgcggggcccgcgggcgcgctgctcgtcgtgaagaactacaccggggaccggctcaacttcgggctcgccgccgagctggcgcgcgccgagggcatccccgtggagacggtggtggtggcggacgacgtgtccctgcacgacacggtggagcccgcgcggcgccggggcatcgctggcacggtgctggtccacaaggtcgcgggcgcggcggccgaggcgggcgcggcgctccaggacgtcctccgcgaggccaccgcggcggcggaggtgctgggcaccatgggcgtggccctggggccctgcaccgtgcccgcggcgggcaagccgggcttcacgctggaggaggacgaaatcgagctgggcctgggcatccacggcgagcagggcgtgcggcgcgtgccgatgcagacggcggacagcctggtggacacgctgctcaccaccatcgtcgaggaccggcgcatcacctcgggagacagggtggtgctggtggtcaacggattgggcggcacgccgcccatggagctggccatcgtcgcccggcgcgcactggccgctctgcgtcagggcggcatccgcgtggagcgcgcgtggagcgggacgttcctctccgcgctggagatgcccggctgctcgttgacgctgctgaaggtggacgacgcgcggctggcccgcctggatgcggcggtggatgcgcccgcgtggcccggcgcgggacggctgccgaaggagccgggggtgtaccggccttcgtccacggcgtctccagcatcgcttccggcggaggcgccgcaaccggggatggaccgcttccggaaggccgccttgcgggtggcggacgcattcgagcagtcggagccccggctgaccgcgctcgatagcgccgcgggcgacggtgacctgggcctcagtctggtgcgtggcgccgaggcgattcgcgctcttccggaggacgcgtggacgagccccgcgcgtgcgctgacggccattggcaatgccttgcggcgcagcattggcggcagctcggggcccttctacgcgacggcgctgctgcgcgccgcgcgcaggctggcggaagggcccgtggatgccgccgcatgggccgaggccttcgacctcgccgtcaccgccgtatcggagctgggcggcgcgcggcctggggaccgcaccatgctcgatgcactccggcccgccgccgacgccttcgcgaaggcggtgcgttgcgggcagggggctcgcgaggcctgggcctcggcggtgcacgcggccgaggcgggagaggaggcgacgtcccggatgcagccgcgcctgggacgcgccagctacctgggtgcgcgcgccgtcggtgtgccggacgcgggcgccgcggccgtggtggtgtggatgaaggcgctcacgcctggcatcggctga

SEQ ID NO: 120388 - protein, 566 aa, Myxococcus xanthus DK 1622
MKKLVNAPRAVVREMLEGLVSLAPGQVLLDGESVVLRADTPSDVRARKVAVISGGGSGHEPAHAGYVGAGMLDAAVAGDVFTSPSTDAVLAAIRAVAGPAGALLVVKNYTGDRLNFGLAAELARAEGIPVETVVVADDVSLHDTVEPARRRGIAGTVLVHKVAGAAAEAGAALQDVLREATAAAEVLGTMGVALGPCTVPAAGKPGFTLEEDEIELGLGIHGEQGVRRVPMQTADSLVDTLLTTIVEDRRITSGDRVVLVVNGLGGTPPMELAIVARRALAALRQGGIRVERAWSGTFLSALEMPGCSLTLLKVDDARLARLDAAVDAPAWPGAGRLPKEPGVYRPSSTASPASLPAEAPQPGMDRFRKAALRVADAFEQSEPRLTALDSAAGDGDLGLSLVRGAEAIRALPEDAWTSPARALTAIGNALRRSIGGSSGPFYATALLRAARRLAEGPVDAAAWAEAFDLAVTAVSELGGARPGDRTMLDALRPAADAFAKAVRCGQGAREAWASAVHAAEAGEEATSRMQPRLGRASYLGARAVGVPDAGAAAVVVWMKALTPGIG

SEQ ID NO: 120389 - DNA, 1734 bp, Rhodococcus sp. RHA1
  CDS (1)..(1734): transl_table=11
atggcgcacccacagttcctgaactcgcccaagtccttcgtcgtcgacgcgctccgcggggccgtcgccaccaccgacgatctcgaatggcatccggaaccgggttatctcacacggcgggaaccgttgccgtccgggcaggtcgcgttgctgtcgggcggcgggtccgggcacgaaccgctgcacgccgggttcgtcggccggggcatgctcaccggagcctgccccggcctgatcttcagttcgcccaacgcgctgcaggtgcgggccgccacccgggccgtggatgcgggcggcggcgtcgtgcacatcgtgaagaactacaccggcgacgtcctcaacttccgcatcgccggcgaactggcggcggaggacggcatcacggtcgagcacgtgctcgtcgacgacgacgtcgcctccgaacgggaggacggacccggacgtcgcggtaccgcggccacgatcgcggtcgagaagatctgcggcgcttcggccgaacgcggcgacgacctcgccaccgtcgcggagttcgggcgacgcaccgcccggaattcccgcagcatggcggtcgcgctcagagcgtgcaccgttccgggggcggactcgccgtcgttcgacctcccggaggggcagatcgaactcgggatcggcattcacggcgaacgtggaaccgaacgagtcgacgcgatgggggcggccgaactggtccgccggctcaccgaccccgtcctcgcctcactcggcgtggagcggggcgagccggtgatcgcgatcgtcaacgggctcggcgcggcccatccgctggagctgcaactgctgttcggtgagctcgccgaccacctcgcggagcggggtgtggtgatccgtcgctcgctggtcgggagcttcgtcaccgccctcgacatggacggcgcgtccatcacactggtgcgctgcgacgacaagctcctcgacctgtgggacgctccgaccgccgcgccgggatggccgaacgccccggctggggaattccgtggcatcgcagacgaatccgaggtgcggttccggtcgaacgtcgcctcccgcgaggacgaggcggaggtgcccggcaccgccgacacgatgggccgggcagcggtgggcgcgtggatcgtcgcgttcgtggagaaggtgctcgccgaggaaccgaacctcaccgacctcgatcgccgcgcgggcgacggggacttcggcaccaacatggtggccgccctcgaccacgtcggcgtgcccgggatccgcgaccgctactccccggcgacggtgttcgagtcactgtccgacgcctacctcggtcatgcgggcggcacgtccggcgcgctgttcggtgtctggttccggcagttctaccgggtggccgccgacgcaccgcacggactggacacgaaggcgatcgccgccgcggcacgagcaggcctcgacacgatccaggaactcggcggggcgcaacccggcgacaagacgatgatcgacgccatcgcccctgccgtcgccgccctcgaatcggccgtcgcggccgggaagagtccggccgagggtttggccgaggccgcggacgccgccgcccgcggtgccgcggcgaccgcggacatcactgcgcggcgcgggcgggccagctacatcggtgaggcggcgcgcggcgtcgtggaccccggtgccctggtgctgtcgtggttcttcgccgaggcagccgaagcggcacgcccggtcgggtag

SEQ ID NO: 120390 - protein, 577 aa, Rhodococcus sp. RHA1
MAHPQFLNSPKSFVVDALRGAVATTDDLEWHPEPGYLTRREPLPSGQVALLSGGGSGHEPLHAGFVGRGMLTGACPGLIFSSPNALQVRAATRAVDAGGGVVHIVKNYTGDVLNFRIAGELAAEDGITVEHVLVDDDVASEREDGPGRRGTAATIAVEKICGASAERGDDLATVAEFGRRTARNSRSMAVALRACTVPGADSPSFDLPEGQIELGIGIHGERGTERVDAMGAAELVRRLTDPVLASLGVERGEPVIAIVNGLGAAHPLELQLLFGELADHLAERGVVIRRSLVGSFVTALDMDGASITLVRCDDKLLDLWDAPTAAPGWPNAPAGEFRGIADESEVRFRSNVASREDEAEVPGTADTMGRAAVGAWIVAFVEKVLAEEPNLTDLDRRAGDGDFGTNMVAALDHVGVPGIRDRYSPATVFESLSDAYLGHAGGTSGALFGVWFRQFYRVAADAPHGLDTKAIAAAARAGLDTIQELGGAQPGDKTMIDAIAPAVAALESAVAAGKSPAEGLAEAADAAARGAAATADITARRGRASYIGEAARGVVDPGALVLSWFFAEAAEAARPVG

SEQ ID NO: 120391 - DNA, 1683 bp, Kineococcus radiotolerans SRS30216
  CDS (1)..(1683): transl_table=11
gtgagcacccgtcccgaccagttctccaccggcgccgacccggtcgcctcggccctcgccggcctggcccgcgcccacggcgcgaccctgcgcgtcaacctcgaccccgcctacgtggtggccgcggacccggcccccacccggcgggtcgcgctcgtctccggcgggggttcggggcacgagcccctgcacaccggcttcgtcggccgcggcggcctggacgcggccatccccggccaggtgttcgcctccccgcacaaccagcagatcttcgccggggcccgcgcggccgcccggcccggcggcgtcctgctcgtggtgaagaactacaccggcgacgtcatcaacttcggcatcgccgcggaacgcctgcgcgcggaggggatcgacgtcgagaccgtcctcgtcgacgacgacctcgccaccgagaacgaggccgccgagaccggccggcgcgggaccggcgcgacggtcgtggtggagaaggtgctggccgcggccgccgacggcggggcctcgctggccgagctcgccgacctgggccggcgcgtggtcgccgcctcccgcagcctcgccgtcgcctcccgcgcgcacaccgcccccggcgggaccggccccgccttcgagctggccccggggcagctggagtacggcgtcggcatccacggcgagcgcgccgtcagcaccgtcgaccgccccggcagcgccgaggtcgtggaccggatgctggaggagctcctggcccacgtgcccgccaccgcgaccgggtacggcgtcctggtcaacggcctgggagccgtcaccggcctggagctgttctccgtcctcgaccacgtcgtgggtcggctgggggaacggggcctgacgacggccgcggccctggccgggacctacgtcgccgcgctcgacatgcggggcttctccctcaccctcaccgccctggaaccggactgggtcgcccacctcgccgcccccaccgcgacccccgcgctgcccagcgccgaaccggtggggacggcggtccccgccaccgccaccgacgccaccgccgacgccggggaggtcaccggccgcgcggtcgccgacgaccccttcctcaccgccctgggccgccgggtcgccgccgcgaagccggagctcacccggctcgaccaggtcaccggggacggggacttcggcgacaacctcgacggcggcacccgcaccgccctcgcctcccgggtccccggggacgagccgcagccgggtctgcgggccgcggagcaggcgttcctcgaccacgtcgggggttccagcggaccgctgttcgggttgctgttccagaacctgcgcaccggcctcagcgggggttcgggggtcgaggcggtgcgcgtgggcctgcgttcggccgcggaggccgtgcagcgcgtcgggggcgcccggcccggggaccggaccatggcggacaccctgcacgcggccgtcacctcgaccggcggcccggccgagctgctgcgcgccgccgtggacggggccgcggccaccgccggcatgctcccccgccggggccgggcgagctacctcggcgaacgcgccctggggacgcccgaccccggggcggtcggcgtcgcgatcgtgctggccgccctggtcgagaccctcgacccgtcggcggcggtggacctgcccgagcgctggagctga

SEQ ID NO: 120392 - protein, 560 aa, Kineococcus radiotolerans SRS30216
MSTRPDQFSTGADPVASALAGLARAHGATLRVNLDPAYVVAADPAPTRRVALVSGGGSGHEPLHTGFVGRGGLDAAIPGQVFASPHNQQIFAGARAAARPGGVLLVVKNYTGDVINFGIAAERLRAEGIDVETVLVDDDLATENEAAETGRRGTGATVVVEKVLAAAADGGASLAELADLGRRVVAASRSLAVASRAHTAPGGTGPAFELAPGQLEYGVGIHGERAVSTVDRPGSAEVVDRMLEELLAHVPATATGYGVLVNGLGAVTGLELFSVLDHVVGRLGERGLTTAAALAGTYVAALDMRGFSLTLTALEPDWVAHLAAPTATPALPSAEPVGTAVPATATDATADAGEVTGRAVADDPFLTALGRRVAAAKPELTRLDQVTGDGDFGDNLDGGTRTALASRVPGDEPQPGLRAAEQAFLDHVGGSSGPLFGLLFQNLRTGLSGGSGVEAVRVGLRSAAEAVQRVGGARPGDRTMADTLHAAVTSTGGPAELLRAAVDGAAATAGMLPRRGRASYLGERALGTPDPGAVGVAIVLAALVETLDPSAAVDLPERWS

SEQ ID NO: 120393 - DNA, 1656 bp, Oceanicola batsensis HTCC2597
  CDS (1)..(1656): transl_table=11
atgacgatgaccctgttcatgaacagcaaggaagacctcgtgaaccaggccgtggacgggatgatcgcctgctccggcgggcggctggcgcggctggacggctatccgcacatccgcgccgtggtgcgcgcggactgggaccggagcaaggtggcgctggtctcgggcggcgggtcggggcacgagccctcgcacgccgggttcctcgggccggggatgctgacggcggcgatctgcggcgacgtcttcgcctcgccctcggtcgatgcggtgctggcggggatcctggcggtgacggggccggcgggctgcctgctgatcgtcaagaactataccggcgaccgcctgaacttcggtctggcggccgagcgcgcgcgggccttcgggctgaacgtcagcatggtggtggtcgatgacgacgtggcgctgcccgatctgccgcaggcgcggggtgtggcgggcacgctcttcgttcacaagatcgccggggcggtcgccgaggggggggccgatctggccgcggtgacggcggcggcggagaaggcgatcgggcgcatccgttcgatcggcatgtcgctcgatacctgttcggtgcccggcgcccccaaggacgaccggatccccgagggcaaggccgaactgggtctcggcatccatggcgaggccggggtcgagcaggtggattacgtcgatgcccgcaccgccgtcgccatgatggccgagaaactgtcgagcctgatgcccgccggcacgaaacatgtcgccctgctgaacaacctcggcggtgcctcggtgctggaaatgcaggtgctggcgcacgagctggcgcgctcgtccatcgcggaccggctgggctgggtcgtgggcccggcctcgatgatgacctcgctcgagatgcacggcttctcgatttcggtcttcccggccgaggaggaggagttggccgcgctgcaggccgccacgcccgtcgcggcctggccgggggtgaacgcgctgacgccggtggaggtccgggaactgcccgacgggctgcggccgatccagccgctgccgtcggatcatcctgccacgcgcgacttcctgacccgctgctgcgagatcctgatcgcggccgaggcggatctgaacgcgctcgacgcccgcaccggcgacggcgatacgggcaccacgcttgccaccgcggcgcgggcgctgatccaggcgatggaccggctgccgctggccgatcacacccagctgtgccgagccatcgggcaggagctgagccagaccatgggcggctcgtcgggcgtccttttggcgatcttcttcgccgccgccggggacgcggcctcgagcggagtgccgatgcgcgaggccctgcgcaccgggctggaccggatgcaggaggtcggcggcgccgaactgggcgaccggacgatggtggacgcgctgcacccggcgctgaccgcgctggacgagggcgggatcgacagggcggcgaaggtcgcgcgcgagggcgcggatgcgaccggacagatgctgcgcgccaaggcggggcgggcgacctacatcaaccccgagcagctgagcggccagaacgatcccggcgccgaggcggtggcccggctgttcgagcagctgtcggcgggggcggaccagcccgcgaccacctga

SEQ ID NO: 120394 - protein, 551 aa, Oceanicola batsensis HTCC2597
MTMTLFMNSKEDLVNQAVDGMIACSGGRLARLDGYPHIRAVVRADWDRSKVALVSGGGSGHEPSHAGFLGPGMLTAAICGDVFASPSVDAVLAGILAVTGPAGCLLIVKNYTGDRLNFGLAAERARAFGLNVSMVVVDDDVALPDLPQARGVAGTLFVHKIAGAVAEGGADLAAVTAAAEKAIGRIRSIGMSLDTCSVPGAPKDDRIPEGKAELGLGIHGEAGVEQVDYVDARTAVAMMAEKLSSLMPAGTKHVALLNNLGGASVLEMQVLAHELARSSIADRLGWVVGPASMMTSLEMHGFSISVFPAEEEELAALQAATPVAAWPGVNALTPVEVRELPDGLRPIQPLPSDHPATRDFLTRCCEILIAAEADLNALDARTGDGDTGTTLATAARALIQAMDRLPLADHTQLCRAIGQELSQTMGGSSGVLLAIFFAAAGDAASSGVPMREALRTGLDRMQEVGGAELGDRTMVDALHPALTALDEGGIDRAAKVAREGADATGQMLRAKAGRATYINPEQLSGQNDPGAEAVARLFEQLSAGADQPATT

SEQ ID NO: 120395 - DNA, 1761 bp, Synechococcus sp. WH 7805
  CDS (1)..(1761): transl_table=11
atgagctatctaccaacagacccggctcggttcgcagagcaagccgtcgatggtttcgccgcctcccatccccgacatgtaaagcgtgttgacggtggcgtgatccgcctcagccccatgggcccgggccaggtcggcgtggtcgtgggcggaggctcaggccactatccagcctttgctggcttggttggggctgggatggccagcgcagccgtctgcggcaacatctttgcttcaccctcggcagggcaggtgcagcgggttggcgccgccgtggagcagggcggcggcctgttgctgaccttcggcaattacgccggcgatgtcctccatttcagtctcggagccgagcgactgcgacgccagggcatcgacgtacggatcgtgacggtgaccgatgacattgccagcgccggcagcgatcaaatggaacagcgtcgaggcatcgccggagggttagccgtctacaaggtggctggtgcggccgccgaggccgggttgtccctggatgcggtggagcatctggcccgaaaagccaatgcccgcacccgctcgctgggcgtggcctttagcggttgcacacttccaggagcgagtactccgctcttcaccgtgccaagtggccggatggcaatcggcatgggactgcacggggaaccggggctgagcgagggatcgctctgtgatgccgacagccttgcctcgctgctggtggagcggctcctggacgaacgcccattggacgtaacggcagcggaacagcgtgttgtagtgctgctcaatggcctcgggggcttcaaatatgaggaactgttcgtactgttcgcatcgatcagcgacagcctcaagcaggccggcgtcacggtggccgattgcgaatgcggtgagctagtcaccagcctcgacatggcaggagtctcactcagcctgttctggctggatgcggagctggaaccgttctggagggccccagccgacagccccgcttaccgacgtgggttggatgcccagatcgcaacgtcccttccgggcgccggcacgagcacagtcggcagacagccttccgcaaaagctccacaagccgagtccagcgccgccgaatcagccgaattaaccgcgccgcagcggatgttgttggcgcgcttcagagcggttgaagaggccctctgtcaacgggaggaggaactcggtgcactggatgccgtcgccggagatggtgaccacggcctcggcatggtgcgcgggatccggggagcctccgcagcagcccatgccgcccttgccaagaactgcgaaaccggtgaagtgttgatggaagccggcgaagcttggtcggaccatggcggcggggcgtccggcgccctctggggtggtgcactgctggcggccggtcagagcctggcgcggatctcggatcgtcccgtagacgagcaggtgacaacagcgatcgaagcggcactgctggcagtccgcacccttgggcaggcctccttgggggacaaaaccatgcttgatgctctcgaaccatttcaccaacgtctgcacaacaacctcaaacagggtcttggcctggaagcagcactgaacgatgcagcagctgtctccctcaaggccgcccaggcaaccgctgatcttttgcccaagcgaggacgagcccggccccacggtgagcgcagcctggggcatccagatgctggtgccatatcgctggcctactgcctacaggccgcccttcaagcccgccaaccccaagaggactga

SEQ ID NO: 120396 - protein, 586 aa, Synechococcus sp. WH 7805
MSYLPTDPARFAEQAVDGFAASHPRHVKRVDGGVIRLSPMGPGQVGVVVGGGSGHYPAFAGLVGAGMASAAVCGNIFASPSAGQVQRVGAAVEQGGGLLLTFGNYAGDVLHFSLGAERLRRQGIDVRIVTVTDDIASAGSDQMEQRRGIAGGLAVYKVAGAAAEAGLSLDAVEHLARKANARTRSLGVAFSGCTLPGASTPLFTVPSGRMAIGMGLHGEPGLSEGSLCDADSLASLLVERLLDERPLDVTAAEQRVVVLLNGLGGFKYEELFVLFASISDSLKQAGVTVADCECGELVTSLDMAGVSLSLFWLDAELEPFWRAPADSPAYRRGLDAQIATSLPGAGTSTVGRQPSAKAPQAESSAAESAELTAPQRMLLARFRAVEEALCQREEELGALDAVAGDGDHGLGMVRGIRGASAAAHAALAKNCETGEVLMEAGEAWSDHGGGASGALWGGALLAAGQSLARISDRPVDEQVTTAIEAALLAVRTLGQASLGDKTMLDALEPFHQRLHNNLKQGLGLEAALNDAAAVSLKAAQATADLLPKRGRARPHGERSLGHPDAGAISLAYCLQAALQARQPQED

SEQ ID NO: 120397 - DNA, 1659 bp, Citrobacter freundii
  CDS (1)..(1659): transl_table=11
atgtctcaattcttttttaatcaacgcacccatctcgtgagcgacgtcatcgacggtacgattatcgccagcccgtggaataacctggcgcgtctggaaagcgatccggccattcgcatcgtggtccgtcgtgacctcaacaaaaataacgtggcggtaatttccggcggtggttcagggcacgaacccgcgcacgttgggtttatcggtaaaggcatgctaaccgctgcggtttgcggcgacgttttcgcttccccgagcgtggatgcggtactgaccgccatccaggcggtaaccggtgaggcgggctgtttattgatcgtgaaaaattacaccggtgaccgtcttaatttcggtctcgccgccgagaaagcccgtcgccttggttacaacgttgaaatgctgattgttggcgacgacatctccctgcctgataacaaacacccacgcggcattgcgggaaccatcctggtgcataaaatcgcaggctattttgccgaacgcggctacaacctcgccaccgtcctgcgtgaagcgcagtacgcggccaataacaccttcagcctgggcgttgcgctttccagctgtcatctgccgcaagaagccgacgccgccccgcgtcatcatccgggccacgcggaactgggcatgggcattcacggcgaaccaggcgcatcggttatcgacacccagaacagtgcgcaggtggtgaacctgatggtggataagctgatggcagccctgcctgaaaccggccgtctggcggtgatgattaacaatcttggcggcgtttctgttgccgaaatggccatcattacccgcgaactggccagcagcccgctgcacccacgtatcgactggctgattggcccggcctcactggtcaccgctctggatatgaaaagcttttcactgacggccatcgtgctggaagaaagcatcgaaaaagcgttactcaccgaggtggaaaccagcaactggccgacgccggtcccgccgcgtgaaatcagttgtgtaccatcatctcagcgtagcgcacgcgtggaattccagccttcggcgaacgccatggtggccgggattgtggaacttgtcaccacaaccctttccgatctggagactcatcttaatgcgctggacgccaaagtcggcgatggcgataccggttcgacctttgccgctggcgcgcgtgaaattgccagtctgttgcatcgccagcagttgccgctggataaccttgccacgctgttcgcgctgattggcgaacgtctgaccgtagtgatgggtggttccagcggtgtgctgatgtctattttctttaccgctgcggggcagaaactggaacagggagctagcgttgccgaatccctgaatacgggactggcgcagatgaagttctacggcggcgcagacgaaggcgatcgcaccatgattgatgcgctgcaaccagccctgacttcgctgctcacgcagccgcaaaatctgcaggccgcattcgacgccgcgcaagcgggagccgaacgaacctgtttgtcgagcaaagccaatgccggtcgcgcatcgtatctcagcagcgaaagcctgctcggaaatatggaccccggcgcgcacgccgtagcgatggtgtttaaagcgctagcggagagtgagctgggctaa

SEQ ID NO: 120398 - protein, 552 aa, Citrobacter freundii
MSQFFFNQRTHLVSDVIDGTIIASPWNNLARLESDPAIRIVVRRDLNKNNVAVISGGGSGHEPAHVGFIGKGMLTAAVCGDVFASPSVDAVLTAIQAVTGEAGCLLIVKNYTGDRLNFGLAAEKARRLGYNVEMLIVGDDISLPDNKHPRGIAGTILVHKIAGYFAERGYNLATVLREAQYAANNTFSLGVALSSCHLPQEADAAPRHHPGHAELGMGIHGEPGASVIDTQNSAQVVNLMVDKLMAALPETGRLAVMINNLGGVSVAEMAIITRELASSPLHPRIDWLIGPASLVTALDMKSFSLTAIVLEESIEKALLTEVETSNWPTPVPPREISCVPSSQRSARVEFQPSANAMVAGIVELVTTTLSDLETHLNALDAKVGDGDTGSTFAAGAREIASLLHRQQLPLDNLATLFALIGERLTVVMGGSSGVLMSIFFTAAGQKLEQGASVAESLNTGLAQMKFYGGADEGDRTMIDALQPALTSLLTQPQNLQAAFDAAQAGAERTCLSSKANAGRASYLSSESLLGNMDPGAHAVAMVFKALAESELG

SEQ ID NO: 120399 - DNA, 1788 bp, Aspergillus oryzae
  CDS (1)..(1788)
atgtctgcacaaaccaaacacttcttctcggacccgaaccatctggttgtcaccgccctccattctttgactctcacaaacccttctcttgctttcgaccctgagaacaagatcattttccgtcgccctgattcgctcaaaaagaagaaggtcgcgattgtttccggcggtggctctggccacgaaccggctttcgcaggctttgtcggccagggattcctggatgcttcagtcgctggcacgatcttcgcctcgccctctgccgtacaaatccgtaaagctgctctcgactgtgttgacaatgagcaaggtgtcctcatcatccccatgaactacaccggcgatgtgctcaacttcggtatggctgccgagaaggcacgtgccgccggaatcaagactgaattttttgctatcaatgacgacgctggcgtcggcaagaagaagggcggaaaagttggccgccgcggtattggtggcggaatcctcgtcctgaaaatcgtcagcgccttggctgagactggtgcttctctcgaagaaatctaccgtgttgctcaacaggcaaactcgctgctcgcaaccgtaggctcttctctagagcacgtccacattcccggcagacctgcttctgaagatactattcctgtcggggaggtcgaagttggaatgggtattcacaacgaacctggatctcatcgaatgaaattcactttgccagagctggtgaagaccatgcttttccaaatcttggatcacaacgatcccgaccgtgctttcatcacacgcgaaccgggcgacgagttcgtgctcctgattaacaacctgggtggtgtgagcagcctggagctctctggtatcaccgatgaagtataccgtcagcttgagcgggactacagcatcaaacccgtacgagtcattcaaggaacttttctgaccagtctcaacgggctgggcttcagtgcttccctgttgaagctcgctgataatggcttgggtgctggcaagtctttccttgagcttttggatgctcccgctgaggcagttggttggtccgctccaatcccagcttccacctgggaccgtcgcaccgatgctcctgtagagctcaagaagaccaagttagctgagcaacagcctagtaacctcaagttggaccctgctactatcaggaaagtcttgggagctggtctccggcgcatcattgacgccgaaccgacggttactcgctacgatacgattgtcggagacggtgactgtggtgttggcttgaaacgtggtgccgaggctgttcttgcactccttgaggacaacttctcaagcctggatgaagacgtggttaaaaccgtcaaccgcatcgttaccattgtggagaacaccatggatggtacttccggtgccatctacgccatcttcttgaacgcacttgtgcacggtctccgggagcaagacaagggcaaatcgactcctgccacagctgaagtctggggcgaggccttgaaatactcgctcggagccctcggaaaatacacccccgccaagcctggtgaccgtactatgatcgatgctcttgttcccttctgtaccactctgcgcgacactaaggatgtccatgctgctgctaaggctgctcaagagggaactgaagcgacgaagagcatgaaggccagcttgggacggtctgtctatgtgggtggtgaagacgagtgggtgggtaaggtccctgacccaggtgcttacggactcagcgaattcttcactgggcttgtcgaagccattccaaagcaagcatga

SEQ ID NO: 120400 - protein, 595 aa, Aspergillus oryzae
MSAQTKHFFSDPNHLVVTALHSLTLTNPSLAFDPENKIIFRRPDSLKKKKVAIVSGGGSGHEPAFAGFVGQGFLDASVAGTIFASPSAVQIRKAALDCVDNEQGVLIIPMNYTGDVLNFGMAAEKARAAGIKTEFFAINDDAGVGKKKGGKVGRRGIGGGILVLKIVSALAETGASLEEIYRVAQQANSLLATVGSSLEHVHIPGRPASEDTIPVGEVEVGMGIHNEPGSHRMKFTLPELVKTMLFQILDHNDPDRAFITREPGDEFVLLINNLGGVSSLELSGITDEVYRQLERDYSIKPVRVIQGTFLTSLNGLGFSASLLKLADNGLGAGKSFLELLDAPAEAVGWSAPIPASTWDRRTDAPVELKKTKLAEQQPSNLKLDPATIRKVLGAGLRRIIDAEPTVTRYDTIVGDGDCGVGLKRGAEAVLALLEDNFSSLDEDVVKTVNRIVTIVENTMDGTSGAIYAIFLNALVHGLREQDKGKSTPATAEVWGEALKYSLGALGKYTPAKPGDRTMIDALVPFCTTLRDTKDVHAAAKAAQEGTEATKSMKASLGRSVYVGGEDEWVGKVPDPGAYGLSEFFTGLVEAIPKQA

SEQ ID NO: 120401 - DNA, 1752 bp, Escherichia blattae
  CDS (1)..(1752): transl_table=11
atggtctgcccgccagaccttaactcacaaccttttacttcccgacacacgcgctacagcccgctgtacgggtgtgttgtacctaacgatcaggaaaccgttatgtcgcaatttttttataaccaacgcgaaaatcttgtcagtgacgccatcgaaggggcaatgattgccagcccgtggaacaacctggcccgtctggagagcgatcccgccatccgcatcgtggtgcgccgggatctggataaatcccgggtggcggtgatctccgggggcggtgccggtcacgaaccggcccatgtgggctttgtgggtaaaggcatgctgaccgccgccgtgtgtggtgatctgtttgcctcaccgagcgtggatgcggtgcttaccgccattcaggcggtcaccggcgaggcgggctgcctgctgattgtcaaaaactacaccggtgaccggctgaacttcgggctggcagcagagaaagcccggcgcatgggctacaaagtggacatggtgattgtgggggatgatatctcactgccggagaacaaacacccgcgcggcattgccgggacgattatgatccacaaagtggcggggtacttcgccgaaaccggctgcaacctggacacggtcgcccgggaagcccggctggcaatggagcgggtattcagtattggcgtggccctttccagctgccacttaccggccgatccgcaggatggcgtgcgccatcacccgggccaggctgagctgggcatggggatccacggggagcccggcgcaagcgtcatcgacacccagaacagcaccgacattgtgcgcctgatggtggcaaaaatccgcgctgccctgcctgaaaccggccgcctgctgctgatgctgaataaccttggcggcgtctcagtcaccgaaatggcgatcctcacccgggagctggcccactgtgagcttgccacccgcaccgactggttgatgggcccggcaccgctggtcagcgccctggacatgaaaggcttttccatcaccgccctggtcatggaagagagcattgaaaaagccctgctggcagacgtggaaaccgcaggctggctgccgccagtgcgcctgcgcgccagccagacccagccctgcaatatccgcagtgcccgggtggcattcaccccgtcagacaacccggtagtgggccagtatgtggagaccgtcaccgccacactcagcgcccaggaagcggaacttaacgccctggatgccaaagtgggcgacggcgataccggctccacctttgccgccggggcccgcgccattgcagaactgctgcaccagcaccagctgccgctcagccagctggataccctgtgcgccctgatcggcgaacgcttaacagtagtgatggggggctccagcggtgtgctgatgtccatcttctttacggccgcaggccaggcaatcagcgaagggaaaccggtggtggccgcactccaggcgggcctggcgcagatgaagtattacggcggtgccgatctgggtgaccgcaccctgattgatgccctgcaacctgcgctggcagctctggcacagcatccgggggatctggcggcggcataccaggcagcccgggacggggcagacgccaccacccgcgccaccaaagccaatgccggtcgcgcctcttacctgaacagcgacagcctggcgggcaatatggacccgggcgctcacgcagtcgcaatggtctttaaggcgctggcgggcgcctga

SEQ ID NO: 120402 - protein, 583 aa, Escherichia blattae
MVCPPDLNSQPFTSRHTRYSPLYGCVVPNDQETVMSQFFYNQRENLVSDAIEGAMIASPWNNLARLESDPAIRIVVRRDLDKSRVAVISGGGAGHEPAHVGFVGKGMLTAAVCGDLFASPSVDAVLTAIQAVTGEAGCLLIVKNYTGDRLNFGLAAEKARRMGYKVDMVIVGDDISLPENKHPRGIAGTIMIHKVAGYFAETGCNLDTVAREARLAMERVFSIGVALSSCHLPADPQDGVRHHPGQAELGMGIHGEPGASVIDTQNSTDIVRLMVAKIRAALPETGRLLLMLNNLGGVSVTEMAILTRELAHCELATRTDWLMGPAPLVSALDMKGFSITALVMEESIEKALLADVETAGWLPPVRLRASQTQPCNIRSARVAFTPSDNPVVGQYVETVTATLSAQEAELNALDAKVGDGDTGSTFAAGARAIAELLHQHQLPLSQLDTLCALIGERLTVVMGGSSGVLMSIFFTAAGQAISEGKPVVAALQAGLAQMKYYGGADLGDRTLIDALQPALAALAQHPGDLAAAYQAARDGADATTRATKANAGRASYLNSDSLAGNMDPGAHAVAMVFKALAGA

SEQ ID NO: 120403 - DNA, 1853 bp, Zygosaccharomyces rouxii
  CDS (35)..(1798)
ttcaattcaatttaactgatattgtggtagaagaatgagcggtgtcaagtcgttcgaagtttctgatccagtcaaccactccttaaaaggggttgctcttgcaaatccatcgttgacattgggttccggtgaaaagaatatcttcagaaaaactgatagcataacggttggattgattgcaggtggtggtaccggtcatgaaccaacacatgcgggattcgttggtaaaggtggtctctcagctgctgtatgtggtgaaatcttcgcatcaccatccaccaagcaaatcttgaatgctattcaattagtcgcagaaaactctagcagtgtgttgttggttgtgaagaactacactggtgatgttttgcatttcggtttatctgctgagcgtgccagagctcttggtatcgactgtcgtgtgatgacagtgactgatgatgtggcagttggtagagaaaaaggtggtatggtcggtaggagagctctcgcaggtaccgtacttgttcacaaatctctaggtgccttttctgagaagtactctgagaaatatggtatcgaaggtactgaaaaggtcgctcacattgttaacgatcatctagtttccattaacagttctttagaccattgcaaagtcccaggtagaaaatttgaaaccgaattgaattctaaccaaatggaattgggtatgggtattcacaacgagccaggtgtcccagtgttggattccattccaagtacggaagaattaattgagaagcaaatgcttccaaagatgttagatcctaacgataaggatagacattttgtagacttcggcaaagatgacgaagtgttgcttttggttaacaatttgggcggtgtttccaactttattatttccgctattgcatctataactgtagacctgttgaagaagaattatggaattgtgcctgtgcaggtcattactggtaccgttatgacttcctttaacggtaacgggtttggtttgaccctgttgaatgttagtggtacctccaagcagctcaaatcacatttctcagagattaactctgtgctggacttgattaatgcacctacagatgcacctggctggccagttacttcagttccaggtgacaagggcccatcttataatgaagacctatttaccaaagaggttaaggtaaaggacgctggtgcctacaactacgaaaactttgctcagtggatgaaagctggtgcagaaagtgtagttgctgcagagccacatattacatctctggacaataaagtaggtgatggtgactgcgggtacactttggtagctggtgtcaatggtattacagacagtttacccaagttatcgcgtaaatcgttgtcagaggctactgcgcagatttcggatgtcatagaaagttccatgggtggtacctctggtggtctctattcgattttgatctcaggatttgctcatggattaatccaagcatccgacggtgagaacactccagtgacaccagagttgaccgctaaggccttagacattgctttggagactctttataaatacacaaaggcaagacccggtgcatctacaatgatcgatgctctagaacctttcatcaaagaattctctgcttctaaagatttcgataaggcagtagctgctgctgaagagggtgctaaagccactggtagcagagaggccaaattcggtagagcctcatacgtcggagactcctcgaacgtggaagatcctggtgctgtgggcttagttgctttcatgaagggcgttcaatcagcatataaatcttaggtataaaagaggatttagccgccgagtatcctcttattaagtaagacgtatatca

SEQ ID NO: 120404 - protein, 587 aa, Zygosaccharomyces rouxii
MSGVKSFEVSDPVNHSLKGVALANPSLTLGSGEKNIFRKTDSITVGLIAGGGTGHEPTHAGFVGKGGLSAAVCGEIFASPSTKQILNAIQLVAENSSSVLLVVKNYTGDVLHFGLSAERARALGIDCRVMTVTDDVAVGREKGGMVGRRALAGTVLVHKSLGAFSEKYSEKYGIEGTEKVAHIVNDHLVSINSSLDHCKVPGRKFETELNSNQMELGMGIHNEPGVPVLDSIPSTEELIEKQMLPKMLDPNDKDRHFVDFGKDDEVLLLVNNLGGVSNFIISAIASITVDLLKKNYGIVPVQVITGTVMTSFNGNGFGLTLLNVSGTSKQLKSHFSEINSVLDLINAPTDAPGWPVTSVPGDKGPSYNEDLFTKEVKVKDAGAYNYENFAQWMKAGAESVVAAEPHITSLDNKVGDGDCGYTLVAGVNGITDSLPKLSRKSLSEATAQISDVIESSMGGTSGGLYSILISGFAHGLIQASDGENTPVTPELTAKALDIALETLYKYTKARPGASTMIDALEPFIKEFSASKDFDKAVAAAEEGAKATGSREAKFGRASYVGDSSNVEDPGAVGLVAFMKGVQSAYKS

SEQ ID NO: 120405 - DNA, 1878 bp, Arabidopsis thaliana
  CDS (1)..(1878)
atggttcctccggctaaaaaattcatcaacaaccccaacgatgttgtaaccgagttcatcgaaggtctcgtcgaaacttatcctggacttcagtatttggatggtcttcccgagatcaaagttgtactaagagctgatgtctcagctgcaaattatgacaaggttgccgttatatcaggaggaggaagtgggcatgaaccagcacaagctgggtatgttggagaaggaatgctcacagctgctatttgtggagatgtttttgcttcgccaactgttgattccatcctagctaggattcgtgctgtaactggtccaaaaggatgcctcttggttgtcacgaactatactggtgaccgcttgaactttggcctggcagctgagcaagcaaaaactgagggtttcgatatagaggtaactactgtaattgttggagatgattgtgctctacccccgccgcgtggcgtagctgggcgcagaggtttagcgggaacagttcttgtccataaggttgctggagcagcagctgctgctggactttctctagcagaagttgcagcagaagcaaaacatgcatctgaaatggttggaaccatgggtgttgcactatctgtctgtgcgcttccaggacaggttacatcagatcgtttgggtccagagaaaatggaacttgggcttggagttcatggggagcctggtgctgctgtagtcgacattcaacctgtggaagttgtagtgtcccatgttcttcaacagatactgagtccagagacaaattatgttccaattacacgtggtaacagtgtggttctgatgattaatggcttaggtggtacacctctaatggaacttatgattgctgctggaaaagcagtcccaaaattacagttggaatatgggcttgccgttgatagggtgtatactggatcatttatgacgtctcttgatatggcaggtgactgtttctgttgtgtctatgtagagtcactgattttgtgctgtgctctcatactccttcccttctcagggttctcgatatcgatcatgaaggccgaccagtcaattttagagcgtttggatgctccgaccaatgctcctagttggccagttggcacagatgatctctctacaggaagccgcccaccagcaaagatccccgttccacttcccttccgatcaaccaaaaacgaagaggagcttagtcaacaggggcgaattcttgaggcagctattgaagcagcagcaactgtagtcatcaatctgaaggatagtttgaacgaatgggatggaaaagtaggtgatggggattgtggatcaacaatgtgcagaggtgcaacagctattctggaggacatgaagaattatccgctcaacgatgctgcggaaacagtgagtgagattggttcatcgattagaagagtcatggggggaacaagtggaataatacatgacactgtctcatatgaaaccagttacaatctcctctgtaaggcagcatatgcggagttaaaagctaacagtcaatcagaaaccacttccaaacactggtctgaagcactcaagtcatcaatctctgctgtcagtaaatatggtggagcaactgccggttatagaacgatgttagatgcgctcatccccgcttcaaaagtccttgaggagaagctgagtgttggggaggaccctattgctgcttttgttctgtctgctgaagctgcgaccgcaggagctgaatctaccattcatatgaaagcacaggccgggagatcaagctatgtatcagctgagatttttgcatcaattcctgatccaggagcaatggctgcagcggcatggtacagcgccgctgcaagagccgtgaaagagcagaggcagaggttttga

SEQ ID NO: 120406 - protein, 625 aa, Arabidopsis thaliana
MVPPAKKFINNPNDVVTEFIEGLVETYPGLQYLDGLPEIKVVLRADVSAANYDKVAVISGGGSGHEPAQAGYVGEGMLTAAICGDVFASPTVDSILARIRAVTGPKGCLLVVTNYTGDRLNFGLAAEQAKTEGFDIEVTTVIVGDDCALPPPRGVAGRRGLAGTVLVHKVAGAAAAAGLSLAEVAAEAKHASEMVGTMGVALSVCALPGQVTSDRLGPEKMELGLGVHGEPGAAVVDIQPVEVVVSHVLQQILSPETNYVPITRGNSVVLMINGLGGTPLMELMIAAGKAVPKLQLEYGLAVDRVYTGSFMTSLDMAGDCFCCVYVESLILCCALILLPFSGFSISIMKADQSILERLDAPTNAPSWPVGTDDLSTGSRPPAKIPVPLPFRSTKNEEELSQQGRILEAAIEAAATVVINLKDSLNEWDGKVGDGDCGSTMCRGATAILEDMKNYPLNDAAETVSEIGSSIRRVMGGTSGIIHDTVSYETSYNLLCKAAYAELKANSQSETTSKHWSEALKSSISAVSKYGGATAGYRTMLDALIPASKVLEEKLSVGEDPIAAFVLSAEAATAGAESTIHMKAQAGRSSYVSAEIFASIPDPGAMAAAAWYSAAARAVKEQRQRF

SEQ ID NO: 120407 - DNA, 1857 bp, Arabidopsis thaliana
  CDS (1)..(1857)
atggatttcgcagccaagaaattcatcaacaaccccaacgatgttgtaactgagttcatagagggtctggtagaaacttatcctggactccagtatttggatggttttcctgaggttaaggtggtgctacgagctgatgtctcggctgcaaaatatgacaaggttgccgttatctcaggtggaggcagtgggcatgagccagcacatgctggatacgttggagaaggaatgctaacagctgctatttgtggagatgtctttgcctccccaccagttgattctatccttgctggaattcgagctgtaactggtactgagggatgtctattgattgtcaagaattatacgggtgatcgcttgaactttggtttggctgctgaacaagcaaaatctgaaggttacaaagttgagactgtaattgttggagaggattgcgctttacccccgccacgtggcatcgctggacgcagagggttagcaggaacagttcttgtccataaggttgcgggggcagcagcagctgctggtctttctctagaaaaagttgctgctgaggcaaaatgtgcgtcagagatggttggtaccatgggtgttgcattatccgtctgtacacttcctggacaggttacatcagatcgtcttggcgcacagaagatggaactcgggcttggaattcatggagaacctggtgctgctgtggttgacgttgaacctgtggatgtggtggtgtcccatgttcttcagcaaatacttagtcctgagaccaattatgttccaattactcgtggtaacagagtggttctcatggtcaatggtttgggaggcacacctttaatggaacttatgattgctgctggaaaagcagtccctaaactgcagttggaatttggacttgccgttgatagggtgtatacaggcttttttatgacttctcttgatatggcaggattctcgatttcaatcatgaaggctgaccattcgattttagaccgattggatgctccaaccaaggctccaaattggccagttggcactgatggcaaccggccaccagcgaagattcctgttcctgttcctccttctcgatcaataaaaagcatggagtctcaaagccgacctctagagctgagtaaagaaggtcaagttcttgaggcagctattcaagcagcagcaactgtgatcatcagccttaaggatagtttgaatgaatgggatggaaaagtaggcgatggtgattgtgggtcaacaaggtgcaacagctattctggaggacatgaaaaactaacttcacagagattcttgacaaaaaatttaaccatgtctctttttgtttctagttatccactcaatgatgctgcggaaacagtgaatgagattggtctatcaatcaaaagagccatggggggcacaagcggaataatttaccatctcctctgcaaggcagcatacgcggagctaaaagctaacgctcagtcagaagtcactcccaaaaattgtgagatcatgcttgcttgttgtgggtctgaagcactcaagtcatcaatcgcttcagtcagcaaatatggtggagcaactgcgggctacagaacgatgctagatgcgctcatcccagcttcacaagttcttgaggagaaactgagcgctggagaggatccaatatctgctttcattctatcaggcgaagcggcaactgccggagcggaatcaaccatacagatgcaagcacaggctgggagatcaagctatgtatctgcagagaatcttgcaacggttccagatccaggtgcaatggcagcagcgggatggtacaatgcggcagcaagagccgtaaaggagcagtatgagggctcgtcatga

SEQ ID NO: 120408 - protein, 618 aa, Arabidopsis thaliana
MDFAAKKFINNPNDVVTEFIEGLVETYPGLQYLDGFPEVKVVLRADVSAAKYDKVAVISGGGSGHEPAHAGYVGEGMLTAAICGDVFASPPVDSILAGIRAVTGTEGCLLIVKNYTGDRLNFGLAAEQAKSEGYKVETVIVGEDCALPPPRGIAGRRGLAGTVLVHKVAGAAAAAGLSLEKVAAEAKCASEMVGTMGVALSVCTLPGQVTSDRLGAQKMELGLGIHGEPGAAVVDVEPVDVVVSHVLQQILSPETNYVPITRGNRVVLMVNGLGGTPLMELMIAAGKAVPKLQLEFGLAVDRVYTGFFMTSLDMAGFSISIMKADHSILDRLDAPTKAPNWPVGTDGNRPPAKIPVPVPPSRSIKSMESQSRPLELSKEGQVLEAAIQAAATVIISLKDSLNEWDGKVGDGDCGSTRCNSYSGGHEKLTSQRFLTKNLTMSLFVSSYPLNDAAETVNEIGLSIKRAMGGTSGIIYHLLCKAAYAELKANAQSEVTPKNCEIMLACCGSEALKSSIASVSKYGGATAGYRTMLDALIPASQVLEEKLSAGEDPISAFILSGEAATAGAESTIQMQAQAGRSSYVSAENLATVPDPGAMAAAGWYNAAARAVKEQYEGSS

SEQ ID NO: 120409 - DNA, 1743 bp, Schizosaccharomyces pombe
  CDS (1)..(1743)
atggataagcactttatcaacgatcctgaagtcctcgtccttgatggccttaaatccttggccgacatgaacaaaactttaactgttcatgaagagggaaaattcatctatttccatgactacaacaaaaagaatgtcagtgtcatttccggcggtggtgctggtcatgaacccactcattcttcgttcgtgggcaagggtatgcttactgccgccgtctcaggctccatttttgcttctccgtcgtcaaagcaaatttataccggtattaagcaagtcgaatctgaggctggcaccttggtaatttgcaaaaactacaccggtgacatccttcactttggtatggccttggagaagcaaagaacggctggtaagaaggctgaacttattgccgttgcagatgacgtatcagtaggtcgtaagaagagcggtaaggtcggacgtcgtggtttgtctggtactgttcttgttcacaaaatcgctggtgcagctgccgccagagggttacctttggaagccgttacgaccattgctaaggctgctattgacaatttggttagtatcggtgcttcactcgctcacgttcacgtccctggtcatgagccaattgcaaaagaagatgaaatgaaacatgatgaaatggaacttggaatgggtattcacaatgaacctggatgcaagcgtatttcccctattccctctattgatgacctaattgctcagatgcttaagcaaatgttggatcaatccgacaaggaccgtgcctatgtaaagattgagggtgacgatgaagtagtcttacttatgaataaccttggtggtctttccatgcttgaattcagtgccattagccacaaggtgaaggaagcattggctaaagaatacaaaatcaaccccgttcgcatctttgccggtccatttaccaccagtttgaatggcttgggtttcggtatcactttgctccgtaccactgaccgcgtcaaagtcgagggcgaagaatactctttggttgatttgattgaccaacctgttgaagctatcggatggcctttgtgtcaaccctctgacttgaagtccaaaaacaagattggcaatgtcagcatcgaggagggtcagaaggatgtcaagtctcccgttactgtcgataaggagaaggttcgtcaggcgattgtcaattcgatggagaatctcatcaaagcagagcctaaaattacaaagttcgatacgatggctggtgatggtgactgtggtactactttgaagcgtggtgctgaaggtgttttgaagtttgttaaatccgacaaattctctgacgatcctattcgtattgttcgtgatatcgcagatgttattgaagacaatatggatggtacatctggtgctttgtacgccattttcttccatggctttgcgaagggcatgaaagacaccttggagaagagcaaggacatttcatctaagacatgggctgctggtttgaaggttgctcttgatactcttttcaagtatactcccgctcgtcctggtgacagcactatgtgtgatgctcttgttccatttgtcgaaacatttgttaaaactaatgatcttaatgctgccgtagaggaggctcgtaaaggtgctgatgctactgcagatatgcaagccaaacttggacgtgctgtctacgttggtgatgatgttaaagttcccgatgccggcgctcttggtgtcgttgcaattgtcgaaggatttacgaaataa

SEQ ID NO: 120410 - protein, 580 aa, Schizosaccharomyces pombe
MDKHFINDPEVLVLDGLKSLADMNKTLTVHEEGKFIYFHDYNKKNVSVISGGGAGHEPTHSSFVGKGMLTAAVSGSIFASPSSKQIYTGIKQVESEAGTLVICKNYTGDILHFGMALEKQRTAGKKAELIAVADDVSVGRKKSGKVGRRGLSGTVLVHKIAGAAAARGLPLEAVTTIAKAAIDNLVSIGASLAHVHVPGHEPIAKEDEMKHDEMELGMGIHNEPGCKRISPIPSIDDLIAQMLKQMLDQSDKDRAYVKIEGDDEVVLLMNNLGGLSMLEFSAISHKVKEALAKEYKINPVRIFAGPFTTSLNGLGFGITLLRTTDRVKVEGEEYSLVDLIDQPVEAIGWPLCQPSDLKSKNKIGNVSIEEGQKDVKSPVTVDKEKVRQAIVNSMENLIKAEPKITKFDTMAGDGDCGTTLKRGAEGVLKFVKSDKFSDDPIRIVRDIADVIEDNMDGTSGALYAIFFHGFAKGMKDTLEKSKDISSKTWAAGLKVALDTLFKYTPARPGDSTMCDALVPFVETFVKTNDLNAAVEEARKGADATADMQAKLGRAVYVGDDVKVPDAGALGVVAIVEGFTK

SEQ ID NO: 120411 - DNA, 1755 bp, Saccharomyces cerevisiae
  CDS (1)..(1755)
atgtccgctaaatcgtttgaagtcacagatccagtcaattcaagtctcaaagggtttgcccttgctaacccctccattacgctggtccctgaagaaaaaattctcttcagaaagaccgattccgacaagatcgcattaatttctggtggtggtagtggacatgaacctacacacgccggtttcattggtaagggtatgttgagtggcgccgtggttggcgaaatttttgcatccccttcaacaaaacagattttaaatgcaatccgtttagtcaatgaaaatgcgtctggcgttttattgattgtgaagaactacacaggtgatgttttgcattttggtctgtccgctgagagagcaagagccttgggtattaactgccgcgttgctgtcataggtgatgatgttgcagttggcagagaaaagggtggtatggttggtagaagagcattggcaggtaccgttttggttcataagattgtaggtgccttcgcagaagaatattctagtaagtatggcttagacggtacagctaaagtggctaaaattatcaacgacaatttggtgaccattggatcttctttagaccattgtaaagttcctggcaggaaattcgaaagtgaattaaacgaaaaacaaatggaattgggtatgggtattcataacgaacctggtgtgaaagttttagaccctattccttctaccgaagacttgatctccaagtatatgctaccaaaactattggatccaaacgataaggatagagcttttgtaaagtttgatgaagatgatgaagttgtcttgttagttaacaatctcggcggtgtttctaattttgttattagttctatcacttccaaaactacggatttcttaaaggaaaattacaacataaccccggttcaaacaattgctggcacattgatgacctccttcaatggtaatgggttcagtatcacattactaaacgccactaaggctacaaaggctttgcaatctgattttgaggagatcaaatcagtactagacttgttgaacgcatttacgaacgcaccgggctggccaattgcagattttgaaaagacttctgccccatctgttaacgatgacttgttacataatgaagtaacagcaaaggccgtcggtacctatgactttgacaagtttgctgagtggatgaagagtggtgctgaacaagttatcaagagcgaaccgcacattacggaactagacaatcaagttggtgatggtgattgtggttacactttagtggcaggagttaaaggcatcaccgaaaaccttgacaagctgtcgaaggactcattatctcaggcggttgcccaaatttcagatttcattgaaggctcaatgggaggtacttctggtggtttatattctattcttttgtcgggtttttcacacggattaattcaggtttgtaaatcaaaggatgaacccgtcactaaggaaattgtggctaagtcactcggaattgcattggatactttatacaaatatacaaaggcaaggaagggatcatccaccatgattgatgctttagaaccattcgttaaagaatttactgcatctaaggatttcaataaggcggtaaaagctgcagaggaaggtgctaaatccactgctacattcgaggccaaatttggcagagcttcgtatgtcggcgattcatctcaagtagaagatcctggtgcagtaggcctatgtgagtttttgaagggggttcaaagcgccttgtaa

SEQ ID NO: 120412 - protein, 584 aa, Saccharomyces cerevisiae
MSAKSFEVTDPVNSSLKGFALANPSITLVPEEKILFRKTDSDKIALISGGGSGHEPTHAGFIGKGMLSGAVVGEIFASPSTKQILNAIRLVNENASGVLLIVKNYTGDVLHFGLSAERARALGINCRVAVIGDDVAVGREKGGMVGRRALAGTVLVHKIVGAFAEEYSSKYGLDGTAKVAKIINDNLVTIGSSLDHCKVPGRKFESELNEKQMELGMGIHNEPGVKVLDPIPSTEDLISKYMLPKLLDPNDKDRAFVKFDEDDEVVLLVNNLGGVSNFVISSITSKTTDFLKENYNITPVQTIAGTLMTSFNGNGFSITLLNATKATKALQSDFEEIKSVLDLLNAFTNAPGWPIADFEKTSAPSVNDDLLHNEVTAKAVGTYDFDKFAEWMKSGAEQVIKSEPHITELDNQVGDGDCGYTLVAGVKGITENLDKLSKDSLSQAVAQISDFIEGSMGGTSGGLYSILLSGFSHGLIQVCKSKDEPVTKEIVAKSLGIALDTLYKYTKARKGSSTMIDALEPFVKEFTASKDFNKAVKAAEEGAKSTATFEAKFGRASYVGDSSQVEDPGAVGLCEFLKGVQSAL

SEQ ID NO: 120413 - DNA, 1776 bp, Schizosaccharomyces pombe
  CDS (1)..(1776)
atgtctgtaaaacaatttgtatctgacggacatatagtacgcccatacttgcttggacttgctagaagtaaccctggtcttactgttattgaacatgatcgtgtgatttacaggacagcttctgccccgggttctggtgatcttcctaaagtaactttagtgtctggtggtggtagtgggcacgagcctacacatgcaggttttgttggtgatggagccttggacgctgtagcttgtggagacatttttgcttctccctctactaaacaaatttactctgccctcaaagctgttgcttctcctaagggaactttaattattgtcaagaattatacaggcgatattattcattttggcctggcagctgagagagccaaggcagctggaatgaacgttgagcttgttgccgtaggagatgatgtttctgtaggcaaaaaaagaggtgcactcgtaggaagaagaggtttaggagccactgtgctagtacacaaaattgcgggatctgcagcagcattaggattggatctgcatcaagttgctcaagtggcccaatcagtgattgacaatgctgctaccatagcagcttcattggatcactgcgccgttcccggtcgcaaatttgaaaccaacttgggtccagacgagtatgagattggcatgggtattcataacgagcctggaaccttcaaatcatcaccacttccatctattcccgagctagttacagagatgctttcaattttgtttggtgagaaaaacccggacaatagtttcgtagagttttcttcaaaagacgatgttatccttctagtaaacaatatgggtggtatgtccaatttagagttgggatatgctactgaagtagtttcggaacaattagccaaacgaggtatcattcctaaaagaaccatgtctggtacgtttgtaaccgctctgaacggtcctggttttggaattacattggtcaatgcttctaaggctactccagatattttcaaatattttgacttgccaacaaccgctagtggatggaacgtttcttatcataacgcaaaggactgggaggttttggctgacggcaaggtgccaacagctcccgctttggagcatacccgtaatgagaagcacagcggtgtaaaggctgacccaaagatgtttactaaaattttaaaagctgccgttgacgctatcaatgaatttgagccaaagacaacttggtacgatacgattgcaggagatggtgattgtggaacaacccttgtgaatggtggagaggccatcacaaaggctattaatgataaatcgattcgattggatgatggtgtaaatggtattgacgatttggcctatattgttgaggattcgatgggaggtacatcgggtggtctttactcgatttatttgtctgcgctagccaaaggagttcatgagtcaggcgattccgaattatccgtgcatacatttgcgtttgcaagcaagtatgcacttgacgctcttttcaaatacactagagcccgtaaaggattccgaacgcttattgatgctattcaaccatttgttgaaactttaaatgagggtaagggacttgatgctgctgcgaaagctgccactgaaggttctgaacaaactagaaaaatggatgctgtcgttggaagagcatcttatgttgctaaagaagaacttcataagcttgatagtgagggaggattgccggatcctggtgcctttgcattggccgctattttgaacgcaattgttgaggcaagcgaacattaa

SEQ ID NO: 120414 - protein, 591 aa, Schizosaccharomyces pombe
MSVKQFVSDGHIVRPYLLGLARSNPGLTVIEHDRVIYRTASAPGSGDLPKVTLVSGGGSGHEPTHAGFVGDGALDAVACGDIFASPSTKQIYSALKAVASPKGTLIIVKNYTGDIIHFGLAAERAKAAGMNVELVAVGDDVSVGKKRGALVGRRGLGATVLVHKIAGSAAALGLDLHQVAQVAQSVIDNAATIAASLDHCAVPGRKFETNLGPDEYEIGMGIHNEPGTFKSSPLPSIPELVTEMLSILFGEKNPDNSFVEFSSKDDVILLVNNMGGMSNLELGYATEVVSEQLAKRGIIPKRTMSGTFVTALNGPGFGITLVNASKATPDIFKYFDLPTTASGWNVSYHNAKDWEVLADGKVPTAPALEHTRNEKHSGVKADPKMFTKILKAAVDAINEFEPKTTWYDTIAGDGDCGTTLVNGGEAITKAINDKSIRLDDGVNGIDDLAYIVEDSMGGTSGGLYSIYLSALAKGVHESGDSELSVHTFAFASKYALDALFKYTRARKGFRTLIDAIQPFVETLNEGKGLDAAAKAATEGSEQTRKMDAVVGRASYVAKEELHKLDSEGGLPDPGAFALAAILNAIVEASEH

SEQ ID NO: 120415 - DNA, 1830 bp, Pichia angusta
  CDS (1)..(1830)
atgtcgagcaaacactggaattacaagcaagacctggtccatgcgcacctcaaaggcctgtgtcatgccaatccagacctccaattcatcgaatccgagcgtgtggtgatcaacaagcactccaagcccgacaaggtgatgatcctatctggtggagggtctggccacgagccattgcacgctggctttgttggtgaaggctgtttggacgttggagtggctggttttgttttcgcctcgccctctacaaagcagattgtttcaggtttgaaggcaaagccctcagacaaaggtacgctaattgtggtgaaaaattacaccggcgacattcttcactttgggcttgctgcagagcgggccaaggccgaaggcgtccccgtggagctgctaattgtccaggacgacgtttctgtgggcagaaccaagaacggaatggtgggcagacgcggtctggccggtacgagtctggtgcacaagattgtcggtgccaaggccgccaaggactcgaacaaagcctcgttgagcgaggtgtaccagctgggcgaggccgtggtggccaatctggtgaccatcggcgcgtcgctcgaccactgcacaattccgggtaacagacaccacgagtccgagtccgacgacgaggacgagcagaaacatctgctcaaggaggacgagatcgaggtgggtatggggatccacaacgagtcgggcatcaagcgcgtttcgccaatcccgaccatcgacacgcttgtggcagacctgctcaagtacttgctcgacaagagcgacgaggagagacactatgtggacttcgactcgtcggacgaggttgtgctgatgatcaacaatttgggcggcacgtcgaacctcgagctgtacgctatccagaacactgttgttgagcagctggctaccgactacaagatcaagcccgcaagagtgtacacgggcgcgtacaccacgtcgctagacggtcctggtttttccatcacgttgctgaacgtgactcgggcggggggcaaggaggttttcgattgtctggactacccaaccaaggttcctgggtggaactcgtcgtacacaacggcagaatgggcggcgaaatccgagtcgttcgtcatcgacgctccgccagtgagcgacgcgtcggcgacctcgaaagtgcggttctcaagcagcacagtcaaggctgtgttggagagcggatgcaagaagttgctgaccaaggagccaaagatcacgctgtacgacacggttgcgggcgacggcgactgcggcgagacgctggccaacggcgcgcacgcgatcctggacctgctggctgccgacaagctggagatcaccgacggtgtccggagtctgacgcagatcactgacgtcgtcgaaacggctatgggaggcacctctggtgggctttactcgatctttatctctgcactcgccaagtcgttgaaggacagagagctccagcagggcggatacgaggtgacgccgcagatcctggctgcatcgctcaaggacgccctggagtcgctgtacagatacacacgggcccgtgctggcgaccggactctgatcgacgcgcttgcgccgtttgtggagcagtttgcggccagcaagggtgacctcaaccaggctaacaaggcgtgccacgagggagcagagtcaacgcgaaagctcaaggctaagtttggccgcgcgtcctacgtcagcgaggaggagttcaagccgtttgaggccgagggcgggctgccggatcccggcgccatcgggcttgctgcgctggtcgacggttttgccgaggcgtacagcaaaataggctccaacttgtag

SEQ ID NO: 120416 - protein, 609 aa, Pichia angusta
MSSKHWNYKQDLVHAHLKGLCHANPDLQFIESERVVINKHSKPDKVMILSGGGSGHEPLHAGFVGEGCLDVGVAGFVFASPSTKQIVSGLKAKPSDKGTLIVVKNYTGDILHFGLAAERAKAEGVPVELLIVQDDVSVGRTKNGMVGRRGLAGTSLVHKIVGAKAAKDSNKASLSEVYQLGEAVVANLVTIGASLDHCTIPGNRHHESESDDEDEQKHLLKEDEIEVGMGIHNESGIKRVSPIPTIDTLVADLLKYLLDKSDEERHYVDFDSSDEVVLMINNLGGTSNLELYAIQNTVVEQLATDYKIKPARVYTGAYTTSLDGPGFSITLLNVTRAGGKEVFDCLDYPTKVPGWNSSYTTAEWAAKSESFVIDAPPVSDASATSKVRFSSSTVKAVLESGCKKLLTKEPKITLYDTVAGDGDCGETLANGAHAILDLLAADKLEITDGVRSLTQITDVVETAMGGTSGGLYSIFISALAKSLKDRELQQGGYEVTPQILAASLKDALESLYRYTRARAGDRTLIDALAPFVEQFAASKGDLNQANKACHEGAESTRKLKAKFGRASYVSEEEFKPFEAEGGLPDPGAIGLAALVDGFAEAYSKIGSNL

SEQ ID NO: 120417 - DNA, 1827 bp, Pichia pastoris
  CDS (1)..(1827)
atgtctagtaaacattgggattacaagaaagatctggtactcagccatctggctggattatgtcagtccaacccccatgtaaggctaattgagtccgaaagagtcgtcatctccgccgagaaccaggaggacaagattaccttgatctctggtggaggttcaggacacgagcctctacatgctggctttgtcaccaaggacggtcttttggatgccgctgtggccgggttcatctttgcctcgccatctactaaacagatatttagcgcaatcaaagccaaaccttcgaagaagggaactttgatcatcgtcaagaactatacaggagacattcttcacttcggtcttgccgccgaaaaggccaaggccgaaggtctcaacgcagaactgctgattgttcaggacgatgtctctgttggtaaagccaagaatggcctggtagggcgtagaggtttggctggaacttctttagtgcacaagattttgggtgccaaagcttatttacaaaaggacaacctggaattgcatcagctggtcactttcggtgagaaggtcgttgccaacctggttacaattggtgcttccttggaccatgtcaccattccagccagagcaaacaaacaggaggaagatgattcagatgacgagcacggctacgaagtgctaaagcacgatgaatttgaaatcggaatgggtattcacaacgaaccaggtatcaagaagtcgtcgccaattccaacagtagacgaattggtggctgagctactggagtaccttctttcgactaccgataaggaccgaaattacgtccaatttgacaagaatgatgaagttgtgctactgatcaataacttgggaggaacctcagtgttggaattgtacgctattcagaacattgttgtcgaccaactggcctccaaatattccattaaaccagtccgcattttcactggcactttcaccacatcactggatgggcccggtttttctatcactttattgaatgctaccaagacaggagataaagatatcctaaagtttttagaccacaagactagtgcccctggctggaactccaacatatcagactggtctggcagggttgacaattttattgtggctgccccagaaatagacgaaggagacagttcatctaaggtatctgttgatgctaagctgtatgctgaccttctggagtctggtgtgaagaaggtcatttcaaaagagccaaagatcacattgtatgacactgttgcaggagatggtgattgtggtgaaacgttggcgaatggttccaatgccattttaaaggctctggctgaaggaaagcttgatctcaaagacggtgttaaatcactggtgcaaattacagacatcgtggaaactgccatgggtggaacatctggaggtctgtactccattttcatcagcgctttagcaaagtctttgaaagagaaggaactttccgagggtgcctacacactgacccttgaaacgatctctggatccttacaggcagcacttcagtctctattcaaatacacaagagcacgtactggagacagaactcttattgacgctttggagccatttgtaaaggaattcgccaagtctaaggatctgaaacttgcaaacaaagctgcccatgatggtgctgaagccacaagaaagctcgaagccaagtttggaagagcatcttatgttgccgaagaagagttcaaacaattcgaaagtgaaggtggactacctgatcctggtgctattggtcttgccgctttgatttcaggaattactgatgcatacttcaaatctgaaaccaagttgtag

SEQ ID NO: 120418 - protein, 608 aa, Pichia pastoris
MSSKHWDYKKDLVLSHLAGLCQSNPHVRLIESERVVISAENQEDKITLISGGGSGHEPLHAGFVTKDGLLDAAVAGFIFASPSTKQIFSAIKAKPSKKGTLIIVKNYTGDILHFGLAAEKAKAEGLNAELLIVQDDVSVGKAKNGLVGRRGLAGTSLVHKILGAKAYLQKDNLELHQLVTFGEKVVANLVTIGASLDHVTIPARANKQEEDDSDDEHGYEVLKHDEFEIGMGIHNEPGIKKSSPIPTVDELVAELLEYLLSTTDKDRNYVQFDKNDEVVLLINNLGGTSVLELYAIQNIVVDQLASKYSIKPVRIFTGTFTTSLDGPGFSITLLNATKTGDKDILKFLDHKTSAPGWNSNISDWSGRVDNFIVAAPEIDEGDSSSKVSVDAKLYADLLESGVKKVISKEPKITLYDTVAGDGDCGETLANGSNAILKALAEGKLDLKDGVKSLVQITDIVETAMGGTSGGLYSIFISALAKSLKEKELSEGAYTLTLETISGSLQAALQSLFKYTRARTGDRTLIDALEPFVKEFAKSKDLKLANKAAHDGAEATRKLEAKFGRASYVAEEEFKQFESEGGLPDPGAIGLAALISGITDAYFKSETKL

SEQ ID NO: 120419 - DNA, 1659 bp, Citrobacter freundii
  CDS (1)..(1659): transl_table=11
atgtctcaattcttttttaaccaacgcacccatcttgtgagcgacgtcatcgacggggcgattatcgccagcccatggaataacctggcgcgtctggaaagcgatccggccattcgcatcgtggtccgtcgtgaccttaataaaaataacgtagcggtcatttccggcggcggttcgggacacgaacccgcgcacgttgggtttatcggtaaaggcatgctaaccgctgcggtctgcggcgacgttttcgcctccccgagcgtggatgctgtactgaccgcgattcaggcggtgaccggtgaggctggctgtttgttgattgtgaaaaactacaccggtgaccgtcttaatttcggtctcgccgccgagaaggcgcgtcgccttggctataacgttgaaatgctgattgtcggcgacgacatctccctgccggataacaaacacccacgtggcattgcgggaactatcctggtgcataaaatcgcaggctattttgccgaacgcggctataacctcgccaccgtcctgcgtgaagcgcagtacgcagccagcaacacctttagcctgggcgtagcgctttccagctgtcatctgccgcaagaaaccgacgcagcccctcgtcatcatccgggtcatgcggagctgggtatgggaattcacggcgaaccaggcgcatcggttatcgacacccaaaacagtgcgcaagtggtaaacctgatggtggataaactgctggccgccctgcctgaaaccggtcgtctggcggtgatgattaataatcttggcggcgtttccgtggccgaaatggccatcatcacccgcgaactcgccagcagcccgctgcactcgcgtatcgactggctaattggcccggcctcgctggtcaccgcgctggatatgaaaggcttctcactgacggccatcgtgctggaagagagcatcgaaaaagcactgctcaccgaagtggaaaccagcaactggccgacgccggtcccaccgcgtgaaatcacctgcgtagtgtcatctcacgctagcgcccgcgtggaattccagccttcggcaaacgccctggtggccgggattgtggagctggtcaccgcaaccctttccgatctggagactcatctgaatgcgctggacgccaaagtcggcgatggcgataccggttcgacctttgccgccgcggcgcgtgaaattgccagcctgctgcatcgccagcagctgccgctgaataaccttgccacgctgttcgcgctgattggcgaacgtctgaccgtggtgatgggcggttccagcggtgtgctgatgtcaatcttctttaccgccgccgggcagaaactggaacagggcgctaacgttgtcgaagcgctaaatacggggctggcgcagatgaagttctacggcggcgcagacgaaggcgatcgcacgatgattgatgcgctgcaaccggccctgacctcgctgctcgcacagccgaaaaatctgcaggccgcattcgacgccgcgcaagcgggagccgaacgaacctgtttgtcgagcaaagccaatgcgggtcgcgcatcgtatctgagcagcgaaagcctgctcggaaatatggaccccggcgcgcagcgcctagcgatggtgtttaaagcgctagcggagagtgagctgggctaa

SEQ ID NO: 120420 - protein, 552 aa, Citrobacter freundii
MSQFFFNQRTHLVSDVIDGAIIASPWNNLARLESDPAIRIVVRRDLNKNNVAVISGGGSGHEPAHVGFIGKGMLTAAVCGDVFASPSVDAVLTAIQAVTGEAGCLLIVKNYTGDRLNFGLAAEKARRLGYNVEMLIVGDDISLPDNKHPRGIAGTILVHKIAGYFAERGYNLATVLREAQYAASNTFSLGVALSSCHLPQETDAAPRHHPGHAELGMGIHGEPGASVIDTQNSAQVVNLMVDKLLAALPETGRLAVMINNLGGVSVAEMAIITRELASSPLHSRIDWLIGPASLVTALDMKGFSLTAIVLEESIEKALLTEVETSNWPTPVPPREITCVVSSHASARVEFQPSANALVAGIVELVTATLSDLETHLNALDAKVGDGDTGSTFAAAAREIASLLHRQQLPLNNLATLFALIGERLTVVMGGSSGVLMSIFFTAAGQKLEQGANVVEALNTGLAQMKFYGGADEGDRTMIDALQPALTSLLAQPKNLQAAFDAAQAGAERTCLSSKANAGRASYLSSESLLGNMDPGAQRLAMVFKALAESELG

SEQ ID NO: 120421 - DNA, 2225 bp, Solanum lycopersicum
  CDS (137)..(1921)
gaattcggcacgagcctctataaatcttttttttccccttctctctctttttgtgtttgttcagacttcggacaaagcattcaacaattgaagtctactctccccacacctacaaagccctcagcacaattatccgatggattttcagagcaaaaaactcatcaacgaccccaatgatgttgtgacagagttcattgagggacttattgagaattatccagggttgcagtatctggatggtttcccagaggttaaggtcgtcttgcgtgctgatgtttctggtgcaaaatatgacaaagttgccatcatatcaggtggtggaagtggccatgagcctgctcatgctggatttgttggagaagggatgctgactgcagctatctgtggggacgtttttgcctctccaaatgttgattcaattcttgcgggcatacgagctgtcacaggtcccatggggtgccttcttattgtcaagaactatactggtgatcgactgaattttggtttggctgctgaacaagcaaaatctgaaggttataaagtcgagatggtaatcgtcggtgatgactgtgctttaccacctccaagaggcattgctggccgaagagggttggcagggacgcttcttgttcacaaggttgccggagctgcagcagcttgtggtcttccccttgctgacgttgcagctgaagccaaacgtgcatcagaaatggttgggacaatgggcgttgcgttatctgtttgcacgtcgccaggacaggtgacttcagaccgtttaggcccagggaagatggagcttggtcttggaatacatggggaaccaggagctgctgtagctgaccttcaaccagtagatgtggtggtttctcatgttctgaaggagattttgtcaccggagaccaactacgttccaatcacgcgtgggagtagagtcgtgctcctgattaatggattaggagcaacaccattgatggaattgatgattatagctggcaaggctgtcccagaattgcagcttgaacatggtctagctgttgatagagtctatacagggtcatttatgacgtcacttgatatggcaggcttttcaatttcggtaatgaaggctgatcaagcaattttagatcgtttagatgctccaactaaagctccaaattggcctgttggtgctgaaggcaaccggcctcctgcaaagattcctgttccacttccgccatcacattctatcaagattgaaaagacattgagtcggcctgaaaaactgagccctcagggtcatatccttgagacagctattgaagcagcagctactgaagttgtaaatctcagggataatttgaatgagtgggacaataaagttggtgatggcgattgtggttcaactatgttcagaggtgctgtggctatacttgaagacatgaagaagtactatccgttgaatgaccctgcagaaacagtcaatgaaattggagcctccattggaagagtaatggggggaactagcggtatcttatacagtatattctgtaaggcagcatatgcgaagttgaaagaaaatgctgagtcggttgtcacagctattcactgggctgatgcacttgaagctgctatcgctgctgttagtaaatatggaggagctagtgctggttatcgtacccttttagatgctcttataccagcattgtcagctcttaaagagaggttgaatgctggggacgaccctgcggatgctttcattatttctgctgaggcagcatctgctggagccgagtcaaccaagcacatgcaggcgcaggctggccgttcaacctatgtacccggagatattcttgcatcagttcctgacccaggtgccatggctgcagctgcgtggtacagagcagctgcgttagctgtgaaggagaagtataatacagcataagcatatttaatcggccattcctattacttcctgcaggaatgttttctctttctcgaggaagaaattaacccaacaattttttgctcgtaaaccttatgaggagttagctttccgcttatgcagtcctgcataaagccgagagagtgtagaaaatgtatgttacagtccttttatacagtgttctaagtgagggaaaaaacaaacactgccatgtagaatggtaatctgtgaaggtggttgtaaactttattgtaacaatggattttcttattctgctacttttagcaaaaaaaaaaaaaaaaaa

SEQ ID NO: 120422 - protein, 594 aa, Solanum lycopersicum
MDFQSKKLINDPNDVVTEFIEGLIENYPGLQYLDGFPEVKVVLRADVSGAKYDKVAIISGGGSGHEPAHAGFVGEGMLTAAICGDVFASPNVDSILAGIRAVTGPMGCLLIVKNYTGDRLNFGLAAEQAKSEGYKVEMVIVGDDCALPPPRGIAGRRGLAGTLLVHKVAGAAAACGLPLADVAAEAKRASEMVGTMGVALSVCTSPGQVTSDRLGPGKMELGLGIHGEPGAAVADLQPVDVVVSHVLKEILSPETNYVPITRGSRVVLLINGLGATPLMELMIIAGKAVPELQLEHGLAVDRVYTGSFMTSLDMAGFSISVMKADQAILDRLDAPTKAPNWPVGAEGNRPPAKIPVPLPPSHSIKIEKTLSRPEKLSPQGHILETAIEAAATEVVNLRDNLNEWDNKVGDGDCGSTMFRGAVAILEDMKKYYPLNDPAETVNEIGASIGRVMGGTSGILYSIFCKAAYAKLKENAESVVTAIHWADALEAAIAAVSKYGGASAGYRTLLDALIPALSALKERLNAGDDPADAFIISAEAASAGAESTKHMQAQAGRSTYVPGDILASVPDPGAMAAAAWYRAAALAVKEKYNTA

SEQ ID NO: 120423 - DNA, 1785 bp, Brassica napus
  CDS (1)..(1785)
atggtttacgcggcgaagaaattcatcaacaaccccaacgatgttgtgactgagttcatcgagggacttgtggaaacttatcctggactgcagtatttggatggctttcctgaggttaaggtggtactacgagctgatgtctctgctgagaagtatgacaaggttgccgttatatcaggtggaggcagtgggcatgagccagctcatgctggttacgttggagaaggaatgcttacagctgctatctgcggagatgtctttgcttctccacctgttgattccatcctggctgggattcgggctgtcactggtcctcagggatgtcttttgatcgtcaagaactatactggcgaccgcttgaactttggtttggctgctgagcaagcgaaatctgaaggttacaaagtagagactgtaattgttggagaggattgcgctttacccccacctcgtggtattgctggacgcagagggttagcaggaaccgttcttgtacataaggtggctggcgcagcagcagcggctggtctttctctagaaaaagttgcggccgaggcaaagtgtgcgtcggagatggttggtaccatgggtgttgcattatctgtttgtacgcttcctgggcaggttacatctgatcgtctgggccaagagaagatggaactcgggcttggaattcatggagaacctggtgctgctgtggttgacgttcaacctgtggatgtggtggtttcacatgttcttcagcagatactgagtcctgagactaattatgttcccattacccgtggtaacagtgtggttctgatggttaatggcttatgtggtacccctttgatggaacttatgattgctgctggaaaagctgtccctaaactgcagttggaatttggacttgctgttgatagggtgtatactgggttttttatgtcttctcttgatatggcaggtttctcgatttcgatcatgaaggctgaccagtcaattttagagcgtctggatgctccgaccaagggacctagttggccagttggcacagatgggaaccgcccaccatcgaagatcccagttccactgcctccattccaacaaaacaaaaacgaagagtctctaggccgacctcaagaacttattcaacaaggtcgaattcttgaggcatctattgaagcagcagcaactgtggtcatcagtttgaaagatagtttgaacgaatgggatggaaaagtaggagacggggactgtggttcatcaatgtgcagaggggcaacagctattttggaggacatgaggaattattatcctctcaatgatgctgctgaaacagtgaatgatattggttcatctatcagaagagtcatggggggaacgagtggaataatttatagtctcctctgcaaggcagcttatgctgagttaaaagctaatgctcagtcagaagtcactcccaaaaactggtctgatgcactcaagtcatcaatctctgctgtcagtaaatatggtggagcaagtgcgggctatagaacgatgttagatgctctcatcccagcttcaaaagtcctcgaggagaagctgagtgttggagaggaccctgtttctgcttttgttctgtctgctgaagctgcaactgcaggagcggaatcaaccattcagatgcaagcacaggccgggagatcgagctatgtgtcagctgagattcttggctccattccttatccgggcgccattgctgcagcggcatggttcagggttgctgcaagagcagtgaaggagcagagccagggtttgtga

SEQ ID NO: 120424 - protein, 594 aa, Brassica napus
MVYAAKKFINNPNDVVTEFIEGLVETYPGLQYLDGFPEVKVVLRADVSAEKYDKVAVISGGGSGHEPAHAGYVGEGMLTAAICGDVFASPPVDSILAGIRAVTGPQGCLLIVKNYTGDRLNFGLAAEQAKSEGYKVETVIVGEDCALPPPRGIAGRRGLAGTVLVHKVAGAAAAAGLSLEKVAAEAKCASEMVGTMGVALSVCTLPGQVTSDRLGQEKMELGLGIHGEPGAAVVDVQPVDVVVSHVLQQILSPETNYVPITRGNSVVLMVNGLCGTPLMELMIAAGKAVPKLQLEFGLAVDRVYTGFFMSSLDMAGFSISIMKADQSILERLDAPTKGPSWPVGTDGNRPPSKIPVPLPPFQQNKNEESLGRPQELIQQGRILEASIEAAATVVISLKDSLNEWDGKVGDGDCGSSMCRGATAILEDMRNYYPLNDAAETVNDIGSSIRRVMGGTSGIIYSLLCKAAYAELKANAQSEVTPKNWSDALKSSISAVSKYGGASAGYRTMLDALIPASKVLEEKLSVGEDPVSAFVLSAEAATAGAESTIQMQAQAGRSSYVSAEILGSIPYPGAIAAAAWFRVAARAVKEQSQGL

SEQ ID NO: 120425 - DNA, 1779 bp, Glycine max
  CDS (1)..(1779)
atggcatttccgaacaagaagctcatcgacgaccccaatgatgttgtgactgaattcattgaaggtcttgtggagacatattccggactacagtatttagatggctttcctctggtgaaggttgtcttacgtgcagatgtttcagctgcaacatatgataaagttgcaatcgtaccagggggaggaagtggccatgagcctgcccatgctggatttgtcggagaaggaatgcttacagcagcaatatgtggagatatattttcttctccacctgttgactcaattctagctgggatacgagctgtaactggtcctaagggatgtcttttgattgtaaagaactatactggtgatcgtttgaactttggcttggctgctgagatagcaaaatctgaagggtataaagtagagactgttattgttggtgacgattgtgcactacctccacctcgagggattgctggaagaagaggtttggcaggaactattctggttcacaaggttgcaggagctgctgctgctggtggtctttctcttgctgatgttgctgcagaagctaaacatgcatctgaaatagtgggaacaatgggtgttgctctgactgtgtgcacaattcctggtcaagttgcatcagatcgtttgggaccaggaaagatggaacttggtcttggaattcatggagaacctggggcagctgtggctgatattcagcccgtaaatgtggtggtttctcatgttctacagcaaatattgtccacggaaacaaactatgtaccgataactcgaggagaaagagtggtccttatggtcaatgggttaggtgccactcctacaatggaactaatgattatagctggaaaaacagttccaaaattacagctagaacatggattggctgttgatagagtttatacagggtcatttatgacttctcttgatatggcaggtttctcaatttctattatgaaggctgatccagttattcttcaacgattagatgctccaactaaagctccttattggcctgttgctgctgatggtaatcacccgcctgctaagattcctgttccaattccagcatctcgatcagcaaagactgatgagccacgaagtcagccattacaactaaatgagcaaggccaaattcttgaggtagccattgaagctgctgcaaatgcaattataaatctgaaggacaatttaaatgaatgggatggtaaagttggtgatggtgactgtggatcaactatgtatagaggtgcaaaagcaattcttgaggacatcaaaaattaccctctaaatgatgctgcagaaactgtcggtgaaattggttcatcaattggaagatccatgggaggaacaagtgggatcatatatactatattttttaaggcagcacattcggtgctaaaagcaagttcccattctggtgtcacttcaaaacaatgggctgaagcactcgcagtttccattgctgctgtaagtaaatatgggggggctagtgctggatatagaacattgttagatgcccttatcccagcatcgttggttcttgaagagaaattaaattctggagttgatccttgcatcgcatttgttctctcctctgaagctgcattggctggagctcagtcaacggtagacatgcaagcacaggctggacgttcgacttacttttctggagagattctttcaacagttcctgatcctggtgctatggctgccgctacatggtacagagccgcggccttagctgtgaaggccaaataccagagctaa

SEQ ID NO: 120426 - protein, 592 aa, Glycine max
MAFPNKKLIDDPNDVVTEFIEGLVETYSGLQYLDGFPLVKVVLRADVSAATYDKVAIVPGGGSGHEPAHAGFVGEGMLTAAICGDIFSSPPVDSILAGIRAVTGPKGCLLIVKNYTGDRLNFGLAAEIAKSEGYKVETVIVGDDCALPPPRGIAGRRGLAGTILVHKVAGAAAAGGLSLADVAAEAKHASEIVGTMGVALTVCTIPGQVASDRLGPGKMELGLGIHGEPGAAVADIQPVNVVVSHVLQQILSTETNYVPITRGERVVLMVNGLGATPTMELMIIAGKTVPKLQLEHGLAVDRVYTGSFMTSLDMAGFSISIMKADPVILQRLDAPTKAPYWPVAADGNHPPAKIPVPIPASRSAKTDEPRSQPLQLNEQGQILEVAIEAAANAIINLKDNLNEWDGKVGDGDCGSTMYRGAKAILEDIKNYPLNDAAETVGEIGSSIGRSMGGTSGIIYTIFFKAAHSVLKASSHSGVTSKQWAEALAVSIAAVSKYGGASAGYRTLLDALIPASLVLEEKLNSGVDPCIAFVLSSEAALAGAQSTVDMQAQAGRSTYFSGEILSTVPDPGAMAAATWYRAAALAVKAKYQS

SEQ ID NO: 120427 - DNA, 26 bp, Artificial sequence
  primer
atgtctcacaaacaattcaaatcaga

SEQ ID NO: 120428 - DNA, 24 bp, Artificial sequence
  primer
ctagtacccagcagctgtaacaaa

SEQ ID NO: 120429 - protein, 683 aa, Artificial sequence
  consensus sequence
  Variant (2)..(6): Xaa in position 2 to 6 is any amino acid
  Variant (8)..(31): Xaa in position 8 to 31 is any amino acid
  Variant (32)..(40): Xaa in position 32 to 40 is any or no amino acid
  Variant (42)..(44): Xaa in position 42 to 44 is any amino acid
  Variant (49)..(49): Xaa in position 49 is any amino acid
  Variant (54)..(56): Xaa in position 54 to 56 is any amino acid
  Variant (58)..(58): Xaa in position 58 is any amino acid
  Variant (61)..(61): Xaa in position 61 is any amino acid
  Variant (62)..(62): Xaa in position 62 is any or no amino acid
  Variant (64)..(64): Xaa in position 64 is any amino acid
  Variant (66)..(66): Xaa in position 66 is any amino acid
  Variant (68)..(70): Xaa in position 68 to 70 is any amino acid
  Variant (72)..(73): Xaa in position 72 to 73 is any amino acid
  Variant (78)..(93): Xaa in position 78 to 93 is any amino acid
  Variant (94)..(99): Xaa in position 94 to 99 is any or no amino acid
  Variant (101)..(106): Xaa in position 101 to 106 is any amino acid
  Variant (112)..(112): Xaa in position 112 is any amino acid
  Variant (114)..(114): Xaa in position 114 is any amino acid
  Variant (117)..(117): Xaa in position 117 is any amino acid
  Variant (121)..(122): Xaa in position 121 to 122 is any amino acid
  Variant (123)..(132): Xaa in position 123 to 132 is any or no amino acid
  Variant (134)..(142): Xaa in position 134 to 142 is any amino acid
  Variant (143)..(145): Xaa in position 143 to 145 is any or no amino acid
  Variant (147)..(154): Xaa in position 147 to 154 is any amino acid
  Variant (155)..(158): Xaa in position 155 to 158 is any or no amino acid
  Variant (162)..(162): Xaa in position 162 is any amino acid
  Variant (165)..(167): Xaa in position 165 to 167 is any amino acid
  Variant (169)..(169): Xaa in position 169 is any amino acid
  Variant (171)..(172): Xaa in position 171 to 172 is any amino acid
  Variant (174)..(181): Xaa in position 174 to 181 is any amino acid
  Variant (182)..(184): Xaa in position 182 to 184 is any or no amino acid
  Variant (186)..(205): Xaa in position 186 to 205 is any amino acid
  Variant (207)..(211): Xaa in position 207 to 211 is any amino acid
  Variant (214)..(224): Xaa in position 214 to 224 is any amino acid
  Variant (225)..(237): Xaa in position 225 to 237 is any or no amino acid
  Variant (239)..(239): Xaa in position 239 is any amino acid
  Variant (241)..(241): Xaa in position 241 is any amino acid
  Variant (245)..(245): Xaa in position 245 is any amino acid
  Variant (247)..(247): Xaa in position 247 is any amino acid
  Variant (249)..(282): Xaa in position 249 to 282 is any amino acid
  Variant (283)..(293): Xaa in position 283 to 293 is any or no amino acid
  Variant (295)..(296): Xaa in position 295 to 296 is any amino acid
  Variant (298)..(302): Xaa in position 298 to 302 is any amino acid
  Variant (304)..(313): Xaa in position 304 to 313 is any amino acid
  Variant (314)..(315): Xaa in position 314 to 315 is any or no amino acid
  Variant (317)..(326): Xaa in position 317 to 326 is any amino acid
  Variant (327)..(329): Xaa in position 327 to 329 is any or no amino acid
  Variant (331)..(333): Xaa in position 331 to 333 is any amino acid
  Variant (335)..(339): Xaa in position 335 to 339 is any amino acid
  Variant (341)..(341): Xaa in position 341 is any amino acid
  Variant (342)..(365): Xaa in position 342 to 365 is any or no amino acid
  Variant (367)..(387): Xaa in position 367 to 387 is any amino acid
  Variant (388)..(402): Xaa in position 388 to 402 is any or no amino acid
  Variant (404)..(452): Xaa in position 404 to 452 is any amino acid
  Variant (453)..(483): Xaa in position 453 to 483 is any or no amino acid
  Variant (485)..(487): Xaa in position 485 to 487 is any amino acid
  Variant (492)..(492): Xaa in position 492 is any amino acid
  Variant (494)..(498): Xaa in position 494 to 498 is any amino acid
  Variant (499)..(501): Xaa in position 499 to 501 is any or no amino acid
  Variant (503)..(529): Xaa in position 503 to 529 is any amino acid
  Variant (530)..(546): Xaa in position 530 to 546 is any or no amino acid
  Variant (549)..(549): Xaa in position 549 is any amino acid
  Variant (552)..(587): Xaa in position 552 to 587 is any amino acid
  Variant (588)..(603): Xaa in position 588 to 603 is any or no amino acid
  Variant (605)..(606): Xaa in position 605 to 606 is any amino acid
  Variant (608)..(609): Xaa in position 608 to 609 is any amino acid
  Variant (611)..(612): Xaa in position 611 to 612 is any amino acid
  Variant (614)..(614): Xaa in position 614 is any amino acid
  Variant (616)..(616): Xaa in position 616 is any amino acid
  Variant (618)..(631): Xaa in position 618 to 631 is any amino acid
  Variant (632)..(642): Xaa in position 632 to 642 is any or no amino acid
  Variant (644)..(649): Xaa in position 644 to 649 is any amino acid
  Variant (651)..(657): Xaa in position 651 to 657 is any amino acid
  Variant (658)..(658): Xaa in position 658 is any or no amino acid
  Variant (661)..(662): Xaa in position 661 to 662 is any amino acid
  Variant (664)..(671): Xaa in position 664 to 671 is any amino acid
  Variant (672)..(679): Xaa in position 672 to 679 is any or no amino acid
  Variant (681)..(681): Xaa in position 681 is any amino acid
VXXXXXGXXXXXXXXXXXXXXXXXXXXXXXXXXXXXXXXXVXXXSGGGXGHEPXXXGXVGXXGXLXAXXXGXXFASPXXXXXXXXXXXXXXXXXXXXXXGXXXXXXNYTGDXLXFGXAAEXXXXXXXXXXXXGXXXXXXXXXXXXDXXXXXXXXXXXXRRGXAGXXXVXKXXGXXXXXXXXXXXLXXXXXXXXXXXXXXXXXXXXLXXXXXPGXXXXXXXXXXXXXXXXXXXXXXXXEXGXGIHXEXGXXXXXXXXXXXXXXXXXXXXXXXXXXXXXXXXXXXXXXXXXXXXXNXXGXXXXXEXXXXXXXXXXXXLXXXXXXXXXXXXXGXXXTXXXXXGXXXXXXXXXXXXXXXXXXXXXXXXXSXXXXXXXXXXXXXXXXXXXXXXXXXXXXXXXXXXXXWXXXXXXXXXXXXXXXXXXXXXXXXXXXXXXXXXXXXXXXXXXXXXXXXXXXXXXXXXXXXXXXXXXXXXXXXXXXXXXXXDXXXGDGDXGXXXXXXXXGXXXXXXXXXXXXXXXXXXXXXXXXXXXXXXXXXXXXXXXXXXXXGGXSGXXXXXXXXXXXXXXXXXXXXXXXXXXXXXXXXXXXXXXXXXXXXXXXXXXXXAXXGXXTXXDXLXPXXXXXXXXXXXXXXXXXXXXXXXXXAXXXXXXTXXXXXXXXGRXXYXXXXXXXXXXXXXXXXDXGA

SEQ ID NO: 120430 - protein, 19 aa, Artificial sequence
  protein pattern
  Variant (4)..(4): Xaa in position 4 is Ala, Cys or Ser
  Variant (9)..(11): Xaa in position 9 to 11 is any amino acid
  Variant (13)..(13): Xaa in position 13 is any amino acid
  Variant (14)..(14): Xaa in position 14 is Ile or Val
  Variant (16)..(16): Xaa in position 16 is any amino acid
  Variant (17)..(17): Xaa in position 17 is Gly or Asn
  Variant (18)..(18): Xaa in position 18 is any amino acid
GGGXGHEPXXXGXXGXXXL

SEQ ID NO: 120431 - protein, 19 aa, Artificial sequence
  protein pattern
  Variant (2)..(2): Xaa in position 2 is any amino acid
  Variant (3)..(3): Xaa in position 3 is Ile, Leu or Val
  Variant (4)..(4): Xaa in position 4 is Phe, Ile, Leu, Met or Val
  Variant (5)..(7): Xaa in position 5 to 7 is any amino acid
  Variant (13)..(13): Xaa in position 13 is any amino acid
  Variant (14)..(14): Xaa in position 14 is Ile or Leu
  Variant (15)..(15): Xaa in position 15 is any amino acid
  Variant (18)..(18): Xaa in position 18 is Ile, Leu, Met or Val
  Variant (19)..(19): Xaa in position 19 is Ala, Ser or Val
GXXXXXXNYTGDXXXFGXX

SEQ ID NO: 120432 - protein, 14 aa, Artificial sequence
  protein pattern
  Variant (2)..(3): Xaa in position 2 to 3 is any amino acid
  Variant (5)..(6): Xaa in position 5 to 6 is any amino acid
  Variant (8)..(8): Xaa in position 8 is Leu, Met or Val
  Variant (9)..(9): Xaa in position 9 is Ile, Leu, Met or Val
  Variant (11)..(11): Xaa in position 11 is Ala, Thr or Val
  Variant (13)..(13): Xaa in position 13 is any amino acid
AXXGXXTXXDXLXP

SEQ ID NO: 120433 - protein, 9 aa, Artificial sequence
  protein pattern
  Variant (2)..(2): Xaa in position 2 is Ile, Leu or Met
  Variant (6)..(6): Xaa in position 6 is Gly or Asn
  Variant (8)..(8): Xaa in position 8 is any amino acid
GXGIHXEXG

SEQ ID NO: 120434 - protein, 15 aa, Artificial sequence
  protein pattern
  Variant (2)..(3): Xaa in position 2 to 3 is any or no amino acid
  Variant (5)..(5): Xaa in position 5 is Ala, Asp, Glu, Asn, Ser or Thr
  Variant (6)..(6): Xaa in position 6 is Ile, Leu or Val
  Variant (8)..(8): Xaa in position 8 is Ala, Ser or Thr
  Variant (11)..(11): Xaa in position 11 is Asn, Pro, Ser or Thr
  Variant (12)..(13): Xaa in position 12 to 13 is any amino acid
  Variant (14)..(14): Xaa in position 14 is Ala, Asn, Gln or Ser
  Variant (15)..(15): Xaa in position 15 is Ile or Val
AXXGXXFXSPXXXXX

SEQ ID NO: 120435 - protein, 12 aa, Artificial sequence
  protein pattern
  Variant (2)..(2): Xaa in position 2 is Ala, Gly, Asn, Ser or Thr
  Variant (3)..(4): Xaa in position 3 to 4 is any amino acid
  Variant (9)..(9): Xaa in position 9 is any amino acid
  Variant (11)..(11): Xaa in position 11 is any amino acid
  Variant (12)..(12): Xaa in position 12 is Gly, Ser or Thr
DXXXGDGDXGXX

SEQ ID NO: 120436 - DNA, 1047 bp, Saccharomyces cerevisiae
  CDS (1)..(1047)
atgactactgaaaaaaccgttgtttttgtttctggtgctactggtttcattgctctacacgtagtggacgatttattaaaaactggttacaaggtcatcggttcgggtaggtcccaagaaaagaatgatggattgctgaaaaaatttaagagcaatcccaacctttcaatggagattgtcgaagacattgctgctccaaacgcttttgacaaagtttttcaaaagcacggcaaagagatcaaggttgtcttgcacatagcttctccggttcacttcaacaccactgatttcgaaaaggatctgctaattcctgctgtgaatggtaccaagtccattctagaagcaatcaaaaattatgccgcagacacagtcgaaaaagtcgttattacttcttctgttgctgcccttgcatctcccggagatatgaaggacactagtttcgttgtcaatgaggaaagttggaacaaagatacttgggaaagttgtcaagctaacgcggtttccgcatactgtggttccaagaaatttgctgaaaaaactgcttgggattttctcgaggaaaaccaatcaagcatcaaatttacgctatcaaccatcaacccaggatttgtttttggccctcagctatttgccgactctcttagaaatggaataaatagctcttcagccattattgccaatttggttagttataaattaggcgacaatttttataattacagtggtccttttattgacgttcgcgatgtttcaaaagctcatttacttgcatttgagaaacccgaatgcgctggccaaagactattcttatgtgaagatatgttttgctctcaagaagcgctggatatcttgaatgaggaatttccacagttaaaaggcaagatagcaactggcgaacctggtagcggctcaacctttttgacaaaaaactgctgcaagtgcgacaaccgcaaaaccaaaaatttattaggattccaatttaataagttcagagattgcattgtcgatactgcctcgcaattactagaagttcaaagtaaaagctaa

SEQ ID NO: 120437 - protein, 348 aa, Saccharomyces cerevisiae
MTTEKTVVFVSGATGFIALHVVDDLLKTGYKVIGSGRSQEKNDGLLKKFKSNPNLSMEIVEDIAAPNAFDKVFQKHGKEIKVVLHIASPVHFNTTDFEKDLLIPAVNGTKSILEAIKNYAADTVEKVVITSSVAALASPGDMKDTSFVVNEESWNKDTWESCQANAVSAYCGSKKFAEKTAWDFLEENQSSIKFTLSTINPGFVFGPQLFADSLRNGINSSSAIIANLVSYKLGDNFYNYSGPFIDVRDVSKAHLLAFEKPECAGQRLFLCEDMFCSQEALDILNEEFPQLKGKIATGEPGSGSTFLTKNCCKCDNRKTKNLLGFQFNKFRDCIVDTASQLLEVQSKS

SEQ ID NO: 120438 - DNA, 1155 bp, Metschnikowia zobellii
  CDS (65)..(1081)
tgagcggatacaattcccctctagaaataattttgtttaactttaagaaggagatatacatatgatgaccacttcagtctttgtctctggtgccaccggcttcattgcccagcacgtcgtcaaactccttctctcgaaaggctacaacgtcgttggctccgtcagaaccgccgagaaaggcaagaacctagcaaagctatttggcaccggctccttcacctacgaggtggtgcccaaactcgaagcgcctggtgcctttgacgaggccttggaaaagcatccagaggtgtctgtgtttttgcacacggcctcgcccgtcacctttgacgtcaaggacattgagaaagagttgcttctccccgccgtcgagggcaccaaaaacgtctttagtgccatcaaagcccacggcccgcagatcaaaaacgtcgtggtgacgtcctctgttgctgcggcactcgatcccgctagaaacctggaccccacgttcactgtgaatgaagactcttggaacccaatctcgtgggaggactcgaagcagaacgccatgaccgggtactttggctccaagaagtttgcagagaaggccgcgtgggattttgtggaagccgagaagcccaactttctgttgaacaccgtgttgcccgtgtacgtctttggcccccaggcgtttgactccgaggtcaagggcgagctcaactactctgccgaaatcatcaacaagttgttgaagttgggacccaacgacgaagtgccctcgcaactggggggtttcgtcgacgtgagagacgtggccaaggctcacttggccgcattcgagggcggactctcgaaccagcgccttttgcttagaacggcagcgtttaatgcgcaacgcgtgcttgacataatcaacaataagtttgttaacttgagaggacagttgcccactggaacgccttgtaaaggcgagcctgaaagcactggctctgtgacggacaattcgagaaccaagaagttattgaacttcccagccatcgacttggagaactgtgtggtggactcggttacccagctcatgaagtcccagaagaaggttttgtaagcgaagcttgcggccgcactcgagcaccaccaccaccaccactgagatccggctgctaacaaagcccgaaagga

SEQ ID NO: 120439 - protein, 338 aa, Metschnikowia zobellii
MTTSVFVSGATGFIAQHVVKLLLSKGYNVVGSVRTAEKGKNLAKLFGTGSFTYEVVPKLEAPGAFDEALEKHPEVSVFLHTASPVTFDVKDIEKELLLPAVEGTKNVFSAIKAHGPQIKNVVVTSSVAAALDPARNLDPTFTVNEDSWNPISWEDSKQNAMTGYFGSKKFAEKAAWDFVEAEKPNFLLNTVLPVYVFGPQAFDSEVKGELNYSAEIINKLLKLGPNDEVPSQLGGFVDVRDVAKAHLAAFEGGLSNQRLLLRTAAFNAQRVLDIINNKFVNLRGQLPTGTPCKGEPESTGSVTDNSRTKKLLNFPAIDLENCVVDSVTQLMKSQKKVL

SEQ ID NO: 120440 - DNA, 1035 bp, Torulaspora delbrueckii
  CDS (1)..(1035)
atgtctattctagtttctggtgctactggttttattgctctacatgttgtcagtgatttgttgaagcaggattacaaagttattggtactgttagatctcaagaaaaagctgataaattgcgtaagcaatttggcaacaatcccaatctttcctttgaattggtttcagatattgctgctcctgaagcttttgacaaagtctttcagaaacatggcaaggacatcaaagtggtgttgcacacagcttctcctttcactctagaaaccacaaattatgagaaagatctgttgcttccagcagtgaatggtacaaagagtatcctggagtcgattaagaaatacgctgctgattctgtcgagagagtagtcatcacatcgtcttacgctgccgtcatgaatgtttcgaaagaaggcgacggctcaatagtctacactgagaaggattggaaccctgccacttgggaaaactgtcagatagatggtttgaatgcttattgtgggtccaagaagctagcagaaaaggctgcatgggacttctttgaagataataaaaacgttgtcaagttcaaactgagcatgatcaatcctacttacgttttcgggcctcagctatttgatgaggacgtgaaggataaattgaatacttcctgtgagctaattaactcaattataaagaataatcctcaggtgggatatctattagagaatattaaaggtcatttcgttgatgtcagagatgttgctaaggctcacttggtggcattccaaaaggatgaagctattggacagagactgctcacctcaaatggtcgtttcgcttaccaagacctcgtagatattatcaatgaggatttcccacaattgaagggtaaggtcattgtaggaaagccaggtgccggtaaacaattgtatggcactttcccagacatcaacaacaccagatcgaaggagattttgggcttcgaattcatctctctgcataaatccgtccatgacactgctgctcaagttttgaaaaaagaaggcaaattgtaa

SEQ ID NO: 120441 - protein, 344 aa, Torulaspora delbrueckii
MSILVSGATGFIALHVVSDLLKQDYKVIGTVRSQEKADKLRKQFGNNPNLSFELVSDIAAPEAFDKVFQKHGKDIKVVLHTASPFTLETTNYEKDLLLPAVNGTKSILESIKKYAADSVERVVITSSYAAVMNVSKEGDGSIVYTEKDWNPATWENCQIDGLNAYCGSKKLAEKAAWDFFEDNKNVVKFKLSMINPTYVFGPQLFDEDVKDKLNTSCELINSIIKNNPQVGYLLENIKGHFVDVRDVAKAHLVAFQKDEAIGQRLLTSNGRFAYQDLVDIINEDFPQLKGKVIVGKPGAGKQLYGTFPDINNTRSKEILGFEFISLHKSVHDTAAQVLKKEGKL

SEQ ID NO: 120442 - DNA, 1379 bp, Glycine max
  CDS (138)..(1124)
gatgtgatagaaaaaggaggaacgcagaccgaggcgtttccagttcgaaagggaaatgaaagtgtctttgttggtgaagggtaggtgagagaaacgaaaggggtgtgtgttgggttgaataggtatagataggatcaatgagcaacaacaacgcaggaaaggtggtgtgtgtgacgggtgcttctggtttcatagcttcatggatcgtcaaattccttctccaacgtggttacactgtcagggccaccgttcgctacccaagtaatctgaaaaaggtagatcacttggttaaacttgagggcgcaaaagagaggttgcagctgtttaaggcagatctgttggaagaaggttcctttgactctgttgtggaaggctgtcatggtgtttttcatactgcttcacctgtccgttttgttgtcaacgacccacaggctgaattgcttgatcctgcagtgaagggaactcttaatgttctcaaatcatgtgcaaaatcaccatctgtcaaacgggttgttttaacttcttctatttctgcagttgcatttaatcgaagacctaaaactcctcaagtggtagttgatgagacatggttttcagatccagatgtctgtagggaattagagttgtggtacacactttcaaagactttggctgaggatgctgcctggaaatttgtaaatgaaaacagcattgacatgatttctattaacccaactatggtggcaggacctctcttacaaccagagattaatgaaagtgttgagccaattttaaacctaataaatggtaaaccatttccaaataaatcttttggatgggtcgatgtgaaagatgttgctaatgctcatattctggcctatgaaattgcttcagctagtggaagatattgtttggttgagagagtcatacactactctgaacttgctacgattttacgtggtctgtaccccacattacaaattccagataagtgtgaggtagatgagccgtatatcccaacataccagatttccacagaaaaggcaaaaaaggacttgggaatagagtttactcctttggaagtgagtctcagggagactgtggaaagctttagagaaaagaagattgtcaactttaatccgtgatctatcctaaataaataaatgtcgatgatctcaaccacgttcaatttgtgactatgataaatgtcaggcttcagaaggaattatcactgtaaaatatggattgcaaacaggttaacattgtttgatgaaggaccgaatataaaaggataaattgtatataaattcctgaactttgggcgaattatgctttgtccttttttatgaatttcaactgtacaatgttcgagtccaaaaaaaaaaaaaaaaaaaaaaaaa

SEQ ID NO: 120443 - protein, 328 aa, Glycine max
MSNNNAGKVVCVTGASGFIASWIVKFLLQRGYTVRATVRYPSNLKKVDHLVKLEGAKERLQLFKADLLEEGSFDSVVEGCHGVFHTASPVRFVVNDPQAELLDPAVKGTLNVLKSCAKSPSVKRVVLTSSISAVAFNRRPKTPQVVVDETWFSDPDVCRELELWYTLSKTLAEDAAWKFVNENSIDMISINPTMVAGPLLQPEINESVEPILNLINGKPFPNKSFGWVDVKDVANAHILAYEIASASGRYCLVERVIHYSELATILRGLYPTLQIPDKCEVDEPYIPTYQISTEKAKKDLGIEFTPLEVSLRETVESFREKKIVNFNP

SEQ ID NO: 120444 - DNA, 1011 bp, Oryza sativa (japonica cultivar-group)
  CDS (1)..(1011)
atgagctccgagtctgaggcggcgcccgggaccgggaagctggtgtgcgtcaccggcgcgtcggggtacatcgcgtcgtggctcgtcaggctgctcctcgcccgcggctacacggtccgcgccaccatccgggacacctctgacccaaagaaaacactacacctgcgtgccctggatggagccaacgaaagactccatttgttcgaagcaaatctgctggaagagggctctttcgatgctgcggtcaatggttgtgattgtgttttccatacggcttctcccttttaccacaatgttaaagatcctaaggctgagttacttgaccctgcagtcaaaggaacccttaatgttctaggctcctgcaagaaagcttccattagaagagttatcgtgacatcatccatggctgctgttgcctacaatgggaaaccaagaactcctgatgtagttgttgatgagacatggttttcagttccagagatttgtgaaaagcatcagcaatggtatgttctgtccaagaccctagcagaggaggctgcttggaagttttcaaaagataatggatttgaaatagttacggtgaacccagcaatggtcattggtcccctgctgcagccttcactgaatactagtgctgaagcaattctgaagctaatcaatggatcatcctcgacatatcctaatttcagctttggctggataaacgttaaggatgttgccctggcacatatccttgcatatgaagttccttcagcaaatggaagatattgcatggttgaaagagttgcgcactactcagagctcgtccaaatcattcgtgagatgtatcccaatattcctctgccagacaagtgtgcagatgacaagccatcagtgccaatctaccaggtatcaaaggaaaagataaaaagcttgggcctggaactgactcccctgcacacgagcatcaaggagaccatcgagagcttgaaagagaaaggatttgttacttttgattcaagcaacctgtaa

SEQ ID NO: 120445 - protein, 336 aa, Oryza sativa (japonica cultivar-group)
MSSESEAAPGTGKLVCVTGASGYIASWLVRLLLARGYTVRATIRDTSDPKKTLHLRALDGANERLHLFEANLLEEGSFDAAVNGCDCVFHTASPFYHNVKDPKAELLDPAVKGTLNVLGSCKKASIRRVIVTSSMAAVAYNGKPRTPDVVVDETWFSVPEICEKHQQWYVLSKTLAEEAAWKFSKDNGFEIVTVNPAMVIGPLLQPSLNTSAEAILKLINGSSSTYPNFSFGWINVKDVALAHILAYEVPSANGRYCMVERVAHYSELVQIIREMYPNIPLPDKCADDKPSVPIYQVSKEKIKSLGLELTPLHTSIKETIESLKEKGFVTFDSSNL

SEQ ID NO: 120446 - DNA, 1086 bp, Oryza sativa (japonica cultivar-group)
  CDS (1)..(1086)
atgaccgtgatcgacggcgccgtcgctgccgacgccggcggcgcagccgcggcggtggtgcagccggggaacgggcagaccgtgtgcgtgaccggcgcggccgggtacatcgcgtcgtggctcgtgaagctgctgcttgagaagggctacactgtcaagggcaccgtcaggaacccagatgacccgaagaacgcgcacctgaaggcgctcgacggcgccggcgagcggctggtgctctgcaaggccgacctcctcgactacgacgccatctgccgcgccgtcgccggctgccacggcgtcttccacaccgcctcccccgtcaccgacgaccccgagcagatggtggagccggcggtgagggggacggagtacgtgataaacgcggcggcggaggccggcacggtgcggcgggtggtgttcacgtcgtcgatcggggcggtgaccatggaccccaaccgcgggcccgacgtcgtcgtcgacgagtcctgctggagcgaccttgactactgcaaggaaaccaggaactggtactgctacgggaaggcggtggcggagcaggcggcgtgggaggcggcgcggcggcgaggggtggagctggtggtggtgaacccggtgctggtgatcgggccgctgctgcagccgacggtgaacgccagcgtcgcccacatcctcaagtacctggacggctcggccagcaagttcgccaacgccgtccaggcctacgtcgacgtccgcgacgtcgccgccgcccacctcctcgtcttcgagtccccttccgccgccggccgcttcctctgcgccgagtctgtcctccaccgcgagggtgtcgtccgcatcctcgccaagctcttccccgagtaccctgtccccaccaggtgctccgacgagaagaaccccaggaagcagccgtacaagatgtcgaaccagaagctccgggacctggggctggagttccggccggcgagccagtcgctgtacgagacggtgaagtgcctccaggagaagggccacctgccggtgctcgccgccgagaagacggaggaggaggccggcgaggtccagggcgggattgccatccgagcatga

SEQ ID NO: 120447 - protein, 361 aa, Oryza sativa (japonica cultivar-group)
MTVIDGAVAADAGGAAAAVVQPGNGQTVCVTGAAGYIASWLVKLLLEKGYTVKGTVRNPDDPKNAHLKALDGAGERLVLCKADLLDYDAICRAVAGCHGVFHTASPVTDDPEQMVEPAVRGTEYVINAAAEAGTVRRVVFTSSIGAVTMDPNRGPDVVVDESCWSDLDYCKETRNWYCYGKAVAEQAAWEAARRRGVELVVVNPVLVIGPLLQPTVNASVAHILKYLDGSASKFANAVQAYVDVRDVAAAHLLVFESPSAAGRFLCAESVLHREGVVRILAKLFPEYPVPTRCSDEKNPRKQPYKMSNQKLRDLGLEFRPASQSLYETVKCLQEKGHLPVLAAEKTEEEAGEVQGGIAIRA

SEQ ID NO: 120448 - DNA, 1074 bp, Oryza sativa (japonica cultivar-group)
  CDS (1)..(1074)
atgaccgtcgtcgtcgttgccgatgacgccgccgccgccgcagcggcggcgcagcagcaggaggagctgccgccggggcacggccaaacggtgtgtgtcaccggcgccgccgggtacatcgcgtcgtggctcgtcaagctgctgctggagaggggctacaccgtgaagggcacagtgagaaacccagatgacccgaagaacgcccacctgaaggcgctggacggcgccgacgagaggctggtcctctgcaaggccgacctcctcgactacgactccatccgcgccgccgtcgacggctgccacggcgtgttccacaccgcctcccccgtcaccgatgaccctgagcagatggtggagccggcggtgcgggggacggagtacgtgataaaggcggcggcggaggccggcacggtgcgccgggtggtgttcacgtcgtccatcggcgccgtcaccatggaccccaaccgcggccccgacgtggtcgtcgacgagtcctgctggagcgacctcgagttctgcaagaaaaccaagaactggtactgctacggtaaggcggtggcagagcaggaggcgtgcaaggcggccgaagagcgcggcgtcgacctcgtcgtcgtcagccccgtgctggtggtcggcccgctgctgcagccgacggtgaacgccagcgccgtgcacatcctcaagtacctcgacggctcggccaagaagtacgccaatgccgtgcaggcgtacgtggacgtgcgcgacgtcgcggctgcgcacgtccgcgtcttcgaggcgccggaggcctccggccggcacctctgcgccgagcgcgtcctgcaccgtgaggacgtcgtccacatcctcggcaagctcttccccgagtatcctgtgcccacaaggtgctctgacgaggtgaacccacggaagcagccgtacaagatgtccaacaagaagctgcaggatcttggcctccacttcatacctgtgagcgactcgctctacgagacggtgaagagcctccaggagaaggggcaccttccagttctgagcaaagagatcccagaagagttgaatggtgtgccagcatga

SEQ ID NO: 120449 - protein, 357 aa, Oryza sativa (japonica cultivar-group)
MTVVVVADDAAAAAAAAQQQEELPPGHGQTVCVTGAAGYIASWLVKLLLERGYTVKGTVRNPDDPKNAHLKALDGADERLVLCKADLLDYDSIRAAVDGCHGVFHTASPVTDDPEQMVEPAVRGTEYVIKAAAEAGTVRRVVFTSSIGAVTMDPNRGPDVVVDESCWSDLEFCKKTKNWYCYGKAVAEQEACKAAEERGVDLVVVSPVLVVGPLLQPTVNASAVHILKYLDGSAKKYANAVQAYVDVRDVAAAHVRVFEAPEASGRHLCAERVLHREDVVHILGKLFPEYPVPTRCSDEVNPRKQPYKMSNKKLQDLGLHFIPVSDSLYETVKSLQEKGHLPVLSKEIPEELNGVPA

SEQ ID NO: 120450 - DNA, 1014 bp, Arabidopsis thaliana
  CDS (1)..(1014)
atgccagtcgacgtagcctcaccggccggaaaaaccgtctgcgtcaccggagctggtggatacatcgcttcttggattgttaagatacttctcgagagaggttacacagtcaaaggaaccgtacggaatccagatgatccgaagaacacacatttgagagaactagaaggaggaaaggagagactgattctgtgcaaagcagatcttcaggactacgaggctcttaaggcggcgattgatggttgcgacggcgtctttcacacggcttctcctgtcaccgacgatccggaacaaatggtggagccggccgtgaatggagccaagtttgtaattaatgctgcggctgaggccaaggtcaagcgcgtggtcatcacctcctccattggtgccgtctacatggacccgaaccgtgaccctgaggctgtcgttgacgaaagttgttggagtgatcttgacttctgcaaaaacaccaagaattggtattgttacggcaagatggtggcggaacaagcggcgtgggagacagcaaaggagaaaggtgttgacttggtggtgttgaatccggtgctggttcttggaccgccgttacagccgacgatcaacgccagtctttaccacgtcctcaaatatctaaccggctcggctaagacttatgctaatttgactcaagcttatgtggatgttcgcgatgtcgcgctggctcatgttctggtctatgaggcaccctcggcctccggacgttatctcctagccgagagtgctcgccaccgcggggaagttgttgagattctggctaagctattcccggagtatcctcttccgaccaagtgcaaggacgagaagaaccctagagccaagccatacaaattcactaaccagaagattaaggacttaggcttagagttcacttccaccaagcaaagcctctacgacacacatcgcaagaatccgtggaaaatggcattaagatcgggtcttgaaaagcttattaattccctcaagtatcccccttaa

SEQ ID NO: 120451 - protein, 337 aa, Arabidopsis thaliana
MPVDVASPAGKTVCVTGAGGYIASWIVKILLERGYTVKGTVRNPDDPKNTHLRELEGGKERLILCKADLQDYEALKAAIDGCDGVFHTASPVTDDPEQMVEPAVNGAKFVINAAAEAKVKRVVITSSIGAVYMDPNRDPEAVVDESCWSDLDFCKNTKNWYCYGKMVAEQAAWETAKEKGVDLVVLNPVLVLGPPLQPTINASLYHVLKYLTGSAKTYANLTQAYVDVRDVALAHVLVYEAPSASGRYLLAESARHRGEVVEILAKLFPEYPLPTKCKDEKNPRAKPYKFTNQKIKDLGLEFTSTKQSLYDTHRKNPWKMALRSGLEKLINSLKYPP

SEQ ID NO: 120452 - DNA, 969 bp, Arabidopsis thaliana
  CDS (1)..(969)
atgaactgcggaggaaaggtggtctgcgttaccggagcttccggctacatagcgtcttggattgtcaagcttttgctcctccgtggctacaccgtcaatgccactgttcgagatccaaaggacaagaagaaaacagaacatcttcttgcactagacggtgcaaaagaaagactcaaattgttcaaagcagatcttttggaagaatcttcttttgatcaagctatcgatggttgtgatgctgtcttccacactgcttctccagttctattcactgtcacagatcctcagactgagctgattgatccagccttaaagggtactattaacgtccttaatacatgcaaacaagtttcttctgtcaagagggtcattctgacatcttccacggctgcggttctctctcgtcagcctcctattgggccaaacgacctggtggacgagactttcttctccgatccaagtctatgcagggagacaaagaattggtattcactctccaagattttggccgagaatgcagcgtggcaatttgccaaagacaatggaatcgacatggttgtgttgaatcctggatttatttgcggaccactcttgcaaccaactcttaacatgtcggtagagctaattgtggatttcataaatggtaagaaccctttcaataaaagatactacaggttctcggacgtaagagatgtcgccttggttcatatcaaagcgttggagactccttcagccaatggcagatacatcatcgatggtccaaatatgagtgtaaacgacattatagacattcttcggaagctgttcccagatttgtctattgctgatacgaatgaagaaagtgagatgaatgagatgatatgccaagtgtgtgtggagaaagtgaaaaatttgggagtagagttcactcctatgaaatcaagccttagagacactattgttagcctcaaggagaaatgtcttttatga

SEQ ID NO: 120453 - protein, 322 aa, Arabidopsis thaliana
MNCGGKVVCVTGASGYIASWIVKLLLLRGYTVNATVRDPKDKKKTEHLLALDGAKERLKLFKADLLEESSFDQAIDGCDAVFHTASPVLFTVTDPQTELIDPALKGTINVLNTCKQVSSVKRVILTSSTAAVLSRQPPIGPNDLVDETFFSDPSLCRETKNWYSLSKILAENAAWQFAKDNGIDMVVLNPGFICGPLLQPTLNMSVELIVDFINGKNPFNKRYYRFSDVRDVALVHIKALETPSANGRYIIDGPNMSVNDIIDILRKLFPDLSIADTNEESEMNEMICQVCVEKVKNLGVEFTPMKSSLRDTIVSLKEKCLL

SEQ ID NO: 120454 - DNA, 969 bp, Arabidopsis thaliana
  CDS (1)..(969)
atggctgacggaggaaaaatggtttgcgtcactggagcgtccggttacgttgcgtcttggattgttaagcttttgctcctccgtggctacactgttagggccaccgttcgagacccaagtgatgaaaagaaaacagaacatcttcttgcactagacggtgcaaaagaaaaactcaaactgttcaaagcagatcttctggaagaaggttctttcgagcaagctattgaaggttgtgacgctgtcttccataccgcttctccagtttcactaactgtaactgatcctcagattgagctgattgacccggcagtaaagggaacacttaacgtccttaaaacttgcgctaaagtttcatctgttaagagggtcatcgtaacatcgtccatggccgcagttctctttcgtgagcctaccttgggaccaaacgacttagtagacgagagttgcttctcggatccaaacttttgcactgagaaaaagctttggtatgcgctctcaaagactttggccgaagatgaagcatggcgattcgcaaaggaaaaagggctcgacttggtcgtaataaatccaggacttgtgctcggaccgctcttgaaaccaagccttactttctcagtaaatgtgattgtggaacttattacaggtaaggacaatttcatcaacaaggattttaggctcgtcgatgtgagggatgttgccctcgctcatatcaaagcgttcgagactccttcagccaacggtagatatattattgagggtccggttgtgacgataaatgacattgagaagattttgcgtgaattctttcctgacttgaatctcggtaacaagggtgaagcaagtgagatcattccagtgatatacaagctatgtgttgagaaagtgaagagtttgggaattgagttcactcccacagaagcaacccttagagacactattcttagcctcaaagagaaatgtcttgtgtga

SEQ ID NO: 120455 - protein, 322 aa, Arabidopsis thaliana
MADGGKMVCVTGASGYVASWIVKLLLLRGYTVRATVRDPSDEKKTEHLLALDGAKEKLKLFKADLLEEGSFEQAIEGCDAVFHTASPVSLTVTDPQIELIDPAVKGTLNVLKTCAKVSSVKRVIVTSSMAAVLFREPTLGPNDLVDESCFSDPNFCTEKKLWYALSKTLAEDEAWRFAKEKGLDLVVINPGLVLGPLLKPSLTFSVNVIVELITGKDNFINKDFRLVDVRDVALAHIKAFETPSANGRYIIEGPVVTINDIEKILREFFPDLNLGNKGEASEIIPVIYKLCVEKVKSLGIEFTPTEATLRDTILSLKEKCLV

SEQ ID NO: 120456 - DNA, 1035 bp, Arabidopsis thaliana
  CDS (1)..(1035)
atgccagtcgacgtagcctcaccggccggaaaaaccgtctgcgtcaccggagctggtggatacatcgcttcttggattgttaagatacttctcgagagaggttacacagtcaaaggaaccgtacggaatccagatgatccgaagaacacacatttgagagaactagaaggaggaaaggagagactgattctgtgcaaagcagatcttcaggactacgaggctcttaaggcggcgattgatggttgcgacggcgtctttcacacggcttctcctgtcaccgacgatccggaacaaatggtggagccggccgtgaatggagccaagtttgtaattaatgctgcggctgaggccaaggtcaagcgcgtggtcatcacctcctccattggtgccgtctacatggacccgaaccgtgaccctgaggctgtcgttgacgaaagttgttggagtgatcttgacttctgcaaaaacaccaagaattggtattgttacggcaagatggtggcggaacaagcggcgtgggagacagcaaaggagaaaggtgttgacttggtggtgttgaatccggtgctggttcttggaccgccgttacagccgacgatcaacgccagtctttaccacgtcctcaaatatctaaccggctcggctaagacttatgctaatttgactcaagcttatgtggatgttcgcgatgtcgcgctggctcatgttctggtctatgaggcaccctcggcctccggacgttatctcctagccgagagtgctcgccaccgcggggaagttgttgagattctggctaagctattcccggagtatcctcttccgaccaagtgcaaggacgagaagaaccctagagccaagccatacaaattcactaaccagaagattaaggacttaggcttagagttcacttccaccaagcaaagcctctacgacacagtcaagagcttacaagagaaaggccatcttgctcctcctcctcctcctccttcagcatcgcaagaatccgtggaaaatggcattaagatcgggtcttga

SEQ ID NO: 120457 - protein, 344 aa, Arabidopsis thaliana
MPVDVASPAGKTVCVTGAGGYIASWIVKILLERGYTVKGTVRNPDDPKNTHLRELEGGKERLILCKADLQDYEALKAAIDGCDGVFHTASPVTDDPEQMVEPAVNGAKFVINAAAEAKVKRVVITSSIGAVYMDPNRDPEAVVDESCWSDLDFCKNTKNWYCYGKMVAEQAAWETAKEKGVDLVVLNPVLVLGPPLQPTINASLYHVLKYLTGSAKTYANLTQAYVDVRDVALAHVLVYEAPSASGRYLLAESARHRGEVVEILAKLFPEYPLPTKCKDEKNPRAKPYKFTNQKIKDLGLEFTSTKQSLYDTVKSLQEKGHLAPPPPPPSASQESVENGIKIGS

SEQ ID NO: 120458 - DNA, 960 bp, Arabidopsis thaliana
  CDS (1)..(960)
atgaacggcgaaggaaaggttgtttgcgtcaccggagcttccggatacatagcttcttggattgttaagcttttgctcctccgtggctacaccgtcagggccaccgtccgaaacccaatggatacaaagaaaacaaatcatcttcttacacttgaaggtgcaagtgaaagactaaaactgttcaaatcagatcttttggaagaaggttctttcgatcaagctatagagggatgcgacggtgtcttccatactgcctctccagtttcattaaccgttacagatcctcagactgagatgatcgatccggcggttaatggtactttgaacgttttgagaacgtgcgccaaagtttcttctgtgaagagggtcattgtaacatcgtccactgctgctactctttctattaacccaaacgacgtggtggacgaaaccgtcttcaccgatctaagtgtttacttagcgatgaaggcatggtatggatattcaaaaactttggctgaggaaacagcgtggcggtttgctaaagaaaacgggatcgatttggttgtaatgaatccaggaaacgtgatcggaccagttttgcagccaactcttaattactctgtagaagtgattgtggatctgataaatggtaaaaacccttccaatagtttttactataggttcatggacgtgagagatgtttctcttgctcatatcaaagcgttcgaggtcccttctgctagtggcagatacatacttgctgatccagatgtaacaatgaaagacattcaaaagcttttacatgaactgtttcctgatttgtgccgtgttgataaggataatgagaatgaggtgggtgaaatggcatacaaagtgtgtgtcgataaattgaaaagtttgggaattgagttcactcctatcaaagaatctctcaaggatactgttgttagccttaaggagaggtgtcttcttatatga

SEQ ID NO: 120459 - protein, 319 aa, Arabidopsis thaliana
MNGEGKVVCVTGASGYIASWIVKLLLLRGYTVRATVRNPMDTKKTNHLLTLEGASERLKLFKSDLLEEGSFDQAIEGCDGVFHTASPVSLTVTDPQTEMIDPAVNGTLNVLRTCAKVSSVKRVIVTSSTAATLSINPNDVVDETVFTDLSVYLAMKAWYGYSKTLAEETAWRFAKENGIDLVVMNPGNVIGPVLQPTLNYSVEVIVDLINGKNPSNSFYYRFMDVRDVSLAHIKAFEVPSASGRYILADPDVTMKDIQKLLHELFPDLCRVDKDNENEVGEMAYKVCVDKLKSLGIEFTPIKESLKDTVVSLKERCLLI

SEQ ID NO: 120460 - DNA, 978 bp, Arabidopsis thaliana
  CDS (1)..(978)
atggctgtaaagcaaaaggtctgtgttactggtgcaggagggtttattgcttcatggctcgtcaagtttcttctctctcgtggctacactgtccatggaaccgttcgagatccttgtgatgaaaagaatgaccatttgaggaaactggataatgcttcaaaaaatctgaaacttttcaaggcagatttgtttgatgatgaaggtcttttctcagccattgatggttgctctggcgttttccatatcgcttctcctgtgccttttgaaggagttcctctcacagaggaagaactgattaaaccagctctcactggcaccaagaatgttctagaagcatgcacagaaaccaaagtgcagaaagttgtggttgtatcatcaatcgctgcagttgtttacaatccaaaatggcctcaagatgttgctaaggacgaggattgttggtcagacactcaataccttcactcacttgagggttattggcgttattactatcttgccaaaacattaacggaacgtgaagctttagagtggagtaagagaaactttgctgatgttgttacgctctgtccgtctgtcattataggccctaggcttcaatccacgcttaactctagtagtttgggacttctcaagttcataaaaggtggtataaagtccttgttgagcgatgaactgtatcttgtggatgtgcgtgatgttgcggatgcgcttttgttggtgtatgaaaatcgagaagcaacaggaagatacatatgtaattctcattcactttacactgattctcttatggagaagctcaagaatatgtatcctaaacgcaacttccctgaaagtttcacggaggtaaaagagaaggaagtgaggcctctaagtgcagagaagttgaaaaacttggggtggaagtttaggccattagaagaaaccattgatgattctgttgtgagctttgaagcagctggtgatcttccaaaggcataa

SEQ ID NO: 120461 - protein, 325 aa, Arabidopsis thaliana
MAVKQKVCVTGAGGFIASWLVKFLLSRGYTVHGTVRDPCDEKNDHLRKLDNASKNLKLFKADLFDDEGLFSAIDGCSGVFHIASPVPFEGVPLTEEELIKPALTGTKNVLEACTETKVQKVVVVSSIAAVVYNPKWPQDVAKDEDCWSDTQYLHSLEGYWRYYYLAKTLTEREALEWSKRNFADVVTLCPSVIIGPRLQSTLNSSSLGLLKFIKGGIKSLLSDELYLVDVRDVADALLLVYENREATGRYICNSHSLYTDSLMEKLKNMYPKRNFPESFTEVKEKEVRPLSAEKLKNLGWKFRPLEETIDDSVVSFEAAGDLPKA

SEQ ID NO: 120462 - DNA, 999 bp, Arabidopsis thaliana
  CDS (1)..(999)
atgcttgtcgacgggaaactcgtctgcgtcaccggagccggcggctacattgcttcttggatcgttaagttactcttagagagaggctacaccgttagaggaaccgtaaggaacccaactgatcccaagaacaaccatctcagagagcttcaaggagccaaggaaagactcactcttcacagtgcagatcttctcgactacgaagctctctgtgccacaatcgacggttgcgatggcgttttccacactgcctctccgatgaccgacgatcccgagacaatgttggagccggcggtgaacggagccaagttcgtgattgacgcagcggctaaagccaaggtcaagcgcgtggttttcacgtcatcaattggtgcagtttacatgaaccctaaccgtgacactcaagccattgttgacgaaaactgctggagtgatcttgatttctgcaaaaacactaagaattggtattgctacgggaagatgttggcggaacaatcggcatgggagacggccaaagcaaaaggtgtggacttagtggtgctaaatccggttttggttctcggaccaccgctccagtcagcgatcaacgctagtctagtccatattctcaagtacctcaccggctcagccaagacctacgctaacttgactcaggtctacgtggacgtccgtgacgtggcactaggccatgttctggtctacgaagcaccctccgcctcaggccgttacatcctcgccgagaccgcacttcaccgcggagaggttgttgagattctggccaaattcttcccggagtatccacttcccaccaagtgttcggacgagaagaatccgagggctaagccatacaagtttactacccaaaagataaaagacttaggcttggaatttaaacccatcaagcaatctctttacgaatctgtcaagagcttgcaagagaaaggccatcttcctctacctcaagattcgaaccaaaacgaagtcatcatcgaatcttag

SEQ ID NO: 120463 - protein, 332 aa, Arabidopsis thaliana
MLVDGKLVCVTGAGGYIASWIVKLLLERGYTVRGTVRNPTDPKNNHLRELQGAKERLTLHSADLLDYEALCATIDGCDGVFHTASPMTDDPETMLEPAVNGAKFVIDAAAKAKVKRVVFTSSIGAVYMNPNRDTQAIVDENCWSDLDFCKNTKNWYCYGKMLAEQSAWETAKAKGVDLVVLNPVLVLGPPLQSAINASLVHILKYLTGSAKTYANLTQVYVDVRDVALGHVLVYEAPSASGRYILAETALHRGEVVEILAKFFPEYPLPTKCSDEKNPRAKPYKFTTQKIKDLGLEFKPIKQSLYESVKSLQEKGHLPLPQDSNQNEVIIES

SEQ ID NO: 120464 - DNA, 1038 bp, Lactococcus lactis subsp. lactis Il1403
  CDS (1)..(1038): transl_table=11
atgacaaatacaaataaaaaaacaattcttgtaacaggtggttctggatatattgctatgtttatcatgattgctttattgaaaaaaggctatcgagtacgggcgacattgcggacgatgtctcgacaagaagaagtgaaaaaaatgatggcacaaggcggaatttcagattttacagatttagattttgtacaaactgatttgacaaaagaagaaggatggagtcaagccatgactggtgttgattctgtgattcatgtgtcttcaccaacacctttgcaacgtcctgacgctgatgatttaatggtgaaaatggctgtagatggagtgaagtttgtgatgaaagcggccaaggaagcaggagttgaacgagtggttttgacctcagcatcgggagcagttttagcggggcataaggatcatccagaaatcttcacagagagagattggacaaaccttgatgctccaattaatgcatatcaacgttctaaaacgatggcggaaatggagttttggaaacttgcagaagcttatggtattgaaggagcatcggttttacctacagctgttatgggtccaattcttggaaatgatttttcacattctagtgcggctataaaaaatatgtttgaaggtaaaatgcccagacttttaaatttagcatttgattatgttgacgttcgtgatgttgctgatttacatttgctagctcttgagaaaaaagaagcgattggtcagcgtttcattgcaacttcaggccaaaatattacttacaaaaagcaagctgagtttttgaaaaaggaatttggtacaaaagctaaaaaagtatctactcaggtaattcccgactttttagttaaaattttagctcgatttgataaaagtttggcgatgccagctacatttttggggcaaaacacagcttgttcaaatgaaaaatcagttaaacttttaggctggaaaccacgttcaggtgaagcagcgattattcaaacggcacaaacgatgttggatttgggagttattaaagttgattaa

SEQ ID NO: 120465 - protein, 345 aa, Lactococcus lactis subsp. lactis Il1403
MTNTNKKTILVTGGSGYIAMFIMIALLKKGYRVRATLRTMSRQEEVKKMMAQGGISDFTDLDFVQTDLTKEEGWSQAMTGVDSVIHVSSPTPLQRPDADDLMVKMAVDGVKFVMKAAKEAGVERVVLTSASGAVLAGHKDHPEIFTERDWTNLDAPINAYQRSKTMAEMEFWKLAEAYGIEGASVLPTAVMGPILGNDFSHSSAAIKNMFEGKMPRLLNLAFDYVDVRDVADLHLLALEKKEAIGQRFIATSGQNITYKKQAEFLKKEFGTKAKKVSTQVIPDFLVKILARFDKSLAMPATFLGQNTACSNEKSVKLLGWKPRSGEAAIIQTAQTMLDLGVIKVD

SEQ ID NO: 120466 - DNA, 1029 bp, Clostridium acetobutylicum ATCC 824
  CDS (1)..(1029): transl_table=11
atgatgggaaaaggattggtattagtaacagggggaagtggtttcatagccgtacacataatcttgaaacttttaaatcagggatatggcgttcgagcaacgcttcgcacattatcacgtaaggatgaggtcaaatcaatgctagctcaaggaggtataactgattttgcaaatctagagttcattcagacagatttaacaagtgatatgaattggatggaagctgcaactggtgctacttacgtcattcatgtagcatcgccaacaccagccatacgtcctgacgatggagatgcaatggtgaaaatggcggttgatggtactttgcgtgtgatgaaggtggctaaagcagctggcgttaaacgtgtagtcctaacttctgcttcgggggcagtgctttcaggacataaatctcaccctgacatttttacagaggaagattggacgaacttgtcgggggatattgatgcgtatcaacgttcaaaaaccatggcagaactcgcggcttgggaatttgcaaagaaagagaatatggagttttcagttgtcaatccagtggcagtgatgggacctgtactaggcaaggacttttctcactccaatcaaattattcgttccatgcttactggaaaaatgccattcctcttaaaaattggttttgattacgttgatgtgcgagacgtagcagacttacatttgttagcaatgatacgttcagaagccgtaggacagcgatttattgctaccacaggggaaaatctcacatataaagaagaagcgaagattttacagagatctttaggcggcgcagctaaaaaagtctccataaaagaaatgccaaattttatcgtgaagtttttggcattttttatgaaggatttgcgtatgccagctacatttctaggccaaaacacagcctgtagcaatgcaaaagcaaaaaaattgcttggctggcagccaagatcagcagaagaagcaattatagcaactgggaaaagcatggttgaacttggattagttgataaatag

SEQ ID NO: 120467 - protein, 342 aa, Clostridium acetobutylicum ATCC 824
MMGKGLVLVTGGSGFIAVHIILKLLNQGYGVRATLRTLSRKDEVKSMLAQGGITDFANLEFIQTDLTSDMNWMEAATGATYVIHVASPTPAIRPDDGDAMVKMAVDGTLRVMKVAKAAGVKRVVLTSASGAVLSGHKSHPDIFTEEDWTNLSGDIDAYQRSKTMAELAAWEFAKKENMEFSVVNPVAVMGPVLGKDFSHSNQIIRSMLTGKMPFLLKIGFDYVDVRDVADLHLLAMIRSEAVGQRFIATTGENLTYKEEAKILQRSLGGAAKKVSIKEMPNFIVKFLAFFMKDLRMPATFLGQNTACSNAKAKKLLGWQPRSAEEAIIATGKSMVELGLVDK

SEQ ID NO: 120468 - DNA, 1011 bp, Schizosaccharomyces pombe 972h-
  CDS (1)..(1011)
atgagtggaaaattggtccttgttactggtgttacaggatttattggagcccacgtcgctgagcagctcctgcaagccggctaccgtgtgcgtggtacggtgagaagcatggaaaaggcagacgagcttattagactcaatcccggattaaaggataaaattgagtttgtaatcgtcaaggatgtctctgcttctaacgcttttgacggtgttttgaaagatgtggaattgatttgtcatatagcatcaccattctttgtggaaaacgttactgacaacaaatcccaacttttggaccctgccgtgaagggtactctcggcattttagaggctgctcaaggcgtaaagagtattaagcgcattgttattacttcatcttttgccgcagtgggcaatttccaaatcgaccctcataacaataaggtgtatactgagaaggattggaatcccattacctatgaggaggcattgaccactgataatggcattgtagcatactgtgcttcgaagaaactcgccgaagaggctgctcgagagtatgtaaaggaaaagaagccttcttatgatatttgtacgatcaatcctccttatgtgtatggtccaccaattcaccctatgaaaaatatggactctttaaatacctccaatcaaatattttggaaattaatcgatggatcgaaggaagccactccattttattattactatgttgatgtccgtgatgtagctgctgctcacgtttttgcccttgagaacgccaagttgtctaacggccgtatgcttgtctccaagggtgtattcactactggtgatatttgcaaggtccttcgcaaagaattccccaacaagtccgatgttattgccgagcccgtcgatataactgtggatcccagtttcttcaagttagacaactcattttccaagtctcttggattcaaatatcattccgacgaggaatgctatgttgacactgctaagaagttatgggaacgtgctgaggagtttaaataa

SEQ ID NO: 120469 - protein, 336 aa, Schizosaccharomyces pombe 972h-
MSGKLVLVTGVTGFIGAHVAEQLLQAGYRVRGTVRSMEKADELIRLNPGLKDKIEFVIVKDVSASNAFDGVLKDVELICHIASPFFVENVTDNKSQLLDPAVKGTLGILEAAQGVKSIKRIVITSSFAAVGNFQIDPHNNKVYTEKDWNPITYEEALTTDNGIVAYCASKKLAEEAAREYVKEKKPSYDICTINPPYVYGPPIHPMKNMDSLNTSNQIFWKLIDGSKEATPFYYYYVDVRDVAAAHVFALENAKLSNGRMLVSKGVFTTGDICKVLRKEFPNKSDVIAEPVDITVDPSFFKLDNSFSKSLGFKYHSDEECYVDTAKKLWERAEEFK

SEQ ID NO: 120470 - DNA, 1056 bp, Streptomyces avermitilis MA-4680
  CDS (1)..(1056): transl_table=11
atgagcacagaagacctctcattccccgaagacgagaaggtcctggtcaccggcggcagcggattcgtcggcgcccacacggtcgtccgcctgctgcgcgaggggcatcgcatccgagtggcagtccggggtcccgcacaggaggcgcaggtgctggcggcactccggcaggccggggtcgatcgggcggacctgctggagttcgcggtcgcggacctcagcgccgacgacggctgggcgcaggccatggacgggatcgcgcacgtcctgcaccacgcgtcgcccttcccgcccactcctcccgagacggaggacgaggtcatcctccccgcccgcgacggcgcgctgcgggtgatcgccgccgcccgcagcgccgggatcccccgggtcgtgatgacgtcctccttcgccgcggtcggatacaccctgacgcccgacgaccactacacggaggagaactggaccgatccgaacacccccggactgcccgcctaccacaagtcgaaggtgctggccgaggcggcggcgtgggactacgtcaagaccaacgggggcatcgagctggcggtcgtcaaccccaccggcatcttcggcccccaactcgtggaccggccctcaggatccatcggactgatcaaggccctcatggccggcgagatgcccgtcgtgccggtctggaactttggcgtcgtcgacgtgcgtgacgtcgtggacctgcatctgcgcgcgatgctgcacccggcggcggcgggcgagcgattcctcgccaacagcggatcgtcgagcctgttcaagatcgcgaacatccttcgcgagcaattccccgccgcggccgaccggctgcccgcgacggaactgaccatcgatcaggtacgcgaggccgcgaagaccgagcccgcgctgaaggacgccgccgtcctggggggcaggatccccgaaatcagccacgagaaggccagttccatccttggctgggagcccctggacgtcagggacaccatcgtggcaaccgcggaggccctgatcgagctgggcgcggtcaccctgccggagtag

SEQ ID NO: 120471 - protein, 351 aa, Streptomyces avermitilis MA-4680
MSTEDLSFPEDEKVLVTGGSGFVGAHTVVRLLREGHRIRVAVRGPAQEAQVLAALRQAGVDRADLLEFAVADLSADDGWAQAMDGIAHVLHHASPFPPTPPETEDEVILPARDGALRVIAAARSAGIPRVVMTSSFAAVGYTLTPDDHYTEENWTDPNTPGLPAYHKSKVLAEAAAWDYVKTNGGIELAVVNPTGIFGPQLVDRPSGSIGLIKALMAGEMPVVPVWNFGVVDVRDVVDLHLRAMLHPAAAGERFLANSGSSSLFKIANILREQFPAAADRLPATELTIDQVREAAKTEPALKDAAVLGGRIPEISHEKASSILGWEPLDVRDTIVATAEALIELGAVTLPE

SEQ ID NO: 120472 - DNA, 1071 bp, Strongylocentrotus purpuratus
  CDS (1)..(1071)
atggctgcaaacgtagaaagagttttggttactggcgcatcaggctacatagccactcacatcgtgaagcaactacaggaagctgggtacagggtcagaggaaccgtcagaagtgtatccaaccccgtcaaagttggacccctcaaggagctctgtcctaaccctgctcatgagctggaactggtggaagccgatctgaccaaagatgaaggatggaaagaagctgtccaaggatgcagccatgtcctgcacacagcgagtccgttccccttggctgccccgaagcacgaggacgaactcatcaaaccagccgtggacggtacagtcagggtgctacaggcgtgccaggaggtgggcggggtcgagagagttgtggtgaccagctcctgttatgcaatcagtgatttggctgagacccccaaagagcctctgacagaggaaaattggttgaaggtggagaagcttggtcttaacgcagcttacgccaagagcaaggcacttgctgaaagagctgcctgggacttcgttgaaaaacttccagctgaatccaagtttgagctggccgtcatcaatccgtccgtcgtgttgggtccggcgctgtgcggagctcctgggaccagcgtggagatcgtacgccgtatgatggaacgcgacccctccctggcagctaaggtcagctttccagtctgtgacatacgcgatgtcgctaaggcccacgtcgttgccatgacactacccgaggcagcaggtaatcggcacatcatcgctccatatacattatggtatctggagatggctaatgccctgagagaggaattcggcaagcagggctacaacccgccaacaagtttagccccgtattttttgctgaaggtgggtagctggtttgactcttccgcgaaaacgattgtccaaattcacggccacaaggttaatttctccgatcacagacttcgtcaagtcctcggcatcacaccgtacgatcccaaggttacactggtcgacatggcatactcgtgtattgatcgcggtttcatcgtgaagaagagtgcctacaaaccacgggactga

SEQ ID NO: 120473 - protein, 356 aa, Strongylocentrotus purpuratus
MAANVERVLVTGASGYIATHIVKQLQEAGYRVRGTVRSVSNPVKVGPLKELCPNPAHELELVEADLTKDEGWKEAVQGCSHVLHTASPFPLAAPKHEDELIKPAVDGTVRVLQACQEVGGVERVVVTSSCYAISDLAETPKEPLTEENWLKVEKLGLNAAYAKSKALAERAAWDFVEKLPAESKFELAVINPSVVLGPALCGAPGTSVEIVRRMMERDPSLAAKVSFPVCDIRDVAKAHVVAMTLPEAAGNRHIIAPYTLWYLEMANALREEFGKQGYNPPTSLAPYFLLKVGSWFDSSAKTIVQIHGHKVNFSDHRLRQVLGITPYDPKVTLVDMAYSCIDRGFIVKKSAYKPRD

SEQ ID NO: 120474 - DNA, 1056 bp, Magnaporthe grisea 70-15
  CDS (1)..(1056)
atgagctcaaaacccaaggttctcctcacaggcgggtctggcttcatagcagcccacacgcttgaccagctcctcgagaagggctacaaggtcatcacaaccgtgcggagtgaagagaaggccaagatcatccgcgatgcgcaccccaacgttgacaaggatgcgctggatattgccatcgttccagacattgccaagccggatgcgttcgacgaagtggtaaagatgccgggcatcgagcttgttctccacactgcgtcccccttccacttcaacatcggcgacccaaaggagctcatcgatcccgccgtgatcgggaccactggcattctcaaggcgatagctcgctccgcccctggcgtcaagcgggtggtgatcacgtcgtcgtttgccgccgttgtcgacccgaaccgcgcgacggaccctaacactgtgttcgacgaatcctcgtggaaccccatcactctggagaaggcgctttcgaacccgaacgacaaacccaatgcatacagagcatccaagaagttggcagaggaagcagcttgggcctttgtccgcgacccggcctcggatgtcaagttcgaccttgctacaatcaacccgcccatggttttgggacccgtggttccctatttcaccaatctcgaatccgtgaacacgtcgaatgagcgcatcgtgagtctgctgcgcggaaagtggaaggaggacaacgccattccggacacgggcctggcgtttatctggatcgacgtgcgcgatgttgcagaagctcacatccgcgccatggaggtccccgaagcaggcggaaagcgtcttttcacgacagcgggcaccttcagcaaccgcgaaatatatgaggtgaccaagaagcactttggagacaagtacgccgacaaactcccgcctagcgatgtcaagggtggtgacatcatgccggaagacaagcgctaccgcttcgacaactccgagacgaacaagatcttgggcatcaagtggcggactttggacgagagtatcgttgatgccatcaaatgtttccaggctgttggagtttag

SEQ ID NO: 120475 - protein, 351 aa, Magnaporthe grisea 70-15
MSSKPKVLLTGGSGFIAAHTLDQLLEKGYKVITTVRSEEKAKIIRDAHPNVDKDALDIAIVPDIAKPDAFDEVVKMPGIELVLHTASPFHFNIGDPKELIDPAVIGTTGILKAIARSAPGVKRVVITSSFAAVVDPNRATDPNTVFDESSWNPITLEKALSNPNDKPNAYRASKKLAEEAAWAFVRDPASDVKFDLATINPPMVLGPVVPYFTNLESVNTSNERIVSLLRGKWKEDNAIPDTGLAFIWIDVRDVAEAHIRAMEVPEAGGKRLFTTAGTFSNREIYEVTKKHFGDKYADKLPPSDVKGGDIMPEDKRYRFDNSETNKILGIKWRTLDESIVDAIKCFQAVGV

SEQ ID NO: 120476 - DNA, 1029 bp, Gibberella zeae PH-1
  CDS (1)..(1029)
atgaccaaggttctcctcaccggtggctcgggcttcatcgctgcccataccctggaacagcttctcgaaaaggattacagcatcgtcacaactgtccgctcagaggacaaggcccagaagatccgcaacgcattccccgacaaagtcaaggatggcaagttggagattgtcattgtaaccgacatcgcaaagcccgatgcttttgaccaagtggccaagactcccggcctcgatgccgttattcacgttgcaagcccctttcacttcaacatcaccgatcccaagaaggatctcatagatccagctgtcattggcacaacgggtatcctcaaagcccttcatgcttcagcacccaacgtcaagcgcgtggtcatcacttcatcattcgccgccatcatcgacgaggccaagttcacagacggatctcacgtcttttccgaaaagacatggaaccctgttaccattgacgacatcacccgttccgatacaactgcttaccgcgcttcaaagaccctcgctgaacgtgcagcctgggactttgtcgccgagaagaagccctctttcgatctcgtaacggtttgcccgcctctggttctgggtcccgtatcaaagcacctcgctactctggagagcatcaacacgtccaacgcccgtatcgtgaatcttttgcgaggcgagtggaaggacgagattcctccctgcacgcccgttcctctctggattgatgtgcgagatgctgcgcgcgcacacgttcgaggtcttgaagagcccagcgctggagggaagcgactctttaccacggcaggattattctcacaccgtgagattgtcgacattattgctgagaaattcccagagttcaaggataggctccctgggcctgaagtcaagggcggagaactccctcccaaagaccagatttttggaatcgataataaggagacgaacgagctgctcaagattgactggctcacagtggaaaagagtatgacggatctggttgagtcactcaaggagattggcatctag

SEQ ID NO: 120477 - protein, 342 aa, Gibberella zeae PH-1
MTKVLLTGGSGFIAAHTLEQLLEKDYSIVTTVRSEDKAQKIRNAFPDKVKDGKLEIVIVTDIAKPDAFDQVAKTPGLDAVIHVASPFHFNITDPKKDLIDPAVIGTTGILKALHASAPNVKRVVITSSFAAIIDEAKFTDGSHVFSEKTWNPVTIDDITRSDTTAYRASKTLAERAAWDFVAEKKPSFDLVTVCPPLVLGPVSKHLATLESINTSNARIVNLLRGEWKDEIPPCTPVPLWIDVRDAARAHVRGLEEPSAGGKRLFTTAGLFSHREIVDIIAEKFPEFKDRLPGPEVKGGELPPKDQIFGIDNKETNELLKIDWLTVEKSMTDLVESLKEIGI

SEQ ID NO: 120478 - DNA, 1002 bp, Gibberella zeae PH-1
  CDS (1)..(1002)
atgtctgataagcctatcgtcttggtaactggtgccaatggttacattgccggcagtgtcgttgaggcttttctcaaagcaggatatgctgttcgaggcactgtccgatcaaaggcctctggagattccctcgtaaaggctctttcttcatatggaagtgaccttgagattgttcaagtgccggacattgttgctcctggagctttcgatacagctgtcaaggctgccggcgtgagtttaagcttcacagaccctgatcctgttcttgaagtggccatcaaaggcacggagagcgtcctggagtctgctctcaccgagccgtcaataaaatcggttgtcttgatgtcgtctattgctgccatatctgcaactggcaacccctcttcaaaccgagtcacggaagccgactggaacgatgctgctttggatgccgtcaagaaactcggcaaagcgtcgcccagtccattaatctacgttgcgagtaaagtagctggcgagcgagccttctggaagtttcgcgacgaaaagaagccttctttcacaatgactgctctcaaccctactttcgtcatgggaccacagccaggcctcgagtcaatctccaagattggtggcactactgctttcatttggcaggtgttctcaggccaggatatccccaaaccaatagtcccgaaccccagctttgtcgatgcgcgagatattgcccgagttgcagtatttagtgtcgaccatcctgaaaaggcgaatggggagcgatttctgttgacagcgggccttgtacctccccaggctgctgcggatgtgcttcgcaaggcatatcccgataggcaggacattatcaaggttggacagcctggcgagggatactatcccggttatgcctttcccgaagaaaagatccttgatgcttccaagacgatcaagttgacagggcaggacttttacccggttgagaagtcaatcatcgacacggccaagtctttggagaagttcttgtag

SEQ ID NO: 120479 - protein, 333 aa, Gibberella zeae PH-1
MSDKPIVLVTGANGYIAGSVVEAFLKAGYAVRGTVRSKASGDSLVKALSSYGSDLEIVQVPDIVAPGAFDTAVKAAGVSLSFTDPDPVLEVAIKGTESVLESALTEPSIKSVVLMSSIAAISATGNPSSNRVTEADWNDAALDAVKKLGKASPSPLIYVASKVAGERAFWKFRDEKKPSFTMTALNPTFVMGPQPGLESISKIGGTTAFIWQVFSGQDIPKPIVPNPSFVDARDIARVAVFSVDHPEKANGERFLLTAGLVPPQAAADVLRKAYPDRQDIIKVGQPGEGYYPGYAFPEEKILDASKTIKLTGQDFYPVEKSIIDTAKSLEKFL

SEQ ID NO: 120480 - DNA, 1059 bp, Candida glabrata CBS 138
  CDS (1)..(1059)
atggcttctgataacagcaacacaactgtctttgtctctggtgctactggtttcattgctcagcacgtagttagacaattgcttgaccagaactacaaggttattggttctgttagatctgctgagaagggtgaccacttgaagaatgttatcttcaaaggtggtgacttcaactatgagattgtcaaagacatctctgatccaaccgcatttgaccacgtcttcgagaagcatggcaaggatatcaaggtagtcttacacaccgcctctccattccacttcaacactactgacattgaaaaggatttgttgattccagctgtcaacggtaccaagggtatcttagaatccatcaagaagtacgctgctcaaacagttgagagagttgttgttacttcctcctttgctgccaacacctccacagttgacatgttctacgctaaggattcttccaagacaattactgaagaatcttggaaccaagacacttgggaaagttgtcaatccgatccaatcagaggttactgtggttcaaagaagtttgccgaaaaggcggcttgggacttctacaacgccaacaaggactctgtcaaatttaagttgtctatcatcaacccagtatacgtcttcggtccacaaaactatgtggaaccaggtaagaagattctaaacacttcttctgaagtcatcaacagcttggtccacttgaagaaggatgacccattgccagagtttgcaggtggtcacatcgacgtccgtgatgttgccaaggctcatatcctagcgttccaaaaggacgagttgatcgagcaaagattgatgcttcatgctggtctattcactacccaaaccctgctagatatcattaatgaacaattcccagaactgaaaggtaagattccagctggtaagccaggtaccggtaacccagatgatgcattgactccagttgacaactccaagaccaagaaattgctgggcttcgagtttattgatttgaagaaggacctttacgacaccatctctcaaattttggaagccgagaagaactctaattaa

SEQ ID NO: 120481 - protein, 352 aa, Candida glabrata CBS 138
MASDNSNTTVFVSGATGFIAQHVVRQLLDQNYKVIGSVRSAEKGDHLKNVIFKGGDFNYEIVKDISDPTAFDHVFEKHGKDIKVVLHTASPFHFNTTDIEKDLLIPAVNGTKGILESIKKYAAQTVERVVVTSSFAANTSTVDMFYAKDSSKTITEESWNQDTWESCQSDPIRGYCGSKKFAEKAAWDFYNANKDSVKFKLSIINPVYVFGPQNYVEPGKKILNTSSEVINSLVHLKKDDPLPEFAGGHIDVRDVAKAHILAFQKDELIEQRLMLHAGLFTTQTLLDIINEQFPELKGKIPAGKPGTGNPDDALTPVDNSKTKKLLGFEFIDLKKDLYDTISQILEAEKNSN

SEQ ID NO: 120482 - DNA, 1056 bp, Candida glabrata CBS 138
  CDS (1)..(1056)
atgactgctgctaataacaacactactgtttttgtctccggtgcttccggtttcattgctcaacacatcatcagacaattgctagaccagaactacaaggtcattggttctgttagatctacagagaagggtgacaacctgaagaatgctatcttcaaaagtgctaacttcaactatgagatcgtcaaggatatcgctgatctaaatgcttttgaccctgtcttcgagaagcacggtaaggatatcaaggttgtcctacacaccgcctctcctttaaacttcactactaccgaatacgaaaaggatttgttgattccagctgtcaacggtaccaagggtatcttagagtccatcaagaagtacgctgcccaaacagttgagagagttgttgttacttcctcctttgcttctcacacttccactgttgacatgtgcaacaccaagggtaagataactgaagactcctggaaccaagactcctgggaaaactgtcaaacggatgccgttagagcttacttcggttccaagaaatttgctgaagaagctgcatgggaattcttgaacaagaacaaagatgcagttaagttcaagttggccactgttgacccagtgtacgtcttcggtcctcaaaaccacatcgagcctggcaagaaggtattgaacgtctcatccgaagtcattaaccaattggtacacctgaagaaagacgacccattgccacaagtagcatgtggttacatcgatgtccgtgacattgctaaggctcatatcctagcgttccaaaaggatgaattaatcggtcaaagactgttgctacactctggtttgttcaccgtccaaaccctactggatgctatcaacgagcaattcccagagctaagaggtaagatcccagctggtgagccaggttccaacaagccagaagatctactgactccaattgacaacaccaagaccaagaagctgctaggattcgagttccgtgacctgaagaccatcatccaggacaccgtctctcaaatcctagaagctgagaatgccagtgccaagttgtaa

SEQ ID NO: 120483 - protein, 351 aa, Candida glabrata CBS 138
MTAANNNTTVFVSGASGFIAQHIIRQLLDQNYKVIGSVRSTEKGDNLKNAIFKSANFNYEIVKDIADLNAFDPVFEKHGKDIKVVLHTASPLNFTTTEYEKDLLIPAVNGTKGILESIKKYAAQTVERVVVTSSFASHTSTVDMCNTKGKITEDSWNQDSWENCQTDAVRAYFGSKKFAEEAAWEFLNKNKDAVKFKLATVDPVYVFGPQNHIEPGKKVLNVSSEVINQLVHLKKDDPLPQVACGYIDVRDIAKAHILAFQKDELIGQRLLLHSGLFTVQTLLDAINEQFPELRGKIPAGEPGSNKPEDLLTPIDNTKTKKLLGFEFRDLKTIIQDTVSQILEAENASAKL

SEQ ID NO: 120484 - DNA, 1080 bp, Kluyveromyces lactis NRRL Y-1140
  CDS (1)..(1080)
atgtctgcaaaggttttattgacaggtgcttcaggttttattgcgctgcatgttttagatcagctgctagctgctggttatgaagtcgttggtacagttcgttctgaagaaaaagctgagccaattaagaaggaattggctaaggaacacccaaatggtaagtaccaattcgaagtcgttgttgatatcgcagctccaaacgctttcgatgctgttttccaaaagcacactgacttgaaatacgtcctgcacactgcttctccattctcgtttggtttgacaaagagcaacgaagaaaactacttgattccggccactcacggtaccaagtctgtccttgagtctattcaaaaatacggtaagaacgtcgaacatgtaattgttacatcttcctatgcagctatcatgcgcttagatcatgccggtgacccaaatttcattcatgatgaaacttcttggaatcctatcacctgggaagaagctcgtgaaaactccgttactgcatacattgcttctaagaaatatgccgaaaagttggcctgggattttgtaaaggacaacaattctacattcaatttgactacagtgaaccctccatacgttttcggtccacaaaaattcactttcggtttggctaagtcttccttgaatacctctgctgatatcgttaatcaagccttgaagacaactccagaatatgaaggcccatttaaccagccagctggtcttgcttgtgatgtccgtgatgtcgccaagttacatgtcttgccattgggtaagaaagaattcaatggtcaaagactattcccggtcagtgacactggatatggaattgaggaatacgaaaaaggtaagttcaacttcgaaaagatcctacgtattttgaacgaaaagttgcctgaattgaagggtaagatttctccaggcggcatcaaggataatgaagctgaattagcgaaattggactactacagaaacaagactacaacagatttgactaagctaacgttctacaagtttgaagatactgtctatgatgccacaaagcaaatcttagattacgaagcctctcaaaagtaa

SEQ ID NO: 120485 - protein, 359 aa, Kluyveromyces lactis NRRL Y-1140
MSAKVLLTGASGFIALHVLDQLLAAGYEVVGTVRSEEKAEPIKKELAKEHPNGKYQFEVVVDIAAPNAFDAVFQKHTDLKYVLHTASPFSFGLTKSNEENYLIPATHGTKSVLESIQKYGKNVEHVIVTSSYAAIMRLDHAGDPNFIHDETSWNPITWEEARENSVTAYIASKKYAEKLAWDFVKDNNSTFNLTTVNPPYVFGPQKFTFGLAKSSLNTSADIVNQALKTTPEYEGPFNQPAGLACDVRDVAKLHVLPLGKKEFNGQRLFPVSDTGYGIEEYEKGKFNFEKILRILNEKLPELKGKISPGGIKDNEAELAKLDYYRNKTTTDLTKLTFYKFEDTVYDATKQILDYEASQK

SEQ ID NO: 120486 - DNA, 1080 bp, Kluyveromyces lactis NRRL Y-1140
  CDS (1)..(1080)
atgtctgctaaagttttattgacaggtgcgtcaggtttcatagcgttgcatgttttagatcagctgctagctgctggttatgaagtcgttggtacagttcgttctgaagaaaaagctgagccaattaagaaggaattggctaaggaacacccaaatggtaagtaccaattcgaagtcgttgttgatatcgcagctccaaacgctttcgatgctgttttccaaaagcacactgacttgaaatacgtcctgcacactgcttctccattctcgtttggtttgacaaagagcaacgaagaaaactacttgattccggccactcacggtaccaagtctgtccttgagtctattcaaaaatacggtaagaacgtcgaacatgtagtagttacttcttcctttgcagccattgtacacagacaccgctctggtgacccaactttcatcaatgatgaaactacttggaacccggtcatttgggaagacgctcgtgaagatgccgctacttcatatgttgcttctaagaaatatgccgaaaagttggcctgggatttcgtgaaggacaacaattctacattcaatttgactacagtgaaccctccatacgttttcggtccacaaaaattcactttcggtttagctagggcttccttaaacacctctgctgacttcgtcaacaaggccttgaagacaactccagaatatgaaggcccatttaaccagccagctggtgttgcttgtgatgtccgtgatgtcgccaagttacatgtcttgccattgggtaagaaagaattcaatggtcaaagactattcccggtcagtgacactggatatggaattgaggaatacgaaaaaggtaagttcaacttcgaaaagatcctacgtattttgaacgaaaagttgcctgaattgaagggtaagatctctccaggcggcatcaaggataatgaagctgaattatcgaaattgacctactacagaaataagatcaccacggattcaaccaagctaacgttctataagcttgaagatactatctatgatgcggcaaagcaaatcttggattatgaagcttctcaaaaataa

SEQ ID NO: 120487 - protein, 359 aa, Kluyveromyces lactis NRRL Y-1140
MSAKVLLTGASGFIALHVLDQLLAAGYEVVGTVRSEEKAEPIKKELAKEHPNGKYQFEVVVDIAAPNAFDAVFQKHTDLKYVLHTASPFSFGLTKSNEENYLIPATHGTKSVLESIQKYGKNVEHVVVTSSFAAIVHRHRSGDPTFINDETTWNPVIWEDAREDAATSYVASKKYAEKLAWDFVKDNNSTFNLTTVNPPYVFGPQKFTFGLARASLNTSADFVNKALKTTPEYEGPFNQPAGVACDVRDVAKLHVLPLGKKEFNGQRLFPVSDTGYGIEEYEKGKFNFEKILRILNEKLPELKGKISPGGIKDNEAELSKLTYYRNKITTDSTKLTFYKLEDTIYDAAKQILDYEASQK

SEQ ID NO: 120488 - DNA, 1014 bp, Debaryomyces hansenii CBS767
  CDS (1)..(1014)
atgacttcagtattcgtttcaggcgctacaggatacattgcacaacatattgtgaaaacattgctcgaaaaaaattataaagtggtaggatctgtgagatctacagaaaagggagaaaagttgaagaagctcttacagtcagccaacttcaactacgaagttgttaatgatattcagaaagaggggagctttaatgacgcattaaaacatcacccagaagtgacagttttcttacacacagcatccccattccatttcaaagctaaggacgtggagaaggagttgttgatccctgcggtcaacgggaccaagaatgcgttgaaggctattaaagactacgcaccgcaggtcaagagggtagttgtaacatcgtcgattgccgctatcaaggttgaggcaaaggaaaacgacagtacgtttgtaacaaccgaggaaacatggaatccaatctcatgggaagaggcactcactaatccagttttagggtaccgtggatctaaaacgtttgcggaaaaagcggcatgggagttcgttgaaatggaaaagcccctgttcatattgtcaacagtcaatccggtgattgtgtttggcccacaggcattcgacagtgaagtcaaagaaacattgaatacttcggcagaaattataaacaacttattgaagttgaaaccagatgatccagttcctcctctgaataatgcgtttatcgatgttcgcgacgttgccaaggcacacgtggtggcatttgagaatgaatatgccgctaaccagagattgttgcttagtgagtccaggtactcatcgcaactagtattggatcttatccacaagaacttccccgagttcaagtcgcggattccccttggaaccccaggtgtctatcccgacacctccaagctctccaagactgacaattccaaaaccaaggccatcgttggcttcccattcattcctctcgaaaaatctgtggtagatactgttctgcagatcgtggcagctgagaaacaccaatga

SEQ ID NO: 120489 - protein, 337 aa, Debaryomyces hansenii CBS767
MTSVFVSGATGYIAQHIVKTLLEKNYKVVGSVRSTEKGEKLKKLLQSANFNYEVVNDIQKEGSFNDALKHHPEVTVFLHTASPFHFKAKDVEKELLIPAVNGTKNALKAIKDYAPQVKRVVVTSSIAAIKVEAKENDSTFVTTEETWNPISWEEALTNPVLGYRGSKTFAEKAAWEFVEMEKPLFILSTVNPVIVFGPQAFDSEVKETLNTSAEIINNLLKLKPDDPVPPLNNAFIDVRDVAKAHVVAFENEYAANQRLLLSESRYSSQLVLDLIHKNFPEFKSRIPLGTPGVYPDTSKLSKTDNSKTKAIVGFPFIPLEKSVVDTVLQIVAAEKHQ

SEQ ID NO: 120490 - DNA, 1023 bp, Debaryomyces hansenii CBS767
  CDS (1)..(1023)
atgacaagaaccgtatttgtttcaggagcttctggatttatcgcccagaatatcgtcaagttattaatcgagaagggttataatgttattggaacggtaagaaccgctgagaaaggtgagaatttgaaaaagtgcttagctagtgaaaaattcacatatgaaatcgttccagatattagtgttgaaggtgcatttgataaggttttggaaaagcattctgagattaatgttttattgcataccgcttctccgtttttttacgacactactgatccagaaaatgatttggttcttccggctatcaacggtaccaagaacatattaaaggccgtaaagcaatacggagcacagattgaaagggttgtcatcacatcttcagatgctgcaatctactccgcagatgatgagcaaaattccgacctttcattcaacgaaagtaattggaacagcatttcttatgaggatgccattaaagatccgatcgcggcctattatggagcaaagacttttgctgaaaaagcggcgtgggacttcgttaaagaaaacaactccaatttcaagttgactgctgtcaatccagtctatgtttttggaccacaagcgtttgcaagtgaagttaagggcaagttaaatacttccaacgagttaattaatacattaatcaagttgggtccttctgatttatttgataacgataaaggggggttcattgatgtaagagatgttgctaaagcccatgtgatggcttttgaaagtgaggataccattaacaagagactttatttaactaatggccattttagtacccaaatgatgttagacatcgtgaacaaaaatttcccagaattgaagggtaaaattccaattggaaatcctggaacgggatctcaggatattctgactttagcgaagatgagcaatgatgcaaccagacaaattttaaattttgattttaattctttagaaaaggttgttgccgatactgttgcacaaattttagatgccagaaaacgtactttatag

SEQ ID NO: 120491 - protein, 340 aa, Debaryomyces hansenii CBS767
MTRTVFVSGASGFIAQNIVKLLIEKGYNVIGTVRTAEKGENLKKCLASEKFTYEIVPDISVEGAFDKVLEKHSEINVLLHTASPFFYDTTDPENDLVLPAINGTKNILKAVKQYGAQIERVVITSSDAAIYSADDEQNSDLSFNESNWNSISYEDAIKDPIAAYYGAKTFAEKAAWDFVKENNSNFKLTAVNPVYVFGPQAFASEVKGKLNTSNELINTLIKLGPSDLFDNDKGGFIDVRDVAKAHVMAFESEDTINKRLYLTNGHFSTQMMLDIVNKNFPELKGKIPIGNPGTGSQDILTLAKMSNDATRQILNFDFNSLEKVVADTVAQILDARKRTL

SEQ ID NO: 120492 - DNA, 1041 bp, Yarrowia lipolytica CLIB122
  CDS (1)..(1041)
atgtcaaccattctcgtcaccggagccaccgggtttattgctggtcaggtcattgcagatctcctgaatcacgggcacaaggtcttgggcaccgtgcgccagctcagcaaggcctccaagctccaggaggcgtttcctgaagcccacaagtccggcaagctgacttttgccacgctttccgatgttcgaagccaggacgagctcaaggcgatttttgcctcacaccccgaaattgcggttgtgatgcacacggcatcgccgtttttctacaactccgaggacgtggtcaaagacctgctggagccggcgctcgagggcacccgttcggtgctccaggtaacccaagacgccggccacaacgtgcacaaggtggtgctgacatcctcggtggcctccatgctcgacccgttcagaaacaaggaccccagctacgtggcaacggaggctacatggaaccccgtcacgtgggaccaggctgctgagtcaaacaacgccgaactggcctacgtagcctccaagacatttgccgagcaggaggcgtggaagttcgtcgagagcaccaagccgcgcttttcgctgactacagtcaaccctgcggcggtgtttggaccccatgcgaccaaaatcgaccccaaggcgctcaacacgtccagcgacgtcatcaacagcctggctctggacaccaagcctggagacacgccgggagactttgcgtttttgtgggttgacgtgcgaaacgtggcccgggcccatacgttggctatcgactccaagctcgacgacaagcggctgctcctgtgcaacggcaagtttgcggcccaggacttggttgatattctcaacaagaacttttccgacattcgaggcacaattgcggaaggtactcccgggaacggaccccgagtcgccgcccagtactttaactacgacaactccaatacccgccagttgctggatttgcagtggattgggctcgagcagtcgattgtggactttaccaagcagtacgaggctgcgaaatcggaatcacgagctgattga

SEQ ID NO: 120493 - protein, 346 aa, Yarrowia lipolytica CLIB122
MSTILVTGATGFIAGQVIADLLNHGHKVLGTVRQLSKASKLQEAFPEAHKSGKLTFATLSDVRSQDELKAIFASHPEIAVVMHTASPFFYNSEDVVKDLLEPALEGTRSVLQVTQDAGHNVHKVVLTSSVASMLDPFRNKDPSYVATEATWNPVTWDQAAESNNAELAYVASKTFAEQEAWKFVESTKPRFSLTTVNPAAVFGPHATKIDPKALNTSSDVINSLALDTKPGDTPGDFAFLWVDVRNVARAHTLAIDSKLDDKRLLLCNGKFAAQDLVDILNKNFSDIRGTIAEGTPGNGPRVAAQYFNYDNSNTRQLLDLQWIGLEQSIVDFTKQYEAAKSESRAD

SEQ ID NO: 120494 - DNA, 1017 bp, Yarrowia lipolytica CLIB122
  CDS (1)..(1017)
atgcccactacactcgtcactggagccaccggatttcttgccggccactgcgtcgaccaactgctcaaggccggccacaatgtcattggcacggttcgaaaccctgcaaaggccgagcgactgacacaggctctgcagagctctgtggactcgggaaaactcaccctggagaccgtcaaggatatccagaacgaggccgagtttgaggcactgttcaagaagcaccccaagcttgactacattcttcatacggcctctccgttcaacttcactgccgaggaccccgaggaagaaatgctcaagccggcaattcagggtactctctccgtgctcaagaccgctaaggcccatgctcccaacgtaaagaagattgtcatcacctcttctgtggccagcaacctcgatgttgccaccttctacgaccctaacaccacttacaccgagaagagctggaaccccatgacctgggagcaagcggctgagaagggcaacccgttcgccaactacatgggctccaagctgtatgctgagaaggccggcattgagttccgtgacaaggagaagccccagttctccataacctggatcaaccccacctacattctggggcccggtgttgctctcgacatgagcgctctcaacacctcgaacgaggtccttgcaaacgttctcgggtccaagaagggccaggaccccgagggagttgccggctggtttgtcgatgtccgagactgtgctcgggcccacgttgttgctctcaagcccgagcttgacggagaacgactcctgctggccaccgccaagttctgcacccaggacattgaggatatcgccaacaagatccccgagttccatggcaagattgcaattggaaaccccgccaaccgggagaaggagctaaaccacgcttcccagtgcgacgctagctactccaagaagctgcttgatatcgactggattcccttcaacaagactgtcgaggattttgccaaccagtggtacgagcagcataagtag

SEQ ID NO: 120495 - protein, 338 aa, Yarrowia lipolytica CLIB122
MPTTLVTGATGFLAGHCVDQLLKAGHNVIGTVRNPAKAERLTQALQSSVDSGKLTLETVKDIQNEAEFEALFKKHPKLDYILHTASPFNFTAEDPEEEMLKPAIQGTLSVLKTAKAHAPNVKKIVITSSVASNLDVATFYDPNTTYTEKSWNPMTWEQAAEKGNPFANYMGSKLYAEKAGIEFRDKEKPQFSITWINPTYILGPGVALDMSALNTSNEVLANVLGSKKGQDPEGVAGWFVDVRDCARAHVVALKPELDGERLLLATAKFCTQDIEDIANKIPEFHGKIAIGNPANREKELNHASQCDASYSKKLLDIDWIPFNKTVEDFANQWYEQHK

SEQ ID NO: 120496 - DNA, 1035 bp, Yarrowia lipolytica CLIB122
  CDS (1)..(1035)
atgtctactacacccaccactctcatcactggagccactggcttcattgccggccattgcatcgagcagcttctgaaggccgaccacaaggtcattggaacgattcgatcgcaggagaagggccagcgattggccgctgctttccccgaggccatcaagaccggccagctggtgtttgagactgtttccgatgtccgatccgagcaggagttcaagactctgttccagaagcacactgacatcaagtatgtgctccacaccgcctctcccttccatttcaacgtcgaggaccccgtcaaggatatgcttgagcctgcggttgagggtactctgaccgtcctcaagaccgccaagcagtacgctccccaggttgagaagttcgtcatcacttcgtctttcgccgccatgatgaactggcacgaggttggcgactcctccgccgtcgtcaccgagaagtcctggaaccccgtcacttgggacgaggctgcccagaagggcaatgttgtcgtaacctacctgggctccaagaagttcgccgagaaggccgcttgggatttcatggagtctgagaagccctcctttggcctcaccactgtcaaccctgcctacgtctttggtcctggtattgctattgatgccaaggctctcaacacctccaacgaggtcattgtccagggagctctctctaccaagcctggtcaggatgctcctgctggccctgcccagatgtgggttgacgtgcgagacgtggccaaggcccacctgtctgccatctccaagaccctagacaaccagcgtctcatgctgtgcgtgtccaagttctgtaaccaggatctccttgacgtgatcaacgagaaggtgcctgagctcaagggaaagattgctaccggaaagcctggaaccggagctgaaactgacaaggagggctttcagtttgataacgaccagacacgaaaggctctcaactacgactggattccccttgacaagtctgtggctgactttgctaaccaatggctgtcgttccagaactaa

SEQ ID NO: 120497 - protein, 344 aa, Yarrowia lipolytica CLIB122
MSTTPTTLITGATGFIAGHCIEQLLKADHKVIGTIRSQEKGQRLAAAFPEAIKTGQLVFETVSDVRSEQEFKTLFQKHTDIKYVLHTASPFHFNVEDPVKDMLEPAVEGTLTVLKTAKQYAPQVEKFVITSSFAAMMNWHEVGDSSAVVTEKSWNPVTWDEAAQKGNVVVTYLGSKKFAEKAAWDFMESEKPSFGLTTVNPAYVFGPGIAIDAKALNTSNEVIVQGALSTKPGQDAPAGPAQMWVDVRDVAKAHLSAISKTLDNQRLMLCVSKFCNQDLLDVINEKVPELKGKIATGKPGTGAETDKEGFQFDNDQTRKALNYDWIPLDKSVADFANQWLSFQN

SEQ ID NO: 120498 - DNA, 1002 bp, Yarrowia lipolytica CLIB122
  CDS (1)..(1002)
atgcccactactcttgttaccggagccaccggctttcttgccggccactgcgtcgaccagctcctcaaggacggccataccgttattggcacagttcgaaacccttccaaggctgagcgacttgccgaggcgttcaagagtgaagttgagagtggcaaactcgaactggagactctcaaggacatccagaacgaggatgagttcgaggccatcttcaagaagcaccctgagattgactacattctccacactgcctcacctcttagtttcaatgtgactgatcctgagaaggacatgttgcagccagccattcgaggcaccacagccgtgctgaaacaggccaaggcacacgctcccaacgtcaagaaggtcgtcatcacctcgtccattgctgcaatgatgaacccggatcctagccacgtccacaacgagcacagctggaaccccatgaccagagagcaggccgcccagaagggcaaccccgtggccaactacgtgggatccaagatttttgccgaaaaggccgggctggagtttctgaacgacgaaaagcccaacttctccatcacttggatcaacccagcctacattctggggcctggcatcactcttgatctgggagccatcaacgcctccaaccagctcatttccagcgtgctggagtccaagcttggcgaggaggtcaaggtgcagagcggctcgtttgtcgacgtccgggactgtgccagagcccatgtcgtggctctccagcctaagtttgacagaaagcgtctcatgctgtgcacagccaaggtgtgcacccaggacattgaggacatttgcaacaagatccccgagctcaagggcaaaattgctgttggaactcctggtgagcgagaaaagcagctgagtaagtcgatcatggatccttccgaaaccaagaagctgttggactttgagtggattccccttgacaagagtgtcactgatttcgccaagcaatggctcgagatcaagcagtga

SEQ ID NO: 120499 - protein, 333 aa, Yarrowia lipolytica CLIB122
MPTTLVTGATGFLAGHCVDQLLKDGHTVIGTVRNPSKAERLAEAFKSEVESGKLELETLKDIQNEDEFEAIFKKHPEIDYILHTASPLSFNVTDPEKDMLQPAIRGTTAVLKQAKAHAPNVKKVVITSSIAAMMNPDPSHVHNEHSWNPMTREQAAQKGNPVANYVGSKIFAEKAGLEFLNDEKPNFSITWINPAYILGPGITLDLGAINASNQLISSVLESKLGEEVKVQSGSFVDVRDCARAHVVALQPKFDRKRLMLCTAKVCTQDIEDICNKIPELKGKIAVGTPGEREKQLSKSIMDPSETKKLLDFEWIPLDKSVTDFAKQWLEIKQ

SEQ ID NO: 120500 - DNA, 996 bp, Yarrowia lipolytica CLIB122
  CDS (1)..(996)
atgctcgttcttctcaccggcggctccggattcattgccgcccacattctcgacggactcgtcaagcggggcattcctgtcgtcaccacagtgcgatccgacaacaaggccaagttccttgctgaaaagtaccctggtcacgacctcaagtttgagattgtgccggacgtggcccagaaggacgccttcaacaatgccctcaagaaccacaagatcacccacattctgcacaccgcctcgcccttcttcctcaaccccaaggatccccagaaggagattctggatcccgccatcaacggcacccgaggcattctggaggctgcgcaggagcacggacctggcgtcgaacacgtggtaatcacctcctccaacgccgccatcacatactacgacgcccgacataaggacccggagaccgtgtacaccgaaaagtgctggtccaacgtgccctgggaggaggccatcaacaaccccgcctcgacatacaaggcttccaagcagtttgccgaggaggccatgtggaacttccagaaggaaaagaaccccaagttccgtctcacggccatcaaccctccttacgtgtttggacccatgaagcacgacgtttccgctgccaccctcaacacctccaacaagattgtgtgggacatcatcaagtccagcaccattggaaaggccggtcctacttactgggtggacgtgcgagacgtggccgagggacacattagagctctggagcgacccgaggagtctgcaaactccagatggtacacagtgggaggcatcttcactccgcaggacgtgctggacgtgcttaatgagatggacgagttcaagggcaagattcctgtgggagagcctggatcgggggtccctcttcactctaccattcccaagtacgacaactctctgaccaacaagcagagcgggcttaagtaccatactctggaggagtccgtcaaggatcttgccaagcagctcaatactctcgagtaa

SEQ ID NO: 120501 - protein, 331 aa, Yarrowia lipolytica CLIB122
MLVLLTGGSGFIAAHILDGLVKRGIPVVTTVRSDNKAKFLAEKYPGHDLKFEIVPDVAQKDAFNNALKNHKITHILHTASPFFLNPKDPQKEILDPAINGTRGILEAAQEHGPGVEHVVITSSNAAITYYDARHKDPETVYTEKCWSNVPWEEAINNPASTYKASKQFAEEAMWNFQKEKNPKFRLTAINPPYVFGPMKHDVSAATLNTSNKIVWDIIKSSTIGKAGPTYWVDVRDVAEGHIRALERPEESANSRWYTVGGIFTPQDVLDVLNEMDEFKGKIPVGEPGSGVPLHSTIPKYDNSLTNKQSGLKYHTLEESVKDLAKQLNTLE

SEQ ID NO: 120502 - DNA, 1029 bp, Yarrowia lipolytica CLIB122
  CDS (1)..(1029)
atgccaccaacttctctcgtcaccggctccactggatttttggccagccacgtggtcgaccagctgctcagcgcaggtcatagagtcatcggtacggttcgatccccccacaaagccgcacgtctggctgaggccttcaagcagcagattgcttcaggccaattggagctggaaacgctttccgacgtgagaaacgccggtgaattcaaggccattttcgaaaaacatcccgagatcaagtacattttgcacacggcttcccccttcaactacaacacgactgaccccgagaaggagatgctccaaccagcggtcgaaggaactacaaccgtactcaaggcagccaaggaccatgcccccaacgtcgagaaggtggttatcacttcttcgctcgctgccattctcaacattgccacgttcaacgatccctccactaccctgaccgagaaggactggaaccccatcacctgggaacaggcggccgagaagggcaacccctatgccaactatattggatcaaaggccatggctgaaaaggcgtctgtggagtttgagaagatggagaaacccaagttcaagctcacctgggtcaaccccgtgctcattctcggtccaggtatcattctcgatccactggccattaacacctccaatgaagccattgtaaccaacgcttttgaaaccaagcccgggcaaaagcctcccgtcaaagctggttactttgttgacgtgcgcgactgcgccaaagcccatgtttctgctctcaaccccgagtttgacggacgaagactcttcctatccacctcaaagtactgcacccaggactttctgaacattgccaaccagctacccgaattcaagggaaagatcgccgagtttgaccctatcgagcgggagaaggagttgcattcgttagcccagatcgacaactcggccacgttgaaactgctcaactacgacctcatctccctggagcattccgtcacagattttgccaaagagtggctttcttacgagcggaacgactag

SEQ ID NO: 120503 - protein, 342 aa, Yarrowia lipolytica CLIB122
MPPTSLVTGSTGFLASHVVDQLLSAGHRVIGTVRSPHKAARLAEAFKQQIASGQLELETLSDVRNAGEFKAIFEKHPEIKYILHTASPFNYNTTDPEKEMLQPAVEGTTTVLKAAKDHAPNVEKVVITSSLAAILNIATFNDPSTTLTEKDWNPITWEQAAEKGNPYANYIGSKAMAEKASVEFEKMEKPKFKLTWVNPVLILGPGIILDPLAINTSNEAIVTNAFETKPGQKPPVKAGYFVDVRDCAKAHVSALNPEFDGRRLFLSTSKYCTQDFLNIANQLPEFKGKIAEFDPIEREKELHSLAQIDNSATLKLLNYDLISLEHSVTDFAKEWLSYERND

SEQ ID NO: 120504 - DNA, 1059 bp, Yarrowia lipolytica CLIB122
  CDS (1)..(1059)
atgtctacagttctcgtcactggagctaccggattcattgcaggtcatgtcgttggcgatctgctggcgtctggacacaaggtcattggcaccattcgacatctcgacaaggctgtcaagctgatggaggccttcccagaggccaattcgtccaaccagctgctgttcgagacgctcaccgacattcgacacgaagacgagctcaagcggatctttgagaaacacaaggacatttccgtcgtgattcacactgcctcgcccttcttcttcaactccaagaacgtggtcaaggatctactcgagccggccgtcgagggtacacgagcagttcttcaggctacccaagttgcaggcaccaacgtcaacaaggttgtggtcacctcttccattgcagcaatgctcgaccccttcaaaaagaacgaccccaactatgtcgccacagaattcacctggaaccctgtaacttggacacaggcagccgactccgacgatggagaacttgcctacgtggcctccaagacttttgccgaacgagaggcctgggactacgtcgagcgaaacaagccccggtacactctgaccaccgtcaatcctgctgcagtgtttggaccccatgcaaccaagatcgaccccaagcagctcaacacatctaatgatgtcatcaacaacctggctcttgatactaagcccggagacccaccttctgagtttgccttcgtttgggtggacgtccgagatgtagctcgagcccatactctggctatcgaccacaaactcgacaaccggcgactactcctgtgtaacggcaagtttgccgcccaggacattctcgatatcatcaacagagacttccccgatatccgaggcaagattgctactggaaaccccggcactggcaaggaggtgacatccaacatttttaactacaacaacgacgtgacccgtcaggagctgccaacgctcaagtggattggactcgagcagtccattgtggacttcaccaagcagtacgaggagattctgcatgagaagaagaagaagcattggtggaatatttag

SEQ ID NO: 120505 - protein, 352 aa, Yarrowia lipolytica CLIB122
MSTVLVTGATGFIAGHVVGDLLASGHKVIGTIRHLDKAVKLMEAFPEANSSNQLLFETLTDIRHEDELKRIFEKHKDISVVIHTASPFFFNSKNVVKDLLEPAVEGTRAVLQATQVAGTNVNKVVVTSSIAAMLDPFKKNDPNYVATEFTWNPVTWTQAADSDDGELAYVASKTFAEREAWDYVERNKPRYTLTTVNPAAVFGPHATKIDPKQLNTSNDVINNLALDTKPGDPPSEFAFVWVDVRDVARAHTLAIDHKLDNRRLLLCNGKFAAQDILDIINRDFPDIRGKIATGNPGTGKEVTSNIFNYNNDVTRQELPTLKWIGLEQSIVDFTKQYEEILHEKKKKHWWNI

SEQ ID NO: 120506 - DNA, 972 bp, Yarrowia lipolytica CLIB122
  CDS (1)..(972)
atgtctgtactgctcaccggatccacaggcttcattgccactcacgtcctcgaccaactgcttagcaagggtctctccgtggtagccacctaccgatccgagtccaaggtggactttctgaagaaacgattcgagggcaagagtgtcgagtttgtgcttctgtcagacattgaatccgagtccgaggtcaaggacatcttcaacaagaacccacaaatcaccaaagtgatccacaccgcatcaccgttccacttcaacttcaccgaccccctgacggaggttcttcagccagccgtgaacggcaccaaggcggtgctgaacgccattcccgagcacgtgactcacgtagttgtcacctcctcggtggcggccgtggtggacatcaagtatattgacgactacaacgagatcatcaccgaggactcgtggaacggaatctcgtgggaggacgccgagaagaagggaggcagcttcacgtaccgaggctccaaaacctttgccgaaaaggcagcgtgggaactgcacaagaaggccaagtacaacctggtcacaattctgcctcctctggtgtttggaccagtctacggacagactgacaccctcaacacctccaacgaacagctggtggacgcgctcaaaaaggggtctaacttcagatacgcaggaacgtatgtcgacgtccgagatacagctgctgcccacgtggctgccattgatgccacggaatcagccagatggctcactattggaggctactacacccgccaggagattctggatatcaccaacaaggagtttcccgaattccatgctgacaaggggactccgggcgactactctggtttgaaacgggccttccgatacgacaactccaagaccaacaaggtgttccctcgaaagtacatcacgttgaagcagacagtggaggacacctttcggggcattgatcccaagtatatcaacaagttgtag

SEQ ID NO: 120507 - protein, 323 aa, Yarrowia lipolytica CLIB122
MSVLLTGSTGFIATHVLDQLLSKGLSVVATYRSESKVDFLKKRFEGKSVEFVLLSDIESESEVKDIFNKNPQITKVIHTASPFHFNFTDPLTEVLQPAVNGTKAVLNAIPEHVTHVVVTSSVAAVVDIKYIDDYNEIITEDSWNGISWEDAEKKGGSFTYRGSKTFAEKAAWELHKKAKYNLVTILPPLVFGPVYGQTDTLNTSNEQLVDALKKGSNFRYAGTYVDVRDTAAAHVAAIDATESARWLTIGGYYTRQEILDITNKEFPEFHADKGTPGDYSGLKRAFRYDNSKTNKVFPRKYITLKQTVEDTFRGIDPKYINKL

SEQ ID NO: 120508 - DNA, 1029 bp, Yarrowia lipolytica CLIB122
  CDS (1)..(1029)
atgtccattcttgtcaccggcgccacgggatttattgccgcccattgcattgaccagctgctgaaaaacggccacagcgtgattggaacgatccgaagcccccagaagggcgccgctctggaagccgccttccccgacgccgttgccaacaagaagctcattctcgagacggtttccgacattcgatctgccaaggagtttgaccaactgttcgacaagcaccccgaaattggcaaagtgctgcacactgcctctcctttccacttcaacatcaaggacccaatcaaggacatgctggagccggccgtggagggcacaaacacagtgctgcagtctgtgctgaaacacggtccccaggtgaccaaggtggtggtcacgtcgtcgtttgtgtccatgctgaccgccgacgacatgttcgatccctccgtgaccgtggacgagaagagctggaaccgaatcacctgggagcagggcgccggcaatgtggagtttctgacctactttgcatccaagaagtttgccgagaaggctgcttgggactttgttgagaacgaaaagccctttttccagctcaccaccgtcaacccttctctggtgtttggcccctccatcaccaagcccgacctcaagagcctcaacacctccaacggagacattgtcactcatgctctggaggtcaaggactctgatgaaggcgtcggacagtacaactccttctgcgtcgacgtgcgagacgttgccaagggtcatgtggttgctctggacgacaagaccaatggaaagcgactcatgctctgttccgacaagttttgctcccagcgactgcttaactacatcaacgaggacttccccgagctcaagggcaagattgccgttggtcatcctgatcaggtcgaagccattgaggccaagaccttcaactttgacaacaccgagaccaagaagctgcttgggttcgagtttactcctctccgagaaaccatccacgacttcgttgcccagtggttggaagttaagaaggaggagtag

SEQ ID NO: 120509 - protein, 342 aa, Yarrowia lipolytica CLIB122
MSILVTGATGFIAAHCIDQLLKNGHSVIGTIRSPQKGAALEAAFPDAVANKKLILETVSDIRSAKEFDQLFDKHPEIGKVLHTASPFHFNIKDPIKDMLEPAVEGTNTVLQSVLKHGPQVTKVVVTSSFVSMLTADDMFDPSVTVDEKSWNRITWEQGAGNVEFLTYFASKKFAEKAAWDFVENEKPFFQLTTVNPSLVFGPSITKPDLKSLNTSNGDIVTHALEVKDSDEGVGQYNSFCVDVRDVAKGHVVALDDKTNGKRLMLCSDKFCSQRLLNYINEDFPELKGKIAVGHPDQVEAIEAKTFNFDNTETKKLLGFEFTPLRETIHDFVAQWLEVKKEE

SEQ ID NO: 120510 - DNA, 1032 bp, Aspergillus nidulans FGSC A4
  CDS (1)..(1032)
atggacatcaagttcgtcctcgtcacaggcgcaactggctttattggcgcgcacatcgttgacgccctcctaggtcacggcctacgggtgcgcggcgcaacgcgctccctggccaaaggcgaagaaatgttgaaagcacgcctgcactacaaagaacagctcgagttcgtcaagatcaacgattttgagaatcccggtggactagctgaagctgtcaagggcgttgatggtatcattcatacggcgagtcccttcacatacgatacaaaagacaacgaaaaggaactcgtcatccccgccataaacggcgtgaaagctgtctttgaagcggcggccgctgccgacgcatctacaactaaaatcaagcgcatagtcctaacatcctcctttgcgtcggtcatagacgtaaaccgcagagcaggaccaggatcagggccagatggatacttcacctacacagctgccgattggaacccactaagctacgccgaggcaattgatacatccaccaatgcggtagtggcataccgcggatccaagaaattcgccgagctcgcggcgtgggagtttatccgcgacagaaagccgtcgtttgatctcgttactctctgtccgcccatgacctttggcccggttgtgcatcctgttccatcagtggagagtctcaatgagtcgaatgcaatgctgtggaaagtcgctgtcggcgaaccgcttcctgtcgcgcgtgtgcctttctggattgatgtgcgtgatctagcggatgcacatataggcgcattgttgaagcctggagttggagggaggagatatacggttgcggcgccagagagattctcgtatgggcttgcggcggggattatcaaggaggagtttgcagacttgagagagcgggttacggggacaaggcaggacgtggatgagagtcatgggttggatggggagacggccggaagggaattgggtatcagctataggcggttcagagagacggtgcgggatttggtgaggcagggggtggagaggggttggtga

SEQ ID NO: 120511 - protein, 343 aa, Aspergillus nidulans FGSC A4
MDIKFVLVTGATGFIGAHIVDALLGHGLRVRGATRSLAKGEEMLKARLHYKEQLEFVKINDFENPGGLAEAVKGVDGIIHTASPFTYDTKDNEKELVIPAINGVKAVFEAAAAADASTTKIKRIVLTSSFASVIDVNRRAGPGSGPDGYFTYTAADWNPLSYAEAIDTSTNAVVAYRGSKKFAELAAWEFIRDRKPSFDLVTLCPPMTFGPVVHPVPSVESLNESNAMLWKVAVGEPLPVARVPFWIDVRDLADAHIGALLKPGVGGRRYTVAAPERFSYGLAAGIIKEEFADLRERVTGTRQDVDESHGLDGETAGRELGISYRRFRETVRDLVRQGVERGW

SEQ ID NO: 120512 - DNA, 1005 bp, Aspergillus nidulans FGSC A4
  CDS (1)..(1005)
atgcctaaggtattgttgacaggaggcagcggcttcattgctgctcatatcctcgaccaattgctggagagaggctttgatgtcgtcacgacagtgcggtcaaaagagaagggcgagaagatcctagctgctcatccaaatacgccaaaggagaagctttcgtatgtcatcgttaaggacgttgcgcaagatggggcttttgatgaggctgtcaaatctgaccccccgttcgactatgtccttcacacggcgtccccttttcactacaacgtccaggatccggtaagagatttccttgacccggctatcaagggaacaacgggcatcttgaaagctatcaaggcctacgcacccaacgtgaaaagggtgacgatcacttcgtccttcgcagcgatcgtcaacgtgaaaaaccacgcaaaggtctatagtgaggaagtttggaatcctatcacttgggaggaaggtttagactcctcacagacttatcgggcgagcaagaccctggcagaaaaagccgcttgggacttcgtggagaaggagaagcccagctttgaccttgcaacaatcaatccgcccctagttctaggacctgtcgtgcactaccttagctcccttgactccatcaacacctccaatgcgcggatcagcagtttcgtgcgggggttcagtaaggatgcgttaccgccaaccggcacgtatgtttgggtggatgtccgtgatgtcgcgctagcccatgtcagaaccatcgaggtgccggaggccggagggcagcgattcttcatcaccgctggtcactattcgaacaaggacatcgtcgacattatccgtgacgcgtatcctgagctggaggatagactgccgcctaaggacgccccgagtgacatgcctaaagatgtatacggatatgacaactcaaaatcaatgcaggttctgggtcttaagtaccgtgggttaaaggagtcggttgttgacacggtcaagagcctgctggagaatggtgcctag

SEQ ID NO: 120513 - protein, 334 aa, Aspergillus nidulans FGSC A4
MPKVLLTGGSGFIAAHILDQLLERGFDVVTTVRSKEKGEKILAAHPNTPKEKLSYVIVKDVAQDGAFDEAVKSDPPFDYVLHTASPFHYNVQDPVRDFLDPAIKGTTGILKAIKAYAPNVKRVTITSSFAAIVNVKNHAKVYSEEVWNPITWEEGLDSSQTYRASKTLAEKAAWDFVEKEKPSFDLATINPPLVLGPVVHYLSSLDSINTSNARISSFVRGFSKDALPPTGTYVWVDVRDVALAHVRTIEVPEAGGQRFFITAGHYSNKDIVDIIRDAYPELEDRLPPKDAPSDMPKDVYGYDNSKSMQVLGLKYRGLKESVVDTVKSLLENGA

SEQ ID NO: 120514 - DNA, 1038 bp, Candida albicans SC5314
  CDS (1)..(1038): transl_table=12
atgtctggagaaacagtttttgtcactggtgcaactggatatattgctcaacatattattaaacaattattatctaaaggttattctgtaattggatcggttcgatcccaatctaaaggtgaacaattgaaagaattaattactgctcatcatcaagatactactggtgatgctaaatttgattatgttatagtcgaaagtcttattgaaccaggagcatttgattcgattttacaaaatcataaagaagttggagttttcattcatagtgcttcaccaatcccatttgctactgatagtgttgaaaaagatattttacaaccagctatagatgggacaaaaaatgttttaacatcaattaaaaaatatggtaatgagaatattaaaaagttggttataacttcatcaattgctgctgttgaaccattgggtacgggacaaactgaacctaaaacaattctggaaaaagattggaatccaattacttttgaacaaggtcttgctaatccagcagttgcttattatgcttctaaaacattagcagaaagagaagtttggaaatttgtcgatgaaaataaaaaccaattaaattttgatgttgccgtgattaatcctctgtttgtatttggacctcaagcatttggaattaaagataaatcagcagcattaagatcaacgggagaaatcattaattccgtattgaaattgaaatcaaatgatccaattccatcgttagtagcatcatttattgatgttcgtgatgttgctagagcacatattattgcctttgaggatgatgatgctattggtcaacgattaattttagataatgaaatattcactaaagaattgattgctcatttaattaaaaagaatttcccttctttggatatcccagaaggtgatattgttaaaagtgaagaagaaattgcaaattatccttggagagtagatagtaccaaaactgaaaaaattttgggattcaaatatatttcattggataaaagtgttgttgatactgttaatcaattgatttga

SEQ ID NO: 120515 - protein, 345 aa, Candida albicans SC5314
MSGETVFVTGATGYIAQHIIKQLLSKGYSVIGSVRSQSKGEQLKELITAHHQDTTGDAKFDYVIVESLIEPGAFDSILQNHKEVGVFIHSASPIPFATDSVEKDILQPAIDGTKNVLTSIKKYGNENIKKLVITSSIAAVEPLGTGQTEPKTISEKDWNPITFEQGLANPAVAYYASKTLAEREVWKFVDENKNQLNFDVAVINPSFVFGPQAFGIKDKSAALRSTGEIINSVLKLKSNDPIPSLVASFIDVRDVARAHIIAFEDDDAIGQRLILDNEIFTKELIAHLIKKNFPSLDIPEGDIVKSEEEIANYPWRVDSTKTEKILGFKYISLDKSVVDTVNQLI

SEQ ID NO: 120516 - DNA, 1167 bp, Candida albicans SC5314
  CDS (1)..(1167): transl_table=12
atgactgataaaactaattttcctactacagtatttgtatctggtgcttctggattcattgctcaagaattaatcaaacaattgataataaaaggatataatgttataggatcagtaagatccaccactaaaggagaatcaattaaatccaatttaacatcctcatcaaccacacaatcattgaatagtgatttgtttaattatacaattattaaagatatttcatcaccaggagcatttgataatgtattaaaacaatatcccgaaattgagatttttttacatacagcatcaccatttcattttaaagcaggaaatattgaacaagaattattaattccagcaattaatggtactaaaaatgccttattggcaattaaacaatttggtcataaaattaaacatgtagtgattacttcatcagtagttgccgttggaaaatttgggaaatttcctcgtaccagtacgggctcaacatcattgtcttcatcagtggtggttgctgatgaaaattcatggaatccaattacttgggaaatgtcattgaaaaatcctttttatggatattttggttcgaaaacttttgctgaaaaagaagtttggatatttttacaaattgaaaatccaaaatttaatataacgacaattaatccaggtatggtattaggaccacaagcatttcccataaacaaccataatggtggtggtgctggtgctggtggtactaacaatttagaattgaatacttcatcacaagaaatagttcgattattgaatttatcaactgttgatgatgttaataaagttaagatttcaactaaagtagagaatacatttattgatgttagagatgttgcaaaagctcatattatagcatttgaaaaacctcaactaactaaaaataaacgattactattaattgaagatatttataatgaacaaacattacttaatatcattaataacaattttcctcaattaaatttaccaaaaggtgaacctattactggtcaaattgatgaatccaaattaaataatacttggaatactacacaaactaaaaccatttttggtgataaatatattggaattgaaaaaagtgtgattgattcagttaatcaaattcttgaagctaagaatgagggtaatcctcaatgtaaattgtaa

SEQ ID NO: 120517 - protein, 388 aa, Candida albicans SC5314
MTDKTNFPTTVFVSGASGFIAQELIKQLIIKGYNVIGSVRSTTKGESIKSNLTSSSTTQSLNSDLFNYTIIKDISSPGAFDNVLKQYPEIEIFLHTASPFHFKAGNIEQELLIPAINGTKNALLAIKQFGHKIKHVVITSSVVAVGKFGKFPRTSTGSTSLSSSVVVADENSWNPITWEMSLKNPFYGYFGSKTFAEKEVWIFLQIENPKFNITTINPGMVLGPQAFPINNHNGGGAGAGGTNNLELNTSSQEIVRLLNLSTVDDVNKVKISTKVENTFIDVRDVAKAHIIAFEKPQLTKNKRLLLIEDIYNEQTLLNIINNNFPQLNLPKGEPITGQIDESKLNNTWNTTQTKTIFGDKYIGIEKSVIDSVNQILEAKNEGNPQCKL

SEQ ID NO: 120518 - DNA, 1017 bp, Candida albicans SC5314
  CDS (1)..(1017): transl_table=12
atgtccgtttcaaaatctgctacaactgtttttgtatctggggcttctggtttcattgcacaaaatgtaatcaaacaattgttggccaatggatacaaagtcataggatcagtaagatctgaatcaaaaggaaaagaattgacagatattattcaatcaaatgacttccaatttgctgcaatccctgatattagtgctgttggagcatttgatgatgttttgaaatcaaattcacaaatctcagtgtttatccacacagcttccccagtcacttattcggcaaaagatgttcaaaatgaacttatcaaacctgcagtagaaggaacaaggaatgctttgaatgcaataaaactgtatggaccccaaattaaacgagtggttgtgacttcttcatttacagccattgcactggggaaggattttgatcatgacaaatactatacggaaaaagattggaacccagttacaatagaacaggcattatcaaatcctgaagcagcatatgcttatgccaaaaaaatggcagaaaagactgtttgggattttgttgaaactgaatcaccaacttttaaagtaactgttgtcaatccaactgttgtttttggaccacaagcttttggagttaaagataaatcgaaattgaatttactgattgaaatgatcaatgatattcttactttgaaacctgacgatgaaattccaccctatgctagtcgatgtattgatgtgagagatgttgctaaagctcatttggttgcatttgaaaaagaggaggcaatcaatcaaaggttggtgttaataaaccagccattcagtaatgatttgcttgcatatattatcaaaaagagtttccccgttatcaatattccggaaggcaatttggaaagaagtcgagaatgcattgcaaaatcgtgtatcaaaacagatttgacaaagacgcaagaaattcttggatttgattacgttccagtggagaagacaatcctagatacaattcaacaactatatgacgcttga

SEQ ID NO: 120519 - protein, 338 aa, Candida albicans SC5314
MSVSKSATTVFVSGASGFIAQNVIKQLLANGYKVIGSVRSESKGKELTDIIQSNDFQFAAIPDISAVGAFDDVLKSNSQISVFIHTASPVTYSAKDVQNELIKPAVEGTRNALNAIKSYGPQIKRVVVTSSFTAIASGKDFDHDKYYTEKDWNPVTIEQALSNPEAAYAYAKKMAEKTVWDFVETESPTFKVTVVNPTVVFGPQAFGVKDKSKLNLSIEMINDILTLKPDDEIPPYASRCIDVRDVAKAHLVAFEKEEAINQRLVLINQPFSNDLLAYIIKKSFPVINIPEGNLERSRECIAKSCIKTDLTKTQEILGFDYVPVEKTILDTIQQLYDA

SEQ ID NO: 120520 - DNA, 1032 bp, Candida albicans SC5314
  CDS (1)..(1032): transl_table=12
atgtcaacaccaattactgttattgtttctggagccacaggatttattgctcaacacgttgttaaacaattattagctaaaaactatcaagtcattggtacagttagatcaacagccaaaggtgatcatttattaaaattattcaacaatccacaaaacttatcttatgaaattgttgaagatgttggaactaaaggtgcctttgataaagtattacaaaaacatggagaagcaaaagtgttcttacatttagcttcaccattccattttaatgtgactgatgttgaaaaagaattgttattgcctgctgttgatggtactaaaaatgtattacaagcaatttataattttggtaacaatattgaaaaagtggttatcacttcatcttatgctgccattagtaccgcttctaaagaagctgataaaaatgcaattattacagaaaaggattggaatgaaatcagttggcaagatgctttacttaatccagttaatggatatcgtggatccaaaaaatttgctgaaaaagctgcttgggattttataaaatctaatgataatgttaaattttcattgtcgacaattaatccatcatttgtatttggtccacaatcatttggttcagaaattaaacaaagtttaaacacttctagtgaaatcattaattctattttgaaattgaaaccaaatgattcaattcctgcgtcaaaaggaggttgggttgatgtaagagatgttgccaaagctcatatcattgcctttgaaaatgaggatgccaaaaatcaaagaatattgttgaattcaggtagatttacatctcaatcacttgttgatattattaatgataaatttccagatttgaaagggaaaataccagttgatgaaccaggttcagataaatctgttattgctgaaagtttggctactattgatgataccaaatctcgtgaattattaggatttgaatattataaccttgaacaatcagtttatgatactgttgaacaaattgttaatgctcataagttgtaa

SEQ ID NO: 120521 - protein, 343 aa, Candida albicans SC5314
MSTPITVIVSGATGFIAQHVVKQLLAKNYQVIGTVRSTAKGDHLLKLFNNPQNLSYEIVEDVGTKGAFDKVLQKHGEAKVFLHLASPFHFNVTDVEKELLLPAVDGTKNVLQAIYNFGNNIEKVVITSSYAAISTASKEADKNAIITEKDWNEISWQDALLNPVNGYRGSKKFAEKAAWDFIKSNDNVKFSLSTINPSFVFGPQSFGSEIKQSLNTSSEIINSILKLKPNDSIPASKGGWVDVRDVAKAHIIAFENEDAKNQRILLNSGRFTSQSLVDIINDKFPDLKGKIPVDEPGSDKSVIAESLATIDDTKSRELLGFEYYNLEQSVYDTVEQIVNAHKL

SEQ ID NO: 120522 - DNA, 1044 bp, Candida albicans SC5314
  CDS (1)..(1044): transl_table=12
atgtcaaaaactgtcattttaacaggagcttcgggttatattggtcaacacattcttggagaattattagaccaaaattataaagtaattgccatagttcgttcccaaaaatcatcagatacattatcaaaactattcaaacaaacccccaaattacaatttgaaattgttgaacaatttgacaaaccacacgcattagataaagttttggaaaaacataaagaagcaacaatttttattagtacagctgctgtggtcacttttcatgctgaagattatgaaagagatgttttagatccagcaattgatctagttaaaaacattttttcaagtatcaaagaacatgctccacaaattactagagtaatattaacatcttccagtgcttcagtagttggattagataaggcattttcatatgatgctgaatactctgataatgattggtctccatttactcgtgaaatgagtacactggatggtaccatggcctattttgcatcaaagaaattggcagagaaagaagcttggaaattccttaaagaagaaaaaccaaattttgatcttgttgtcataatgccagcattgattcttggtccagttcgttttagttctgaattgaaaaacggtaaatttccttccacatctggtatcattggaggattattacatttgaaatctgatgatcctatccaaccaatggcagcaggtgcggttgacgttagagacgttgcaaaggtgcatgttgatgtgattacttcggaaaaagcttcaaaccaaagaattttagttgaaagtggtaaagtaaccaatgataatatcattcaaaccatcattgacaattttcctagttacaaggacaagttacctacccctaacccagtgccacattctaaatttgtgaaacccaaagatgaacgctcaagaaagattattggattctcattaaggtcattaggtgattcagtagttgatttggtcaaacaaatcgatcaggagaattcagtaatcgaatcaattaagaaattagatattaaaaaatag

SEQ ID NO: 120523 - protein, 347 aa, Candida albicans SC5314
MSKTVILTGASGYIGQHILGELLDQNYKVIAIVRSQKSSDTLSKLFKQTPKLQFEIVEQFDKPHALDKVLEKHKEATIFISTAAVVTFHAEDYERDVLDPAIDLVKNIFSSIKEHAPQITRVILTSSSASVVGLDKAFSYDAEYSDNDWSPFTREMSTSDGTMAYFASKKLAEKEAWKFLKEEKPNFDLVVIMPALILGPVRFSSELKNGKFPSTSGIIGGLLHLKSDDPIQPMAAGAVDVRDVAKVHVDVITSEKASNQRILVESGKVTNDNIIQTIIDNFPSYKDKLPTPNPVPHSKFVKPKDERSRKIIGFSLRSLGDSVVDLVKQIDQENSVIESIKKLDIKK

SEQ ID NO: 120524 - DNA, 1026 bp, Candida albicans SC5314
  CDS (1)..(1026): transl_table=12
atgtcttcatctactacagttttcgtttctggtgcttctggttttattgctcaaactttagtcaaacaattgattgaaaaaggttataaagttgttggtactgttagatccaatgaaaaaggtgattccttgaaggaaaacttgaaagcagctaaattgcaatcagaaaatttcacttacgaaattgttaaagatattgctgttaaaggtgcttttgacgatgctttaaagaaacatcctgaagtcactgttttcttacataccgcatctccattccatttcaatgtcactgatattgaaaaagaattattaactccagctgttgaaggtaccaacaatgccttacaagccattaaaacacatggaccacaaattaaacgtgttgttgtcacttcatcatatgctgctgtgggaagatttgctgatttagctgatccatcaatcccagctactgaagaatcttggaatccaatcacctgggaacaatcattatcaaatccacttgctggttatgttggttccaaaaaatttgctgaaaaagctgcttgggattttgttgaaaaggaaaaaccaaatttcactctttctgtgatcaatccagtatatgtatttggtccacaagcttttgaaattaaaaacaaatcccaattgaatacatcatcagaaattattaatggattattaaattctaaaccagattctaaatttgataatttaactggttatttcattgatgttagagatgttgctaaagctcatattgtagcttttgagaaagattcaattcaaggtcaaagattaattttggccgaatctccattttcaactcaaagtattttggatttgattcgaaaagatttcccacaattggattctcaattacctaaaggtgatccatctcaagctgatgcttggaagaaagctgaaagtaagattgagaatgaaaagactagagaattacttggattcaaatttattgatttcaaaaaatccattgacgattcggttgctcaaattattggttaa

SEQ ID NO: 120525 - protein, 341 aa, Candida albicans SC5314
MSSSTTVFVSGASGFIAQTLVKQLIEKGYKVVGTVRSNEKGDSLKENLKAAKLQSENFTYEIVKDIAVKGAFDDALKKHPEVTVFLHTASPFHFNVTDIEKELLTPAVEGTNNALQAIKTHGPQIKRVVVTSSYAAVGRFADLADPSIPATEESWNPITWEQSLSNPLAGYVGSKKFAEKAAWDFVEKEKPNFTLSVINPVYVFGPQAFEIKNKSQLNTSSEIINGLLNSKPDSKFDNLTGYFIDVRDVAKAHIVAFEKDSIQGQRLILAESPFSTQSILDLIRKDFPQLDSQLPKGDPSQADAWKKAESKIENEKTRELLGFKFIDFKKSIDDSVAQIIG

SEQ ID NO: 120526 - DNA, 1014 bp, Candida albicans SC5314
  CDS (1)..(1014): transl_table=12
atgacaaaggttttcataacaggagcatcagggtttattgctcaacacattatcaaattattattatcaaaaggatacgaagttgttggcactgttcgttcaaccaccaaaggtgaacaattgaaatctttcatgccctcagatgccaaatttacatatgagatagttaaagaattgtctacacccaactcctttgatgaagcattgagtaaacacaacgacatagaatatttatttcatactgcatccccattgacatttgataccgaagacccagaaaatgttattcttcaacctgccattaaaggaacggaaaacattttgcatgcagcagctgacctttgtccaaacttgaaacgtgtagtgctcacttcttcagatgctgccatttattccaatactgatgagacaaacccgacattatctttcaatgaaggaagttggaacaatacttcatatcaagatgcattgaaggataatattacagcatattatgcatctaaggcatttgcagaaaaattggcttgggaatttgtcttgatgcaaaaaccagtgtttggattagtggttgtaaacccatcttgggtatttggtccaaaagcatatgattttgatcctaaaagatttaatagttcgaatgaaatgattgatgatttgttaaaattgaaccacgaaaataattcaacttttgagaatgttagtggtggatacatttcggcaacagatatagctaaagttcaagtgtatgcaattgaatccgatgatttggtaaacaaaagattattaatgacaaatgggtatttcacctgtcaacagattcttgatataatcaataaacatttcccagaattaaacctaccaaaaggaaatccgggaactgaagcagaggagtttaagaaactagcaagagtgaacaatgatgctaccagaaaattattgccttgggagtttgagcctttggaaactattgtcgttgatacagtaaaacaaattctagaatctaaacaaaactaa

SEQ ID NO: 120527 - protein, 337 aa, Candida albicans SC5314
MTKVFITGASGFIAQHIIKLLLSKGYEVVGTVRSTTKGEQLKSFMPSDAKFTYEIVKELSTPNSFDEALSKHNDIEYLFHTASPLTFDTEDPENVILQPAIKGTENILHAAADLCPNLKRVVLTSSDAAIYSNTDETNPTLSFNEGSWNNTSYQDALKDNITAYYASKAFAEKLAWEFVLMQKPVFGLVVVNPSWVFGPKAYDFDPKRFNSSNEMIDDLLKLNHENNSTFENVSGGYISATDIAKVQVYAIESDDLVNKRLLMTNGYFTCQQILDIINKHFPELNLPKGNPGTEAEEFKKLARVNNDATRKLLPWEFEPLETIVVDTVKQILESKQN

SEQ ID NO: 120528 - DNA, 1053 bp, Ustilago maydis 521
  CDS (1)..(1053)
atgtctggcccgttggtactcatcaccgggatcaccggtttcctttcggcgcacgtgcttgacgctgtgctcgcgtctcctgccaactacaaggtccgaggtacgcttcgatctatcagcaagaaggacgagatcctcgctcgtttgagcgcacaagaccgtgagagggtcgaatttgtccaagtggccgatatagcgacgtcggatctgttggctgccgttcgaggagtcgagatcatccaccacgtcgcttcgccttaccagctcaacgtacaggatgccgagcgtgatctgctgattccggctgtcgaaggcactttgaacctgctacgctttgccaagcacgaaaagagcgtcaaaaaaatcgtcatcacctcttcgtttgctgctgtgacaaacttcaaagatggtggcccctaccgtcctggcttcgtctatacagctgattgctggaacccttcttcgtacgaggatgcgattaaagccggcggcgcaggtgcattctcctactcggtcagcaagaagctcgccgagaaagccgcttgggactatttggccaacgaaaagcctcactttgagattgcctgcatcaacccacccatgatctacggcgccacgttgcaacccgttgccaaactgtccagcctcaacacgtcgagcaaaaccatctacggcctcatcaactcggccgactctatgcccgaagaccgtctacctctcttttgccatgctcgcgatgtcggagatgcacatgtcgcgacgaccgagaagcccgatggtatgggtcaacgatggttgctgtgtggaggcaagttcacctgggctcatgcggtcaaattcattgcagagcaatatccagatctgcaggaccgcctgcctaaaggttggaaggaggctagtgccaatccacgcgacttgaacaccattgttgatttggacaccaagccagcacagaccaagctaggaatgcagttccgagactggcaaatcacgctcaaggagtcgctcgatagcttgctcgagttggagaagcgtcctggctggaagaactga

SEQ ID NO: 120529 - protein, 350 aa, Ustilago maydis 521
MSGPLVLITGITGFLSAHVLDAVLASPANYKVRGTLRSISKKDEILARLSAQDRERVEFVQVADIATSDLLAAVRGVEIIHHVASPYQLNVQDAERDLLIPAVEGTLNLLRFAKHEKSVKKIVITSSFAAVTNFKDGGPYRPGFVYTADCWNPSSYEDAIKAGGAGAFSYSVSKKLAEKAAWDYLANEKPHFEIACINPPMIYGATLQPVAKLSSLNTSSKTIYGLINSADSMPEDRLPLFCHARDVGDAHVATTEKPDGMGQRWLLCGGKFTWAHAVKFIAEQYPDLQDRLPKGWKEASANPRDLNTIVDLDTKPAQTKLGMQFRDWQITLKESLDSLLELEKRPGWKN

SEQ ID NO: 120530 - DNA, 1095 bp, Ustilago maydis 521
  CDS (1)..(1095)
atgccggccattcagcctaaatcacatgtgctcgttaccggagggtctggcttcattgccatttggacaatctatcagctgctagaacgcggtcacaatgtgcgagcaacagtccgttccgatgacaagggcaactacctcaagcatgtttttgaaaagtacggcgacaagctgagctacaccatcgccgaggacctcgaaaaggaaggtgcttttgatgatgccgtccagggtgtcgacgctgttctccacaccgcctcgcccttccattataacatcgagggagaccccaagcgaacgctcatcaacccagccgtcaacggcacacgcaacgtgctctcctctattcaaaaacacggcagcaacgtgaagcgcgtcgtcatcacctcatcctatgccgccattcttgactctacacgtcggggaactattgtctacacggaagaggactggaacatctcgagcgtcgagaacgtcgaaaagaagggcaaggaccaggacgcatctgatgcctaccgcgcatccaagaccatggccgaacgtgctgcgtggcaatttgtcgaggagaacaagcccagctgggacctagtcactatcaaccctcctctcgtcttcggccccatcatccaccaggtcaattcgcctgagaagctcaacacgtctgttggcttcgtgtggggcttgctgcacgggtccaagacagaagatgacctgcttacgccctccgggagctgcgtagatgttcgcgatgtcgcgtatgcacatgttgagtctcttgtccgcgacgacgccggtggcaaccgttttgctgtgtctctcaattcctttgtctggcaggacgtggtcgacatcatccataacgacagcagcgtgcctgtcgaatggaagaagcaggtccccactggcaagcaaggcaccggatcatcggtcaagcagaacaggctcgacggttccaaagctacacgccagctcggcctcaattacatccagctcaaggatcttgtgcaggacatggtggccagccttgccgatgccgagaagcgccgctggtctggcgtgccgagcgccaacatcctctcgcgcacaaagcactag

SEQ ID NO: 120531 - protein, 364 aa, Ustilago maydis 521
MPAIQPKSHVLVTGGSGFIAIWTIYQLLERGHNVRATVRSDDKGNYLKHVFEKYGDKLSYTIAEDLEKEGAFDDAVQGVDAVLHTASPFHYNIEGDPKRTLINPAVNGTRNVLSSIQKHGSNVKRVVITSSYAAILDSTRRGTIVYTEEDWNISSVENVEKKGKDQDASDAYRASKTMAERAAWQFVEENKPSWDLVTINPPLVFGPIIHQVNSPEKLNTSVGFVWGLLHGSKTEDDLLTPSGSCVDVRDVAYAHVESLVRDDAGGNRFAVSLNSFVWQDVVDIIHNDSSVPVEWKKQVPTGKQGTGSSVKQNRLDGSKATRQLGLNYIQLKDLVQDMVASLADAEKRRWSGVPSANILSRTKH

SEQ ID NO: 120532 - DNA, 1074 bp, Cryptococcus neoformans var. neoformans B-3501A
  CDS (1)..(1074)
atgccaactgtactcctcacaggtatcacgggatttctgtctgcacacgtcgcccataccttcctgaagcatgactggatagtgcacggcacacttcggtccagctcgaaggtagcgttagtcgaagttattcctgaatactctccttatatttcgtcaggcaaactaaaactcttcgttgtcggacctcttgagaatgccgattacactgaagccatgaaaggcgttgatgctgtggtccacactgcctctccggtagagtttggtggagagaattttagagagagccatttgaaacctgctttggaaggaacaaggggtgtcctcagagctgtagccaaagagaagaatgtaaagtccgtcgtctacactagtacttttggagccgttggtgatcataggtatcatcccactgagatcaaaggcaaagttgtcactgaggataactggaacccgtataccttggaagagttggataagatggtggaatctggagagtcaggcaaccccacatttcctccaggatatctgttctataaaggagccaagaagtacgcggaactcgctgcttgggaatgccagaaagaagcgagagaacagggtgctgaatggtctttggtcacgatgaactgtgtgatgatctgggggcctccaattcaacctctcacatcactcagtcatgggggcatgtcgaccgagttcctttggatgcttgcaggagggaaagatgcccatatcatggacagtctctatccctattacgtcgatgttcgggatgctgctgaagcacactatcaagccaccgtccgtagagcgcaaggaaggtttatcatctctgccggcccttatgatttccaagagttcgcagacatgcttagggagctttatcctgagcaaaaagaacgattcgcccttggtgctcccggcaaatatatgtacagagatccaggagtgtacgtgctcacaaatgaaaagagtcaaagggaacttggtattacttaccgtccaaaacaagagactctcaaagatgcatttgacaggtttttcgctttggagaaacaaggattgaagtaa

SEQ ID NO: 120533 - protein, 357 aa, Cryptococcus neoformans var. neoformans B-3501A
MPTVLLTGITGFLSAHVAHTFLKHDWIVHGTLRSSSKVALVEVIPEYSPYISSGKLKLFVVGPLENADYTEAMKGVDAVVHTASPVEFGGENFRESHLKPALEGTRGVLRAVAKEKNVKSVVYTSTFGAVGDHRYHPTEIKGKVVTEDNWNPYTLEELDKMVESGESGNPTFPPGYLFYKGAKKYAELAAWECQKEAREQGAEWSLVTMNCVMIWGPPIQPLTSLSHGGMSTEFLWMLAGGKDAHIMDSLYPYYVDVRDAAEAHYQATVRRAQGRFIISAGPYDFQEFADMLRELYPEQKERFALGAPGKYMYRDPGVYVLTNEKSQRELGITYRPKQETLKDAFDRFFALEKQGLK

SEQ ID NO: 120534 - DNA, 1041 bp, Cryptococcus neoformans var. neoformans B-3501A
  CDS (1)..(1041)
atgcccgctatccagcctggatctttggtgctcgttaccggtgcttctggttacatcgccgcccataccatagatgccctattgaaagaaggattcaatgtacgaggtacagttaggagtcagtcaaagggtgaataccttgccaaactcttcaagggtgcaaaggccaggtttgaatatgtaatcgtcggagatatcgcacaggaaggagcattcgatgaagccgtgaagagtgtgaatgcagtagctcacatggctagtccttaccatttcaacgcagttgagttggacgagttgttcgaacctgctaagaagggtactacgggagtcttggaaagtctcaagaagaacaaccccgactgtaagcgggttgtagtaacaagctctgtggcggccatcgtcaattccaacattaagcctcctcatacctttaccgaggccgattggaatcccgtcagcctgaaggtctgcgaggagaaaggcagagatgccgatggcgtgaacaagtatcgagctagcaaaactcttgccgaaaaagtcttctggaagttcttcgaggacgagaagccgtccttcgatggagtcgctatcaaccctccgttggtactcggtcctatcatacatgaatgcgattcccccgagtccctcaatacatctgtagccaatttttacgactggatgatcggcaagaagacggaaaaaaatttgcccgaggctggtggtaattatgttgatgtgcgggattgcgctttggctcaccttcgcgccctcgtcgtaccggaagctgctggtcaaaggttcattactggcaacggtgcatataatggtaacgacttttgcattgccctcgctgagacgtgtccagacttgaaaggtgttgccaagggcaacgccgatccagcctataggaagaagcttatcgacgaaaacaatcacatggacgggtcgaaggcagaaaaagtgctggggttggcatataggtccaaaaatgagactttgagagacatggcgaagagcttaagggcaaggttcaatttctag

SEQ ID NO: 120535 - protein, 346 aa, Cryptococcus neoformans var. neoformans B-3501A
MPAIQPGSLVLVTGASGYIAAHTIDALLKEGFNVRGTVRSQSKGEYLAKLFKGAKARFEYVIVGDIAQEGAFDEAVKSVNAVAHMASPYHFNAVELDELFEPAKKGTTGVLESLKKNNPDCKRVVVTSSVAAIVNSNIKPPHTFTEADWNPVSLKVCEEKGRDADGVNKYRASKTLAEKVFWKFFEDEKPSFDGVAINPPLVLGPIIHECDSPESLNTSVANFYDWMIGKKTEKNLPEAGGNYVDVRDCALAHLRALVVPEAAGQRFITGNGAYNGNDFCIALAETCPDLKGVAKGNADPAYRKKLIDENNHMDGSKAEKVLGLAYRSKNETLRDMAKSLRARFNF

SEQ ID NO: 120536 - DNA, 1071 bp, Strongylocentrotus purpuratus
  CDS (1)..(1071)
atggcaattcaccctctaagtatgtttgtctgtctgtccccagaggtgctagtaacaggtgcttcagggtacatagcaactcacatcgtgcagcagctccaggaagctgggtacaaggtcagagggactgtcaggagtctgaccaatcccaagaaagttggaccactcaaggaactctgtcccaatgcagctcatgaactggaactggtggaagccgaccttaccaacgaggcatgctggaaagatgctgtccaggggtgtagccatgtcatccacaccgccagccctttcccagacaagagccctaaggatgagaacgtagtcatcaaacctgctgtcgagggtactaccaacgttctccaagcatgtgtggatgtgggtggggtcaagagggtggtattgaccagctctgtcgctgcaatcagtgatttaacagaaactaacacagaacctataacagaagaaacatggaggaatatgaacagccctatggaagatgcttatgggaaaagcaaggcattagcagagaaagcggcatgggactttgtagagaaactaccagctgaatccaaatttgagttggctgtcatcaacccatccatggttcttggtcctgtcatctgcggagttccaggaaccagtgtagaggtgatccgacgtatcctagaacgagacccgcctgccattcccaagctgaacttccctgtatgtgatgtcagggatgttgctaaggctcatgtcgtcgctatgacacaccctgatgcaccaggtcatcgtcatatcgtttctccacacaacatgtggtttcgagaaatggccgatgttctcagggaggagtttagagacaaaggcgagttacaagcccccgagaatgatggctccacctctactactcaagatggtcagctgttaactgaagtacttggcatcaaaccatacgagcccaaggaatcgctgatagacatggcttacacctgcatagataaaggcttcatcgtcaggaagaaagaatatgtcaatcccaagactcaacaaacacaaacaacagagggcgctagtgcttcaccttag

SEQ ID NO: 120537 - protein, 356 aa, Strongylocentrotus purpuratus
MAIHPLSMFVCLSPEVLVTGASGYIATHIVQQLQEAGYKVRGTVRSLTNPKKVGPLKELCPNAAHELELVEADLTNEACWKDAVQGCSHVIHTASPFPDKSPKDENVVIKPAVEGTTNVLQACVDVGGVKRVVLTSSVAAISDLTETNTEPITEETWRNMNSPMEDAYGKSKALAEKAAWDFVEKLPAESKFELAVINPSMVLGPVICGVPGTSVEVIRRILERDPPAIPKLNFPVCDVRDVAKAHVVAMTHPDAPGHRHIVSPHNMWFREMADVLREEFRDKGELQAPENDGSTSTTQDGQLLTEVLGIKPYEPKESLIDMAYTCIDKGFIVRKKEYVNPKTQQTQTTEGASASP

SEQ ID NO: 120538 - DNA, 1074 bp, Pseudomonas syringae pv. phaseolicola 1448A
  CDS (1)..(1074): transl_table=11
atgacagaacgagtgcttgttaccgggggtggcggttttgtggcctgccacttgattcagcaactgcttgccagcggcaatgtcgtcaataccaccgtgcgcaacctcaccaacagggcaaaagtgcttcctctgctgacgttgcaaaagcaacatccaggcaaactttacctgttcgaagcagatcttcttgtagacggcgcgtttgatgcgcccatgcacgactgcacggttgtccatcatgtggcgtcgccctttctgctgcctgaaaaaataaaggacggccgccgggaaatgcttgagcctgcactgctgggcacccggaacgttctgagcagtgtcgataaaacgcccagcgtccttcgtgtcgtcatgacctccaccgtcggggcaatctttggcgattacattgacgttttgcacatgaagaacaagacccttaccgaagactatttcaataccagcagcacgcttgaaaccaacccctatcactacgccaaggtcgaggccgaaaaagaagcatggcggatctgcgagaagcagactcgctggagcctggtcactatcaatccgggcatgattctcggcccttctcttacgccggcctcggactccggaagcctgtttcttctggatgagatgttccgcggttacttcttctatggcatgcccgacctgagtctgactaccgtggacgtcagggatgtagcggcagctcatatcatcgcagcgaacaaggttgacgctcaggggcgctatatccttgctgaacaacatatgatttctttcgtggagatagctggcattgtgcgccgtttgcatcgacgcccctggttattgccgcgttaccgcattcccgacgctattgtcaggttgattggtcccttcttcggactcactcaggattatctgagcaagcacctcggcattcgctttgtggtggataaccaacgcagcctgaatgatctgggcatcaaatatcgatccatcacggaaacgctgacagatcattaccgttgctgggatatgcagcgtcagctcaacagccaggcgaatgagaagcatcggtcgtga

SEQ ID NO: 120539 - protein, 357 aa, Pseudomonas syringae pv. phaseolicola 1448A
MTERVLVTGGGGFVACHLIQQLLASGNVVNTTVRNLTNRAKVLPLLTLQKQHPGKLYLFEADLLVDGAFDAPMHDCTVVHHVASPFLLPEKIKDGRREMLEPALLGTRNVLSSVDKTPSVLRVVMTSTVGAIFGDYIDVLHMKNKTLTEDYFNTSSTLETNPYHYAKVEAEKEAWRICEKQTRWSLVTINPGMILGPSLTPASDSGSLFLLDEMFRGYFFYGMPDLSLTTVDVRDVAAAHIIAANKVDAQGRYILAEQHMISFVEIAGIVRRLHRRPWLLPRYRIPDAIVRLIGPFFGLTQDYLSKHLGIRFVVDNQRSLNDLGIKYRSITETLTDHYRCWDMQRQLNSQANEKHRS

SEQ ID NO: 120540 - DNA, 1059 bp, Cytophaga hutchinsonii ATCC 33406
  CDS (1)..(1059): transl_table=11
atgacacacatcaataaagaaaaacctgttctggtaacaggtgctacaggatatgtagctggctggattgtaaaaaaattactggatgaaggttttaccgtgcatgcatctgtacgaaatccaaccgataacgacaaactgaaatatttaaatacccttgcccagcaggcttccggaacgattaaatattttaaagctgatctgttagaggcaggctcgtatgatgaagctatggaaggttgtgaattggtatttcataccgcttctccgttcattaataaagtagcagacccgcaacgtgatttagtagatccggcattgatcggaaccaaaaacgtattggcttcagtaaataaaactgcgtctgtaaaacgtgtggtgttaaccagcagtgtagccgctattattggtgatgccattgactgcagcaaaatgcctgacggggctggcacggaagcacattggaacacgacttctacgttaaatcaccagccgtataattattctaaaacagtggcagaacgggctgcctgggaaataaataaaaaacagaatcgctgggatcttgttgtgataaatccttcactggttatcggaccaggtttaaatccatttgctacttctgaaagctttaatattgtgcgccaggtcggcgatggcagcatgcgttttggcataccggattttaccatcggtgtagtggatgtacgtgatctggccgaagcccatgttattgccggcttaaagcctgacgccgaaggacggaatattatctcggcacaaaatacaggcttacttgaactggcaggtatgctgcgtaaaaagtttggtactgcttaccacttccctaccaggctattgcctaaatcattggtatggctgctggcgccgcttgccggctttaaacgcgacatgattaaccgaaacgttggttatccgtggcgcgtagataatacaaagagtattcagaagttaggaatacattacaggccgattgaagaatcaatcgttgaattgtttcagcagatgattgataacggaattgtgaagaaaaaataa

SEQ ID NO: 120541 - protein, 352 aa, Cytophaga hutchinsonii ATCC 33406
MTHINKEKPVLVTGATGYVAGWIVKKLLDEGFTVHASVRNPTDNDKLKYLNTLAQQASGTIKYFKADLLEAGSYDEAMEGCELVFHTASPFINKVADPQRDLVDPALIGTKNVLASVNKTASVKRVVLTSSVAAIIGDAIDCSKMPDGAGTEAHWNTTSTLNHQPYNYSKTVAERAAWEINKKQNRWDLVVINPSLVIGPGLNPFATSESFNIVRQVGDGSMRFGIPDFTIGVVDVRDLAEAHVIAGLKPDAEGRNIISAQNTGLLELAGMLRKKFGTAYHFPTRLLPKSLVWLLAPLAGFKRDMINRNVGYPWRVDNTKSIQKLGIHYRPIEESIVELFQQMIDNGIVKKK

SEQ ID NO: 120542 - DNA, 1023 bp, Hyphomonas neptunium ATCC 15444
  CDS (1)..(1023): transl_table=11
atggcgaaggttcttgtcacaggcgcaaccggcttcatcgccgggcatgtcatccaccagctgctcgaagcgggccatgaggtgatcggaacggcccgttccgcctcaaaggccgggccgctgaaccagaccctcagcgcctatgccggccggccggtctcaatcgaaatccgcgccgcagacctctccgccgatgcaggctggacagaggccgtggcgggggtcgacgtcgtccagcatgtcgcctcccccattccgctgaccgtgccgaagaatgccgatgagctgatcattcccgcccgcgacggcgcgctacgtgtgctgagggcggccaaggccgcgggcgtcaggcgcgtggtgatgacctcctcgatggcggcctgtgcctatggctggggcgaggcgcgccccaacccgatcaccgaggaacactggtcgcaggacaatggcgcggcggacatgaccccctacatccgctccaagctgatcgccgagcgggcggcatgggattatgtcagcgatgaaggcaagggcctggcgctgaccaccatcaacccggccctcgtgctcggcccggtgatgagcggggacttttccgcctcggtcgaaatcctcacccagctgatgtcgggcaagctgccgggcacgccgaaggtgggcttcgtggtggtggatgtgcgcgatgtggcggctgcccatgtggccgcgatgacgaacccggcggccgaaggcgaacgcttcctgctgggcgaccggttcatctggttccgcgacgtggccgaagtgctgcgccgcgagtttccagactatgcctcaaaagttccgtccagggacattcccggctggatggtccacctgatcgccctgatcaacccacccgccaaacagctcatccccgaactcagccgcgaacggcatatctccagcgagaaggcgcggcgcgttctggactggaccccgcgcagcagcgaagaagctgtgatcgcaggcgcgcggagcctgattgggtttggggtggtttga

SEQ ID NO: 120543 - protein, 340 aa, Hyphomonas neptunium ATCC 15444
MAKVLVTGATGFIAGHVIHQLLEAGHEVIGTARSASKAGPLNQTLSAYAGRPVSIEIRAADLSADAGWTEAVAGVDVVQHVASPIPLTVPKNADELIIPARDGALRVLRAAKAAGVRRVVMTSSMAACAYGWGEARPNPITEEHWSQDNGAADMTPYIRSKLIAERAAWDYVSDEGKGLALTTINPALVLGPVMSGDFSASVEILTQLMSGKLPGTPKVGFVVVDVRDVAAAHVAAMTNPAAEGERFLLGDRFIWFRDVAEVLRREFPDYASKVPSRDIPGWMVHLIALINPPAKQLIPELSRERHISSEKARRVLDWTPRSSEEAVIAGARSLIGFGVV

SEQ ID NO: 120544 - DNA, 1029 bp, Listeria monocytogenes str. 4b H7858
  CDS (1)..(1029): transl_table=11
atgaaaaataacgtattagtaacaggcggaactggatttttaggaatgcatattatctttcaattattgcaacaaggctatcaagtcaaaacaaccgtacgctctttaaaaagcaaagaaaaagtaatagaagtactgcaaaataatggaataacggattttacgcaattatcctttgtcgaacttgatttatccaaagatgaaggatggaaagaagcaatgctcgattgtaaatatgtgctaagtgtcgcatctccagtatttttcggtaaatttaaaaatgaagaagaattaatacgcccagcaatagaaggtattacaagaattttacaggccgcaaaagaggcaaaagtaaaacgagtagttatgacttcgaattttggcgctattggttttagcaacgcagataaaaatagcattacaacagaagcatattggaccgatgaactcgctaagggtttgtcagcatatgaaaaatctaaactaattgcagaaaaagaagcttggaaattcatggaaaatgaaacagaattggaatttgctaccatcaatccggttgccatttttggtccatcacaaagcagtcatgtctccggaagctttgacttattaaaaaatctgttaaatggttctatgaaacgtatcataaatattccgttaaacgtagtagatgcacgagatgttgccgatttacatattcgcgcaatgattactcctgaagcaaacggagaacgttttattgcttcagctgacggagaaattagtatggcagatatcgcacatttgcttcaacgagagcgtcctgaactagtgagtaaaatgccgaaaaaaacattgccaaatgccgctataagagcagctgctatatttagtaaacacgccaaagaaggcgagttgatgattaatatgaatcggcaaataagcaattcaaaagcgagagatcttttaggatggcagccgatttcgacaaaagaagaagccgttcttgctgcagtggatagtttggcaaagtatggtttattagattaa

SEQ ID NO: 120545 - protein, 342 aa, Listeria monocytogenes str. 4b H7858
MKNNVLVTGGTGFLGMHIIFQLLQQGYQVKTTVRSLKSKEKVIEVLQNNGITDFTQLSFVELDLSKDEGWKEAMLDCKYVLSVASPVFFGKFKNEEELIRPAIEGITRILQAAKEAKVKRVVMTSNFGAIGFSNADKNSITTEAYWTDELAKGLSAYEKSKLIAEKEAWKFMENETELEFATINPVAIFGPSQSSHVSGSFDLLKNLLNGSMKRIINIPLNVVDARDVADLHIRAMITPEANGERFIASADGEISMADIAHLLQRERPELVSKMPKKTLPNAAIRAAAIFSKHAKEGELMINMNRQISNSKARDLLGWQPISTKEEAVLAAVDSLAKYGLLD

SEQ ID NO: 120546 - DNA, 1047 bp, Prosthecochloris aestuarii DSM 271
  CDS (1)..(1047): transl_table=11
atggcacaacatccaatcgtctgcgtcaccggcgctactggttttattgcagcccatctgatcaaaaaactgctgcaacagggctacgctgtacggggaaccgtcaggaaactttcaaaacacagcagttaccggtttcttgaaaacctcgacggagcggcagaacgcctggagctcatcgaggccgatctgctctcccccggctctttcgatgcagccatcgggggaacgcaatatgtcatgcacacggcaagtccttacctgataaacgtcagagacccgcaaaaaaacctcgtagaacctgcactggagggaacacgctcggtgctcgaatcatgcagaaaagcctcaagcgtcaaacgcgtcgtgctcacctcatcaatcgccgctatcaccggcgcaccggacagtaacagggtcttcactgaaaatgactggaacacaacctcctcgctgaaagaaaacccgtatcactactcaaaaacccttgccgagcgggccgcatgggagttcatgcaggagcagccgggttttgacctggttgtcatcaaccccttcatggtgatcggtccttctctcggagcctcgctgaacacgaccaatcagatgatacgcgacattataaccggcgtctatcccggcattcttgatgtcaactggggatttgtcgatgtccgtgatgtcgccctggctcatatccgtgccatagaaaaacccgcagcccatggtcgatacctctgttcagcagaagcgctggatatgcgtaacgtggtcgcaatcctcagaaaggcagggtatggaaacgactataagttgccctctctcgacctgtcgggaaaagcagcgacaacactcatgaaactcgtctcatggagccagccacgcgataccggtgcctacctgagaacacatctcggacgtcgtatgcgctacgataacgataaaatccgaaaggaactcgacatccaattccgaaatatcgaaagctcactgcttgaaaccgtcgaagaccttatcagctgggggcatctgaagaagaagagctga

SEQ ID NO: 120547 - protein, 348 aa, Prosthecochloris aestuarii DSM 271
MAQHPIVCVTGATGFIAAHLIKKLLQQGYAVRGTVRKLSKHSSYRFLENLDGAAERLELIEADLLSPGSFDAAIGGTQYVMHTASPYLINVRDPQKNLVEPALEGTRSVLESCRKASSVKRVVLTSSIAAITGAPDSNRVFTENDWNTTSSLKENPYHYSKTLAERAAWEFMQEQPGFDLVVINPFMVIGPSLGASLNTTNQMIRDIITGVYPGILDVNWGFVDVRDVALAHIRAIEKPAAHGRYLCSAEALDMRNVVAILRKAGYGNDYKLPSLDLSGKAATTLMKLVSWSQPRDTGAYLRTHLGRRMRYDNDKIRKELDIQFRNIESSLLETVEDLISWGHLKKKS

SEQ ID NO: 120548 - DNA, 1026 bp, Erythrobacter sp. NAP1
  CDS (1)..(1026): transl_table=11
atgagcaagaccgtactcgtaaccggcgcaaccggctacatcgcaggcgaattgatccgccagttgctggcgcgcgactggaccgttcacaccaccgtccgcaacaaggcaaagagcgaggcgctgctgcgcgatcgcctcggcaatccgggcgaggacaaggtcaaggttttcgaggcagagcttatgtccgacgatggctgggcagaggcggttgccgggtgcacgcatgtcgcgcacgtcgcgtctcccatcgcagcatcgaccccgaaggacgagaacgagatgattgtccccgcccgcgaaggtacgctgcgcgcgctgcgatttgccaaggatgcgggggtcacgcgctttgtccagaccagctcaatggcagcggtcgcatatggtcgcagcgacaaggtctacacggtcgatgagagcgactggaccgacatcactcacccggatgtttatccgtacatcaagtccaagaccattgcagagcgcaccgcgcgcgattgggtggccgagcacggtggcgacatggaattcgtctcggtcaatccctccatggtgcttggccctgtcgacgatcccgatttctcgccatcggtggaggctgtgcgccaattgctcgcaggcgatgtgccgatggcacccgaccttggctttgcaatcgtcgacacgcgcgacaccgccgaactgcatgtcaaatgcctcgaagagccaggacttgcgggagagcgttttctcgcagccggcgacttttacaagttcatcgatgtggcgaagatgctcaaggatggcctgccaccggagcacacgaagaaggtgccgaccaaggtcatgcccaacttcctcgtgcacattctcagtctgttcaacgaaggcatccgctcgatcaagagtgagcttgggaagagccgccattgcgataccagccacgcgaaggagcggctcggatgggaaacgcgccctgcaaaagaaagcgtgatcgattgcgccaagagcctgatcgaacacggtgtcgtgaaggtctga

SEQ ID NO: 120549 - protein, 341 aa, Erythrobacter sp. NAP1
MSKTVLVTGATGYIAGELIRQLLARDWTVHTTVRNKAKSEALLRDRLGNPGEDKVKVFEAELMSDDGWAEAVAGCTHVAHVASPIAASTPKDENEMIVPAREGTLRALRFAKDAGVTRFVQTSSMAAVAYGRSDKVYTVDESDWTDITHPDVYPYIKSKTIAERTARDWVAEHGGDMEFVSVNPSMVLGPVDDPDFSPSVEAVRQLLAGDVPMAPDLGFAIVDTRDTAELHVKCLEEPGLAGERFLAAGDFYKFIDVAKMLKDGLPPEHTKKVPTKVMPNFLVHILSLFNEGIRSIKSELGKSRHCDTSHAKERLGWETRPAKESVIDCAKSLIEHGVVKV

SEQ ID NO: 120550 - DNA, 1017 bp, Flavobacteria bacterium BBFL7
  CDS (1)..(1017): transl_table=11
atgaaaaaagtattagtaacgggaatttcaggatatgttggtctgcacgcagcggtggaattattaaaaaatggatatgcagtcaaaggttcagttaggaatttatccaaaagagacgaattaacacgagcaattcgtagagaagttgagcccaaaggtaatttagagttttgtgaacttaatcttttaaaagatgaaggttggaaggaagcaatgcaagattgtgactatgttcttcatattgcttcgccttatgttgcaagtgagcccaaagatgaaaatgagataataaagcctgctattgatggcacacaacgagctttaaaatttgctaaaagtaatggcgtaaaacgcgtggttttaacttcttctatggtagcaatgtttggtgatgcaaataagtcattaaacatagaacaagatacttggactaatccaaatgctaaaaatatgtccgcctatgtaaaaagtaaaacacttgcagaaaaaagtgcttgggattttattgaaactcaaaaaggtgataataagttggaattggttgttattaatccaggtccaatttggggaccaaccttgtcagataaactctctggtgaatcaatgaatattgttaaggatatgattactggtaaaatgccaatgcttgctaaagtacgcattaatatgtcagatgtgagagatattgccagtattcacgttaaggctttagagaatgagaaggctaatggacaacgatttgttgttgcaactgaaaatccatattcgtttaaagaaatggctcaaatcttaaaatcaaatggaaatgataaagtaagcactttagaaggtccaaatttcttattaaaatttatgtctaattttaatagcgatttaaaaggtatgaagccttttattggaaacacttatgacgcagatgttagcaaaacaaaggaagtgtttaattggaagccgatttcttttgaaaagtccattttagacacagttcaatcagtaaaacaacgattgaacaaatag

SEQ ID NO: 120551 - protein, 338 aa, Flavobacteria bacterium BBFL7
MKKVLVTGISGYVGLHAAVELLKNGYAVKGSVRNLSKRDELTRAIRREVEPKGNLEFCELNLLKDEGWKEAMQDCDYVLHIASPYVASEPKDENEIIKPAIDGTQRALKFAKSNGVKRVVLTSSMVAMFGDANKSLNIEQDTWTNPNAKNMSAYVKSKTLAEKSAWDFIETQKGDNKLELVVINPGPIWGPTLSDKLSGESMNIVKDMITGKMPMLAKVRINMSDVRDIASIHVKALENEKANGQRFVVATENPYSFKEMAQILKSNGNDKVSTLEGPNFLLKFMSNFNSDLKGMKPFIGNTYDADVSKTKEVFNWKPISFEKSILDTVQSVKQRLNK

SEQ ID NO: 120552 - DNA, 1110 bp, marine gamma proteobacterium HTCC2143
  CDS (1)..(1110): transl_table=11
atgaccgctatttcaggccccgacgcgggccccgttgcagtaactggcgcctctgggtttattggatcccatgtcgttaagaatttagttgaagccgggtatcacgtaagggcctgtgttcgcgatgccagccggacagataaaatgtcctatttacatgatattaatgccaaaggaccaggcggtattgaactacacagtattgatttgctggattcgaaaaatggcgcttatgacgacgtttttactggctgtgccgccgtatttcatgtcgccgccgacttaggaacagatccaaaatatggtccaccaactccgcaaatgacctatgacgctttgctggaggccacggccggggtactcgattcgtgtaagaaagccggaaccgttcaacgcgtagtctatacgtcatcgtctgcggcaatcatggggcccggcgctccagatcggccaatagactatatctataccgaagacgactgggctggaggtacctacgaatcactgcaagatcgttatacctcaacaaataggaagggggacgtgttcaaaaactggaacatcgaacgttcttcctatgcaaaaggtaagttagatgcagaaaaatatgcttacaaattcggcgaggagtccggtattgacgtggtatcagtttgtccgtgtcacgtattggggcctttaatgggggcgccccataattcagtctggcaacaacggattgggcagtttttggaagggggcgacgggggttttaaaggtaatggtcaagactggaatattattgatgtccgcgatattgctcaagcccaacgtttattggctaccagtgaagtcgccaaaaatggctcgcgctacatgatggttgccaccgatgaatctggcgagcctaccactcgggaactgattgatattcttagcggtatgtatccggacattgatgtcgccagagattatcaccctgaacaaagcaatacccgcttacgcgcacggtgtacaaaagccatggaagagctggggttaaaacctcacgctgttcttgagaccttgcgagataccgcagagtcgctgctagaacttggcgttattaccccggcgaagaagggcggctga

SEQ ID NO: 120553 - protein, 369 aa, marine gamma proteobacterium HTCC2143
MTAISGPDAGPVAVTGASGFIGSHVVKNLVEAGYHVRACVRDASRTDKMSYLHDINAKGPGGIELHSIDLLDSKNGAYDDVFTGCAAVFHVAADLGTDPKYGPPTPQMTYDALLEATAGVLDSCKKAGTVQRVVYTSSSAAIMGPGAPDRPIDYIYTEDDWAGGTYESLQDRYTSTNRKGDVFKNWNIERSSYAKGKLDAEKYAYKFGEESGIDVVSVCPCHVLGPLMGAPHNSVWQQRIGQFLEGGDGGFKGNGQDWNIIDVRDIAQAQRLLATSEVAKNGSRYMMVATDESGEPTTRELIDILSGMYPDIDVARDYHPEQSNTRLRARCTKAMEELGLKPHAVLETLRDTAESLLELGVITPAKKGG

SEQ ID NO: 120554 - DNA, 1740 bp, Cercospora nicotianae
  CDS (499)..(1572)
cacacatagtcacaaactacctctctgcaacgaagtcgccagcaatggagtatgagacagtccgcaagctagtcccaggctactgtagcctcaaaagaagctaggctcaatgaagcacaaaaagcctcaaggatcttccgcaggcttgctgctcttggctgcctggcttcgatgtccgactcggcaaacgcagatacctcgccgcatgttgcacgaaatatgcggctcagcggcaagcagcgagcacttcgattcgttggttgtgacttcttgctagtgagcggaggaagcaccgtgagcgcgtgggtgtagcccatcaggatttgccattcccaggcagtacgcggcaacaccactcatatcccgatgacttgattgccggtcactgcgtcaacccaggccttgatccgactatgtgcactttcacgaagtgttcgcgatttgacaacccgctcttgcaactcttctgaacacagctctgcacaaattgccgcagttatggccgactctctggttctattgactggtgctaccggcttcattggctttcgtatcttggtcgagctgctccgtcaaggatacagcgtgcgagctgtgatccgcagtgctgccaagggacaatggcttgagtcacggctgactgccgtgatgaaaggctcggactacaaggacaggttccaaactaccattgtggcggatttcgtgacagatggagctttcgatcaagcagctgagaacacgtcttacattatccacgtggccagcccgatagtcagctcggacaacccagacgactgggaacacgacttcaaacgtgttgctgtgaaaggcagtattggggtcctggaggcagccaaacgaagcggaactgtgcgacgagtcgtcatcacatctagcatggttggacttttctcgccgaaagctctttttgctgagccatctgaggtgcctctgaatgcagaatcgcgcattccggaaatggagcctccttatgcgcacaaaatgctggcataccaagctgggaagatcgcaagcatcaacagcgcggaagcttggatcaagcacgagaaaccggcgttcgatcttattcacatgcacccgtccttcgtgactggtcgggatgacctagcgacgactcgcgaggatctgcggaaattctcgtcaaactggcattcgatgcagattgtactcggccacaagaatcctatcggcaagccaatcctgacatgccacaacgatgatgtcgctcgctgtcatgtatcggcgctggatcccaaggtcgcaggcaatcagagtttcctcatttcgtgcagtccggaggatggatccgaatgggataatgtgaagaagatcgtgcagagggagtttcctgaagcggttgcgcagggcgtgttgcccaatgacggtcacatgccgacagtgaataaaggcgtcagatttgacgtccggaaaactgaggagacctttggcttcaagcacattccctacgaggcacaagtccttgatgtggtcaagcagtacttggagttgccggagaaggatgaaggggtggagatctcgacgacggcgtaggaagaagtatatatgcccattttactctcacatttcctgttcatattgcttccgatctcttcagtcgcctgctcacgttgcaagaagcagcactggcgaagctgaagtcgaatctcgggatgtgctcggggccgttcgggccgatgccaagaccatctcgtcgcccag

SEQ ID NO: 120555 - protein, 357 aa, Cercospora nicotianae
MADSLVLLTGATGFIGFRILVELLRQGYSVRAVIRSAAKGQWLESRLTAVMKGSDYKDRFQTTIVADFVTDGAFDQAAENTSYIIHVASPIVSSDNPDDWEHDFKRVAVKGSIGVLEAAKRSGTVRRVVITSSMVGLFSPKALFAEPSEVPLNAESRIPEMEPPYAHKMLAYQAGKIASINSAEAWIKHEKPAFDLIHMHPSFVTGRDDLATTREDLRKFSSNWHSMQIVLGHKNPIGKPILTCHNDDVARCHVSALDPKVAGNQSFLISCSPEDGSEWDNVKKIVQREFPEAVAQGVLPNDGHMPTVNKGVRFDVRKTEETFGFKHIPYEAQVLDVVKQYLELPEKDEGVEISTTA

SEQ ID NO: 120556 - DNA, 1481 bp, Zea mays
  CDS (181)..(1296)
ctcgatcgtcgtcatcacgctcgaccgcacaactgcaccaaggggggaggagacctaaaaactactacatcttttagctacacatctagctaaagatcgagaggggtaaataaggacgagcgggcgcgagctagaagagcagctgcaggtactaccatcatcgtcgtcgtcgtcgccaggatgaccgtcgtcgacgccgtcgtctcctccaccgatgccggcgcccctgctgccgccgccaccgcggtaccggcggggaacgggcagaccgtgtgcgtgaccggcgcggccgggtacatcgcctcgtggttggtgaagctgctgctcgagaagggatacactgtgaagggcaccgtcaggaacccagatgacccgaagaacgcgcacctcaaggcgctggacggcgccgccgagcggctgatcctctgcaaggccgatctgctggactacgacgccatctgccgcgccgtgcagggctgccagggcgtcttccacaccgcctcccccgtcaccgacgacccggagcaaatggtggagccggcggtgcgcggcaccgagtacgtgatcaacgcggcggcggaggccggcacggtgcggcgggtggtgttcacgtcgtccatcggcgccgtgaccatggaccccaagcgcgggcccgacgtcgtggtcgacgagtcgtgctggagcgacctcgagttctgcgagaaaaccaggaactggtactgctacggcaaggcggtggcggagcacgcggcgtgggagacggcccggcggcggggcgtggacctggtggtggtgaaccccgtgctggtggtgggccccctgctgcaggcgacggtgaacgccagcatcgcgcacatcctcaagtacctggacggctcggcccgcaccttcgccaacgccgtgcaggcgtacgtggacgtgcgcgacgtggccgacgcgcacctccgcgtcttcgagagcccccgcgcgtccggccgccacctctgcgccgagcgcgtcctccaccgcgaggacgtcgtccgcatcctcgccaagctcttccccgagtaccccgtcccagccaggtgctccgacgaggtgaatccgcggaagcagccgtacaagttctccaaccagaagctccgggacctggggctgcagttccggccggtcagccagtcgctttacgacacggtgaagaacctccaggagaagggacacctgccggtgctcggagagcggacgacgacggaggccgccgacaaggatgcccccacggccgagatgcagcagggagggatcgccatccgtgcctgagagggcgatgccacacatgaacacaaagcaatgttcatactgctgccctgcacctgctgtgtaaacaggcctgtgtttgttctggctgatagtgatgtaccctaagacttgtaacgtcatgttcgttcttgtgaactatagcgagtgaataaaattggttaatgttggatgttcaaaaaaaaaaa

SEQ ID NO: 120557 - protein, 371 aa, Zea mays
MTVVDAVVSSTDAGAPAAAATAVPAGNGQTVCVTGAAGYIASWLVKLLLEKGYTVKGTVRNPDDPKNAHLKALDGAAERLILCKADLLDYDAICRAVQGCQGVFHTASPVTDDPEQMVEPAVRGTEYVINAAAEAGTVRRVVFTSSIGAVTMDPKRGPDVVVDESCWSDLEFCEKTRNWYCYGKAVAEHAAWETARRRGVDLVVVNPVLVVGPLLQATVNASIAHILKYLDGSARTFANAVQAYVDVRDVADAHLRVFESPRASGRHLCAERVLHREDVVRILAKLFPEYPVPARCSDEVNPRKQPYKFSNQKLRDLGLQFRPVSQSLYDTVKNLQEKGHLPVLGERTTTEAADKDAPTAEMQQGGIAIRA

SEQ ID NO: 120558 - DNA, 1425 bp, Aplysia californica
  CDS (1)..(1425)
atggcgtcccttgtattggtcacagatgctaccagcttcatctcatcacacatcatccgacagctccaggaagatggctgtcaggtcaggggaacggtcagctcgctgtccgacgaggaggagaggatcaaggtcctgcacgagctttgtcctgaggccaagttcaaggtcgaggtcgtggaggctgaccccgccaagcctgagtcctgggagagtgccatgaaggatgtccagtacgtgatcctcgccatcaagcccaccgcggcagtgcctgcagcgacagaaggagaggcgccaacgcagccggcagtggaggccgttctcaacgtgttcaaggcctgcgtggccgctaagtcggtcaagcgtgttgtgttgacaagctcttaccaggctgtctgtggtgctccggcagcccccaatgacaaggttcacacagaggccgactgggctgacgcagagacagctgaacctcttatcaagtcagtcatcctggcagagaaggccgcgtgggactttgtcaaagagctcacagatgcagacaagattgaattgtgtgtgatgaaccccacaatgcccctgggacccccattgattgatgcccagcatgatatcgttcgtaccctgttggaccgaggcatcactggctgtccccgtgtctgctactctgtggtggatgtgagagatgtggccactgcacacgccaaggctctcactcttgatgaagtggctggaaaccgtcacatcctccatggagccaatctatgggtgaaggacgctgccctcgctttgtctaaggaattcaaaccttttgggtacagtataccgaccatcagcctgcctaacgttgccttgtgggggctcagtctgttcaacaagacagccaaaacattcctgcccaatgtcggcaaacagagtcagtttgacaacaccaggatgaaggatgtgttgggcgttacaccacgcgacgtgaaagatacggtggtggatgaggccaacgccctcatagagagaggtctcggcaaaaagcccaagaaagtccgcaaccagggggcggccgccgcaccagaaagtgcagaggccaccaaggctgaagaagagggagcagagaagaaagagggtgagggcgaggagaagcccaaagagaacggagaggtaaaggacgaggatggagagaagaaggaagaggaccagaaggacgctgatggaggggacacgccagcccccgcagctgctggagaggggaagacggaggagagtcagaaggaggaggagaaacccgcagctgaggcgtggaggagaagaaagaggaaggaggagcaggagatgcagcaccagcagcggaagaggcaaaggcggagaattaagggcccagatataggacatgggcttgtcgctactactagtgcatctatttcttgttcttga

SEQ ID NO: 120559 - protein, 474 aa, Aplysia californica
MASLVLVTDATSFISSHIIRQLQEDGCQVRGTVSSLSDEEERIKVLHELCPEAKFKVEVVEADPAKPESWESAMKDVQYVILAIKPTAAVPAATEGEAPTQPAVEAVLNVFKACVAAKSVKRVVLTSSYQAVCGAPAAPNDKVHTEADWADAETAEPLIKSVILAEKAAWDFVKELTDADKIELCVMNPTMPLGPPLIDAQHDIVRTLLDRGITGCPRVCYSVVDVRDVATAHAKALTLDEVAGNRHILHGANLWVKDAALALSKEFKPFGYSIPTISLPNVALWGLSLFNKTAKTFLPNVGKQSQFDNTRMKDVLGVTPRDVKDTVVDEANALIERGLGKKPKKVRNQGAAAAPESAEATKAEEEGAEKKEGEGEEKPKENGEVKDEDGEKKEEDQKDADGGDTPAPAAAGEGKTEESQKEEEKPAAEAWRRRKRKEEQEMQHQQRKRQRRRIKGPDIGHGLVATTSASISCS

SEQ ID NO: 120560 - DNA, 978 bp, Malus domestica
  CDS (1)..(978)
atgagcagcggagcagggaaggtcgtgtgcgtcaccggtgcgtctggatacattgcttcatggctcgttaagcttcttctccagcgcggctacaccgtcaaggcctctattcgcgacccaaatgatccaactaagacagagcacctgcatgcgcttgatggagcccaagacagacttcaacttttcaaagcaaatctgttggaagaaggttcttttgactctgctgttgagggttgtgaaggcgtattccatactgcatctcccttttatcatgatgtcacagacccaaaggcagaactacttgaacctgcggtaaaggggacccttaatgttcttaattcgtgtgcgaaatcaccatcaatcaaacgggtggttttgacatcttctatagccgctgtagcatataatggaaagcctcgaactcctgatgtagtagttgatgagacttggtttacagatccagatgtttgtaaggaatcaaagctttggtacgtgctttcaaagactttggctgaagatgctgcgtggaaatttgtaaaggagaagggtattgacttggttacaattaaccccgcaatggtgataggtcctctgttacagccaactcttaatacaagtgctgcagcagttttaaatgttattaagggagctcgaacttttccaaatgcaagttttggatggattaacgttaaagatgttgccaatgcacatattcaagcatttgagaggcctaccgctagtggcagatattgtttggttgagagagttgcccacttctcagaagttgtgagaattttacgtgagctgtaccctactttgcaacttccagagaagtgtgcagacgacaagccttttgtgccaacatatcaggtgtccaaggagaaggcgaagagcttgggtgtcgaatttattccactagatgttagcctcaaggaaacagttgaaagtctgaaggaaaagggttttgtcaatttctga

SEQ ID NO: 120561 - protein, 325 aa, Malus domestica
MSSGAGKVVCVTGASGYIASWLVKLLLQRGYTVKASIRDPNDPTKTEHLHALDGAQDRLQLFKANLLEEGSFDSAVEGCEGVFHTASPFYHDVTDPKAELLEPAVKGTLNVLNSCAKSPSIKRVVLTSSIAAVAYNGKPRTPDVVVDETWFTDPDVCKESKLWYVLSKTLAEDAAWKFVKEKGIDLVTINPAMVIGPLLQPTLNTSAAAVLNVIKGARTFPNASFGWINVKDVANAHIQAFERPTASGRYCLVERVAHFSEVVRILRELYPTLQLPEKCADDKPFVPTYQVSKEKAKSLGVEFIPLDVSLKETVESLKEKGFVNF

SEQ ID NO: 120562 - DNA, 1376 bp, Populus trichocarpa
  CDS (99)..(1115)
gaaaacacacctcctctcttctttgtctctgtctgttctccactttcccagtcaccaaactcgtatgcatataattacatttatctaaatataacaacatgcctgttgatgcttcatcactttcaggccaaggccaaactatctgtgtcaccgggggtggtggtttcattgcttcttggatggttaaacttcttttagataaaggttacactgttagaggaactgcgaggaacccagctgatcccaagaattctcatttgagggagcttgaaggagctgaagaaagattaactttatgcaaagctgatcttcttgattatgagtctcttaaagagggtattcaagggtgtgatggtgttttccacactgcttctcctgtcacagatgatccggaagaaatggtggagccagcagtgaacgggaccaaaaatgtgataattgcggcggctgaggccaaagtccgacgagtggtgttcacgtcatcaattggcgctgtgtacatggatcccaataagggcccagatgttgtcattgatgagtcttgctggagtgatcttgaattctgcaagaacaccaagaattggtattgctatggaaaggctgtggcagaacaagctgcatgggatatggctaaggagaaaggggtggacctagtggtggttaacccagtgctggtgcttggaccattgttgcagcccactgtcaatgctagcatcactcacatcctcaagtacctcaccggctcagccaagacatatgctaactctgttcaagcttatgtgcatgttagggatgtggcactagcccacattttagtctttgagacgccttccgcctccggccgttacctttgctctgagagcgttctccaccgtggagaggtggtggaaatccttgcaaagttcttccctgagtaccccatccctaccaagtgctcagatgagaagaacccaagaaaacaaccttacaagttctcaaaccagaagctaagggatctgggtttcgaattcaccccagtaaagcagtgtctgtatgaaactgttaagagtttgcaggaaaagggtcaccttccaatcccaaaacaagctgcagaagagtctttgaaaattcaataaggcctcttggaactatttattaggattgttccataccccaagtttggatcgcaaatgctagggaaaggagcatattaaagaatgccaatgtgcaggtgttttagtattttacatgaagaactctgattatccttgtgcttataataatttttttcaagtgagtgtcttcaaatgttcaacttgtatttgtggttgtctaactttatccagtttcaatataaaagaggaacgattctatgtcttaaaaaaaaaaaaaaaaaa

SEQ ID NO: 120563 - protein, 338 aa, Populus trichocarpa
MPVDASSLSGQGQTICVTGGGGFIASWMVKLLLDKGYTVRGTARNPADPKNSHLRELEGAEERLTLCKADLLDYESLKEGIQGCDGVFHTASPVTDDPEEMVEPAVNGTKNVIIAAAEAKVRRVVFTSSIGAVYMDPNKGPDVVIDESCWSDLEFCKNTKNWYCYGKAVAEQAAWDMAKEKGVDLVVVNPVLVLGPLLQPTVNASITHILKYLTGSAKTYANSVQAYVHVRDVALAHILVFETPSASGRYLCSESVLHRGEVVEILAKFFPEYPIPTKCSDEKNPRKQPYKFSNQKLRDLGFEFTPVKQCLYETVKSLQEKGHLPIPKQAAEESLKIQ

SEQ ID NO: 120564 - DNA, 1511 bp, Saccharum officinarum
  CDS (172)..(1290)
acacacaaaggggagattaacctaaaaactaactctcttcaacttcctctgcctttctgcttcggcactactactactactacgagacacaccgcgagctagctagctttcgtgacgaactagctaaagaggaacagctggtcggtctcttatcatcatcgccgcgccaagatgaccgtcgtcgacgccgtgtccactgatgccgccggcgcccctgcagccgccgcggcaccggtgcagcagcccgggaacgggcagaccgtgtgcgtcaccggtgcggccgggtacatcgcctcgtggctcgtcaagctgctgctcgagaagggatacactgtcaagggaacagtcaggaacccagatgacccgaagaacgcgcacctcaaggcgctggacggcgccgccgagcggctgatcctctgcaaggccgacctcctggactacgacgccatctgccgcgccgtgcagggctgccatggcgtcttccacaccgcctccccggtcaccgacgacccggagcaaatggtggagccggcggtgcgcggcacggagtacgtgatcaacgcggcggcggaggccggcacggtgcggcgggtggtgttcacgtcctccatcggcgcggtgaccatggaccccagccgcgggcccgacgtcgtggtcgacgagtcgtgctggagcgacctcgagttctgcaagaaaaccaggaactggtactgctacggcaaggcggtggcggagcaggcggcgtgggacgcggcccggcagcgcggcgtggacctggtggtggtgaacccggtgctggtggtgggcccgctgctgcagccgacggtgaacgccagcatcgcgcacgtggtcaagtacctggacggctccgcgcgcaccttcgccaacgccgtgcaggcgtacgtggacgtccgcgacgtcgccgacgcgcacctccgcgtcttcgagagcccgcgcgcgtccggccgatacctctgcgccgagcgcgtcctccaccgcgaggacgtcgtccgcatcctcgccaagctcttccccgagtaccccgtccccaccaggtgctccgacgaggtgaacccgcggaagcagccgtacaagttctcgaaccagaagctccgggacctgggcctggagttccggccggtgagccagtcgctgtacgacacggtgaagaaccttcaggagaagggccacctgccggtgctcggagagcagacgacggaggccgacgacaaggaggcggcccccgccgccgccgagctgcagcagggaggaatcgccatccgtgcgtaagagggagatgccacgtacacatgaacagaaaagcaatgttcatactgccctgcccctgccccagctgtgtaaacaaactagtgtttgttcgctggctgatacccgtaccctaagcttgttgtaacgtcatgttcgttcttgtggactatagtgatgagtgaataaaaatggctaatgttcattcattttccactttgaaaaaaaaaaaaaaaaaaaaaaaa

SEQ ID NO: 120565 - protein, 372 aa, Saccharum officinarum
MTVVDAVSTDAAGAPAAAAAPVQQPGNGQTVCVTGAAGYIASWLVKLLLEKGYTVKGTVRNPDDPKNAHLKALDGAAERLILCKADLLDYDAICRAVQGCHGVFHTASPVTDDPEQMVEPAVRGTEYVINAAAEAGTVRRVVFTSSIGAVTMDPSRGPDVVVDESCWSDLEFCKKTRNWYCYGKAVAEQAAWDAARQRGVDLVVVNPVLVVGPLLQPTVNASIAHVVKYLDGSARTFANAVQAYVDVRDVADAHLRVFESPRASGRYLCAERVLHREDVVRILAKLFPEYPVPTRCSDEVNPRKQPYKFSNQKLRDLGLEFRPVSQSLYDTVKNLQEKGHLPVLGEQTTEADDKEAAPAAAELQQGGIAIRA

SEQ ID NO: 120566 - DNA, 1116 bp, Zea mays
  CDS (1)..(1116)
atgaccgtcgtcgacgccgtcgtctcctccaccgatgccggcgcccctgccgccgccgccgcaccggtaccggcggggaacgggcagaccgtgtgcgtcaccggcgcggccgggtacatcgcctcgtggttggtgaagctgctgctcgagaagggatacactgtgaagggcaccgtgaggaacccagatgacccgaagaacgcgcacctcagggcgctggacggcgccgccgagcggctgatcctctgcaaggccgatctgctggactacgacgccatctgccgcgccgtgcagggctgccagggcgtcttccacaccgcctcccccgtcaccgacgacccggagcaaatggtggagccggcggtgcgcggcaccgagtacgtgatcaacgcggcggcggaggccggcacggtgcggcgggtggtgttcacgtcgtccatcggcgccgtgaccatggaccccaagcgcgggcccgacgtcgtggtcgacgagtcgtgctggagcgacctcgagttctgcgagaaaaccaggaactggtactgctacggcaaggcggtggcggagcaggcggcgtgggaggcggcccggcggcggggcgtggacctggtggtggtgaaccccgtgctggtggtgggccccctgctgcaggcgacggtgaacgccagcatcgcgcacatcctcaagtacctggacggctcggcccgcaccttcgccaacgccgtgcaggcgtacgtggacgtgcgcgacgtggccgacgcgcacctccgcgtcttcgagagcccccgcgcgtccggccgccacctctgcgccgagcgcgtcctccaccgcgaggacgtcgtccgcatcctcgccaagctcttccccgagtaccccgtcccagccaggtgctccgacgaggtgaatccgcggaagcagccgtacaagttctccaaccagaagctccgggacctggggctgcagttccggccggtcagccagtcgctttacgacacggtgaagaacctccaggagaagggccacctgccggtgctcggagagcggacgacgacggaggccgccgacaaggatgcccccgcggccgagatgcagcagggagggatcgccatccgtgcctga

SEQ ID NO: 120567 - protein, 371 aa, Zea mays
MTVVDAVVSSTDAGAPAAAAAPVPAGNGQTVCVTGAAGYIASWLVKLLLEKGYTVKGTVRNPDDPKNAHLRALDGAAERLILCKADLLDYDAICRAVQGCQGVFHTASPVTDDPEQMVEPAVRGTEYVINAAAEAGTVRRVVFTSSIGAVTMDPKRGPDVVVDESCWSDLEFCEKTRNWYCYGKAVAEQAAWEAARRRGVDLVVVNPVLVVGPLLQATVNASIAHILKYLDGSARTFANAVQAYVDVRDVADAHLRVFESPRASGRHLCAERVLHREDVVRILAKLFPEYPVPARCSDEVNPRKQPYKFSNQKLRDLGLQFRPVSQSLYDTVKNLQEKGHLPVLGERTTTEAADKDAPAAEMQQGGIAIRA

SEQ ID NO: 120568 - DNA, 1227 bp, Vigna unguiculata
  CDS (42)..(1019)
cagagtatcagctcaaagcagaacaaacaacataatccagaatgagcaccggcgccggacaagtagtgtgtgttaccggagcttccggttacattgcttcctgggtcgttaagtttcttctcgaacgcggctacaccgtgaaggccaccgttcgcgacacaagtgatcccaaaaaggtagatcacttgcttagcctcgatggtgctaaggaaaggctgcatctcgtcaaggcgaatcttctagaagaaggttcctttgactctgccgttgaaggttgtcacgctgtgttccacactgcttctccctttttcgacgatgccaaggacccgcagactgagttgttggatccagctttgaaggggactctgaatgttctgaaatcgtgcgtgaactcgcccacgctgaagcgcgtggttgtcacttcttctattgctgcagtttcgttcaacgacaggcccaaaaaccctgatgtagtggttgacgagacttggtattccgacccagaatactgtaagagaaatgggatatggtataacctctcaaagactttggccgaagatgctgcctggaaatttgcgaaagaaaacaatattgacttggttacagccaaccctgcattggttgttggacctctcttgcaaccagttcttaacactagttctgcagcagttttaaatttaattaatggttcgccaacatttaaaaatgtgactttgggatgggtggacgtgagagatgttgcaattgcccatgttctggcatatgagaatgcttcagctaatggaagatatttactagttgagagagtggcacacttcggagacgttgtgaagattttgcatgatttgtacccaacattgcaacttccacagaagtgtgtagatgataggccatatgatccaatattccaggtttccaaggaaaaagcaaagagcttggggcttgaatttactcctttggaagtgagcatcaaggatactgttgaaagcttgaaggaaaagggttttatcaaattttaagttgttaccctttcttgaaagaaaccttctttagttctacacttggtttcttatgttcatgcttatgtacaataagacttatatcagaactgctaagtactgaaataagttactcttattgtgtggtttgtaagagtttgcattaaagactgtatccttgttatattattatggattgttatattattatggattaaaaaaaaaaaaa

SEQ ID NO: 120569 - protein, 325 aa, Vigna unguiculata
MSTGAGQVVCVTGASGYIASWVVKFLLERGYTVKATVRDTSDPKKVDHLLSLDGAKERLHLVKANLLEEGSFDSAVEGCHAVFHTASPFFDDAKDPQTELLDPALKGTLNVLKSCVNSPTLKRVVVTSSIAAVSFNDRPKNPDVVVDETWYSDPEYCKRNGIWYNLSKTLAEDAAWKFAKENNIDLVTANPALVVGPLLQPVLNTSSAAVLNLINGSPTFKNVTLGWVDVRDVAIAHVLAYENASANGRYLLVERVAHFGDVVKILHDLYPTLQLPQKCVDDRPYDPIFQVSKEKAKSLGLEFTPLEVSIKDTVESLKEKGFIKF

SEQ ID NO: 120570 - DNA, 1014 bp, Vitis vinifera
  CDS (1)..(1014)
atgggttcacaaagtgaaaccgtgtgcgtcaccggtgcctccggtttcatcggttcatggctggtcatgaggctcctggagcgcggctatactgttcgggccaccgttcgcgatccaactaacgtgaaaaaagtgaagcatttgctggacttgcccaaagcggagacgcatctgactctctggaaggcagatcttgctgatgaaggaagtttcgatgaagctattaaaggctgcaccggcgtcttccatgttgccacacccatggattttgaatcgaaggatcctgagaatgaagtgataaagccaactattgaagggatgttgggcataatgaaatcgtgtgctgccgcaaagactgtcagaaggcttgtattcacatcctccgcaggaactgtgaacattcaagaacaccaactgccagtgtacgatgaaagctgctggagtgatatggaattttgccgggctaaaaagatgactgcatggatgtactttgtctccaagacactggctgagcaagctgcatggaagtatgccaaggaaaataacattgacttcatcactatcataccgactcttgtggttggccccttcataatgtcatcaatgcctccaagcctcataactgctctttccccgatcactggaaacgaagctcattattcaattatacggcagggccaatttgttcacctggatgacctctgcaatgctcatatttacttgtttgagaatcctaaggcagagggacgttacatttgctcctcccacgattgtatcattctcgatcttgcaaaaatgcttagagaaaaataccccgagtataatatccccacagagttcaaaggtgttgatgagaacttgaagagtgtctgtttctcctccaagaagctgacagatttggggtttgagtttaaatacagcttagaggacatgtttactggagctgtggacacatgccgggccaagggattgcttcccccttcacatgagaaacctgtagatggcaagacctag

SEQ ID NO: 120571 - protein, 337 aa, Vitis vinifera
MGSQSETVCVTGASGFIGSWLVMRLLERGYTVRATVRDPTNVKKVKHLLDLPKAETHLTLWKADLADEGSFDEAIKGCTGVFHVATPMDFESKDPENEVIKPTIEGMLGIMKSCAAAKTVRRLVFTSSAGTVNIQEHQLPVYDESCWSDMEFCRAKKMTAWMYFVSKTLAEQAAWKYAKENNIDFITIIPTLVVGPFIMSSMPPSLITALSPITGNEAHYSIIRQGQFVHLDDLCNAHIYLFENPKAEGRYICSSHDCIILDLAKMLREKYPEYNIPTEFKGVDENLKSVCFSSKKLTDLGFEFKYSLEDMFTGAVDTCRAKGLLPPSHEKPVDGKT

SEQ ID NO: 120572 - DNA, 1020 bp, Fragaria ananassa
  CDS (1)..(1020)
atggccaccacccaacccatcatctcaacaaagtctgcttgtgtcatcggcggcaccggcttcgtgacgtctcagctgatcaagctcttgctagagaagggctatgccgtcagaaccactgttagagacccagataatctgaagaagatctcccacctaacagcactacaagagttgggagagctaacaatatttcgtggggatttaaccgatgaagggagctttgatgctgctatagcaggttctgatcttgttttccatgtagccacaccagtccactttggctcgccggatccagagaacgacatgatcaagccaggagtccaaggagtactaaacgttatgaaatcatgtgtgaaagcaaaaacagttaagcgagtcgttttgacatcatcagcagctgcagtaactgtcaatactcttagtggaacaggcttgatcgccgacgaaaatgattggtctgatgttgagttcttgacaactgccaagccacctacttggggatatcctgtttcaaaggtactagctgagaagacagcatggaaatttgctgaagaaaacaacattgatctcatcactgtgatcccttctctcatggctggtgcttctctcactccagatatccccagcagtataggcctcgccacgtctttaattacaggaaatgagttcctcataaatggcttgaaaggcatgcaaatgctatcaggttccatatccattacacatgtggaggatgtctgccgagctcatatatttttggcagagaaagaatctgcttctggtcggtacatatgctgtgctgaaaatagtagtgttcctgaggttgcaaagttcctcagcaaaagatatcccgactacaaagtcccgactgagtttggagattttccatccaaggcgaagaccatactctcttcagaaaagcttaagaaggaggggttcactttcaagtacgggattgaagacatatatgaccaaactgtggagtacttgaaacttaagggggtgctgcagaactag

SEQ ID NO: 120573 - protein, 339 aa, Fragaria ananassa
MATTQPIISTKSACVIGGTGFVTSQLIKLLLEKGYAVRTTVRDPDNLKKISHLTALQELGELTIFRGDLTDEGSFDAAIAGSDLVFHVATPVHFGSPDPENDMIKPGVQGVLNVMKSCVKAKTVKRVVLTSSAAAVTVNTLSGTGLIADENDWSDVEFLTTAKPPTWGYPVSKVLAEKTAWKFAEENNIDLITVIPSLMAGASLTPDIPSSIGLATSLITGNEFLINGLKGMQMLSGSISITHVEDVCRAHIFLAEKESASGRYICCAENSSVPEVAKFLSKRYPDYKVPTEFGDFPSKAKTILSSEKLKKEGFTFKYGIEDIYDQTVEYLKLKGVLQN

SEQ ID NO: 120574 - DNA, 1020 bp, Fragaria ananassa
  CDS (1)..(1020)
atggccaccacccaacccatcatctcaaccaagtctgcttgtgtcatcggcggcaccggcttcgtggcgtctcagctgatcaagctcttgctagagaagggctatgctgtcagaaccactgttagagacccagataatctgaagaagatctcccacctaacagcactacaagagttgggagagctaacaatatttcgtggggatttaaccgatgaagggagctttgatgctgctatagcaggttctgatcttgttttccatgtagccacaccagtccactttggctcgccggatccagagaacgacatgatcaagccaggagtccaaggagtactaaacgttatgaaatcatgtgtgaaagcaaaaacagttaaacgagtcgttttgacatcatcagcagctgcagtaactgtcaatactcttagtggaacaggcttgatcgccgatgaaaatgattggtctgatgttgagttcttgacaactgccaagccacctacctggggatatcctgtttcaaaggtactagctgagaagacagcatggaaatttgctgaagaaaacaacattgatctcatcactgtgatcccttctctcatggctggtgcttctctcactccagacatccccagcagtataggcctcgccacgtctttaattacaggaaatgagttcctcataaatggcttgaaaggcatgcaaatgctatcaggttccatatccattacacatgtggaggatgtctgccgagctcatatatttttggcagagaaagaatctgcttctggtcggtacatatgctgtgctgaaaatagtagtgttcctgaggttgcaaagttcctcagcaaaagatatcctgaatacaaagtcccgactgagtttggagattttccatccaaggcgaagaccatactctcttcagaaaagcttaagaaggaggggttcactttcaagtacgggattgaagacatatatgaccaaactgtggagtacttgaaacttaagggggtgctgcagaactag

SEQ ID NO: 120575 - protein, 339 aa, Fragaria ananassa
MATTQPIISTKSACVIGGTGFVASQLIKLLLEKGYAVRTTVRDPDNLKKISHLTALQELGELTIFRGDLTDEGSFDAAIAGSDLVFHVATPVHFGSPDPENDMIKPGVQGVLNVMKSCVKAKTVKRVVLTSSAAAVTVNTLSGTGLIADENDWSDVEFLTTAKPPTWGYPVSKVLAEKTAWKFAEENNIDLITVIPSLMAGASLTPDIPSSIGLATSLITGNEFLINGLKGMQMLSGSISITHVEDVCRAHIFLAEKESASGRYICCAENSSVPEVAKFLSKRYPEYKVPTEFGDFPSKAKTILSSEKLKKEGFTFKYGIEDIYDQTVEYLKLKGVLQN

SEQ ID NO: 120576 - DNA, 981 bp, Medicago truncatula
  CDS (1)..(981)
atgagcagcagcaacttgggaaatgttgtgtgtgtgactggcgcttcaggttacatcgcttcatggctcgtccgattgcttcttcatcgtggctacactgttaaagccaccgttcgcgatccaaatgatcccaagaaggttgaccacttggttaagcttgatggtgctaaggagagattgcaactgttcaaggcaaatctacttgaagaaggtgcctttgattctgttgttcaaggctgtcatggtgtctttcacactgcatctcccttttatcatgatgtcaaggatcctcaggctgaattgattgatcctgctctcaaagggactctcaatgttctcaactcatgtgctaaatccccatcactcaaacgtgttgttttaacttcttctattgctgctgttgcttataatgggaagcctcgaactcctgatgttgttgttgatgagacttggtttacagatgctgatttctgtgctaaatcaaatctgtggtatgtggtttcaaagacattggctgaagaagctgcctggaaatttgttaaagaaaacaacatcgatatggttactattaacccagcaatggtcatagggcctctcttgcaaccagtcctaaacacaagtgctgctgcaattctaaacctgattaatggtgcacagacatttccaaatgctagttttggatgggtcaatgtgaaagatgttgcaaatgcccatattctggcgtacgagaatgcttcagcgagtggaagacattgtttagttgagagagtagcacactactccgaagttgtgaggattttacgtgaactgtacccttcgttgcaactcccagagaagtgtgcggacgataagccatatgtgcctatatatcaggtttccaaagaaaaggcgaaaagcttgggacttgaatatactcctttggaagtgagcatcaaggagactgttgaaagtttgaaagaaaagaagttcgccaacctttaa

SEQ ID NO: 120577 - protein, 326 aa, Medicago truncatula
MSSSNLGNVVCVTGASGYIASWLVRLLLHRGYTVKATVRDPNDPKKVDHLVKLDGAKERLQLFKANLLEEGAFDSVVQGCHGVFHTASPFYHDVKDPQAELIDPALKGTLNVLNSCAKSPSLKRVVLTSSIAAVAYNGKPRTPDVVVDETWFTDADFCAKSNLWYVVSKTLAEEAAWKFVKENNIDMVTINPAMVIGPLLQPVLNTSAAAILNLINGAQTFPNASFGWVNVKDVANAHILAYENASASGRHCLVERVAHYSEVVRILRELYPSLQLPEKCADDKPYVPIYQVSKEKAKSLGLEYTPLEVSIKETVESLKEKKFANL

SEQ ID NO: 120578 - DNA, 978 bp, Ocimum basilicum
  CDS (1)..(978)
atgagtgtagcagcagccataaatgtgtgtgtaaccggagcatcgggtttcattgcatcatggctcgtcaaattcctgctccagaaaggttataccgtcaaggcatccgttcgtgaccccaatgaccctaagaagacagagcatttgcttgcacttgatggagctaaggagagactttgcttaatgaaagcaaatctgctggacgaagggtccttcgattccatagttgatggttgtgaaggtgttttccatactgcatctcctttctaccatgcagtcaaagatccacaggcagaattgattgatcctgcattgaaggggactctcaatgttcttggatcatgcgtcaaaacgtcttctgtaaaaaagattgttttgacgtcatctatagctgcggttgcatactgtggtaaacctcgcactcctgaagttatagttgatgaaacttggtggtctgatccagagatttgcaagcagatgcagctctggtatgtgctttcaaagacactggctgaggatgctgcttggaagtttgtgaaggagaaagatattgacatggttgccataaacccagcaatggtgattggcccattgttgcagccaacactaaacacaagtgctgctgcaatattgaacttgataaatggtgcggagacatacccaaattcttcatttggttggataaatgtcaaagatgttgcacatgcacatattttggcatttgagaatgcttcggcaagtggaagatactgtttagtggagagggtcgcccacttttcagaagttgtaaagatattacgtggactgtaccctacatataaacttcctgaaaagtgtgccgatgacaagccgtttgtgccgatataccaggtgtccaaagaaaaggctaagtctctgggtttggagttcactcctcttgaagagggaatcaaggaaactgttgaaaggctgaaagagaaaaatttctttaaaccttaa

SEQ ID NO: 120579 - protein, 325 aa, Ocimum basilicum
MSVAAAINVCVTGASGFIASWLVKFLLQKGYTVKASVRDPNDPKKTEHLLALDGAKERLCLMKANLLDEGSFDSIVDGCEGVFHTASPFYHAVKDPQAELIDPALKGTLNVLGSCVKTSSVKKIVLTSSIAAVAYCGKPRTPEVIVDETWWSDPEICKQMQLWYVLSKTLAEDAAWKFVKEKDIDMVAINPAMVIGPLLQPTLNTSAAAILNLINGAETYPNSSFGWINVKDVAHAHILAFENASASGRYCLVERVAHFSEVVKILRGLYPTYKLPEKCADDKPFVPIYQVSKEKAKSLGLEFTPLEEGIKETVERLKEKNFFKP

SEQ ID NO: 120580 - DNA, 1020 bp, Aspergillus oryzae
  CDS (1)..(1020)
atgtctaaaattctagtaacaggcgccaatggcttcattgccgcgcactgcatctctctccttctttccacaaaccaccacgtccgcggcacagtccgctccgaacaaaaggcgaccgcgacgcaagcagccctgactgccgcaggcgtggacataacgaacctcgaactggtcgttatcagcgacccgactgatgtaacccagtttgcgcccgctgtggccggttgcaagggcatcttgcatctggcgagcgcgttcagctacgatgccacgcccgaagaatttgaggagaagcttcttatccccgccctcaagggaacagttaccgtatgcgaagctgcctcacagtatcccgaagtcaaaaaggtggtgatcatgtcgagctttgcggcggtttatgatgcctcgttggggccgcagcccggaagggtgtatacggagaaggattggtgtccgttaacctatgaagagggaaagaatgcgagcctcgttccaattgcataccgagcgtctaaagtgatagctgagaaagcagcgtgggattacgttcgtgaccacgaagtcagctatcagctggtcacattgtgcccagggatggtctttggcaagatgattcatccgatcgagtcgttatcgcaattgaatgccagcaaccagattgtttgggatgtgttgaagggcaatggaatcccacctacaaaggcacccgtatggattgacgttgaagaccttgcccggactagtctgcaggcactaactgtggatctaccgtctcaccagcgcttcctggtgacggagggatcgtacgacacacaggagatagccgatatagtccgaaaggagcttccggagagccaggataggatcgcagagggagagcccgggaaacgaataaaggatacgcattactcgtgcgattcaggaaaggtgcaactgatgttggatgtgaggtttaagccgttgaaagagagcttggtagcgttggcgagacagctgtatgcgttggagcaggcctcttag

SEQ ID NO: 120581 - protein, 339 aa, Aspergillus oryzae
MSKILVTGANGFIAAHCISLLLSTNHHVRGTVRSEQKATATQAALTAAGVDITNLELVVISDPTDVTQFAPAVAGCKGILHLASAFSYDATPEEFEEKLLIPALKGTVTVCEAASQYPEVKKVVIMSSFAAVYDASLGPQPGRVYTEKDWCPLTYEEGKNASLVPIAYRASKVIAEKAAWDYVRDHEVSYQLVTLCPGMVFGKMIHPIESLSQLNASNQIVWDVLKGNGIPPTKAPVWIDVEDLARTSLQALTVDLPSHQRFLVTEGSYDTQEIADIVRKELPESQDRIAEGEPGKRIKDTHYSCDSGKVQLMLDVRFKPLKESLVALARQLYALEQAS

SEQ ID NO: 120582 - DNA, 1029 bp, Aspergillus oryzae
  CDS (1)..(1029)
atgactatcacacacagcaagactatcctcgtcaccggggcttcaggtttcctcgcaactcatattgtgaaggcctttcttcaacaaggttactatgtccgcgggaccgttcgatccgaccaggccgcagcaaacgtacgcaagggcttttcgcagtacagtgatcggctgtcatttgctgttgttgaggatatatcacaacccggggcattcaatgaagccgtggaaggggtcgatggtataattcataccgcttctccattccagacttcagtccgggacaataaacgagacctcctgtggcccgctattaacggcactacatctattcttcaggcagcccaggagtatgcaccgcgagttagccgtgtcgtgataacatcttcaatggctgccgtgatagacgtcggaaaaggcccgcaacctggctatccatataccgaggaagattggaatcctatgacattcgaacaggctgaaaacgcccatggcatagtcgcatacgctgcttccaaggcacttgcggagaaagccgcttggcgatatatggaaacgaatacgcctgactttagtcttaccacaatttgcccacccatgatctatggccccgtggagcatcacgtttctaccatggagagattgaatacaagtgcgggtgatatctacaggttgttcaatggtagtagcattgagataccgtcggcaattttgccggtctttgcggacgttcgtgacgttgctcaagcccacctctctgcatttgaatcggagaaaggggcaggagagcgctttattgttagttcgggaggctacacctatcaagaagtctgcgatatccttcggtcagtcgtccccgaggtcagggataaagtccctattggtcagcccgggaaacacgaatcggcggtcataaaggtctctaataacaaggtcaagacccttctgggaattactgtccacacgctacaggagactgtaaaggacactgcatatagcttgctggctctggaaaaagcatttaaggcataa

SEQ ID NO: 120583 - protein, 342 aa, Aspergillus oryzae
MTITHSKTILVTGASGFLATHIVKAFLQQGYYVRGTVRSDQAAANVRKGFSQYSDRLSFAVVEDISQPGAFNEAVEGVDGIIHTASPFQTSVRDNKRDLLWPAINGTTSILQAAQEYAPRVSRVVITSSMAAVIDVGKGPQPGYPYTEEDWNPMTFEQAENAHGIVAYAASKALAEKAAWRYMETNTPDFSLTTICPPMIYGPVEHHVSTMERLNTSAGDIYRLFNGSSIEIPSAILPVFADVRDVAQAHLSAFESEKGAGERFIVSSGGYTYQEVCDILRSVVPEVRDKVPIGQPGKHESAVIKVSNNKVKTLLGITVHTLQETVKDTAYSLLALEKAFKA

SEQ ID NO: 120584 - DNA, 1053 bp, Aspergillus oryzae
  CDS (1)..(1053)
atggcccgtcgcgctcttcttaccgggggcaacggcttcatcggatcccacatcctcgcccagcttcttgaccacggctgcaccgtctgctgtgctgttagaacacaagaaaaaggcgacaagatcttgagggacttcgccacccagcagtctcagataactatcacaatcgtccccgacatcgtcgcaccgggggcatatgacacggcggtacagggaacccccgcttttgacgccgtctatcatactgcatccccattcacgtacgcgaacgcgggaagcaatctccagtttctcgagccggcgatcaaggggacattgaacctgctcaaagccgtgaaagacaatgcccctagtgtgaagagagtcatttggaccggcagctgtgccagtgtgattgactacgacaaccttgtcgcggacccaccaaggatttatacggaagcggattggaaccctgttacatgggaagaggcagtgaatggggatccgtcgaaagcatacagaggtagtaagctttttgcagaacgagaagcatggcagtttatgaaggaagaacaaccacattttgacttggtgacgttatctccgccggcgacttttggtcctctgcgacattctattacaagtatcggggagttgaacgagtccaattctcggttgtggaaattctgcttcagctcgacaaaagatgcaccggtaccctatatgcctgtacacacctatgttgacgttcgagatcttgcatatgcacaattcagagctatgattgtcccagaggcaggcaaccaacggtttgtggtgtgcgccaggcaattcgacttccaggatgtttgcgatattctccgatcacaccatcccgaactgagcgaacgcacgccgcttggcaaaccaggaacacgctctttacctccgggtgcatattccattgataattccaaggtgaaaaagtttttaggggtggagttccgaagtctcgaagagacagttctggacgccgcgcggtgcatgttagatattgagcggaacgaaaagcaagctctttccacctag

SEQ ID NO: 120585 - protein, 350 aa, Aspergillus oryzae
MARRALLTGGNGFIGSHILAQLLDHGCTVCCAVRTQEKGDKILRDFATQQSQITITIVPDIVAPGAYDTAVQGTPAFDAVYHTASPFTYANAGSNLQFLEPAIKGTLNLLKAVKDNAPSVKRVIWTGSCASVIDYDNLVADPPRIYTEADWNPVTWEEAVNGDPSKAYRGSKLFAEREAWQFMKEEQPHFDLVTLSPPATFGPLRHSITSIGELNESNSRLWKFCFSSTKDAPVPYMPVHTYVDVRDLAYAQFRAMIVPEAGNQRFVVCARQFDFQDVCDILRSHHPELSERTPLGKPGTRSLPPGAYSIDNSKVKKFLGVEFRSLEETVLDAARCMLDIERNEKQALST

SEQ ID NO: 120586 - DNA, 1029 bp, Aspergillus oryzae
  CDS (1)..(1029)
atggccagcgaaactgtcttgatcacaggtgcatcaggcttcatcgccactcacatcgtcgaatcattcctgcgtgcgggctacaatgtccgcggcacagttcgatccgaacggacggcaaacagggtccgttatgccttccaggagtacaaggacaagttgagctttgtcattgtctccgatgtcgttgctgccaaagccttcgatgaggccgttgaaggggtcactggtgtgatccacaccgcggcgcccttccaaacagaagtcgaagacaaagaacgagatctgctgcaacctgccatcgaaggaactatcaatctcctggactctataaagagaaacggtcaccaagttcgccgagtcatccatacgtcttcttttggcgatatacttgatgcgtcaaagggagaccggccgggtcacatatacaccgaggcagactggaatccaatgacctatgcggaggccctaagtgaaagcacccctgacgtggtatcctactgcgcagggaagacgatggcggagcatgcagcgtgggatttcatggccacagagaacccgtcatttgacctggtcactatctgcccgccgtacgtgtttggtccggtcaagaatgctacaacaagcttggtcaacctaaatacttcgtccatggatgtataccgtctcatgtcgcccatgtcaaagccaagccacgctgtgccacccactttggtgtgggcgtgggcggatgtgcgtgatgttgctgacgcacatctaaaggccttcgaggttcccgaggctggaggacagcggttcttggttgctcaaggtagatacagctatcagcgaatagccgatatccttcgagataaggtggcggaagtgagagatcgtgttcctttgggtaagccacgatccggtatgggagatgtctatggcattgatgcatccaagtcggagaatgtgttggggttgagatatcgtcctttggaagactctatcgtcgacgcggcaaggtcttatctgaagttggagcaggcgaattga

SEQ ID NO: 120587 - protein, 342 aa, Aspergillus oryzae
MASETVLITGASGFIATHIVESFLRAGYNVRGTVRSERTANRVRYAFQEYKDKLSFVIVSDVVAAKAFDEAVEGVTGVIHTAAPFQTEVEDKERDLLQPAIEGTINLLDSIKRNGHQVRRVIHTSSFGDILDASKGDRPGHIYTEADWNPMTYAEALSESTPDVVSYCAGKTMAEHAAWDFMATENPSFDLVTICPPYVFGPVKNATTSLVNLNTSSMDVYRLMSPMSKPSHAVPPTLVWAWADVRDVADAHLKAFEVPEAGGQRFLVAQGRYSYQRIADILRDKVAEVRDRVPLGKPRSGMGDVYGIDASKSENVLGLRYRPLEDSIVDAARSYLKLEQAN

SEQ ID NO: 120588 - DNA, 1038 bp, Aspergillus oryzae
  CDS (1)..(1038)
atgcaaccatccaagaccattcttgtgacaggagcctccggctttgtagccgctcatatcatcgaagcttttatctctgccggctatgatgtccgaggcacagttcgttctgaagctacggcggagaaggtcaggcgtacattcccacgatacggcgaacagctaagctttgccattgttcccgacattgtcaaggatggtgccttcgacgaagcagtcaaaggcgtcgatggaatcatgcatacggcttgcccaggtgctactgaaacagacagcaacgagcgagatattgtgcaacctgctatcagcgggactattaacattctcaagtccgcccaaaagcatggacttcaggtcaagcgcattgtcattacctcttccttcgcttccatgatcgacatgtccaaaggtacctggcccggtcatacctactccgagaaagactggaaccccatgacctacgaacaggctgtgagcgaaggcacctccagtgtgcaagcatatcttgctgcaaagaaagtcgcagagcgagctgcatgggactttgtcagagacgaaaatacttcctttgacctcgtgaccatcttgccgcctatgatttacggccctaatatcaatgctacacatgtgtcgcagttgaacatcacctcagctgatatataccggttcatgtctccggactcgaagccaagtgatcccatacctgacaatggattctggtcctgggtcgatgtaagagatgttgcgcaggctcatttgaaagcgtacgaagttccagaggctggcggcgagcgtttctttatctgtgctggaaattacagttatcaacaaattgcagatattttgcgggagaaggtccctgaagtaaaggatcgtgtacctatcggaaagcctggctcgggattcgggggtgttgaattgtatacacctgacgccgggaagtctcagagaatacttgggcttcgttatcgaggccttgaggagagtgctgtcgactcggcttatgcctttttggagctagagaaacactcaaattaa

SEQ ID NO: 120589 - protein, 345 aa, Aspergillus oryzae
MQPSKTILVTGASGFVAAHIIEAFISAGYDVRGTVRSEATAEKVRRTFPRYGEQLSFAIVPDIVKDGAFDEAVKGVDGIMHTACPGATETDSNERDIVQPAISGTINILKSAQKHGLQVKRIVITSSFASMIDMSKGTWPGHTYSEKDWNPMTYEQAVSEGTSSVQAYLAAKKVAERAAWDFVRDENTSFDLVTILPPMIYGPNINATHVSQLNITSADIYRFMSPDSKPSDPIPDNGFWSWVDVRDVAQAHLKAYEVPEAGGERFFICAGNYSYQQIADILREKVPEVKDRVPIGKPGSGFGGVELYTPDAGKSQRILGLRYRGLEESAVDSAYAFLELEKHSN

SEQ ID NO: 120590 - DNA, 1053 bp, Aspergillus oryzae
  CDS (1)..(1053)
atgtcttgctccagatcctataaacacgccatggccccccttgttctcataaccggtgctaccggcctcattggcttccgggtgctcttggaagcacttagaaatggatacaacgtgcgcttcacggcccgctcttgcgaaaaagctgagaaagtcacatccaaccctgtcgtgcaagccctcagtcctggcgaccgactttctcccatcatcatgcccgatacaacagtagacagcgccttcgacgacgccctagaagacgttacatacgtgatccacgtgggctccccagtcccagtccccggattcgacccagtcacacaagtatgggagcccacaactaaaggcgtttccaatcttctctcgtcagcaataaaagtcacaagcatcaagcggatcataatcacatcttcaattgtcggaaacatgcctccaatccctgatccattcaccacagtcactgcctcgtcaagagtccatttactcggtcctcctccaacaagcttttccaatctcttcgaagcatacgctttagccaaaatcaccgaagcgaatgacacagacgcattcgtcgaaaagaacaaaccccattttagcgtggcacacatcatgcccggctatgtcttcggacggaacgagttggctcttactgcggacgaggtccttcataataatagctcaaacatgtacctgatgacctgtataacgggcaaagaggttacatttccgttgcacggtggctatgtccatattgatgatttggcggatgttcatttgaaggtactacgtcttgagcccggaccgggcactcctagaaatttcggtgcttgtaccaacattgattactcggctatctttgattacatcgagaaggcctttcccaaggctgtggcggatgggacatttaggcgtggaaatctgcatactttgcctatttcgtatgattcgagtgagacggagaaggtgttgggcataaagttccggccgttcgagtatgctgtcgtggatgccgcgagacagtatctggagaagctggggaaggaattggcatga

SEQ ID NO: 120591 - protein, 350 aa, Aspergillus oryzae
MSCSRSYKHAMAPLVLITGATGLIGFRVLLEALRNGYNVRFTARSCEKAEKVTSNPVVQALSPGDRLSPIIMPDTTVDSAFDDALEDVTYVIHVGSPVPVPGFDPVTQVWEPTTKGVSNLLSSAIKVTSIKRIIITSSIVGNMPPIPDPFTTVTASSRVHLLGPPPTSFSNLFEAYALAKITEANDTDAFVEKNKPHFSVAHIMPGYVFGRNELALTADEVLHNNSSNMYLMTCITGKEVTFPLHGGYVHIDDLADVHLKVLRLEPGPGTPRNFGACTNIDYSAIFDYIEKAFPKAVADGTFRRGNLHTLPISYDSSETEKVLGIKFRPFEYAVVDAARQYLEKLGKELA

SEQ ID NO: 120592 - DNA, 1225 bp, Quercus ilex
  CDS (30)..(1007)
  misc_feature (399)..(399): n is a, g, c or t
  misc_feature (621)..(621): n is a, g, c or t
  misc_feature (1045)..(1045): n is a, g, c or t
tctgaaagaaagaaagaagaaagagaaagatgagcagtggagctgggaagattgtgtgtgtgactggtgcctctggttacatagcttcatggcttgtcaagcttcttctcaaccgtggctacacagtcaaggcctctgttcgtgaccccaatgatccaaagaaaacaaaccacttacaagtacttgatggggccaaggagagacttcacctattcaaagcaaatctactggaagaaggttcttttgattctgctgttgagggctgtgatggggttttccacactgcatctcccctctatcataatgtcacggacccagaggctgaactacttgaacctgcagtgaagggaacacttaatgttcttaattcgtgtgcgaaatttccatctgttaagcggntggttgtgacatcctctatggctgcagttcattacaataaaaaagctaaaactcctgatgtagttgttgatgagacttggttttctgatccagacctttgtaaggaaacaaagcaatggtatatgctttcaaagacgttggctgaagaaaatgcctggaagtttgcaaaagagaagggtattgacatagttacaattaaccctgcaatggtgattggtcctntcttacagccaacgcttaacacaagtgctgctgcgattttgaacttaataaatggagctcagacatttcccaatgtatcatttggatgggttaatgtcaaagatgttgccaatgcacatattcaagcatatgaaattcctacagctagtggaagatattgtttggttgagagtgttatacaccagtctgaagttgtgagggttttacggaaactttatccctccttacaacttccagagaagtgtgcagatgataagccatttgcgccaacatatcaggtgtccaaagaaaggacaagaagcttgggtattgaatacattccttttgaggtgagcctcaaggaaactgttgaaagcttgaaggaaaagaagtttgtcagtttttaagtattggtagcacgctgaagttcctgctaagtaataancaatggtgaggcatgttgcctacaaccattttttggttggtgttttggttttaggagtcttcagcttgatggtgtatttctctatatatctatgtatgcactatgtcggttagtaacttgtgtcccagactttttcctatccaataaaaggaaatgctatgcatttcttttctgtttaaa

SEQ ID NO: 120593 - protein, 325 aa, Quercus ilex
  misc_feature (124)..(124): The Xaa at location 124 stands for Leu, Met, or Val.
  misc_feature (198)..(198): The Xaa at location 198 stands for Ile, Leu, Phe, or Val.
MSSGAGKIVCVTGASGYIASWLVKLLLNRGYTVKASVRDPNDPKKTNHLQVLDGAKERLHLFKANLLEEGSFDSAVEGCDGVFHTASPLYHNVTDPEAELLEPAVKGTLNVLNSCAKFPSVKRXVVTSSMAAVHYNKKAKTPDVVVDETWFSDPDLCKETKQWYMLSKTLAEENAWKFAKEKGIDIVTINPAMVIGPXLQPTLNTSAAAILNLINGAQTFPNVSFGWVNVKDVANAHIQAYEIPTASGRYCLVESVIHQSEVVRVLRKLYPSLQLPEKCADDKPFAPTYQVSKERTRSLGIEYIPFEVSLKETVESLKEKKFVSF

SEQ ID NO: 120594 - DNA, 1038 bp, Kluyveromyces marxianus
  CDS (1)..(1038)
atgacatttacagtggtgacaggcgcaaatggctacattgccaagcacattcttaaatcgttattagaagatggtcatcgcgtaattgggaccgtgagaaacagcaagaaggccgaggaattgaaaaggactgtcaatgatgagaatttgatagtggagttggttcccgacatgttagtggaaaacgcatttgacgagttgttcaagaagtacaacacccaaatcaagtatgtgttccacactgcgtccccggttctcgagacgtcaaaggactatgagaaaagcttgatcgagcccgcgattaccggtgcgaagtcaatggtggaagctatcaggaagtactcattgacatcggtcgagcacattgtgtatacgtcatcgattgctgccagctcgctggaatctgagtttaccgatccaacgctcgttgtcagcgaggatagttggaacccacaaggtttggaagaggcaaagacggagtttttcaccgcttactcgtactcgaagaaaatcgccgagaagacgatgtgggattttgttgaggaatacaaggggactgagcacgaaataaagctcactacggtcaacccatgcttcaacattgggccccaggcgtacgaggcggacgttaccgagactatgaacttcacggcggagttgatcaaccacgttgtgaaaagcaaagtgggcgatccgcttcctccaacgagaattgtgccatacgtcgatgtcagggacactgcgagagcgcatgtcgatgcgttgaagaacgagaagctggcattccaaagactgttggtggtggggccctttttgtcgagccagcagatctacgatattgtgaacgagcgcttcccgcaattgcggggcaagatcgcgcggggcgagcctggcagcgacaagctggaccctgcgaagctggccaagttcgaccacgcccggaccacgcaagctctcgggtgggagttcacgcctatcgagaaggctatagctgacgaggtggcccagatcctccgtgtgggcgcgtaccgtgggtaa

SEQ ID NO: 120595 - protein, 345 aa, Kluyveromyces marxianus
MTFTVVTGANGYIAKHILKSLLEDGHRVIGTVRNSKKAEELKRTVNDENLIVELVPDMLVENAFDELFKKYNTQIKYVFHTASPVLETSKDYEKSLIEPAITGAKSMVEAIRKYSLTSVEHIVYTSSIAASSLESEFTDPTLVVSEDSWNPQGLEEAKTEFFTAYSYSKKIAEKTMWDFVEEYKGTEHEIKLTTVNPCFNIGPQAYEADVTETMNFTAELINHVVKSKVGDPLPPTRIVPYVDVRDTARAHVDALKNEKLAFQRLLVVGPFLSSQQIYDIVNERFPQLRGKIARGEPGSDKLDPAKLAKFDHARTTQALGWEFTPIEKAIADEVAQILRVGAYRG

SEQ ID NO: 120596 - DNA, 999 bp, Solanum lycopersicum
  CDS (1)..(999)
atgccatcagaatccggcaaagttgtttgtgtcaccggcgccggcggtttcattgcctcttggctcgttaaactccttctagaaaaaggctacactgtcagaggaaccgttagaaaccctgatgattccaaaaatggtcacctgaaggaacttgaaggtgcaaaggagagactgattctgttgagagctgatcttctagactatcagagtttgagagaagcaatttatggctgtgacggagttttccacaccgcctcccctgtcactgatgatccagaacaaatggtggagccagcagttattgggaccaagaatgtgataacagcagcagcagaaaccaaagttcgcagagttgtgtttacttcttcaattggtacagtatacatggaccccaaccgggcccctgataaagttgtggacgagacttgctggagtgatcttgactactgcaagaatactaagaattggtactgctatgggaagacagtggcggaaaagacagcgcgggatgaggcaagggaaaagggagtggatttggttgtgattaatccagttttggtgcttggaccactgcttcaaccaacagtgaatgccagtgttcttcacatactaaagtacctaactggatctgctaaaacatatgccaattcaattcaggcgtatgttcatgttaaggatgtggcactagcccacatacttctctacgaagctccttctgcatctggccgctatatctgcgcggagcgcgtgcttcatcgcggtgatgtggttgaaattctcgccaaattcttcccggagtatccaatccccaccaagtgctcggatgaaacgaggccaagggcaaaaccgtacatattcacgaaccaaaagctaaaggacttgggtttggagtttacgccagtgaaacaatgcttatatgagacagtgaagagtctgcaggagaagggtcaccttccagttcctactcaaaatgatgaacctattaaaattcactcttaa

SEQ ID NO: 120597 - protein, 332 aa, Solanum lycopersicum
MPSESGKVVCVTGAGGFIASWLVKLLLEKGYTVRGTVRNPDDSKNGHLKELEGAKERLILLRADLLDYQSLREAIYGCDGVFHTASPVTDDPEQMVEPAVIGTKNVITAAAETKVRRVVFTSSIGTVYMDPNRAPDKVVDETCWSDLDYCKNTKNWYCYGKTVAEKTARDEAREKGVDLVVINPVLVLGPLLQPTVNASVLHILKYLTGSAKTYANSIQAYVHVKDVALAHILLYEAPSASGRYICAERVLHRGDVVEILAKFFPEYPIPTKCSDETRPRAKPYIFTNQKLKDLGLEFTPVKQCLYETVKSLQEKGHLPVPTQNDEPIKIHS

SEQ ID NO: 120598 - DNA, 999 bp, Solanum lycopersicum
  CDS (1)..(999)
atgccgtcagtctccggtcgggtcgtctgtgttaccggtgccggaggcttcatcgcctcttggctcgttaaacttcttttggaaaaaggctacactgttaggggaactgtaagaaatcctgatgatccaaagaattgtcatttgagagaacttgaaggagcaaaagagaggctaacactatgcagaggtgatcttcttgattatcagagtttgcgtgaagcaatcaatggctgtgacggagttttccacacagcttcaccagttactgatgatccagaacaaatggtggagccagcagtaattggtactaagaatgtgataacagcagcagcagaggccaatgtaagacgcgttgtgtttacttcctcaattggagctgtgtacatggacccaagcagagaccctgaaaaagtggttgacgagacttgctggagcgatcctgatttttgcaagaacactaagaattggtattgttatggtaagatggtggcagaacaagcagcgtgggatgaggcgagggagaaaggagttgatttagtcgcgataaatccagtgttggtgcttggaccattgctacaaaatactgtgaatgctagtgttcttcatatcctcaagtaccttactggctcagctaaaacatatgctaattcagttcaagcatatgtacatgttaaggatgtggctttagctcacatacttctctatgaaactccttcagcatcaggacgttacctctgtgctgagagtgtgcttcatcgtggtgacatcgttgaaattctagccaaattcttccctgaatatcccatccccacaaagtgttcggatgtgacgaagccaagggtaaaaccatacaaattctcaaaccaaaaattgaaggatttggggatggaatttacaccagtgaaacaatgcttatatgagacagtgaagagtctacaagagaaaggtcaccttccaattccaactcaaaaggacgaaattattcgaattcagacttag

SEQ ID NO: 120599 - protein, 332 aa, Solanum lycopersicum
MPSVSGRVVCVTGAGGFIASWLVKLLLEKGYTVRGTVRNPDDPKNCHLRELEGAKERLTLCRGDLLDYQSLREAINGCDGVFHTASPVTDDPEQMVEPAVIGTKNVITAAAEANVRRVVFTSSIGAVYMDPSRDPEKVVDETCWSDPDFCKNTKNWYCYGKMVAEQAAWDEAREKGVDLVAINPVLVLGPLLQNTVNASVLHILKYLTGSAKTYANSVQAYVHVKDVALAHILLYETPSASGRYLCAESVLHRGDIVEILAKFFPEYPIPTKCSDVTKPRVKPYKFSNQKLKDLGMEFTPVKQCLYETVKSLQEKGHLPIPTQKDEIIRIQT

SEQ ID NO: 120600 - DNA, 1243 bp, Eucommia ulmoides
  CDS (55)..(1023)
ggaagaaacacggtgagagcgatttttagagagagaaagagtgtgccggagaaaatgagtggagcggggaagacagtgtgcgtcaccggcgcgtctggtttcatagcctcctggatcgtcaagttcttgctccaacgcggctacaccgtccgggctaccgttcgcgatcccaacgatccaaagaagacagagcacttgcgcacacttgaaggagcgagtgagagactccacctgtttaaagcagagctacttgaggatggtgcctttgatgctgtggttgatgggactgatggtgttttccatactgcttctcccttcttctacaacactgataacccacagaaagatttgattgatcctgcagtgaagggatcagttaatgttcttggatcatgtgctaaatccccttctgtcaaaagggttgtcttgacatcttcagttgctgcagttgcgatcaattccaggccaaagaaccctgatgtggttgttgacgagacctggcattctgatgtcgagttttgcacgcaaaggaagctgtggtatgtgctttcaaagacattggccgaggaggctgcctggaaatttgctaaagagaaaggacttgacttagtgactatcaaccctgcaatggttatcggtcctttattgcagccatctctcaacacaagtgctagtgcaattcttaacttcctaaatggggcaaagacgtattcaaattcctcgatggggtggatcgacgtgaggaatgttgccaatgcacatattcaggcattcgagattccttcggccaacggaagatactgtttggttgagagagttgcacattattctgaaattgtgcagattttgcgcaaccattaccctactctcccgcttccagaaaagtgtgcggatgacaaccctttccagccaacattccaggtttcgaaagaaaaggccaagagcttgggcatcgagtttatcccactcgaggtcagcattaaggataccgtcgagagcttgaaggagaagaagtttttctagaaccttggcagcatagccaatctggtctgaaatcttttaagatcagtaataataaatgttgtctaaatttgagcatagccaatctggtctgaaatcttttaagatcagtaatgataaatgttgtctaaatttgagcatagccaatctggcctgaaatcttttaagatcagtaataataaatgttgtctaaaaaaaaaaaaaaaaaaaaaaaaaaaaaaaa

SEQ ID NO: 120601 - protein, 322 aa, Eucommia ulmoides
MSGAGKTVCVTGASGFIASWIVKFLLQRGYTVRATVRDPNDPKKTEHLRTLEGASERLHLFKAELLEDGAFDAVVDGTDGVFHTASPFFYNTDNPQKDLIDPAVKGSVNVLGSCAKSPSVKRVVLTSSVAAVAINSRPKNPDVVVDETWHSDVEFCTQRKLWYVLSKTLAEEAAWKFAKEKGLDLVTINPAMVIGPLLQPSLNTSASAILNFLNGAKTYSNSSMGWIDVRNVANAHIQAFEIPSANGRYCLVERVAHYSEIVQILRNHYPTLPLPEKCADDNPFQPTFQVSKEKAKSLGIEFIPLEVSIKDTVESLKEKKFF

SEQ ID NO: 120602 - DNA, 984 bp, Nicotiana tabacum
  CDS (1)..(984)
atgagtttagcagcgaaaacagtatgcgtaacaggagcttcaggttacatagcgtcatggctcgtcaaattcttgctccagcgtggttacactgttaaggcttccgttcgtgacccaaatgatcccaagaaaacacaacatttgctttcccttggtggcggcgcagagaggcttcacttgttcaaagcaaacctcttagaagaaggttcatttgatgctgtggttgatggatatgaaggtgtattccatacagcatctccatttccctactctgttacagatccacaggctgagttacttgcccctgctgtcaaggggacactcaatcttctcggttcatgtgccaaagcaccgtcagtaaaacgagtggttttaacatcttccatagcagttgcttatagtggtcagcctcggacacctgaggttgtggttgatgaaagctggtggaccagtccagactattgcagagaaaaacagctctggtatgttctctcaaagacattggctgaggatgctgcatggaagtttgtgaaggagaaagggattgatatggttgcaataaatcctgctatggttattggtcctttgttacagcctacactcaatactagttctggtgcagtcttgaacttggtaaatggtgccgagacatacccaaattctacctttgggtgggttaacgtcaaagatgtcgcaaatgcacatattctcgcatttgagaatccttcagctaatggaagatatttaatggttgagagagttgcccactactctgatatactgaagatattacgtgatctttaccctactatgcgacttccagaaaagtgtgctgacgacaatccgttgatgcaaaactatcaagtatcaaaggaaagggcgaaaagcttgggtgttgaattcactcctctcgaagaaagcatcaaagaaactgtcgaaagtttgaaggaaaaaaggttttttggaggctcatcggctatgtga

SEQ ID NO: 120603 - protein, 327 aa, Nicotiana tabacum
MSLAAKTVCVTGASGYIASWLVKFLLQRGYTVKASVRDPNDPKKTQHLLSLGGGAERLHLFKANLLEEGSFDAVVDGYEGVFHTASPFPYSVTDPQAELLAPAVKGTLNLLGSCAKAPSVKRVVLTSSIAVAYSGQPRTPEVVVDESWWTSPDYCREKQLWYVLSKTLAEDAAWKFVKEKGIDMVAINPAMVIGPLLQPTLNTSSGAVLNLVNGAETYPNSTFGWVNVKDVANAHILAFENPSANGRYLMVERVAHYSDILKILRDLYPTMRLPEKCADDNPLMQNYQVSKERAKSLGVEFTPLEESIKETVESLKEKRFFGGSSAM

SEQ ID NO: 120604 - DNA, 972 bp, Nicotiana tabacum
  CDS (1)..(972)
atggcgacgaaaacagtatgtgtaacaggatcttcaggctacatagcttcatggttagtgaagtttctgctccagcgtggttataccgttaaggccactgttcgcgatcccagtgatccaaagaagacagatcacttacattcccttagtggagctaaggagaggcttcacttgttcaaagcgaaccttctggaagaaggtgcctttgatgctgtggttgatgggtgtgaaggcgtatttcatacagcatctccattttaccatggagtcaaagatccacaggcagaattaattgatcctgcactgaaggggacacttaatgttcttggatcagttgcaaagacgccatcaattagaagagtggttttgacatcatctgtagcagcagttgctttcaatggaaaaccgcgaacccctgaagtggtagttgatgagacatgggggtcggatcctgacttttgcagagaatcacagctctggtatgtactttcgaagacattggctgaggatgctgcatggaagtttgtgaaagagaaagctatcgatatggttacgataaacccagcaatggttattggcggtttgttacaaccaatacttaatacaagttgcgctgctgtcttacaactgataaatggtgctgaaacatacccaaatgctacacttggatgggttaatgtgaaagatgttgccctcgcgcatattctagcatttgaaaacccttcagctaatggtagatatttaatggttgaggcagttgcacactactctgagttagtgaagatattacgcgagcattatcccacaatgaagcttccagaaaagtgtgttgatgataagccatttcctccgaagtaccaggttaacatagaaagagcaaagcaattgggtgttgagttcactcccttggctgaaagcatcaaagaaactgtcgaaagcttgaaggagaaaaaattctattcagatgcttag

SEQ ID NO: 120605 - protein, 323 aa, Nicotiana tabacum
MATKTVCVTGSSGYIASWLVKFLLQRGYTVKATVRDPSDPKKTDHLHSLSGAKERLHLFKANLLEEGAFDAVVDGCEGVFHTASPFYHGVKDPQAELIDPALKGTLNVLGSVAKTPSIRRVVLTSSVAAVAFNGKPRTPEVVVDETWGSDPDFCRESQLWYVLSKTLAEDAAWKFVKEKAIDMVTINPAMVIGGLLQPILNTSCAAVLQLINGAETYPNATLGWVNVKDVALAHILAFENPSANGRYLMVEAVAHYSELVKILREHYPTMKLPEKCVDDKPFPPKYQVNIERAKQLGVEFTPLAESIKETVESLKEKKFYSDA

SEQ ID NO: 120606 - DNA, 1011 bp, Eucalyptus globulus
  CDS (1)..(1011)
atgcccgtcgacgccctccccggttccggccagaccgtctgcgtcaccggcgccggcggcttcatcgcctcctggattgtcaagctgctcctcgagcgaggctacaccgtgcgaggaaccgtcaggaacccagacgacccgaagaatgggcatctgagagagctggaaggagccagcgagaggctgacgctgtacaagggtgatctgatggactacggtagcttggaagaagccatcaaggggtgcgacggcgtcgtccacaccgcctctccggtcaccgacgatcctgagcaaatggtggagccagcggtgatcgggacgaaaaatgtgatcgtcgcagcggcggaggccaaggtccggcgggttgtgttcacctcctccatcggtgcagtcaccatggaccccaaccggggtccagacgttgtggtggacgagtcttgttggagcgacctcgaattttgcaagagcactaagaactggtattgctacggcaaggcagtggcggagaaggccgcttgcgcagaggcgaaggagagaggggttgacctcgtggtgattaaccctgtgctcgtgcttggaccgctccttcagtcgacgatcaatgcgagcatcatccacatcctcaagtacttgactggctcagccaagacctacgccaactcggtccaggcgtacgtgcacgtcaaggacgttgcgcttgcccacgtccttgtcttggagaccccatccgcctcaggccgctatttgtgcgccgagagcgtcctccaccgtggcgatgtggtggaaatccttgccaagttcttccctgaatataacgtaccgaccaagtgctctgatgaggtgaacccaagagtaaaaccatacaagttctccaaccagaagctgaaagacttggggctcgagttcaccccggtgaagcagtgcctgtacgaaactgtcaagagcttgcaggagaaaggccacctacccgtccctcccccgccggaagattcggtgcgtattcagggatga

SEQ ID NO: 120607 - protein, 336 aa, Eucalyptus globulus
MPVDALPGSGQTVCVTGAGGFIASWIVKLLLERGYTVRGTVRNPDDPKNGHLRELEGASERLTLYKGDLMDYGSLEEAIKGCDGVVHTASPVTDDPEQMVEPAVIGTKNVIVAAAEAKVRRVVFTSSIGAVTMDPNRGPDVVVDESCWSDLEFCKSTKNWYCYGKAVAEKAACAEAKERGVDLVVINPVLVLGPLLQSTINASIIHILKYLTGSAKTYANSVQAYVHVKDVALAHVLVLETPSASGRYLCAESVLHRGDVVEILAKFFPEYNVPTKCSDEVNPRVKPYKFSNQKLKDLGLEFTPVKQCLYETVKSLQEKGHLPVPPPPEDSVRIQG

SEQ ID NO: 120608 - DNA, 1011 bp, Eucalyptus globulus
  CDS (1)..(1011)
  misc_feature (523)..(523): k is g or t
atgcccgtcgacgccctccccggttccggccagaccgtctgcgtcaccggcgccggcggcttcatcgcctcctggattgtcaagctgctcctcgagcgaggctacaccgtgcgaggaaccgtcaggaacccagacgacccgaagaatgggcatctgagagagctggacggagccagcgagaggctgacgctgtacaagggtgatctgatggactacgagagcttgagagaagccatcatggggtgcgacggcgtcgtccacaccgcctctccggtcaccgacgatcctgagcaaatggtggagccagcggtgatcgggacgaaaaatgtgatcgtcgcagcggcggaggccaaggtccggcgggttgtgttcacctcctccatcggtgcagtcaccatggaccccaaccggggtccggacgttgtggtggacgagtcttgttggagcgacctcgaattttgcaagagcactaagaactggtattgctacggcaaggcagtggcggagaaggccgcttgcgcakaggcgaaggagagaggggttgacctcgtggtgattaaccctgtgctcgtgcttggaccgctccttcagtcgacgatcaatgcgagcatcatccacatcctcaagtacttgactggctcagccaagacctacgccaactcggtccaggcatacgtgcacgtcaaggacgtcgcgcttgcccatgtccttgtcttggagaccccatccgcctcaggccgctatttgtgcgccgagagcgtcctccaccgtggcgatgtggtggaaatccttgccaagttcttccctgagtataacgtaccgaccaagtgctctgatgaggtgaacccaagagtaaaaccatacaagttctccaaccagaagctgaaagacttggggctcgagttcaccccggtgaagcagtgcctgtacgaaactgtcaagagcttgcaggagaaaggccacctacccgtccctcccccgccggaagattcggtgcgtatccagggatga

SEQ ID NO: 120609 - protein, 336 aa, Eucalyptus globulus
  misc_feature (175)..(175): The Xaa at location 175 stands for Stop, or Glu.
MPVDALPGSGQTVCVTGAGGFIASWIVKLLLERGYTVRGTVRNPDDPKNGHLRELDGASERLTLYKGDLMDYESLREAIMGCDGVVHTASPVTDDPEQMVEPAVIGTKNVIVAAAEAKVRRVVFTSSIGAVTMDPNRGPDVVVDESCWSDLEFCKSTKNWYCYGKAVAEKAACAXAKERGVDLVVINPVLVLGPLLQSTINASIIHILKYLTGSAKTYANSVQAYVHVKDVALAHVLVLETPSASGRYLCAESVLHRGDVVEILAKFFPEYNVPTKCSDEVNPRVKPYKFSNQKLKDLGLEFTPVKQCLYETVKSLQEKGHLPVPPPPEDSVRIQG

SEQ ID NO: 120610 - DNA, 1113 bp, Populus tomentosa
  CDS (53)..(1069)
cccagtcaccaaactcgtatacatataattacatttgtccaaatataacaacatgccggttgatgcttcatcactttcaggccaaggccaaactatctgtgtcaccggggctggtggtttcattgcttcttggatggttaaacttcttttagataaaggttacactgttagaggaactgcgaggaacccagctgatcccaagaattcccatttgagggagcttgaaggagctcaagaaagattaactttatgcaaagctgatcttcttgattatgagtctcttaaagaggctattcaagggtgtgatggtgttttccacactgcttctcccgtcacagatgatccggaagaaatggtggagccagcagtgaacgggaccaaaaatgtgatcattgcggcggctgaggccaaagtccgacgagtggtgttcacgtcctcaattggtgctgtgtacatggatcccaataagggcccagatgttgtcattgatgaatcttgctggagtgatcttgaattctgcaagaacaccaagaattggtattgccatggaaaggcggtggcagaacaagctgcgtgggatatggctaaggagaaaggggtggacctagtggtggttaacccagtgctggtgctcggaccattgttgcagcccactgtcaatgctagcatcgttcacatcctcaagtacctcaccggctcagccaagacatatgctaactctgttcaagcttatgtgcatgttagggatgtggcactagcccacattttagtctttgagacgccttccgcctccggccgttacctttgctctgagagcgttctccaccgtggagaggtggtggaaatccttgcaaagttcttccccgagtaccccatccctaccaagtgctcagatgagaagaacccaagaaaacaaccttacaagttctcaaaccagaagctaagggatctgggcttcgagttcacaccagtgaagcagtgtctgtatgaaactgttaagagcttgcaggaaaggggccaccttccaatcccaaaacaagctgcagaagagtctgtgaagattcaataaggcctcttggaactatttattaggatacagttccataccccaag

SEQ ID NO: 120611 - protein, 338 aa, Populus tomentosa
MPVDASSLSGQGQTICVTGAGGFIASWMVKLLLDKGYTVRGTARNPADPKNSHLRELEGAQERLTLCKADLLDYESLKEAIQGCDGVFHTASPVTDDPEEMVEPAVNGTKNVIIAAAEAKVRRVVFTSSIGAVYMDPNKGPDVVIDESCWSDLEFCKNTKNWYCHGKAVAEQAAWDMAKEKGVDLVVVNPVLVLGPLLQPTVNASIVHILKYLTGSAKTYANSVQAYVHVRDVALAHILVFETPSASGRYLCSESVLHRGEVVEILAKFFPEYPIPTKCSDEKNPRKQPYKFSNQKLRDLGFEFTPVKQCLYETVKSLQERGHLPIPKQAAEESVKIQ

SEQ ID NO: 120612 - DNA, 981 bp, Quercus suber
  CDS (1)..(981)
atgagcggtggagctgggaagattgtgtgtgtgactggtgcctctggttacatagcttcatggcttgtcaagcttcttctcaaccgtggctacacagtcaaggcctctgttcgtgaccccaatgattcaaagaaaacaaaccacttacaagtacttgatggggccaaggagagacttcacctattcaaagcaaatctactggaagaaggttcttttgattctgctgttgagggctgtgatggggttttccacactgcatctcccttctatcataatgtcacagacccagaggcagaattacttgaacctgcagtgaagggaacacttaatgttcttaattcttgtgcgaaatttccatctgttaagcgggtagttgtgacatcctctatggctgcagttcattgcaataaaaaagctaaagctcctgatgtagttgttgatgagacttggttttctgatccagatgtttgtaaggaaacaaagcaatggtatatgctttcaaagacgttggctgaagaaaatgtctggaagtttgcaaaagagaagggtattgacatagttacaattaaccctgcaatggtgattggtcctctcttacagccaacgcttaacacaagtgctgctgcgattttgaacttaataaatggaactcatcagacatttcccaatgtagcatttggatgggttaatgtcaaagatgttgccaatgcacatattcaagcatatgaaattcctacagctagtggaagatattgtttggttgagagcgttatacaccattctgaagttgtgagggttttacgaaaactttatccctctgtacaacttccagagaagtgtgcagatgataagccatttgcgccaacatatcaggtgtccaaagaaaggacaagaagcttgggtattgaatacattccttttgaggtgagcctcaaggaaactgttgaaagcttgaaggaaaagaagtttatcagtttttaa

SEQ ID NO: 120613 - protein, 326 aa, Quercus suber
MSGGAGKIVCVTGASGYIASWLVKLLLNRGYTVKASVRDPNDSKKTNHLQVLDGAKERLHLFKANLLEEGSFDSAVEGCDGVFHTASPFYHNVTDPEAELLEPAVKGTLNVLNSCAKFPSVKRVVVTSSMAAVHCNKKAKAPDVVVDETWFSDPDVCKETKQWYMLSKTLAEENVWKFAKEKGIDIVTINPAMVIGPLLQPTLNTSAAAILNLINGTHQTFPNVAFGWVNVKDVANAHIQAYEIPTASGRYCLVESVIHHSEVVRVLRKLYPSVQLPEKCADDKPFAPTYQVSKERTRSLGIEYIPFEVSLKETVESLKEKKFISF

SEQ ID NO: 120614 - DNA, 1020 bp, Fragaria ananassa
  CDS (1)..(1020)
atgcctgctgatcacagctcttcactttccggccatggccaaactgtgtgtgtcaccggagccggaggcttcatcgcttcttggttggtgaagctcctgctggagagaggctataatgtgagaggaaccgtcagaaacccagaggacccaaagaatgctcatctgagggagctggaaggagccaaagagaggctgagcttgcggaaagccgatcttctggatttcgagagcctgaaagaagccattaacggctgtgatggcgttttccacactgcatcgcctgtaactgatgatccggaacaaatggtggaaccggcagtgaatggaacaaagaatgtgatcgttgccgctgctgaagccaaggttaaacgcgtcgtcttcacgtcttcaatcggtgccgtctacatggacccagcccgaggtcccgatgtcgttgtcgacgagtcttgttggagtgacctcgagttttgcaagaacaccaagaactggtactgctacggcaaagctgtggcggagcaagcagcgtgggaagaggccaaagagagaggagtggacttggtggtggtgaacccagttctggtgcttggaccactgctccaaccaaccatcaacgccagcatcatccacatcctcaagtacttgactggctcggccaagacttatgccaattctgttcaggcctatgtgcatgtcaaggatgtggcattagcacacatactggtgtacgaaactccctcggcatctggccgttatctctgcgccgagagcgtccttcaccgtggagatgtggtcgaaatcctcgccaagttcttccctgaataccccatacccagcaagttgaaagatgatgggaaacccagagcaataccctacaagttttcaaaccagaagctacaagacttgggtttggagttcacttctgtgaaacagagcctatatgacactgtcaagagcttgcaggagaagggtcaccttaaggttcctacaaagcaagaagaagagtccatcaagatccaataa

SEQ ID NO: 120615 - protein, 339 aa, Fragaria ananassa
MPADHSSSLSGHGQTVCVTGAGGFIASWLVKLLLERGYNVRGTVRNPEDPKNAHLRELEGAKERLSLRKADLLDFESLKEAINGCDGVFHTASPVTDDPEQMVEPAVNGTKNVIVAAAEAKVKRVVFTSSIGAVYMDPARGPDVVVDESCWSDLEFCKNTKNWYCYGKAVAEQAAWEEAKERGVDLVVVNPVLVLGPLLQPTINASIIHILKYLTGSAKTYANSVQAYVHVKDVALAHILVYETPSASGRYLCAESVLHRGDVVEILAKFFPEYPIPSKLKDDGKPRAIPYKFSNQKLQDLGLEFTSVKQSLYDTVKSLQEKGHLKVPTKQEEESIKIQ

SEQ ID NO: 120616 - DNA, 1026 bp, Zea mays
  CDS (1)..(1026)
atgccaacagcagaggcgacgacgcccgtgccgccggagctgtcctccgggcaagggcggacggtttgcgtgaccggagctggagggttcattgcctcctggctcgtcaagcgcctcctggagaagggctacacagtccgcggcacggtcaggaaccctgtggatccaaagaacgaccacctgaggtcccttgacggcgccgacgaccgcctcgtcctcctccgcgccgacctgctggacccagagagccttgccgaggccttctccggctgtgacggcgtcttccacgccgcctccccggtcaccgatgaccctgagatgatgatcgagccagcgatccggggcacgcgctacgtgatggcggcggcggacgacgccggagtgaagcgcgtcgtgttcacgtcctccatcggcaccgtgtacatgaacccctaccgtgaccccagcaagcctgtggacgacacctgctggagcgacctcgagtattgcaagaacacccagaactggtactgctacgccaagacggtggcggagcagggcgcgtgggaggtggcgcggaagcgagggctggacctggtggtggtgaacccggtgctggtgctgggcccgctgctgcagccgacggtgaacgccagcacggaccacgtgatgaagtacctgacggggtcggccacgacctacgtgaacgcggcgcaggcgtacgtgcacgtcagggacgtggccgaggcgcacgtccgggtgtacgaggcgccccacgcgcacggccgctacatctgcgccgagagcaccctgcaccgcggcgacctctgccgcgtcctcgccaagctcttcccggagtaccccgtacccaccaagtgcaaggaccaggttaaccctccggtggtaggatacaagttcaccaaccagcgcctcaaggatctggggatggacttcgtgccggtcctccagtgcctctacgagacggtcaccagcctccaggagaaaggcatgctgcccgtgcttccgacaaaacacgaccatgcatga

SEQ ID NO: 120617 - protein, 341 aa, Zea mays
MPTAEATTPVPPELSSGQGRTVCVTGAGGFIASWLVKRLLEKGYTVRGTVRNPVDPKNDHLRSLDGADDRLVLLRADLLDPESLAEAFSGCDGVFHAASPVTDDPEMMIEPAIRGTRYVMAAADDAGVKRVVFTSSIGTVYMNPYRDPSKPVDDTCWSDLEYCKNTQNWYCYAKTVAEQGAWEVARKRGLDLVVVNPVLVLGPLLQPTVNASTDHVMKYLTGSATTYVNAAQAYVHVRDVAEAHVRVYEAPHAHGRYICAESTLHRGDLCRVLAKLFPEYPVPTKCKDQVNPPVVGYKFTNQRLKDLGMDFVPVLQCLYETVTSLQEKGMLPVLPTKHDHA

SEQ ID NO: 120618 - DNA, 1041 bp, Zea mays
  CDS (1)..(1041)
atgccaacagcagaggcgacgacgcccgtgccgccggagctgtcctccgggcaagggcggacggtttgcgtgaccggagctggagggttcattgcctcctggctcgtcaagcgcctcctggagaagggctacacagtccgcggcacggtcaggaaccctgtggatccaaagaacgaccacctgagggcccttgacggcgccgtcgaccgtctcgtcctcctccgggccgacctgctggacccacagagccttgccgaggccttctccggctgtgacggcgtcttccacgccgcctccccggtcaccgatgaccctgagatgatgatcgagccagcgatccggggcacgcgctacgtgatggcggcggcggcagacgccggagtgaagcgcgtcgtgttcacgtcctccatcggcaccgtgtacatgaacccctaccgtgaccccagcaagcctgtggacgacacctgctggagcgacctcgagtattgcaagaacacccagaactggtactgctacgccaagacggtggcggagcagggcgcgtgggaggtggcgcggaagcgagggctggacctggtggtggtgaacccggtgctggtgctgggcccgctgctgcagccgacggtgaacgccagcacggaccacgtgatgaagtacctgacggggtcggccacgacctacgtgaacgcggcgcaggcgtacgtgcacgtcagggacgtggccgaggcgcacgtccgggtgtacgaggcgccccacgcgcacggccgctacatctgcgccgagagcaccctgcaccgcggcgacctctgccgcgtcctcgccaagctcttcccggagtaccccgtacccaccaagtgcaaggaccaggttaaccctccggtggtaggatacaagttcaccaaccagaggctcaaggatctggggatggacttcgtgccggtcctgcagtgcctctacgagacggtcaccagcctccaggagaaaggcatgctgcccgtgcttccgacaaaacaagaccatgaccaactcggcaaatcatga

SEQ ID NO: 120619 - protein, 346 aa, Zea mays
MPTAEATTPVPPELSSGQGRTVCVTGAGGFIASWLVKRLLEKGYTVRGTVRNPVDPKNDHLRALDGAVDRLVLLRADLLDPQSLAEAFSGCDGVFHAASPVTDDPEMMIEPAIRGTRYVMAAAADAGVKRVVFTSSIGTVYMNPYRDPSKPVDDTCWSDLEYCKNTQNWYCYAKTVAEQGAWEVARKRGLDLVVVNPVLVLGPLLQPTVNASTDHVMKYLTGSATTYVNAAQAYVHVRDVAEAHVRVYEAPHAHGRYICAESTLHRGDLCRVLAKLFPEYPVPTKCKDQVNPPVVGYKFTNQRLKDLGMDFVPVLQCLYETVTSLQEKGMLPVLPTKQDHDQLGKS

SEQ ID NO: 120620 - DNA, 1019 bp, Solanum tuberosum
  CDS (4)..(1002)
agcatgccatcagaatccggcaaagttgtttgtgttaccggcgccggaggtttcattgcctcttggctcgttaaactccttctagaaaaaggctacactgtcagaggaaccgttagaaaccctgatgatcctaaaaatggtcacttgaaggaacttgaaggtgcaaaggagagactgattctgctgagagctgatcttctggattatcagagtttgagagaagcaatttatggctgtgacggggttttccacaccgcctcccctgtcactgatgatccagaacaaatggtggagccagcggttatagggactaagaatgtgataacagccgcagcagaagccaaagttggaagagttgtgtttacttcgtcaattggtacagtatacatggaccccaaccgggccccggataaagttgtggacgagacttgctggagtgatcttggcttctgcaagaatactaagaattggtactgctacgggaagacggtggcggaaaagacagcatgggatgaggcaagggaaaaaggagtggatttggtggtgatcaatccagtgttggtgcttggaccactgcttcaaccaacagtgaatgctagtgttcttcacatactaaagtacctaactggctctgctaaaacatatgccaattcaattcaggcgtatgttcatgttaaggatgtggcactagcccacatacttctctatgaagctccttctgcatctggccgctatatctgtgctgagagcgtccttcatcgcggcgatgtggttgaaattctcgccaaattcttcccggagtatccaatacctaccaagtgctcggatgaaacgaggccaagggcaaaaccgtacaaattcacgaaccaaaagctaaaggacttgggtttggggtttacgccagtgaaacagtgcttatatgagacagtgaagagtctgcaggagaagggtcaccttccaattcctactcaaaatgatgaacctattaaaattcactcttaattaactggtattaaggg

SEQ ID NO: 120621 - protein, 332 aa, Solanum tuberosum
MPSESGKVVCVTGAGGFIASWLVKLLLEKGYTVRGTVRNPDDPKNGHLKELEGAKERLILLRADLLDYQSLREAIYGCDGVFHTASPVTDDPEQMVEPAVIGTKNVITAAAEAKVGRVVFTSSIGTVYMDPNRAPDKVVDETCWSDLGFCKNTKNWYCYGKTVAEKTAWDEAREKGVDLVVINPVLVLGPLLQPTVNASVLHILKYLTGSAKTYANSIQAYVHVKDVALAHILLYEAPSASGRYICAESVLHRGDVVEILAKFFPEYPIPTKCSDETRPRAKPYKFTNQKLKDLGLGFTPVKQCLYETVKSLQEKGHLPIPTQNDEPIKIHS

SEQ ID NO: 120622 - DNA, 1279 bp, Hordeum vulgare
  CDS (89)..(1135)
cttcttctgtccgtagctcgtacgtgccatctccatctcacctacaatctagcttacacgaacaagcagtgtcaaagtcacagcaacaatgaccgtcgtcgacgccgccgccgccgtcgcgcaggagctgcccgggcacgggcagaccgtgtgcgtcaccggcgccgccgggtacatcgcgtcgtggctcgtcaagctgctcctggagaggggctacaccgtcaagggcacagtgaggaacccagatgacccgaagaatgcacacctgaaggcgctggacggcgccgccgagaggctggtcctctgcaaggccgacctcctcgactacgacgccatctgcgccgccgtcgagggctgccacggcgtgttccacaccgcctcccccgtcaccgacgaccctgagcagatggtggagccggcggtgaggggcacggaatacgtgatcgacgcggcggcggacgccggcaccgtgcgccgggttgtgttcacgtcgtccatcggcgccgtcaccatggaccccaaccgcgggcccgacgtggtcgtcgacgagtcctgctggagcgatcttgagttctgcaagaaaaccaagaactggtactgctacggcaaggcggtggcggagcaggcggcgtgggagaaggcgagggcgcgcggcgtggacctggtggtggtgaacccggtgctggtggtcgggccgctgctgcagccgacggtgaacgccagcgccgcgcacatcctcaagtacctcgacggctccgccaggaagtacgccaacgcggtgcaggcgtacgtggacgtgcgcgacgtcgccggcgcgcacctccgggtcttcgaggcgccccaggcctccggccgctacctctgcgccgagcgcgtcctgcaccgccaggacgtcgtccacatcctcgccaagctcttccccgagtaccccgtcccaacaaggtgctctgacgaggtgaacccacggaagcagccttacaagatgtccaaccagaagctgcaggatcttggcctcaagttcactcctgtgaacgactctctgtacgagacggtgaagagcctccaggagaaggggcacctcccggtgccgaggaaggatatcctcgcaccacagctggacggtgcaacagcgtgatggtgctgaagaaacagcacagtacacgttttttctgtaacatgatctgttatgtttgtgtatacgtcctatctaatatcgtgttatgttatttaagtggactataagcaaacatagtaatgtatcgtcttcgatggtcaacgc

SEQ ID NO: 120623 - protein, 348 aa, Hordeum vulgare
MTVVDAAAAVAQELPGHGQTVCVTGAAGYIASWLVKLLLERGYTVKGTVRNPDDPKNAHLKALDGAAERLVLCKADLLDYDAICAAVEGCHGVFHTASPVTDDPEQMVEPAVRGTEYVIDAAADAGTVRRVVFTSSIGAVTMDPNRGPDVVVDESCWSDLEFCKKTKNWYCYGKAVAEQAAWEKARARGVDLVVVNPVLVVGPLLQPTVNASAAHILKYLDGSARKYANAVQAYVDVRDVAGAHLRVFEAPQASGRYLCAERVLHRQDVVHILAKLFPEYPVPTRCSDEVNPRKQPYKMSNQKLQDLGLKFTPVNDSLYETVKSLQEKGHLPVPRKDILAPQLDGATA

SEQ ID NO: 120624 - DNA, 1110 bp, Gibberella moniliformis
  CDS (1)..(1110)
atgagtcggggtcaagagcttgtccttctcactggcgcaaccggacatgtgggctatgctgtgcttgtcaagactctacaagcagggtacaatgttcgcgcaacactacgtgacatgagccgagcagacgctatcctctcttctggtcctgtccaagaagccctcagcgcccaggaccttgacctctcatttgtccgcgtccccaacttcacggcaccagatgcctttggtcttgttctctcaaatgtgacccacgtggttcatgttgcgagtgctcttcgtcgaggtacaagcacggacttgaaagaggcaataattgacgtggctgtccaggggacgagaaatatcctgcgagcagcccataattgtccttctgtacgaagagtcgtcattacatcttcagtctcagctatcgtggaccagcaccccgtggtatcgcaatcacctgctggtcgctgtgtcacgcccctggatcgccatgctgactatgatgctgagtattacaagggcgactcactcaaggcttatactgcagccaagactgcagctctcaatgctacagatgcttttctggccacagctgatggtggcccaacgaccttaccactacatttcgacgttatcaacattatgccatctttcgtgttcgggcccaagggactagcagcaacaccatccgatgtgacgaatggcagtaacatcttcggtattggtctcgtcatgcgccataaaccatgggatggtatcaggctcgaggcagtttgctgccatgttgacgatgttgcacaagtccatgtcaacgccctgaacgatcatgaattgctaccactgaaagtcggagcgcatcgggatttcatactaggcgtcaagtttaagccagaggagatcggagagattgtcaggaggagatttcctcgagagtggtgggaaagtgaatcggcgacttttggagcaaggggcacgtatgattggtaccatactgattatgatgtcggctcagcagaaagactactcgggaggccttttaagtgcttggaggagcaaatctacgacagcggaagccaggtcatggaaatgttgaagggtatgaccacaagaagctataactag

SEQ ID NO: 120625 - protein, 369 aa, Gibberella moniliformis
MSRGQELVLLTGATGHVGYAVLVKTLQAGYNVRATLRDMSRADAILSSGPVQEALSAQDLDLSFVRVPNFTAPDAFGLVLSNVTHVVHVASALRRGTSTDLKEAIIDVAVQGTRNILRAAHNCPSVRRVVITSSVSAIVDQHPVVSQSPAGRCVTPLDRHADYDAEYYKGDSLKAYTAAKTAALNATDAFLATADGGPTTLPLHFDVINIMPSFVFGPKGLAATPSDVTNGSNIFGIGLVMRHKPWDGIRLEAVCCHVDDVAQVHVNALNDHELLPLKVGAHRDFILGVKFKPEEIGEIVRRRFPREWWESESATFGARGTYDWYHTDYDVGSAERLLGRPFKCLEEQIYDSGSQVMEMLKGMTTRSYN

SEQ ID NO: 120626 - DNA, 981 bp, Arabidopsis thaliana
  CDS (1)..(981)
atggcaaacagtggtgaaggtaaagtggtgtgtgtaacaggagcctccggttacatcgcctcatggctcgtcaagttcctacttagccgtggctacactgttaaggcctccgtccgtgatcccagtgatccgaaaaagacacaacacttagtttcactagaaggtgcaaaggaaagacttcacttgttcaaagcagaccttttggaacaaggttctttcgactctgctattgatggttgccatggagttttccacactgcttctccattttttaatgatgccaaagacccacaggctgaacttattgatcctgcggtcaaggggacgcttaacgttttgaattcgtgcgccaaagcctcttcggttaagagggttgttgtaacctcctccatggctgccgttggttacaatggaaaaccacgcacacctgatgttaccgtcgatgaaacttggttctctgatcctgagctttgcgaggcctccaagatgtggtatgttctatccaagactttggcggaagatgcagcttggaaactcgctaaagagaaaggcttagacattgttactattaacccggctatggtgatcggtcctctcctacagccaactctgaacacgagtgctgctgctatattaaacttaatcaatggtgcaaagactttcccaaacttgagtttcggatgggttaatgtaaaagacgtagccaatgcgcacatccaaacatttgaggtcccttcagctaatgggcgttattgtttggtcgagcgtgtcgttcaccactccgagattgttaacattctacgtgagctttacccaaatctcccactacctgaaaggtgtgtggacgagaatccctacgtgccaacgtatcaagtgtccaaggataaaacgaggagccttggcatagactacatacccttgaaggttagcatcaaggagaccgtcgagtccttgaaggaaaaaggtttcgcacagttctga

SEQ ID NO: 120627 - protein, 326 aa, Arabidopsis thaliana
MANSGEGKVVCVTGASGYIASWLVKFLLSRGYTVKASVRDPSDPKKTQHLVSLEGAKERLHLFKADLLEQGSFDSAIDGCHGVFHTASPFFNDAKDPQAELIDPAVKGTLNVLNSCAKASSVKRVVVTSSMAAVGYNGKPRTPDVTVDETWFSDPELCEASKMWYVLSKTLAEDAAWKLAKEKGLDIVTINPAMVIGPLLQPTLNTSAAAILNLINGAKTFPNLSFGWVNVKDVANAHIQTFEVPSANGRYCLVERVVHHSEIVNILRELYPNLPLPERCVDENPYVPTYQVSKDKTRSLGIDYIPLKVSIKETVESLKEKGFAQF

SEQ ID NO: 120628 - DNA, 978 bp, Neurospora crassa
  CDS (1)..(978)
atgaccaaggttctgttgactggtggttcgggcttcattgctgctcacatcctcgagcagcttcttgccaagggccacaccgtggtcaccaccgtccggtctgaagataaggcgcaaaacatccgcgaggcctaccctgataaggccagcagcggcgagctcaaggtcgtcattgttcccgatatcgccaagctcgatgctttcgatgaggttgtgaaggagcccggtcttgaggttgtcttgcacactgcttcacctttccacttcaagttcactcccaaagaggaccccaagaccgagctcatcgaccccgccgtcaacggcacaaccggcatcctcaaagccatcgcccgctccgcgcccactgtccgccgcgtcgtcatcacctcctccttcgccgccatcttggacgagaacaagatcacggacccgaaccacaccttcagtgaagcctcctggaaccccgtcaccatcgacgacatccaccgcaaccccgcgaccgcctatcgggcctctaagacgctcgccgagaaggccgcctgggactttgtccgcgacccggctaacaatgtcaagttcgacctggccaccatcaacccgcccatggtgtttggtcctgtcgtccaccacctcgccagcctgagcagcatcaacaccagcaacgaacgcattgttgatttgctgcagggcaagtggaaggagggcgtgccatccaccggtgccgccaccatttggattgatgtgcgcgatgttgctagggcgcatatccgtgcaggtttggaggtgccagaggcgggtggcaagagattgttcaccactgctgggacgttcagcaacagtgagattgcagagaaggtgcgcaagaatttccccgagtatggggataagttgccggaggagaggcgctcaagagcggcgagctgccgccggatgatcagcggttcaaggtcgataacaaggcgacgaatgagttgctga

SEQ ID NO: 120629 - protein, 325 aa, Neurospora crassa
MTKVLLTGGSGFIAAHILEQLLAKGHTVVTTVRSEDKAQNIREAYPDKASSGELKVVIVPDIAKLDAFDEVVKEPGLEVVLHTASPFHFKFTPKEDPKTELIDPAVNGTTGILKAIARSAPTVRRVVITSSFAAILDENKITDPNHTFSEASWNPVTIDDIHRNPATAYRASKTLAEKAAWDFVRDPANNVKFDLATINPPMVFGPVVHHLASLSSINTSNERIVDLLQGKWKEGVPSTGAATIWIDVRDVARAHIRAGLEVPEAGGKRLFTTAGTFSNSEIAEKVRKNFPEYGDKLPEERRSRAASCRRMISGSRSITRRRMSC

SEQ ID NO: 120630 - DNA, 1014 bp, Oryza sativa
  CDS (1)..(1014)
atgtcgtccaattttgaggccaacaacaacaatggcgagaagcagctggtctgtgtgaccggagcaggtggcttcattgggtcgtgggtggtgaaggagctcctcatccgtggctaccacgtcaggggaacagccagagatcctgctgacagcaagaatgctcacctgcttgagctggagggagccgaccagaggctctccctctgccgtgccgacgtcctcgacgccgccagcctccgcgccgccttcagcgggtgccacggcgtcttccatgtcgcctccccggtgtccaacgaccctgacctggttccggttgcagtggaggggacgaggaacgtgatcaacgcggcggcggacatgggcgtgcggcgcgtggtgttcacgtcgtcctacggcgccgtgcacatgaaccccagcaggagccccgacgccgtcctcgacgagacctgctggagcgactacgaattctgccgccaaaccgacaacctgtactgctgcgccaagatgatggcagagatgacggcgacggaggaggcggcgaagagggggctggagctggcggtggtggtgccgtcgatgacgatgggtcccatgctgcagcagacgctcaacttcagcagcaaccacgtcgcccgctacctcatgggcaccaagaagtcgtaccccaacgccgtcgccgcctacgtcgacgtccgcgacgtcgcccgcgcgcacgtcctcgtctacgagcgccccgacgcacgcggccgctacctctgcatcggcaccgtgctccaccgcgccgagctcctccggatgctcagggacctcttcccccagtaccctgccactgcaaagtgtgaagatgacgggaagccgatggcgaagccgtacaagttctcgaaccagaggctcaaggatttggggttggaattcactccactgaggaagagtttgcatgaggcggtcttatgcatgcagcagaagagtcacctgcctctgatttatcccgttccaaaacgtgcttacctataa

SEQ ID NO: 120631 - protein, 337 aa, Oryza sativa
MSSNFEANNNNGEKQLVCVTGAGGFIGSWVVKELLIRGYHVRGTARDPADSKNAHLLELEGADQRLSLCRADVLDAASLRAAFSGCHGVFHVASPVSNDPDLVPVAVEGTRNVINAAADMGVRRVVFTSSYGAVHMNPSRSPDAVLDETCWSDYEFCRQTDNLYCCAKMMAEMTATEEAAKRGLELAVVVPSMTMGPMLQQTLNFSSNHVARYLMGTKKSYPNAVAAYVDVRDVARAHVLVYERPDARGRYLCIGTVLHRAELLRMLRDLFPQYPATAKCEDDGKPMAKPYKFSNQRLKDLGLEFTPLRKSLHEAVLCMQQKSHLPLIYPVPKRAYL

SEQ ID NO: 120632 - DNA, 975 bp, Pinus taeda
  CDS (1)..(975)
atgactgcaggtaaacaaaccgaggaaggccagactgtctgtgttacaggagccggaggattcatcgcctcatggctggtgaagctgctgcttgaaaggggctataccgtgcgaggaacagttcgcaaccctgaggatcagaagaatgctcatctcaagcagctggaaggtgcagaagagaggctgacattggtaaaagcagatcttatggactacaacagccttttgaatgccatcaacggctgccaaggagtcttccatgttgcttctcctgtcacagatgatcccgaagaaatggtggagccagctgtgaatggaacaaagaacgtcctggatgcttgtgcagtggctggagtgcgccgtgtggtgtttacttcctccattggggcagtttacatggacccaagtagggattatgatgctcttgtggatgagaactgttggagcaaccttgactattgcaaggagacaaagaactggtactgctatggaaaaacagtggccgagaaggctgcatgggaaagagcgaaggacaaggggttggacctggtagtggtaaatccatgtgtggtattgggtcctgtgctgcaatcctccattaactccagcataattcatatactcaagtatttgactggatctgctaagacctatgccaactcagttcaggcctatgtccatgtcagagatgttgcagaggctcacatcctggtttatgaaagcccatcagcttcaggccgctatttatgtgccgagagtgttctccaccgtggtgatgtggttgactcgctggcatcgatgttccctcaatatccaattcctaccaaggtcaaggaagatgggaagccaagggtgaagccttggaaggtttccaaccaaaagctcaaggacctcggattagaatttacaccagcgaaacaatgcctgtatgagacagttatcagcttacaagaaaaagggcatatttccaagtga

SEQ ID NO: 120633 - protein, 324 aa, Pinus taeda
MTAGKQTEEGQTVCVTGAGGFIASWLVKLLLERGYTVRGTVRNPEDQKNAHLKQLEGAEERLTLVKADLMDYNSLLNAINGCQGVFHVASPVTDDPEEMVEPAVNGTKNVLDACAVAGVRRVVFTSSIGAVYMDPSRDYDALVDENCWSNLDYCKETKNWYCYGKTVAEKAAWERAKDKGLDLVVVNPCVVLGPVLQSSINSSIIHILKYLTGSAKTYANSVQAYVHVRDVAEAHILVYESPSASGRYLCAESVLHRGDVVDSLASMFPQYPIPTKVKEDGKPRVKPWKVSNQKLKDLGLEFTPAKQCLYETVISLQEKGHISK

SEQ ID NO: 120634 - DNA, 933 bp, Arabidopsis thaliana
  CDS (1)..(933)
atgaacggcgaaggaaaggttgtttgcgtcaccggagcttccggatacatagcttcttggattgttaagcttttgctcctccgtggctacaccgtcagggccaccgtccgaaacccaagtgcaagtgaaagactaaaactgttcaaatcagatcttttggaagaaggttctttcgatcaagctatagagggatgcgacggtgtcttccatactgcctctccagtttcattaaccgttacagatcctcaggctcttttgcagactgagatgatcgatccggcggttaatggtactttgaacgttttgagaacgtgcgccaaagtttcttctgtgaagagggtcattgtaacatcgtccactgctgctactctttctattaacccaaacgacgtggtggacgaaaccgtcttcaccgatctaagtgtttacttagcgatgaaggcatggtatggatattcaaaaactttggctgaggaaacagcgtggcggtttgctaaagaaaacgggatcgatttggttgtaatgaatccaggaaacgtgatcggaccagttttgcagccaactcttaattactctgtagaagtgattgtggatctgataaatggtaaaaacccttccaatagtttttactataggttcatggacgtgagagatgtttctcttgctcatatcaaagcgttcgaggtcccttctgctagtggcagatacatacttgctgatccagatgtaacaatgaaagacattcaaaagcttttacatgaactgtttcctgatttgtgccgtgttgataaggataatgagaatgaggtgggtgaaatggcatacaaagtgtgtgtcgataaattgaaaagtttgggaattgagttcactcctatcaaagaatctctcaaggatactgttgttagccttaaggagaggtgtcttcttatatga

SEQ ID NO: 120635 - protein, 310 aa, Arabidopsis thaliana
MNGEGKVVCVTGASGYIASWIVKLLLLRGYTVRATVRNPSASERLKLFKSDLLEEGSFDQAIEGCDGVFHTASPVSLTVTDPQALLQTEMIDPAVNGTLNVLRTCAKVSSVKRVIVTSSTAATLSINPNDVVDETVFTDLSVYLAMKAWYGYSKTLAEETAWRFAKENGIDLVVMNPGNVIGPVLQPTLNYSVEVIVDLINGKNPSNSFYYRFMDVRDVSLAHIKAFEVPSASGRYILADPDVTMKDIQKLLHELFPDLCRVDKDNENEVGEMAYKVCVDKLKSLGIEFTPIKESLKDTVVSLKERCLLI

SEQ ID NO: 120636 - DNA, 1035 bp, Arabidopsis thaliana
  CDS (1)..(1035)
atgccagtcgacgtagcctcaccggccggaaaaaccgtctgcgtcaccggagctggtggatacatcgcttcttggattgttaagatacttctcgagagaggttacacagtcaaaggaaccgtacggaatccagatgatccgaagaacacacatttgagagaactagaaggaggaaaggagagactgattctgtgcaaagcagatcttcaggactacgaggctcttaaggcggcgattgatggttgcgacggcgtctttcacacggcttctcctgtcaccgacgatccggaacaaatggtggagccggccgtgaatggagccaagtttgtgattaatgctgcggctgaggccaaggtcaagcgcgtggtcatcacctcctccattggtgccgtctacatggacccgaaccgtgaccctgaggctgtcgttgacgaaagttgttggagtgatcttgacttctgcaaaaacaccaagaattggtattgttacggcaagatggtggcggaacaagcggcgtgggagacagcaaaggagaaaggtgttgacttggtggtgttgaatccggtgctggttcttggaccgccgttacagccgacgatcaacgccagtctttaccacgtcctcaaatatctaaccggctcggctaagacttatgctaatttgactcaagcttatgtggatgttcgcgatgtcgcgctggctcatgttctggtctatgaggcaccctcggcctccggacgttatctcctagccgagagtgctcgccaccgcggggaagttgttgagattctggctaagctattcccggagtatcctcttccgaccaagtgcaaggacgagaagaaccctagagccaagccatacaaattcactaaccagaagattaaggacttaggcttagagttaacttccaccaagcaaagcttctacgacacagtcaagagcttacaagagaaaggccatcttgctcctcctcctcctcctccttcagcatcgcaagaatccgtggaaaatggcattaagatcgggtcttga

SEQ ID NO: 120637 - protein, 344 aa, Arabidopsis thaliana
MPVDVASPAGKTVCVTGAGGYIASWIVKILLERGYTVKGTVRNPDDPKNTHLRELEGGKERLILCKADLQDYEALKAAIDGCDGVFHTASPVTDDPEQMVEPAVNGAKFVINAAAEAKVKRVVITSSIGAVYMDPNRDPEAVVDESCWSDLDFCKNTKNWYCYGKMVAEQAAWETAKEKGVDLVVLNPVLVLGPPLQPTINASLYHVLKYLTGSAKTYANLTQAYVDVRDVALAHVLVYEAPSASGRYLLAESARHRGEVVEILAKLFPEYPLPTKCKDEKNPRAKPYKFTNQKIKDLGLELTSTKQSFYDTVKSLQEKGHLAPPPPPPSASQESVENGIKIGS

SEQ ID NO: 120638 - DNA, 1017 bp, Populus trichocarpa
  CDS (1)..(1017)
atgcctgttgatgcttcatcactttcaggccaaggccaaactatctgtgtcaccggggctggtggtttcattgcttcttggatggttaaacttcttttagataaaggttacactgttagaggaactgcgaggaacccagctgatcccaagaattctcatttgagggagcttgaaggagctgaagaaagattaactttatgcaaagctgatcttcttgattatgagtctcttaaagaggctattcaagggtgtgatggtgttttccacactgcttctcctgtcacagatgatccggaagaaatggtggagccagcagtgaacgggaccaaaaatgtgataattgcggcggctgaggccaaagtccgacgagtggtgttcacgtcatcaattggcgctgtgtacatggatcccaataagggcccagatgttgtcattgatgagtcttgctggagtgatcttgaattctgcaagaacaccaagaattggtattgctatggaaaggctgtggcagaacaagctgcatgggatatggctaaggagaaaggggtggacctagtggtggttaacccagtgctggtgcttggaccattgttgcagcccactgtcaatgctagcatcactcacatcctcaagtacctcaccggctcagccaagacatatgctaactctgttcaagcttatgtgcatgttagggatgtggcactagcccacattttagtctttgagacgccttccgcctccggccgttacctttgctctgagagcgttctccaccgtggagaggtggtggaaatccttgcaaagttcttccctgagtaccccatccctaccaagtgctcagatgagaagaacccaagaaaacaaccttacaagttctcaaaccagaagctaagggatctgggtttcgaattcaccccagtaaagcagtgtctgtatgaaactgttaagagtttgcaggaaaagggtcaccttccaatcccaaaacaagctgcagaagagtctttgaaaattcaataa

SEQ ID NO: 120639 - protein, 338 aa, Populus trichocarpa
MPVDASSLSGQGQTICVTGAGGFIASWMVKLLLDKGYTVRGTARNPADPKNSHLRELEGAEERLTLCKADLLDYESLKEAIQGCDGVFHTASPVTDDPEEMVEPAVNGTKNVIIAAAEAKVRRVVFTSSIGAVYMDPNKGPDVVIDESCWSDLEFCKNTKNWYCYGKAVAEQAAWDMAKEKGVDLVVVNPVLVLGPLLQPTVNASITHILKYLTGSAKTYANSVQAYVHVRDVALAHILVFETPSASGRYLCSESVLHRGEVVEILAKFFPEYPIPTKCSDEKNPRKQPYKFSNQKLRDLGFEFTPVKQCLYETVKSLQEKGHLPIPKQAAEESLKIQ

SEQ ID NO: 120640 - DNA, 963 bp, Arabidopsis thaliana
  CDS (1)..(963)
atggctgtaaagcaaaaggtctgtgttactggtgcaggagggtttattgcttcatggctcgtcaagtttcttctctctcgtggctacactgtccatggaaccgttcgagatccttgtgatgaaaagaatgaccatttgaggaaactggataatgcttcaaaaaatctgaaacttttcaaggcagatttgtttgatgatgaaggtcttttctcagccattgatggttgctctggcgttttccatatcgcttctcctgtgccttttgaaggagaagaactgattaaaccagctctcactggcaccaagaatgttctagaagcatgcacagaaaccaaagtgcagaaagttgtggttgtatcatcaatcgctgcagttgtttacaatccaaaatggcctcaagatgttgctaaggacgaggattgttggtcagacactcaataccttcactcacttgagggttattggcgttattactatcttgccaaaacattaacggaacgtgaagctttagagtggagtaagagaaactttgctgatgttgttacgctctgtccgtctgtcattataggccctaggcttcaatccacgcttaactctagtagtttgggacttctcaagttcataaaaggtggtataaagtccttgttgagcgatgaactgtatcttgtggatgtgcgtgatgttgcggatgcgcttttgttggtgtatgaaaatcgagaagcaacaggaagatacatatgtaattctcattcactttacactgattctcttatggagaagctcaagaatatgtatcctaaacgcaacttccctgaaagtttcacggaggtaaaagagaaggaagtgaggcctctaagtgcagagaagttgaaaaacttggggtggaagtttaggccattagaagaaaccattgatgattctgttgtgagctttgaagcagctggtgatcttccaaaggcataa

SEQ ID NO: 120641 - protein, 320 aa, Arabidopsis thaliana
MAVKQKVCVTGAGGFIASWLVKFLLSRGYTVHGTVRDPCDEKNDHLRKLDNASKNLKLFKADLFDDEGLFSAIDGCSGVFHIASPVPFEGEELIKPALTGTKNVLEACTETKVQKVVVVSSIAAVVYNPKWPQDVAKDEDCWSDTQYLHSLEGYWRYYYLAKTLTEREALEWSKRNFADVVTLCPSVIIGPRLQSTLNSSSLGLLKFIKGGIKSLLSDELYLVDVRDVADALLLVYENREATGRYICNSHSLYTDSLMEKLKNMYPKRNFPESFTEVKEKEVRPLSAEKLKNLGWKFRPLEETIDDSVVSFEAAGDLPKA

SEQ ID NO: 120642 - DNA, 1275 bp, Zygosaccharomyces rouxii
  CDS (164)..(1180)
tgaatggttattttagcaattgctgtgtgaggcactgacctaaagatgtgtataaatagtgggactgtgtactcatgaggatcaatacatgtataaacttaccatactttcacacaagtcaacttagaatcaatcaatcaatcaattaatcaagctatacaatatgacaaaagtcttcgtaacaggtgccaacggattcgttgctcaacacgtcgttcatcaactattagaaaagaactatacagtggttggatctgtccgttcaactgagaaaggtgataaattagctaaattgctaaacaatccaaaattttcatatgagattattaaagatatggtcaattcgagagatgaattcgataaggctttacaaaaacattcagatgttgaaattgtcttacatactgcttcaccagtcttcccaggtggtattaaagatgttgaaaaagaaatgatccaaccagctgttaatggtactagaaatgtcttgttatcaatcaaggataacttaccaaatgtcaagagatttgtttacacttcttcattagctgctgtccgtactgaaggtgctggttatagtgcagacgaagttgtcaccgaagattcttggaacaatattgcattgaaagatgccaccaaggatgaaggtacagcttatgaggcttccaagacatatggtgaaaaagaagtttggaatttcttcgaaaaaactaaaaatgttaatttcgattttgccatcatcaacccagtttatgtctttggtcctcaattatttgaagaatacgttactgataaattgaacttttccagtgaaatcattaatagtataataaaaggtgaaaagaaggaaattgaaggttatgaaattgatgttagagatattgcaagagctcatatctctgctgttgaaaatccagcaactacacgtcaaagattaattccagcagttgcaccatacaatcaacaaactatcttggatgttttgaatgaaaacttcccagaattgaaaggtaaaatcgatgttgggaaaccaggttctcaaaatgaatttattaaaaaatattataaattagataactcaaagaccaaaaaagttttaggttttgaattcatttcccaagagcaaacaatcaaagatgctgctgctcaaatcttgtccgttaaaaatggaaaaaaataagtgaactagacctgtcactatcagattattagagttctgtatagattaaagtgtgaaaatgtattagaatcataattttaaaaaaaaaaaaaaaa

SEQ ID NO: 120643 - protein, 338 aa, Zygosaccharomyces rouxii
MTKVFVTGANGFVAQHVVHQLLEKNYTVVGSVRSTEKGDKLAKLLNNPKFSYEIIKDMVNSRDEFDKALQKHSDVEIVLHTASPVFPGGIKDVEKEMIQPAVNGTRNVLLSIKDNLPNVKRFVYTSSLAAVRTEGAGYSADEVVTEDSWNNIALKDATKDEGTAYEASKTYGEKEVWNFFEKTKNVNFDFAIINPVYVFGPQLFEEYVTDKLNFSSEIINSIIKGEKKEIEGYEIDVRDIARAHISAVENPATTRQRLIPAVAPYNQQTILDVLNENFPELKGKIDVGKPGSQNEFIKKYYKLDNSKTKKVLGFEFISQEQTIKDAAAQILSVKNGKK

SEQ ID NO: 120644 - DNA, 1029 bp, Saccharomyces cerevisiae
  CDS (1)..(1029)
atgtcagttttcgtttcaggtgctaacgggttcattgcccaacacattgtcgatctcctgttgaaggaagactataaggtcatcggttctgccagaagtcaagaaaaggccgagaatttaacggaggcctttggtaacaacccaaaattctccatggaagttgtcccagacatatctaagctggacgcatttgaccatgttttccaaaagcacggcaaggatatcaagatagttctacatacggcctctccattctgctttgatatcactgacagtgaacgcgatttattaattcctgctgtgaacggtgttaagggaattctccactcaattaaaaaatacgccgctgattctgtagaacgtgtagttctcacctcttcttatgcagctgtgttcgatatggcaaaagaaaacgataagtctttaacatttaacgaagaatcctggaacccagctacctgggagagttgccaaagtgacccagttaacgcctactgtggttctaagaagtttgctgaaaaagcagcttgggaatttctagaggagaatagagactctgtaaaattcgaattaactgccgttaacccagtttacgtttttggtccgcaaatgtttgacaaagatgtgaaaaaacacttgaacacatcttgcgaactcgtcaacagcttgatgcatttatcaccagaggacaagataccggaactatttggtggatacattgatgttcgtgatgttgcaaaggctcatttagttgccttccaaaagagggaaacaattggtcaaagactaatcgtatcggaggccagatttactatgcaggatgttctcgatatccttaacgaagacttccctgttctaaaaggcaatattccagtggggaaaccaggttctggtgctacccataacacccttggtgctactcttgataataaaaagagtaagaaattgttaggtttcaagttcaggaacttgaaagagaccattgacgacactgcctcccaaattttaaaatttgagggcagaatataa

SEQ ID NO: 120645 - protein, 342 aa, Saccharomyces cerevisiae
MSVFVSGANGFIAQHIVDLLLKEDYKVIGSARSQEKAENLTEAFGNNPKFSMEVVPDISKLDAFDHVFQKHGKDIKIVLHTASPFCFDITDSERDLLIPAVNGVKGILHSIKKYAADSVERVVLTSSYAAVFDMAKENDKSLTFNEESWNPATWESCQSDPVNAYCGSKKFAEKAAWEFLEENRDSVKFELTAVNPVYVFGPQMFDKDVKKHLNTSCELVNSLMHLSPEDKIPELFGGYIDVRDVAKAHLVAFQKRETIGQRLIVSEARFTMQDVLDILNEDFPVLKGNIPVGKPGSGATHNTLGATLDNKKSKKLLGFKFRNLKETIDDTASQILKFEGRI

SEQ ID NO: 120646 - DNA, 1035 bp, Saccharomyces cerevisiae
  CDS (1)..(1035)
atgtctaatacagttctagtttctggcgcttcaggttttattgccttgcatatcctgtcacaattgttaaaacaagattataaggttattggaactgtgagatcccatgaaaaagaagcaaaattgctaagacaatttcaacataaccctaatttaactttagaaattgttccggacatttctcatccaaatgctttcgataaggttctgcagaaacgtggacgtgagattaggtatgttctacacacggcctctccttttcattatgatactaccgaatatgaaaaagacttattgattcccgcgttagaaggtacaaaaaacatcctaaattctatcaagaaatatgcagcagacactgtagagcgtgttgttgtgacttcttcttgtactgctattataacccttgcaaagatggacgatcccagtgtggtttttacagaagagagttggaacgaagcaacctgggaaagctgtcaaattgatgggataaatgcttactttgcatccaagaagtttgctgaaaaggctgcctgggagttcacaaaagagaatgaagatcacatcaaattcaaactaacaacagtcaacccttctcttctttttggtcctcaacttttcgatgaagatgtgcatggccatttgaatacttcttgcgaaatgatcaatggcctaattcataccccagtaaatgccagtgttcctgattttcattccatttttattgatgtaagggatgtggccctagctcatctgtatgctttccagaaggaaaataccgcgggtaaaagattagtggtaactaacggtaaatttggaaaccaagatatcctggatattttgaacgaagattttccacaattaagaggtctcattcctttgggtaagcctggcacaggtgatcaagtcattgaccgcggttcaactacagataatagtgcaacgaggaaaatacttggctttgagttcagaagtttacacgaaagtgtccatgatactgctgcccaaattttgaagaaggagaacagattatga

SEQ ID NO: 120647 - protein, 344 aa, Saccharomyces cerevisiae
MSNTVLVSGASGFIALHILSQLLKQDYKVIGTVRSHEKEAKLLRQFQHNPNLTLEIVPDISHPNAFDKVLQKRGREIRYVLHTASPFHYDTTEYEKDLLIPALEGTKNILNSIKKYAADTVERVVVTSSCTAIITLAKMDDPSVVFTEESWNEATWESCQIDGINAYFASKKFAEKAAWEFTKENEDHIKFKLTTVNPSLLFGPQLFDEDVHGHLNTSCEMINGLIHTPVNASVPDFHSIFIDVRDVALAHLYAFQKENTAGKRLVVTNGKFGNQDILDILNEDFPQLRGLIPLGKPGTGDQVIDRGSTTDNSATRKILGFEFRSLHESVHDTAAQILKKENRL

SEQ ID NO: 120648 - DNA, 1044 bp, Saccharomyces cerevisiae
  CDS (1)..(1044)
atgactactgataccactgttttcgtttctggcgcaaccggtttcattgctctacacattatgaacgatctgttgaaagctggctatacagtcatcggctcaggtagatctcaagaaaaaaatgatggcttgctcaaaaaatttaataacaatcccaaactatcgatggaaattgtggaagatattgctgctccaaacgcctttgatgaagttttcaaaaaacatggtaaggaaattaagattgtgctacacactgcctccccattccattttgaaactaccaattttgaaaaggatttactaacccctgcagtgaacggtacaaaatctatcttggaagcgattaaaaaatatgctgcagacactgttgaaaaagttattgttacttcgtctactgctgctctggtgacacctacagacatgaacaaaggagatttggtgatcacggaggagagttggaataaggatacatgggacagttgtcaagccaacgccgttgccgcatattgtggctcgaaaaagtttgctgaaaaaactgcttgggaatttcttaaagaaaacaagtctagtgtcaaattcacactatccactatcaatccgggattcgtttttggtcctcaaatgtttgcagattcgctaaaacatggcataaatacctcctcagggatcgtatctgagttaattcattccaaggtaggtggagaattttataattactgtggcccatttattgacgtgcgtgacgtttctaaagcccacctagttgcaattgaaaaaccagaatgtaccggccaaagattagtattgagtgaaggtttattctgctgtcaagaaatcgttgacatcttgaacgaggaattccctcaattaaagggcaagatagctacaggtgaacctgcgaccggtccaagctttttagaaaaaaactcttgcaagtttgacaattctaagacaaaaaaactactgggattccagttttacaatttaaaggattgcatagttgacaccgcggcgcaaatgttagaagttcaaaatgaagcctaa

SEQ ID NO: 120649 - protein, 347 aa, Saccharomyces cerevisiae
MTTDTTVFVSGATGFIALHIMNDLLKAGYTVIGSGRSQEKNDGLLKKFNNNPKLSMEIVEDIAAPNAFDEVFKKHGKEIKIVLHTASPFHFETTNFEKDLLTPAVNGTKSILEAIKKYAADTVEKVIVTSSTAALVTPTDMNKGDLVITEESWNKDTWDSCQANAVAAYCGSKKFAEKTAWEFLKENKSSVKFTLSTINPGFVFGPQMFADSLKHGINTSSGIVSELIHSKVGGEFYNYCGPFIDVRDVSKAHLVAIEKPECTGQRLVLSEGLFCCQEIVDILNEEFPQLKGKIATGEPATGPSFLEKNSCKFDNSKTKKLLGFQFYNLKDCIVDTAAQMLEVQNEA

SEQ ID NO: 120650 - DNA, 1017 bp, Oryza sativa
  CDS (1)..(1017)
atgtcgtccaattttgaggccaacaacaacaacaatggcgagaagcagctggtctgtgtgaccggagcaggtggcttcattgggtcgtgggtggtgaaggagctcctcatccgtggctaccacgtcaggggaacagccagggatcctgctgacagcaagaatgctcacctgcttgagctggagggagccgacgagaggctctccctctgccgcgccgacgtcctcgacgccgccagcctccgcgccgccttcagcgggtgccacggcgtcttccatgtcgcctccccggtgtctaacgaccctgaccttgttccggttgcagtggaggggacgaggaacgtgatcaacgcagcggcggacatgggcgtgcgccgcgtggtgttcacgtcgtcgtacggcgccgtgcacatgaaccccaaccggagccccgacgccgtcctcgacgagacctgctggagcgactacgaattctgcaagcaaacagacaacctgtactgctgcgccaagatgatggcggagatgacggcgacggaggaggcggcgaagagggggctggagctggcggtggtggtgccgtcgatgacgatgggtcccatgcttcagcagacgctcaacttcagcaccaaccacgtcgcccgctacctcatgggcaccaagaagtcctaccccaacgccgtcgcggcctacgtcgacgtccgcgacgtcgcccgcgcacacgtcctcgtctacgagcgccccgaggcacgcggccgctacctctgcatcggcaccgtgctccaccgcgccgagctcctccggatgctcagggagctcttcccacggtaccctgccactgcaaagtgtgaggatgatgggaagccgatggcgaagccgtataagttctcgaaccagaggctcaaggatttgggtttggagttcactccactgaggaagagtttgaatgaggcggtcctatgcatgcagcagaagggtcacctgcctctgatttatcccgttccaaaacgtgcttacctataa

SEQ ID NO: 120651 - protein, 338 aa, Oryza sativa
MSSNFEANNNNNGEKQLVCVTGAGGFIGSWVVKELLIRGYHVRGTARDPADSKNAHLLELEGADERLSLCRADVLDAASLRAAFSGCHGVFHVASPVSNDPDLVPVAVEGTRNVINAAADMGVRRVVFTSSYGAVHMNPNRSPDAVLDETCWSDYEFCKQTDNLYCCAKMMAEMTATEEAAKRGLELAVVVPSMTMGPMLQQTLNFSTNHVARYLMGTKKSYPNAVAAYVDVRDVARAHVLVYERPEARGRYLCIGTVLHRAELLRMLRELFPRYPATAKCEDDGKPMAKPYKFSNQRLKDLGLEFTPLRKSLNEAVLCMQQKGHLPLIYPVPKRAYL

SEQ ID NO: 120652 - DNA, 1065 bp, Oryza sativa
  CDS (1)..(1065)
atgtcgtgcaattctgccgaggtcgcggccaacgacggcagcagcaatggcggtgagaagcagcagcagcaggaggaggaggtggtgtgcgtgacgggagcgggaggcttcatcggatcatgggtggtgaaggagcacctcctccgtggctaccgcgtcaggggaacagccagggatcccaccaagaacgcccacctgctcgcgctcgacggagccggcgagaggctcaccctgtgccgcgccgacgtcctggactccgagagcctgcgcgccgcgttcgccggatgccatggcgtcttccacgtcgcctccccggtgtccaatgaccctaatctggtgccgatcgcggtggaggggacgaggaacgtggtgaacgcggcggcggacatgggcgtgcggcgcgtggtgttcacgtcgtcgtacggcgccgtgcacatgaaccccaaccggagccccgacaccgtcctcgacgagacctgctggagcgaccccaaattctgccgccaaaccgacgtatactgctacgcgaagacgatggcggagaaggcggcggaggaggaggcggcaaagcgaggcgtgcagctggcggtggtgctgccctgcgtgacggtcgggccaatcttgcacccggccatcaacaccagcatcaaccacgtcgtccgctacctcacgggcgccgcgcccacctacccgaacgccgtcgcggcctacgtcgacgtccgcgacgtcgcccgcgcgcacgcactcgtctacgagcgccacgacgcccgcggccgctacctctgcatcggcgccgtgctccaccgcgcccatctcctccagatgctcaaggaacttttcccacagtaccccgtcacttccaagtgcaaggacgatgggaatccgatggtggaaccgtacaagttctcgaaccagaggctcaaggatttgggcttcgaattcacaccaatgaggaagtgtctgtatgacgcagtcgtatgcatgcaacagaaggggcacctcccgctggttggtaccgccgtaccggaccaaaatgtgacctctaatacgagctcgatcgtctaa

SEQ ID NO: 120653 - protein, 354 aa, Oryza sativa
MSCNSAEVAANDGSSNGGEKQQQQEEEVVCVTGAGGFIGSWVVKEHLLRGYRVRGTARDPTKNAHLLALDGAGERLTLCRADVLDSESLRAAFAGCHGVFHVASPVSNDPNLVPIAVEGTRNVVNAAADMGVRRVVFTSSYGAVHMNPNRSPDTVLDETCWSDPKFCRQTDVYCYAKTMAEKAAEEEAAKRGVQLAVVLPCVTVGPILHPAINTSINHVVRYLTGAAPTYPNAVAAYVDVRDVARAHALVYERHDARGRYLCIGAVLHRAHLLQMLKELFPQYPVTSKCKDDGNPMVEPYKFSNQRLKDLGFEFTPMRKCLYDAVVCMQQKGHLPLVGTAVPDQNVTSNTSSIV

SEQ ID NO: 120654 - DNA, 1029 bp, Oryza sativa
  CDS (1)..(1029)
atgggtgtcgagaagacgacggcgaacggcggcagtggcgccgcggcggtctccggcggagggcgcaccgtctgcgtcaccggcgccggcgggttcatcgcgtcgtggctcgtcaagctcctcctcgagaagggctacgccgtccgcggcaccgttcggaaccctgatgacgctgccaagaacgcgcatctcatggcgctggccggtgccgcggagcggctgaccctcgtccgggcggagctgctcgacaaggagagcctcgccgccgcgttcgccggctgcgagggcgtcttccacaccgcctcccccatcaccgacgacccggagaagatgatcgagccggcggtgagcggggcgaggaacgtgatcaccgcggcggcggacgcgggcggcgtccgccgcgtggtgatgacgtcgtcgatcggcgccgtgtacatgggcggcggcggcggcgaggaggtggacgagacgtgctggagcgacctcgaccactgcagggacaccggaaactggtactgctacgccaagacggtggcggagcaggcggcgtgggagctcgccaaggagcggcggctggacctcgtcgtcgtcaacccgtcgctggtgctcggcccgctgctgcagcgcggggtgaacgccagcacgtggcacgtgctcaagtacctggacggctcggcgcgcacctacgccgacgcggcgcaggcgtacgtgcacgtccgcgacgtcgcggacgcgcacgcgcgcgcctacgagtcccccgccgcgcgcggccgctacctctgcgccggccgcacgctgcaccgcggcgaggtgtgccgcatcctggccgccctcttcccggggtacccggtgcccaccaggtgcaagggcgacgccggcgagacggccgaggggtgccggttcagcagccgcaagctggcggagctcggtgtcgccgtcatgccggcgagccagtgcctgtacgacaccgtcgtcagcctccaggacaagggcctgcttcccttcgtccctgccgccgccatgccgtga

SEQ ID NO: 120655 - protein, 342 aa, Oryza sativa
MGVEKTTANGGSGAAAVSGGGRTVCVTGAGGFIASWLVKLLLEKGYAVRGTVRNPDDAAKNAHLMALAGAAERLTLVRAELLDKESLAAAFAGCEGVFHTASPITDDPEKMIEPAVSGARNVITAAADAGGVRRVVMTSSIGAVYMGGGGGEEVDETCWSDLDHCRDTGNWYCYAKTVAEQAAWELAKERRLDLVVVNPSLVLGPLLQRGVNASTWHVLKYLDGSARTYADAAQAYVHVRDVADAHARAYESPAARGRYLCAGRTLHRGEVCRILAALFPGYPVPTRCKGDAGETAEGCRFSSRKLAELGVAVMPASQCLYDTVVSLQDKGLLPFVPAAAMP

SEQ ID NO: 120656 - DNA, 1044 bp, Oryza sativa
  CDS (1)..(1044)
atgccgactgacgagacagccgcggcggcgccggccaccaccgcgctctccggccatgggtgcaccgtgtgcgtcaccggcgccggcgggttcatcgcgtcgtggctcgtcaagcgcctcctcgagaagggctacaccgtgcgtggcaccgtccggaaccctatggacccgaagaacgaccacctgagagccctggacggcgccggcgagcgcctcgtcctcctccgcgccgacctcctcgaccccgacagcctcgtcgccgccttcaccggctgcgagggcgtcttccacgctgcctcccccgtcaccgatgatcctgagaagatgatagagccggcgatcagggggacgagatacgtgataacggcggcggccgacaccggcatcaagcgagtggtgttcacgtcctccatcggcactgtctacatgaacccctacagggaccccaacaagcccgtcgacgacacctgctggagtgacctcgaatactgcaagaggacagagaactggtactgctacgcgaagacggtggcggagcagggtgcgtgggaggtggcgcggcggcgtggggtggacctggtcgtagtgaacccggtgctggtgctgggaccgctgctgcaggcgacggtgaacgcgagcacggagcacgtgatgaagtacctgacggggtcggccaagacgtacgtgaacgcagcgcaggcgtacgtccacgtccgcgacgtcgccgaggcgcacgtccgcgtgtacgactgcggcggcgcgcggggccggtacatctgcgccgagagcaccctgcaccgcggcgacctctgccgcgccctcgccaagcttttcccggagtaccccgtcccgagcaggtgcaaggacgaggcggcgccgccggtgaaggggtacctcttctccaaccagcgcctccgtgacctcggcatggacttcgtccccgtccgccagtgcctctacgaaaccgtgcgaagcctccaggacaagggcttgctgccggtgctgccgcccaccgccgacgaccaccaccacccttcctcgtga

SEQ ID NO: 120657 - protein, 347 aa, Oryza sativa
MPTDETAAAAPATTALSGHGCTVCVTGAGGFIASWLVKRLLEKGYTVRGTVRNPMDPKNDHLRALDGAGERLVLLRADLLDPDSLVAAFTGCEGVFHAASPVTDDPEKMIEPAIRGTRYVITAAADTGIKRVVFTSSIGTVYMNPYRDPNKPVDDTCWSDLEYCKRTENWYCYAKTVAEQGAWEVARRRGVDLVVVNPVLVLGPLLQATVNASTEHVMKYLTGSAKTYVNAAQAYVHVRDVAEAHVRVYDCGGARGRYICAESTLHRGDLCRALAKLFPEYPVPSRCKDEAAPPVKGYLFSNQRLRDLGMDFVPVRQCLYETVRSLQDKGLLPVLPPTADDHHHPSS

SEQ ID NO: 120658 - DNA, 1047 bp, Oryza sativa
  CDS (1)..(1047)
atggcggcgatggcgtcgccgccgccgccgacgagagtgtgcgtcaccggcgccggcgggttcatcggctcgtggctcgtcaagctcctcctctcccgtggctacgccgtgcacgccaccctccgcgacccgtgtgatcccaagaacgctcatctgaagcagctggacggggcgtcggagatgctgagcctgttcaaggccgacgtgctcgacgccggcgagctgtccgccgccattgccggctgcgagggggttttccatgtcgcctctcccgtgcccggagacaagatcgtcgatcctgagttagaagtaatggctcctgctgtaaagggaacactgaatgttcttgaagtttgttcgtcgtctaagaaggttcagaaagttgtggtggtgtcatctactgctgcagttcattacaaccccaattggcctccaggtaagcccaaagatgagagctgctggtcggacagaaagatatgcatggagaagaaggagtggtatagtgcttccaaggttatcgctgaaaagatggctttggaatatgcagagaaaaaaggtctaaacgttgttacagtctgcccttgtttagtttttggtccacagttgcaaccaactgtcaataccagcaatgaactcctcatctatataacaaaaggaggtccaaacgtaatgaggaacatgttgttgcacatagtagatgtccgtgatgtggctgaagctttgattctggtatacgagaaaccagaatcatctggcagatatctttgcgcaccgtatcacatcagcccaaaggctactgtggagtttctcaagaacatttaccccaactacaattatgtaaagtgtagtgctgaagtgaatggcaagactgaaatatttacaccaatttcgtcagagaaattgaagagcctgggctggaagccaaggaaattggaggagacactcacagacagcattgagtactatgaaaagacaggaattttgcaggatgctggtggaagaccttgcgttctgccttacctttttcactttcttgttgagaactga

SEQ ID NO: 120659 - protein, 348 aa, Oryza sativa
MAAMASPPPPTRVCVTGAGGFIGSWLVKLLLSRGYAVHATLRDPCDPKNAHLKQLDGASEMLSLFKADVLDAGELSAAIAGCEGVFHVASPVPGDKIVDPELEVMAPAVKGTLNVLEVCSSSKKVQKVVVVSSTAAVHYNPNWPPGKPKDESCWSDRKICMEKKEWYSASKVIAEKMALEYAEKKGLNVVTVCPCLVFGPQLQPTVNTSNELLIYITKGGPNVMRNMLLHIVDVRDVAEALILVYEKPESSGRYLCAPYHISPKATVEFLKNIYPNYNYVKCSAEVNGKTEIFTPISSEKLKSLGWKPRKLEETLTDSIEYYEKTGILQDAGGRPCVLPYLFHFLVEN

SEQ ID NO: 120660 - DNA, 987 bp, Brassica napus
  CDS (1)..(987)
atggataaaccaaaaggaaaagtttgtgtgactggagcttcaggcttcttagcttcttggcttgttaagaggcttctccttgagggatatgaagttatcggaacagtcagagatccaggaaatgagaagaagcttgcgcaccttcggaagttggaaggggcaaaggagagactaaggttggtgaaggcagatctaatggaagatggaagttttgataaagccataatgggatgccaaggagttttccatactgcttctcctgttctcaaacctacctctaatccagaggaggagattttgaaaccagctatagagggcacactgaatgtactgagatcatgcgggaagaatcagtctttgaagcgtgtggtcctcacctcctcctcctcaacagtaaggatcagagatgattttaatcctaatatacctcttgacgaatctgtttggacctctttggaactctgcaagcgttttcaggtctggtatgcattatcaaagacattagccgagcaagctgcatggaaattctgtgaagaaaatagtattgaccttgtcactgttctaccatcgttcctcgttggacccagcctgcctcctgatctgtgttctacagcatctgatgtcctcggattgctgaaaggagaaacagagaaatttcaatggcatggacagatggggtacgttcatatcgatgacgtggcaagagcccacatcctcgttttcgaacacgaagcagccggggacagatatatttgcagctctaacgttgtcagtctagaggaactggtgtccttcctctccgcacgttacccatcactccctatccccaagagatttgagaagctaaacaggctgcattacgactttgacacatcgaagataaagagcctcgggctcaagttcaagtcccttgaagagatgttcgatgactgcattgcctcttttgtagagaaaggctatttatctcatgtcgttacatcacaataa

SEQ ID NO: 120661 - protein, 328 aa, Brassica napus
MDKPKGKVCVTGASGFLASWLVKRLLLEGYEVIGTVRDPGNEKKLAHLRKLEGAKERLRLVKADLMEDGSFDKAIMGCQGVFHTASPVLKPTSNPEEEILKPAIEGTLNVLRSCGKNQSLKRVVLTSSSSTVRIRDDFNPNIPLDESVWTSLELCKRFQVWYALSKTLAEQAAWKFCEENSIDLVTVLPSFLVGPSLPPDLCSTASDVLGLLKGETEKFQWHGQMGYVHIDDVARAHILVFEHEAAGDRYICSSNVVSLEELVSFLSARYPSLPIPKRFEKLNRLHYDFDTSKIKSLGLKFKSLEEMFDDCIASFVEKGYLSHVVTSQ

SEQ ID NO: 120662 - DNA, 999 bp, Brassica napus
  CDS (1)..(999)
atgcctgccgacgggaaacttgtttgcgtcactggagccggtggctacattgcttcttggatcgttaagttactcttggagagaggctacaccgttagaggaaccgtgcggaacccagctgatcccaagaacaaccacctcagagagctcgatggagccaaagaaagactcactcttcacagtgctgatcttctcgactacgaagctctttgtgccgcaatagatggctgcgatggcgttttccacaccgcttctccgatgaccgatgaccccgagacaatgttggaaccggcggtgaacggagccaagttcgtgatcgacgcggcggctaaagccaaggtgaagcgtgtggtgttcacgtcatctatcggtgctgtttacatgaaccctaaccgtgaccctcaaaccatagtcaacgaagattgttggagtgatcttgatttctgcaaaaacacaaagaattggtattgctatgggaagatggtggcggaacaatcagcatgggagacggcgaaggctaaaggtgtggacttggtggtgctaaacccggttctagttcttggaccaccgctccagtcagcggtcaacgctagcctagtccatattctcaagtatctcaccggctcagccaagacctatgctaaccttactcaggtctacgtggacgtccgtgatgtggcactaggccatgttatggtctacgaatcatcctctgcctcaggccgttacatcctcgccgagaccgcgcttcaccgcggcgaggttgtcgagattcttgctaaattcttcccggagtatccacttcccaccaagtgttcggacgataagaatccaagggcaaagccatacaagttcactactcagaagataaaagacttagggttggagtttacacccatcaagcaatctctctacgattctgtcaagagcttgcaagagaaaggtcatcttcctcttcctcaatattccaaccaagacaacgtcacaatcgaatcctag

SEQ ID NO: 120663 - protein, 332 aa, Brassica napus
MPADGKLVCVTGAGGYIASWIVKLLLERGYTVRGTVRNPADPKNNHLRELDGAKERLTLHSADLLDYEALCAAIDGCDGVFHTASPMTDDPETMLEPAVNGAKFVIDAAAKAKVKRVVFTSSIGAVYMNPNRDPQTIVNEDCWSDLDFCKNTKNWYCYGKMVAEQSAWETAKAKGVDLVVLNPVLVLGPPLQSAVNASLVHILKYLTGSAKTYANLTQVYVDVRDVALGHVMVYESSSASGRYILAETALHRGEVVEILAKFFPEYPLPTKCSDDKNPRAKPYKFTTQKIKDLGLEFTPIKQSLYDSVKSLQEKGHLPLPQYSNQDNVTIES

SEQ ID NO: 120664 - DNA, 1038 bp, Brassica napus
  CDS (1)..(1038)
atggcaaccgttgatcagaccgctgtaaccaccggaactaagaaggcttgtgtcatcggtggcacaggaaacttagcctctattctgatcaagcatttgcttcaaagcggctacaaagttaacaccacagttagagatccagagaatgagaagaaaatggctcaccttaaggtacttcaacagctcggggacctcaagatcttcaaggcggatttaacggatgaagggagtttcacttcaccaatctcgggctgtgaatatgtgttccatgtcgcaacaccaatcagctttacatctcaagatcccgagaaagacatgatcaaaccagcggtacaaggagtgatcaacgtgttgaaatcttgcttaaaatcgaactcaatcaagcgcgtgatctacacttcttcagctgctgcggtttctatcaacaacctttcggaacctggacttgtgatgaccgaagaaaactggtctgacgttgattttctcacaaaggagaagccgtttaactggggttacccagtctcaaagactttagcagaaaaggaagcttataaatttgcggaagagaataagattgatctcgttactgtggttccagcactcatagccggaaactctctcctctctgatcctccgagcagtttatctctctcgatgtctttaatcactgggaaagaaatgcatctgagcggtctcaaggaaatgcagaagctatctggatccatctcgttcatccacgtggacgacctagctcgtgcacatatgtttcttgcggagaaagaaacagcttctggtcgctacatttgctgttattacaacacaaatgttccagagattgcggattttctcaggcgaagatatactaagtacaatgttttgtcagaatttgaagagtgcttatcaagtgcgaaactgacgctatcctcggaaaaactcatcaaggaaggctttcgatttgaatatgggatcagtgagatgtatgatgagatgacggagtacttcgagtcaaaaggattgatcaaacctaaagtatcttga

SEQ ID NO: 120665 - protein, 345 aa, Brassica napus
MATVDQTAVTTGTKKACVIGGTGNLASILIKHLLQSGYKVNTTVRDPENEKKMAHLKVLQQLGDLKIFKADLTDEGSFTSPISGCEYVFHVATPISFTSQDPEKDMIKPAVQGVINVLKSCLKSNSIKRVIYTSSAAAVSINNLSEPGLVMTEENWSDVDFLTKEKPFNWGYPVSKTLAEKEAYKFAEENKIDLVTVVPALIAGNSLLSDPPSSLSLSMSLITGKEMHLSGLKEMQKLSGSISFIHVDDLARAHMFLAEKETASGRYICCYYNTNVPEIADFLRRRYTKYNVLSEFEECLSSAKLTLSSEKLIKEGFRFEYGISEMYDEMTEYFESKGLIKPKVS

SEQ ID NO: 120666 - DNA, 960 bp, Glycine max
  CDS (1)..(960)
atgcctgagttttgcgtgacaggtggtactgggttcatcgcatcttacctggtcaaggccttactagagaagggtcacacagtgaggaccaccgtgagaaacccaggggatgtggagaaggttggttttctgactgaactaagtggagccaaagagagactgaagattttgaaagcagatctattagtggaaggaagctttgatgaggcagtgagaggagttgatggtgtctttcatatggcgtcccctgtgcttattccttatgatgagaacgttcagcaaaatttgattgatccctgtataaaaggaactttgaatgtgcttaactcttgtgtaaaagcaactgtgaaacattttgtgctcacctcttcttgctcttccataagataccgtgatgatgtgcaagaagtgtgtcctcttaatgaatctcattggactgatctagagtattgcaaacgctataagctgtggtatgcatatgcaaagacaatagcagaaagagaggcttggaggattgcaaaagaaaatggcatggatctagtggtggttaatccctcttttgttgttggtcctctgcttgcaccacaaccaactagcacactgctcttgatactaagcattgtcaaaggcatgaagggagaatatccaaatacaacagtggggtttgtacacataaacgatgtggtagctgctcacttgctggctatggaggaccccaaggcatctggaaggcttatttgttcaagcacagtagctcactggtcgcaaatcattgaaatgcttcgtgccaaatacccttcctatccgtacgaaaacgagtgtagcagccaggaaggagataataacccgcacagcatggacactaccaaaattactcagttggggtttcctccattcaaaactcttgaacaaatgtttgatgactgcatcaaaagttttcaagacaagggcttcctatga

SEQ ID NO: 120667 - protein, 319 aa, Glycine max
MPEFCVTGGTGFIASYLVKALLEKGHTVRTTVRNPGDVEKVGFLTELSGAKERLKILKADLLVEGSFDEAVRGVDGVFHMASPVLIPYDENVQQNLIDPCIKGTLNVLNSCVKATVKHFVLTSSCSSIRYRDDVQEVCPLNESHWTDLEYCKRYKLWYAYAKTIAEREAWRIAKENGMDLVVVNPSFVVGPLLAPQPTSTLLLILSIVKGMKGEYPNTTVGFVHINDVVAAHLLAMEDPKASGRLICSSTVAHWSQIIEMLRAKYPSYPYENECSSQEGDNNPHSMDTTKITQLGFPPFKTLEQMFDDCIKSFQDKGFL

SEQ ID NO: 120668 - DNA, 906 bp, Brassica napus
  CDS (1)..(906)
atgccactcgccgaatcctcaccggccgggaaaaccgtgtgcgtcaccggagctggtggatacatagcttcttggattgttaagttactcctcgagagaggctacaccgtcaaaggaaccgtacggaatccagatgatccaaagaatacacatttgagagaactcgaaggagccaaggagagactgattctgtgcaaggcagatcttcaggactacgaggctcttaaaacggcgattgatggctgcgacggcgtgtttcacacggcttctccggtcactgacgatcccgagcaaatggtggaacctgccgtgaacggagccaagttcgtaattaatgcggctgctgaagcaaaggtcaagcgcgtggtcatcacctcctcaattggtgccgtctacatggacccgaaccgtgaccctgaagccgtcgttgacgaaagttgttggagtgatcttgagttttgcaaaaacacaaagaactggtattgttacggcaagatggtggcggagcaagccgcgtgggagacggcgaaggagaaaggtgttgacctggtggttttgaatccggtgctggttcttggaccgccgttacagccgacgatcaacgccagtctcttccatgtcctcaagtacctaaccgggtcagctaagacttatgctaatttgactcaggcttatgtggatgttcgcgatgtcgcgctggctcatgtactggtctacgaggcacccacggcctctggacgttatctcctcgccgaaagcgcccttcaccgaggcgaagttgttgagattctggctaagttattcccggagtacccacttccaaccaaattttccttcgcccaagtcaaccagtcacacaaccgtatatcagggttcaggttatcttcaatgtggcgcaccccctga

SEQ ID NO: 120669 - protein, 301 aa, Brassica napus
MPLAESSPAGKTVCVTGAGGYIASWIVKLLLERGYTVKGTVRNPDDPKNTHLRELEGAKERLILCKADLQDYEALKTAIDGCDGVFHTASPVTDDPEQMVEPAVNGAKFVINAAAEAKVKRVVITSSIGAVYMDPNRDPEAVVDESCWSDLEFCKNTKNWYCYGKMVAEQAAWETAKEKGVDLVVLNPVLVLGPPLQPTINASLFHVLKYLTGSAKTYANLTQAYVDVRDVALAHVLVYEAPTASGRYLLAESALHRGEVVEILAKLFPEYPLPTKFSFAQVNQSHNRISGFRLSSMWRTP

SEQ ID NO: 120670 - DNA, 1011 bp, Glycine max
  CDS (1)..(1011)
atgccttctgcagaagcttcctccgaaaccatttgtgtcaccggcgctggtggcttcatcgcctcttggatggtcaaactcctcttggaaaaaggctacactgtccgaggaaccctcagaaatccagatgatcccaagaacgggcacttgaaggagtttgaaggagcctccgagaggttaactctgcataaggttgacctccttcatcttgactccgttagatcagttattaacggttgccatggtgtctttcacactgcttctcccgtcaccgataaccccgaagaaatggtggagccagcggtgagtggagctaagaatgtgatcatagctgctgcagaggctaaagttagacgtgtggtgttcacctcatccattggtgccgtctatatggaccccagtaggagcatcgatttggtggttgacgagtcctgttggagtgatttggaatattgcaagaacaccaagaattggtattgctatgggaaggctgtggctgaacaagcagcatgggacacagcaaaagagaatggggtggacttggttgtagtgaacccagttttggttcttggaccattactgcagcccacaatcaatgctagtacaattcacatcctcaagtacctcactggctctgctaagacctatgcaaatgccacacaggcttatgtgcatgttagggatgtggcattggcccacatacttgtttatgagaagccttctgcctctggtagatacctatgtgccgaaagctccctccaccgtggagaattagttgaaattctcgccaagtatttcccggagtacccagttcccaccaagtgttcagatgaaaagaatccgagagcaaaaccctacactttttcaaatcaaaagctgaaagatttgggattggaattcactccagtgagtcagtgtctatatgaaacagtgaagagcctgcaggagaaaggccaccttccagttcctgcaaagcagcaggaagaagattcaactaccgtgaaatcctaa

SEQ ID NO: 120671 - protein, 336 aa, Glycine max
MPSAEASSETICVTGAGGFIASWMVKLLLEKGYTVRGTLRNPDDPKNGHLKEFEGASERLTLHKVDLLHLDSVRSVINGCHGVFHTASPVTDNPEEMVEPAVSGAKNVIIAAAEAKVRRVVFTSSIGAVYMDPSRSIDLVVDESCWSDLEYCKNTKNWYCYGKAVAEQAAWDTAKENGVDLVVVNPVLVLGPLLQPTINASTIHILKYLTGSAKTYANATQAYVHVRDVALAHILVYEKPSASGRYLCAESSLHRGELVEILAKYFPEYPVPTKCSDEKNPRAKPYTFSNQKLKDLGLEFTPVSQCLYETVKSLQEKGHLPVPAKQQEEDSTTVKS

SEQ ID NO: 120672 - DNA, 1062 bp, Glycine max
  CDS (1)..(1062)
atgcaggaagtgctgaaaatggtgaaaagcaatgaacaagttgttcctggagccaaatattgtgtcacaggttccacagggtatatcggttcatggctagtggaggctcttcttgaaaggggatgcacggttcatgccactgttagagatcctgcaaagtcattgcaccttctgtctctgtggaagggtggtgaccaattgagatttttccaagcggatttgcatgaagaaggaagcttcgatgaggctgtaaaaggatgcattggtgtgttccatgttgctgcttcaatggaattcaatgttagggacaaagaaaacaatgaggcttttgttcaagcaaatataactgaccctgcaatcaaaggaaccataaaccttctaaagtcttgcttgaaatccaattctgtgaaaagggttgtcttcacatcttccattagtaccattactgccaaagacatcaacggaaagtggaaatctattgttgatgaatcttgccaaatccaccctgacactgtatggaacacacaagcaagtggatgggtttatgcactttcaaagcttctcacagaagaagcagcatttcaatttgctaaagagaacggcattgatcttgtgtcagtcatatcaagcactgttgcaggcccattcttcactgctaatgtaccaacaagtgttaaagttctagtgtcaccattaacaggtgaaactgagtacttcaggatattatctgctgtaaatgcacgaatgggatcaattgctttagttcacattgaagatatatgcagtgctcacatattcctaatggagcatgctaaagcagaaggccgatacatatgcagcagccaaagttgtgcattgtctgacttggctacccttatttccaaagtgtattcaaattcaaatatctaccagaagaccgagaaaatttatgacaaagttccctctgagatttcatcaaagaagttacaagatttgggctttagttacaagcatgaccttgaagatataatttatcaaacacttatgtgttgcctagactatggttatttacctcctgtttag

SEQ ID NO: 120673 - protein, 353 aa, Glycine max
MQEVLKMVKSNEQVVPGAKYCVTGSTGYIGSWLVEALLERGCTVHATVRDPAKSLHLLSLWKGGDQLRFFQADLHEEGSFDEAVKGCIGVFHVAASMEFNVRDKENNEAFVQANITDPAIKGTINLLKSCLKSNSVKRVVFTSSISTITAKDINGKWKSIVDESCQIHPDTVWNTQASGWVYALSKLLTEEAAFQFAKENGIDLVSVISSTVAGPFFTANVPTSVKVLVSPLTGETEYFRILSAVNARMGSIALVHIEDICSAHIFLMEHAKAEGRYICSSQSCALSDLATLISKVYSNSNIYQKTEKIYDKVPSEISSKKLQDLGFSYKHDLEDIIYQTLMCCLDYGYLPPV

SEQ ID NO: 120674 - DNA, 993 bp, Brassica napus
  CDS (1)..(993)
atggcaaacagtggtgaaggtaaagtggtgtgtgtaacaggagcatctggttacatcgcttcttggcttgtcaagttcctccttagccgtggctacaccgttaaggcatctgttcgtgaccccagtgatccgaaaaaaacacaacacttgctttcgttggatggtgcaaaggaaagacttcacttgttcaaagcagaccttttggaagaaggatctttcgactcagcgattgatggatgtgaaggagttttccacactgcctctcctttttatcatgatgtcaaagacccacaggctgaacttattgatcctgctgtcaagggaacacttaacgttttgaactcgtgcaccaaagcatcttctgtcaaaagggttgttgttacctcctccatggcagccgttgcttacaatggtaaaccacgcacacctgatgtaaccgtcgacgagacttggttctctgatccagaggtttgcaagacttctaagatgtggtatgttctctccaagaccttggcggaagatgctgcttggaagttcgctaaagagaaaggcttggacattgttacgatcaacccagcaatggtgattggtcctctcctacagccaactctcaacacaagtgctgctgctatactaaactttattaatggtgcaaagacattctctaactcaactttcggatgggttaatgtaaaggacgttgccaatgcgcacatccaagcatatgagatcccttcagctaatggacgttattgtatggtcgagagagtccttcatcactctgagattgtgaacattctgcgtcagctttacccaaatctccaactccctgaaagttgtgccgatgagaatccgtttgttccgacgtatgaagtgtccaaggagaaaataaagagcattggcatagactacatacccttggaagttagcatcaaggagaccgtcgagtccttgaaggagaaaggtttcataaacgtccgagcaagcatttga

SEQ ID NO: 120675 - protein, 330 aa, Brassica napus
MANSGEGKVVCVTGASGYIASWLVKFLLSRGYTVKASVRDPSDPKKTQHLLSLDGAKERLHLFKADLLEEGSFDSAIDGCEGVFHTASPFYHDVKDPQAELIDPAVKGTLNVLNSCTKASSVKRVVVTSSMAAVAYNGKPRTPDVTVDETWFSDPEVCKTSKMWYVLSKTLAEDAAWKFAKEKGLDIVTINPAMVIGPLLQPTLNTSAAAILNFINGAKTFSNSTFGWVNVKDVANAHIQAYEIPSANGRYCMVERVLHHSEIVNILRQLYPNLQLPESCADENPFVPTYEVSKEKIKSIGIDYIPLEVSIKETVESLKEKGFINVRASI

SEQ ID NO: 120676 - DNA, 966 bp, Brassica napus
  CDS (1)..(966)
atggcgaaggagacagtgtgtgtaactggcgccaacggtttcatcggatcctggattatccaaacattactcgacaacggatacaccaaaatccacgcctctatctacccaggatccgacccggctcatctcctcaaactaccaagacccgacgacacaaacaccgagatcaagatcttcgaagccgatctcctagaccccgacgccatcgccagagccgtagatggatgcgcaggagtgttccacgtggcgtcgccttgtacgttggatccaccggaggatcccgagaaggagctggtcgaaccggcggttaagggaacgatcaacgtgttgttagcagctaataggttcaacgtgaggcgcgtggtgatcacttcctctatttcggctttggttccgaacccaaattggccggaaggaaaacccgtcgatgagtcgtcgtggaccgatcttgattattgcaagtcgatgcagaaatggtatccaatttcgaagacgctagctgagaaagcggcttgggaattttcggagaagcatggaaccaacgttgtgaccatccatccatccacatgcctcggaccacttctgcaacctagccttaacgcaagctgcgccgttttgctacagctcttacaaggctcgacggagacacaagagtatcactggctcggtgtggtgcacgtgagagatgtggcgaaagctcacgtgatgctgttcgaaacacctgaagcttctggtcggtttctgtgcagtaatgggatctatcagttcagtcagtttgctgctcttgtgtccaaactcttccctgagtttgatgttcacaggtttgataaaaaaacgcaacctgggcttacgccttgtaaagatgcggctaagagattgattgagctggggatggtgtttactccggtcgaagatgcggttaaggagacggtccagagtcttagagacaaaggcttcctctga

SEQ ID NO: 120677 - protein, 321 aa, Brassica napus
MAKETVCVTGANGFIGSWIIQTLLDNGYTKIHASIYPGSDPAHLLKLPRPDDTNTEIKIFEADLLDPDAIARAVDGCAGVFHVASPCTLDPPEDPEKELVEPAVKGTINVLLAANRFNVRRVVITSSISALVPNPNWPEGKPVDESSWTDLDYCKSMQKWYPISKTLAEKAAWEFSEKHGTNVVTIHPSTCLGPLLQPSLNASCAVLLQLLQGSTETQEYHWLGVVHVRDVAKAHVMLFETPEASGRFLCSNGIYQFSQFAALVSKLFPEFDVHRFDKKTQPGLTPCKDAAKRLIELGMVFTPVEDAVKETVQSLRDKGFL

SEQ ID NO: 120678 - DNA, 1047 bp, Glycine max
  CDS (1)..(1047)
atgggttcagcatccgaaagtgtttgcgttacaggagcttctggtttcatcgggtcatggcttgtcatgagactcatcgagcgtggctacaccgttcgagccaccgtacgcgacccagtaaacatgaagaaggtgaagcatttggtggaactaccaggcgcaaagagcaaactgtctctgtggaaggctgatcttgctgaagagggaagctttgatgaagccattaaaggctgcaccggagttttccacgtggccacccccatggactttgaatccaaagaccctgagaatgaagtgataaagcctacaataaatggggtactagacatcatgaaagcatgcttgaaggcaaaaactgtgcgaaggctaatattcacgtcctcagccggaaccctcaacgttattgagcgccaaaagcccgttttcgacgacacatgctggagtgacgttgagttttgccgtagagttaagatgactggttggatgtattttgtttctaaaacactggcggagaaagaagcatggaaatttgccaaagagcagggcctggacttcatcactatcattccacctcttgttgtcggtccctttctgatgccaaccatgccacctagcctaatcacggctctatcgccaatcacaggaaatgaggaccattactcgatcataaagcaaggtcaattcgtccacttagatgatctctgtcttgctcacatatttctgtttgaggaaccagaagtggaagggaggtacatatgcagtgcatgtgacgctaccattcatgacattgccaaattaattaaccaaaaataccctgagtacaaggtccccaccaagttcaagaatattccagatcaattggagcttgtgagattttcttccaagaagatcacagacttgggattcaaatttaaatacagcttagaggacatgtacactggagcaattgacacatgcagagacaaagggcttcttccgaaacctgcagaaaaagggctttttactaaacctgcagaaactccagtgaatgccatcatgcataaatag

SEQ ID NO: 120679 - protein, 348 aa, Glycine max
MGSASESVCVTGASGFIGSWLVMRLIERGYTVRATVRDPVNMKKVKHLVELPGAKSKLSLWKADLAEEGSFDEAIKGCTGVFHVATPMDFESKDPENEVIKPTINGVLDIMKACLKAKTVRRLIFTSSAGTLNVIERQKPVFDDTCWSDVEFCRRVKMTGWMYFVSKTLAEKEAWKFAKEQGLDFITIIPPLVVGPFLMPTMPPSLITALSPITGNEDHYSIIKQGQFVHLDDLCLAHIFLFEEPEVEGRYICSACDATIHDIAKLINQKYPEYKVPTKFKNIPDQLELVRFSSKKITDLGFKFKYSLEDMYTGAIDTCRDKGLLPKPAEKGLFTKPAETPVNAIMHK

SEQ ID NO: 120680 - DNA, 966 bp, Triticum aestivum
  CDS (1)..(966)
atggcggcggcggcgaggaagtgcgtgtgcgtgaccggcgcaggaggcttcgtcgcctcgtggctcgtcaagctcctcctctccaagggtcactacacagtccgcggcaccgtgcgcgatcccggtaatgctaagaatgctcaccttaaggcgctagaaggtgctggggaaagattgcagctgctcagcgctgacctgctggactacgacagcattgcgtccgctgttgctggctgtgagggcgtctttcatgttgctagccctgtcccttctggcaagtcaaccaatcctgaggaagaagttatagcccctgctgtaacaggcacactgaatgtcttgaaggcttgctacgaggcgaaagttaagcgagttgtcatggtgtcttcagttgttgctgtgtccaataatgctaactggcctaagggtaaattatttgatgaagatagctggtcagacgaggatctctgcagaaagggtgaggattggtatttcctttccaaaacgctcgcagagcgtgaggcttttgcttatgcagcaaaaactgggctggatattgtaactatttgcccgtcgttggtaattggccccttgatgcagtctacagtaaatacgagcagtaatattctccttaattatctcaaaggggaacgtgatactgtagaaaataaactcaggaatctagtggatgttcgtgatgttgccgatgctcttctattggcgtatgaaaatccagaggcgtctggacgttacatctgcagttcagtaccagttaaagtttctgatatgataagcatactgaagaccttatatccaatgtacacttatcccaaaaatttcaccgaagtggagggaaataccatttatagttcggagaaacttcagaagctagggtggaccttcaggcctttagagaagaccctgggggacagcgtggaatcctacagagcatctggcgtcctgaactga

SEQ ID NO: 120681 - protein, 321 aa, Triticum aestivum
MAAAARKCVCVTGAGGFVASWLVKLLLSKGHYTVRGTVRDPGNAKNAHLKALEGAGERLQLLSADLLDYDSIASAVAGCEGVFHVASPVPSGKSTNPEEEVIAPAVTGTLNVLKACYEAKVKRVVMVSSVVAVSNNANWPKGKLFDEDSWSDEDLCRKGEDWYFLSKTLAEREAFAYAAKTGLDIVTICPSLVIGPLMQSTVNTSSNILLNYLKGERDTVENKLRNLVDVRDVADALLLAYENPEASGRYICSSVPVKVSDMISILKTLYPMYTYPKNFTEVEGNTIYSSEKLQKLGWTFRPLEKTLGDSVESYRASGVLN

SEQ ID NO: 120682 - DNA, 993 bp, Triticum aestivum
  CDS (1)..(993)
atgggctccgggacggggaaggtggtgtgcgtcaccggcggctcgggctacatcgcctcctggctcgtcaagttcctcctccagcgcggctacaccgtccgcgccaccgtcagggacaccgccgaccccaagaaaacattgcacctgcaggccctggatggagccaaggacaggctgcacttgttcaaagcaagcttgttggaagaaggctctttcgatgctgccgttgccggctgcgattgtgtcttccacacggcttctcccttttatcacaatgtcaaggatcccaaggctgagttacttgacccagctgtcgatggaacgctcaatgttctccgttcctgcaagaaagcctctatcaagagagtgatcgtaacctcatccatggctgctgttgcctacaatgggaagccaaggactcctgatgtagtggttgacgagacatggttttcaagtgcagaagtctgcgaaaagaataagcaatggtatgtgctatccaagacccttgccgaggaggctgcatggaagtacgcaaatgataatggattagaaataattacaataaacccaacaatggtcatcggtcccctgttgcagcctacactgaatactagcacagaagcaatattgaagtttataaatggattatcttctacatacgccaatttctgctttggatggataaacgttaaagatgttgccctggcacatatccttgcatatgaagttccttcagcaaacggaagatattgtatggttgaaagagtcattcaccactcggaccttgtcaagatcattcacgagatgtatcctgaatttccagtgccagacaagtgtgcagatgatgcgccgtttgccccaatctaccaggtatcaaaggacaagataagaagtctgggcatggagctgacacccctggagacgagcctcaaggagactatcgagagcttgaaagagaaaggatttgtcacttctgagtcgagccatctgtga

SEQ ID NO: 120683 - protein, 330 aa, Triticum aestivum
MGSGTGKVVCVTGGSGYIASWLVKFLLQRGYTVRATVRDTADPKKTLHLQALDGAKDRLHLFKASLLEEGSFDAAVAGCDCVFHTASPFYHNVKDPKAELLDPAVDGTLNVLRSCKKASIKRVIVTSSMAAVAYNGKPRTPDVVVDETWFSSAEVCEKNKQWYVLSKTLAEEAAWKYANDNGLEIITINPTMVIGPLLQPTLNTSTEAILKFINGLSSTYANFCFGWINVKDVALAHILAYEVPSANGRYCMVERVIHHSDLVKIIHEMYPEFPVPDKCADDAPFAPIYQVSKDKIRSLGMELTPLETSLKETIESLKEKGFVTSESSHL

SEQ ID NO: 120684 - DNA, 1035 bp, Triticum aestivum
  CDS (1)..(1035)
atggcaccaccgcggcgcgtgtgcgtgaccggcggcggcgggtacatcgcctcgtggctcgtcaagctgctcctctcccggggctatgccgtccacgccaccgtccgcaacccacgtgattccaagaacgcgcatctgatgcagctggacggggcggcggagagcctgcggctgttcaaggcagacgtgctggacagcgccgcgctcgccgccgccgtcgaggggtgcgagggcgtcttccacgtcgcctcccccgtccccgcggataagatcgtcgatcctgagtcagaagtgatggtgcctgctgtgaagggcaccgtaaatattcttgaagtttgttcatctatgaaggttcagaaagttgtggtggtgtcatccacttcttctgttcattttaaccccaactggcctcaggctaaacccaaagatgagagttgctggcccgacaaaaaaatatgcgtggataatgagctctggtactgtcttgctaaaactgttgctgaagaaacagcctgggaatatgcagaaaagaatgggctaaatgttgttacagtatgcccttgtattgttttaggcccacaactgcaacccattgtcagtaccagcagcgaacttctcgtctatgttataaaaggaggtcctaatgcgatgaaggacatgctgttgcacatagtcgatgtccgtgatgtggcagatgctttgcttctggtatacgagaaaccagaatcatctgggagatatatcagcgcaccaaattacattagcacaaaagccatgctggagttgctgaagaagacgtaccctgactacaattatgtaaactgcaaggctgagatggatcacaactctcctatcaccccaatctcgtcggcaaagctgaggaatctgggctggaagccaagggaattggaggagacgctcctggatagcatcgaatactaccggaagacgggaattctgcaggatggcgagggagagggacacgcttgccgcttacctgatatcttccggatgtttcatgcctccgaggaatga

SEQ ID NO: 120685 - protein, 344 aa, Triticum aestivum
MAPPRRVCVTGGGGYIASWLVKLLLSRGYAVHATVRNPRDSKNAHLMQLDGAAESLRLFKADVLDSAALAAAVEGCEGVFHVASPVPADKIVDPESEVMVPAVKGTVNILEVCSSMKVQKVVVVSSTSSVHFNPNWPQAKPKDESCWPDKKICVDNELWYCLAKTVAEETAWEYAEKNGLNVVTVCPCIVLGPQLQPIVSTSSELLVYVIKGGPNAMKDMLLHIVDVRDVADALLLVYEKPESSGRYISAPNYISTKAMLELLKKTYPDYNYVNCKAEMDHNSPITPISSAKLRNLGWKPRELEETLLDSIEYYRKTGILQDGEGEGHACRLPDIFRMFHASEE

SEQ ID NO: 120686 - DNA, 984 bp, Triticum aestivum
  CDS (1)..(984)
atggcgttggccggcggagatggtcgcggcgagctcgtctgcgtgaccggcggcagcggcttcatcggctcctggctcgtccgcctcctcctcgaccgcggctacaccgtccacgccaccgtccagaacctccaggacgagggcgagacgaagcacctgcaggctctggatggcgcggacacgcggctccggctgttccagatggacctcctcgaccctgcctccgtcaggccggccatccagggcgtccacggcgtcttccacctggcctcccctgtgatactgcagcccgcacaagaccccgagaacgagctgctgctgccggcggtcaacggcgcgctcaacgtcctccgcgcagccaaagacagcggcgtcaagcgtgtcgtgatggtgtcttcgcagacggccatgtgtccgactgccgactggccggccgacaaggtcatagacgacgactgctgggccgacgttgagatcctcaagaaactcgagctttggtacaacgtctccaaaacgctggccgagaaggcggcgtgggacttcgccggagaggaaggactgaagctggttgtgctgaatccagggctggtgctgggcccgacgttgaccccagcacctactggtagtctccgtctgctgatgctgcttctgggaggccagaagcttgacatggaacccttcttcgttggctgcgttgacgtcagagatgtggcacaatctctggtggtgctctatgagaacccgtcggcgcagggacgccacctgtgcatggagtccgccgtacgcctcgtcgatttccacgatgaacttgctaatctttaccctgaattcccggttcacaggatccaggaggacaaacagggctgggtggtgagatcaaaggctccgtccaagaaactgatcgagttgggtgttcgtttcaccccattcgacaagactgtcagggagacggtggattgcttaaggagcaaaggggaaatctag

SEQ ID NO: 120687 - protein, 327 aa, Triticum aestivum
MALAGGDGRGELVCVTGGSGFIGSWLVRLLLDRGYTVHATVQNLQDEGETKHLQALDGADTRLRLFQMDLLDPASVRPAIQGVHGVFHLASPVILQPAQDPENELLLPAVNGALNVLRAAKDSGVKRVVMVSSQTAMCPTADWPADKVIDDDCWADVEILKKLELWYNVSKTLAEKAAWDFAGEEGLKLVVLNPGLVLGPTLTPAPTGSLRLLMLLLGGQKLDMEPFFVGCVDVRDVAQSLVVLYENPSAQGRHLCMESAVRLVDFHDELANLYPEFPVHRIQEDKQGWVVRSKAPSKKLIELGVRFTPFDKTVRETVDCLRSKGEI

SEQ ID NO: 120688 - DNA, 960 bp, Zea mays
  CDS (1)..(960)
atggagccggtgcggaagagcgtgtgcgtgaccggcgctggcggcttcgtcgcgtcggagctggtgaagctcctcctctcccggggccaatacgcggtccgcggcaccgtgcgcgaccctggtgctagcaagaatgcccatctcaaggtgctggaaggagctgaggaaaggttgcagcttctcaaggctgatctgatggactacaacagcattgcatcagcagttgccggctgtgagggtgtcttccatgtagccagtcctgtcctttcccatcgaccctccaaccctgaggtggaggtcatagctcccgctgtaataggtacaaccaatgtgttaaaggcttgctatgaggcaaaagttaggcgagttgtggtggtgtcttcatgtggagctgtgtatgctaatcctatttatccgaagggtaaggtgtttgatgaagactgctggtcagatgaggattactgcaggaagaaggaggattggtatttagtttccaaaacactgtcggaacgagaagctcttgcttttgcagcaaaaacagggctggacgttgtaactgtttgtccgtcattagtatttggacccttgatgcagcctacagtaaatttgagcagcgaaatgatccttaaatatttcaaagatctcgagactgttgaaaatgtactcagtaatatggtggatattcgtgatgttgctgatgctcttcttctgacttacgaaaagccagaagcgtctggacgatacatctgcagttcacatgcaataaaaatttctgatatgataaacatactgaagaccatgtatccgtcttacccttatcccaaaaattttgtggaagatgatgtcaactctgtatacagctctgagaaactgcagaagctggggtggaccttcaagcctatagaggaatccctccgtgacactgttgaatcctacaaggcatttggcatcctgaattga

SEQ ID NO: 120689 - protein, 319 aa, Zea mays
MEPVRKSVCVTGAGGFVASELVKLLLSRGQYAVRGTVRDPGASKNAHLKVLEGAEERLQLLKADLMDYNSIASAVAGCEGVFHVASPVLSHRPSNPEVEVIAPAVIGTTNVLKACYEAKVRRVVVVSSCGAVYANPIYPKGKVFDEDCWSDEDYCRKKEDWYLVSKTLSEREALAFAAKTGLDVVTVCPSLVFGPLMQPTVNLSSEMILKYFKDLETVENVLSNMVDIRDVADALLLTYEKPEASGRYICSSHAIKISDMINILKTMYPSYPYPKNFVEDDVNSVYSSEKLQKLGWTFKPIEESLRDTVESYKAFGILN

SEQ ID NO: 120690 - DNA, 969 bp, Zea mays
  CDS (1)..(969)
atggagacggcggagaggggcatcaccgtgtgcgtgaccggcgcggggggctttgtggcatcgtggctcgtcaagctcctcctctccaccggccgctacaccgtccggggcaccgtgcgtcatctcggtgatggcaagaatgcccatcttaagacactggaagatgctgaggagaggttgcagttggtcaaggctgacatgctggactatggcagcgttgcgtccgcggtcgccggctgtcagggtgtcttccatgtcgcgagccctgtcccctccggcaaatcctccaaccctgaggaagatgtcatagctcctgctgtaactggcacactgaatgtgttgaaagcttgctatgaggccaaagcgaagagagttgttgtggtatcttcagtggcggctgtgttcaataatcctgactggcctaagggcgaggcctttactgaggatagctggtcagatggggaatattgcagaaaaaatgaggaatggtatttcctttctaaaacattggcagaacatgaggcttttgcttatgcagccaaaactgggctagacattgtaactatttgcccatcattggtaattggacctttgttgcaacctgcagtaaatacaagtgttaaagtcttcctcagttatatcaaaggagatcaggagatagttaaagatggacccaaaaatcttgtggatgttcgtgatgtcgctggtgcccttctgttggcttacgaaaatctgcaggcatcaggacgatacctctgcagttcaccagcaataagagtctctgatattgtaaacatactgaagaccgaatatccaacatacacttaccctcaaaaattcgttgaagcggaaggtagcaacacatacaacacggagaagcttcggaagctagggtggacctctaggcccatggaggacaccctccgagacagcatcgaatgctacagagctatgggcatcctgaactga

SEQ ID NO: 120691 - protein, 322 aa, Zea mays
METAERGITVCVTGAGGFVASWLVKLLLSTGRYTVRGTVRHLGDGKNAHLKTLEDAEERLQLVKADMLDYGSVASAVAGCQGVFHVASPVPSGKSSNPEEDVIAPAVTGTLNVLKACYEAKAKRVVVVSSVAAVFNNPDWPKGEAFTEDSWSDGEYCRKNEEWYFLSKTLAEHEAFAYAAKTGLDIVTICPSLVIGPLLQPAVNTSVKVFLSYIKGDQEIVKDGPKNLVDVRDVAGALLLAYENLQASGRYLCSSPAIRVSDIVNILKTEYPTYTYPQKFVEAEGSNTYNTEKLRKLGWTSRPMEDTLRDSIECYRAMGILN

SEQ ID NO: 120692 - DNA, 960 bp, Linum usitatissimum
  CDS (1)..(960)
atggcggcggcgaagggcttagtttgtgtgaccggcgccggaggtttcttaggttcttgggtcgtccgtatcctcctctccaacgactattcagtccacggcactgtcagagacccctcggatgagaagtatgcccacctgaagcaactccccaaggcatccacaaacctaaagctcgtaaaggccgatttactagattaccctacccttgtttctgcatttcaaggctgctccggggtttttcacgtcgccagccctgttcctgctttctctgtatcaaacccccaggttgaagtgctggagccagcggtgactggcactcgaaatgtacttaaagcatgtgttgaaacgaaggtcaatcgagctgttgttgtgtcctctggcgctgctgttgccttgaacccaagctggccaaaggatcagcccatggacgagtcttgctggtctgataaggaatactgcagaactacggagaactggtattgcgcctccaagacggaagctgagattctggcttttgagtatggcaaagagtatggacttgatgtagtaagtgtttgtcccaatttgatattggggcctatcctgcagcctactgtgaatgcaagtaccatggtcctcaccaggcttctgaaagaaggcctggactcggtagagaacaagcataggatgattgtggacgtgcgagacgtagctgaagcgttggttttggtgtacgagaagcctgaggcacaagggagatacatatgctctaaacattcggtctatgctcagcaaatggttgagattttgaaagaaaaatatcccaactacaatttccctaagagcttcgtggagggacctgaaaagcgagaaatgagctcagagaagttgcagaggttaggatggagttaccgtccattggaggaaacccttgttgactctgttgagagttataagaaggctggcatattggagtag

SEQ ID NO: 120693 - protein, 319 aa, Linum usitatissimum
MAAAKGLVCVTGAGGFLGSWVVRILLSNDYSVHGTVRDPSDEKYAHLKQLPKASTNLKLVKADLLDYPTLVSAFQGCSGVFHVASPVPAFSVSNPQVEVLEPAVTGTRNVLKACVETKVNRAVVVSSGAAVALNPSWPKDQPMDESCWSDKEYCRTTENWYCASKTEAEILAFEYGKEYGLDVVSVCPNLILGPILQPTVNASTMVLTRLLKEGLDSVENKHRMIVDVRDVAEALVLVYEKPEAQGRYICSKHSVYAQQMVEILKEKYPNYNFPKSFVEGPEKREMSSEKLQRLGWSYRPLEETLVDSVESYKKAGILE

SEQ ID NO: 120694 - DNA, 1056 bp, Linum usitatissimum
  CDS (1)..(1056)
atggttagtgaaatggtttgcagcgctgttggggaaaacaagactgtctgcgtaacgggggcttctgggttcatcgggtcatggcttacgatgaggttgcttgaacaaggatataccgttcgagccacagttcgtaaccctgaggatgagaggaaagtgaagcatctagtggagctgccaaacgcaaagactcatttgacgttgtggaaagccgacctttcggtggcagggagcttcgacgacgctatccatggctgctccggtgtgtttcacgtggccactccgatggatttcgagtcctccgaccctgagaatgaagtgataaagccgacggtggaaggggtgctggacataatgagagcaagcgccaaggccaaaacagtaaagagaatagtgttcacttcgtcggcggggacagtggacgtggaagagcaccataaagcagtctacgacgagaacgattggagcgatctcgatttcgtccaaagagttaaaatgaccggatggatgtactttgtgtcgaagagcttagcagagaaagaggcctggaaatttgcagaggagaacaacttggatttcataagcatcattccaagtgtggtggtggggcctttcattatgccctccatgcctcccagcctcatcactgctctctccctcatcaccaggaatgaagcacactattcgatcatagagcaggggcatttcgtgcacttggacgacctctgcaacgcccacatcttcttgctggagcatccaaatgctcagggccgttacatgtgcaactctcacgacatcaacatttaccaacttgcccactttctatccaacaaataccccgactacaacatcccaacagagttcgaagggatcgaaaagggaaagctgaagaaggtgattttctcgtccgagaaggtgaagaagttaggattcgagttcaagtacggactggaggagatgtttgaaggagctgtggagacttgcaaggaaaagggtttgcttccatcatcgactgttgtgaaggctagtggccatgttgaaaaccattcgctgtag

SEQ ID NO: 120695 - protein, 351 aa, Linum usitatissimum
MVSEMVCSAVGENKTVCVTGASGFIGSWLTMRLLEQGYTVRATVRNPEDERKVKHLVELPNAKTHLTLWKADLSVAGSFDDAIHGCSGVFHVATPMDFESSDPENEVIKPTVEGVLDIMRASAKAKTVKRIVFTSSAGTVDVEEHHKAVYDENDWSDLDFVQRVKMTGWMYFVSKSLAEKEAWKFAEENNLDFISIIPSVVVGPFIMPSMPPSLITALSLITRNEAHYSIIEQGHFVHLDDLCNAHIFLLEHPNAQGRYMCNSHDINIYQLAHFLSNKYPDYNIPTEFEGIEKGKLKKVIFSSEKVKKLGFEFKYGLEEMFEGAVETCKEKGLLPSSTVVKASGHVENHSL

SEQ ID NO: 120696 - DNA, 978 bp, Linum usitatissimum
  CDS (1)..(978)
atgagcgaggaggaagggaaaggaaaggtagtctgtgtgactggagcttcaggctacatagcctcatggctggtgaagttacttcttcaacgaggatacactgttaaagctacagtccgtgacccaaatgatgccaagaagactgaacatttgcttgcacttgagggagccaaggagcggttgaaactgttcaaggcagacttgctggatgaaggatcatttgataatgttgttgagggatgtgaaggtgttttccacaccgcttccccatttttcttcaatgcgactgatcctcaggttgaactggttgaccccgcggtgaagggaactctcaatgtactaacatcatgcgctaaagtcccttcaatcaagagagtggtcatcacatcatccatggcagcagttgcattcaatggaaggactcttgctcctgatgtggtaattgatgagacttggttctctaatgcagaattctgcagaaaatcaaagttgtggtatatgctggcgaaaacactggctgaagaacttgcttggaagttctcaaaagagaatggtatggatatagtttcactaaatccaggacttgtaattggccctctcttgcaaccgacattgaatacgagcgcagagtcagttctgaaccttgtaaagggggtggaaaagtatccaaacacaacatacaggtgggtagatgttagagatgttgcttatgcccatatatatgccatggagaatccttcagctggtggaagatactgcttagtcggagcagttttacatgcttctgaagctgtgaagatgttgcatgagcttttccatgacctcaacatccctcaagaatgtgcggatgacaagccacctatggcgatatatcaagtgtcgaaagaaagagttgaaagcctaggcgtcaaatacagtcctctcaagactagcttgaaagacacagtggaaagcttgaaggaaaagaagttattttga

SEQ ID NO: 120697 - protein, 325 aa, Linum usitatissimum
MSEEEGKGKVVCVTGASGYIASWLVKLLLQRGYTVKATVRDPNDAKKTEHLLALEGAKERLKLFKADLLDEGSFDNVVEGCEGVFHTASPFFFNATDPQVELVDPAVKGTLNVLTSCAKVPSIKRVVITSSMAAVAFNGRTLAPDVVIDETWFSNAEFCRKSKLWYMLAKTLAEELAWKFSKENGMDIVSLNPGLVIGPLLQPTLNTSAESVLNLVKGVEKYPNTTYRWVDVRDVAYAHIYAMENPSAGGRYCLVGAVLHASEAVKMLHELFHDLNIPQECADDKPPMAIYQVSKERVESLGVKYSPLKTSLKDTVESLKEKKLF

SEQ ID NO: 120698 - DNA, 1029 bp, Linum usitatissimum
  CDS (1)..(1029)
atggccacacctaccactgtcgtccagcctccgtcggggaagaaaactgcatgtgtgataggaggcaccgggttcgtggcgtctaggctggtcaagttactcttggaaaatggctactcggtccggaccactgtccggaaccctgacaaccagaggaggatttcacacctgatgccgctgaaagaattgggggagctggagattttcgccgcagagttaactgacgaggagagtttcatcgctccggtggcagggtccgacttggtattcctcgtcgcaaccccggtcaattttgcttctaaggatcctgagaatgacatgataaagccagcaatccaaggtgtggaaaacgtgctgaaagcttgcgccaaggccaaaacggtgaaaagggtggtgcttacttcctctgcagcagccgttactattaataatgtcgagggaacaggtttggtcatggacgagaataactggaccaatgttcagtttctaacctcacacaagcctccaacttgggggtacgctgtttcgaagacactagctgagaaagcagcatggaaatttgctgaagaaaacaagattgatcttgtgacagtgattccttcacttgtagctggtcctcctctcactgctgacgtacctagcagcattaaccttgcactctccatgctcacagggaatgaaatgctcataaatgggctgaaaggaatggaaaagctgtcgggttcgatctcgattacacacgttgaggatgtttgtagagcacatttgttcgttgcggagaaggaatctgcttctggcagattcatatgctgtgctgctaatactagtgtcgctaagctagccaaattcttcagcttgagatatccacagtacaaagtccagccccagattggagatgttccggaacacgcgaagctgacgatttcttcagagaagctgatcggagaaggattcagtttcaagcatgggttggaagagatttatgacgagacagtggaatatttcaaagctgtaggaaatttgaaatga

SEQ ID NO: 120699 - protein, 342 aa, Linum usitatissimum
MATPTTVVQPPSGKKTACVIGGTGFVASRLVKLLLENGYSVRTTVRNPDNQRRISHLMPLKELGELEIFAAELTDEESFIAPVAGSDLVFLVATPVNFASKDPENDMIKPAIQGVENVLKACAKAKTVKRVVLTSSAAAVTINNVEGTGLVMDENNWTNVQFLTSHKPPTWGYAVSKTLAEKAAWKFAEENKIDLVTVIPSLVAGPPLTADVPSSINLALSMLTGNEMLINGLKGMEKLSGSISITHVEDVCRAHLFVAEKESASGRFICCAANTSVAKLAKFFSLRYPQYKVQPQIGDVPEHAKLTISSEKLIGEGFSFKHGLEEIYDETVEYFKAVGNLK

SEQ ID NO: 120700 - DNA, 1029 bp, Linum usitatissimum
  CDS (1)..(1029)
atgccagcagtacctgacaccacatccctcatcgtcggccatggccagaccgtctgcgtcaccggcgccggcggcttcattggctcatggatcgttaaacttctcctccacagaggctactccgtcagaggaaccgtcaggaatccagaggatccgaagaatggacacctgaaagagctacaaggagccaatgagcggctgaccctgtgggaagccgacctactggattacgacagtctccgacgagccattgatggatgtcatggcgttttccacaccgcttcccctatctccgatgatcctgacgaaatgctagagccggcggtggacgggactaaaaatgtaataatagcggcatcggaagcaagagtccggcgtgttgtgttcacgtcgtccatcggcgccgtctacatggatcccaaccgaaaccatgacgtggagatggatgagtccttttggagcgatctcgactattgcaagaacaccaagaactggtactgctacggcaaaacggcagcggagctgagagcatggaaattggcgaaagagaagggtgtggatttggttgtggtcaaccctgtggttgtggtcggaccattgctccaaccaactgtcaacgctagcagcgtgcacatactcaagtacctagccggttgggtaaaaacctacgccaatgcagttcaagggtacgttcacgttagagacgtggcactagcccacatcctcgtattcgagaacatgtatgcatctggtcgctacctttgcgtcgaaagtgtcctccaccgcggtgaggtggttgagattctcgacgagttgttccccggttatcccctcccaaccaagtgcaaggacgagaagagccctagagccaaacctcacaagttttcgtgccaaaagttgaaggacattggtttggagttcactccggtgagacagtgtttgtacgaaacggtgaagtccctgcaggaacatggccatctcgttgctcttccaaaacaaaatttcgaaaagttgagttttgaaccatga

SEQ ID NO: 120701 - protein, 342 aa, Linum usitatissimum
MPAVPDTTSLIVGHGQTVCVTGAGGFIGSWIVKLLLHRGYSVRGTVRNPEDPKNGHLKELQGANERLTLWEADLLDYDSLRRAIDGCHGVFHTASPISDDPDEMLEPAVDGTKNVIIAASEARVRRVVFTSSIGAVYMDPNRNHDVEMDESFWSDLDYCKNTKNWYCYGKTAAELRAWKLAKEKGVDLVVVNPVVVVGPLLQPTVNASSVHILKYLAGWVKTYANAVQGYVHVRDVALAHILVFENMYASGRYLCVESVLHRGEVVEILDELFPGYPLPTKCKDEKSPRAKPHKFSCQKLKDIGLEFTPVRQCLYETVKSLQEHGHLVALPKQNFEKLSFEP

SEQ ID NO: 120702 - DNA, 1041 bp, Linum usitatissimum
  CDS (1)..(1041)
atgccggctgacagctcatccttacccggccacggccacaccatctgcgtcaccggcgccggcggcttcattgcctcatggatggttaaacttcttctcgaaagaggctactccgtcaaaggaactgtcaggaatccagatgatccgaagaacagtcatctgagagaactggaaggagcgagcgagcggctaactctgtgcaaagccgatcttctcgactatgagagcctccgagaagccattgccggctgccagggtgttttccacaccgcttcccctgtcaccgatgatccagaacaaatggtggagccggctgtggttggtacgaacaatgtaataaatgctgcatctgaagccaaagtccggcgggttgtcttcacgtcatcaattggcgctgtctacatggaccccaaccggagcccggacgttgtcgtcgatgaatcgtgttggagcgatctggaattttgcaaaaacaccaagaattggtactgttatgggaagatggtggcggagcaggcggcgtgggagactgctaaagagaagggagtggatgtagtggcggtgaaccctgttctggtaatgggaccattgttgcaatcaaccatcaacgccagcacaattcacatcctcaagtacctaactggttcggcaaagacttacgccaattcggtgcaagcctatgttgatgtcagggacgtggcactagctcacatcatcgtcttcgagaacccggcggcctccggccggtacctctgcgccgagagtgttctccaccgtggcgaggttgtcgatatccttgccaagttattccccgagtatcccgtccccaccaagtgttcagatgagaagaacccaagagcaaagccctacaagttctcgtgccaaaaactgaaggacctgggactggaattcacaccaacaaagcagagtctgtatgaagcagtcaagtcccttgaggaaaagggtcatctttctccccctaaacagcagcagcagcagcacaaggaggaggaacccatcaaaattcagtcctcttcttaa

SEQ ID NO: 120703 - protein, 346 aa, Linum usitatissimum
MPADSSSLPGHGHTICVTGAGGFIASWMVKLLLERGYSVKGTVRNPDDPKNSHLRELEGASERLTLCKADLLDYESLREAIAGCQGVFHTASPVTDDPEQMVEPAVVGTNNVINAASEAKVRRVVFTSSIGAVYMDPNRSPDVVVDESCWSDLEFCKNTKNWYCYGKMVAEQAAWETAKEKGVDVVAVNPVLVMGPLLQSTINASTIHILKYLTGSAKTYANSVQAYVDVRDVALAHIIVFENPAASGRYLCAESVLHRGEVVDILAKLFPEYPVPTKCSDEKNPRAKPYKFSCQKLKDLGLEFTPTKQSLYEAVKSLEEKGHLSPPKQQQQQHKEEEPIKIQSSS

SEQ ID NO: 120704 - DNA, 1023 bp, Zea mays
  CDS (1)..(1023)
atggcgtcgccgcagtcgccgcgcgtgtgcgtaaccggtggcggcgggtacgtcgcctcatggctcgtcaaactcctcctctcccgcggctacgccgtgcatgccactgtccgcgacccaagtgatcccaagaacgaccacctccggcggatggacggggcatcggagagcttgctcctgttcaaggccgacatgctcgatcgcgacgccctggcggcggcggtctctgggtgcgagggggtcttccacgtcgcctcccctgtgcccgcagataaggtcctcgatcctgaggcagaggtactgtctcctgctgtcaaaggcactctgaacgttcttcaggcttgctcggcaaataatgttcggaaagttatcgtggtttcatccacagctgctgtccattttaatccgagttggccccaaggtataatccaagacgagagttgctggtcagataaaactttttgcactaagaatgaggaatggtacattgctgccaagacaattgctgaagagacagcactggagtatggagagaagaatgggctacttgttgttacagtttgcccttgtgtcgttttaggtccactcctgcagcctctaatcaacaccacgagtgaagtattcgtctacattataaaaggaggtcctagagcgatgaaaaacatcacctggaacatcgttgatgtccgtgatgtagccgatgctttgcttttggtatatgagaaagtggaatcatctgggagatacatttgtgcaccaaatcggatcagcacttacgacatagcgaacttgtttagaaagttctaccccaactacaattatgtgaactgcagcgacgaggaccatgaatctgaaatgccgccggttacatcagagaaacttaagagcctaggttggaaaccaagaaaattggaggaaactctgctggacagcattgagcactacgagaaggcagggtttctgcaggatgtagagggctgcccttgtcgtcttccttaccttttccattttgcttctaactaa

SEQ ID NO: 120705 - protein, 340 aa, Zea mays
MASPQSPRVCVTGGGGYVASWLVKLLLSRGYAVHATVRDPSDPKNDHLRRMDGASESLLLFKADMLDRDALAAAVSGCEGVFHVASPVPADKVLDPEAEVLSPAVKGTLNVLQACSANNVRKVIVVSSTAAVHFNPSWPQGIIQDESCWSDKTFCTKNEEWYIAAKTIAEETALEYGEKNGLLVVTVCPCVVLGPLLQPLINTTSEVFVYIIKGGPRAMKNITWNIVDVRDVADALLLVYEKVESSGRYICAPNRISTYDIANLFRKFYPNYNYVNCSDEDHESEMPPVTSEKLKSLGWKPRKLEETLLDSIEHYEKAGFLQDVEGCPCRLPYLFHFASN

SEQ ID NO: 120706 - DNA, 963 bp, Zea mays
  CDS (1)..(963)
atggaggcggtggggaagagcgtgtgcgtgaccggcgcgggcggcttcatcgcgtcgtggctggtgaagctcctcctctgccggggccaatacaaggtccgcggcaccgtgcgcgaccctggtgctagcaagaatgctcatctcaaggtgctggaaggagctggggaaaggttgcagcttgtcaaggctgatttgttggactacagcagtgttgcttcagcaattgccggctgtgagggtgtcttccatgtagctagccctgtcccttccggtcggtcctccaaccctgaggtggaggtcataggtcctgctgtaacaggtacaaccaatgtgttaaaggcttgctatgaggcaaaagttgggcgagttgtggtggtgtcttcatgtgcagctgtctatgctaatcctaattatcccaagggtaaggtctttgatgaagactgctggtcagatgaagcttactgcaggaagaacgaggattggtattttgtttccaagacactggcggaacgagaggcttttgcttatgcagcaaaaacagggctggatgttgtaactatttgcccgtcattagtatttggacccttgatgcagcctacagtaaattcgagcagcaaaatcatccttaaatatttcacaggagatcgcgagactgttgaaaacatactcagaaatatggtggatgttcgtgatgttgctgatgctcttcttctggcttacgaaaagccagaagcgtctggacgatacatctgcagttcacatgcaataaaagttgctgatatgataaacatactgaagaccttgtatccatcttacccttatcccaaaaatttcgtggaagatgatgacaactctgtatacagctctgagaaactgcagaagctggggtggagcttcaagcctatagaggaatccctccgtgacactgttgaatcctacaaagcatttggcatcctgaattga

SEQ ID NO: 120707 - protein, 320 aa, Zea mays
MEAVGKSVCVTGAGGFIASWLVKLLLCRGQYKVRGTVRDPGASKNAHLKVLEGAGERLQLVKADLLDYSSVASAIAGCEGVFHVASPVPSGRSSNPEVEVIGPAVTGTTNVLKACYEAKVGRVVVVSSCAAVYANPNYPKGKVFDEDCWSDEAYCRKNEDWYFVSKTLAEREAFAYAAKTGLDVVTICPSLVFGPLMQPTVNSSSKIILKYFTGDRETVENILRNMVDVRDVADALLLAYEKPEASGRYICSSHAIKVADMINILKTLYPSYPYPKNFVEDDDNSVYSSEKLQKLGWSFKPIEESLRDTVESYKAFGILN

SEQ ID NO: 120708 - DNA, 963 bp, Zea mays
  CDS (1)..(963)
atggcggcggcggcaaagagcgtatgcgtgaccggcgcgggcggcttcatcgcgtcttggctcgtgaagctcctcctctcccgtggccagtacgtggtccgcggcaccgtgcgcgaccctggtgctagcaagaatgctcatctcaaggagctggagcgggctggggaaagattgcagcttctccaggctgatttgttggactacagcagtgttgcatcagcaattgctggctgtgagggtgtcttccatgtagcttgccctgtcccttctggtcggtcctccaaccccgaggtggaggtcataggtcctgctgtagtaggaacaaccaatgtgttaaaggcttgctatgaggcaaaagttaagcgagttgtggtggtgtcttctgtttcagctgtattcagtaaccctaattggcctaaggacaaggtctttgatgaagattcttggtcagacgaggattattgcaggaagaatgaggattggtattatctttctaaaactctatccgaacgtgaagcttttgcttttgcagcaaaatcggggctggatgttgtaactatttgcccgtccttggtatttggacccttgatgcagtctatagtaaatacgagcagtaaagtactccttaattatttcaaaggagatcgtgagactgttgaaaacagactcagaaatatggtggatgttcgtgatgttgctgatgctcttgttctggcttacgaaaatccagaagcatctggacgatacatctgcagctcgcatccattaaaagtttctgatatgataaacatattgaagaccttatatccatcttacccttatcctaaacactttgtggaaacggatggcaacatcacctgcagttctgagaaacttcagaagctagggtggaccttcagggctatagaggaaaccctgcgtgatagtgttgaatcctacaaagcatttggcatccttaactga

SEQ ID NO: 120709 - protein, 320 aa, Zea mays
MAAAAKSVCVTGAGGFIASWLVKLLLSRGQYVVRGTVRDPGASKNAHLKELERAGERLQLLQADLLDYSSVASAIAGCEGVFHVACPVPSGRSSNPEVEVIGPAVVGTTNVLKACYEAKVKRVVVVSSVSAVFSNPNWPKDKVFDEDSWSDEDYCRKNEDWYYLSKTLSEREAFAFAAKSGLDVVTICPSLVFGPLMQSIVNTSSKVLLNYFKGDRETVENRLRNMVDVRDVADALVLAYENPEASGRYICSSHPLKVSDMINILKTLYPSYPYPKHFVETDGNITCSSEKLQKLGWTFRAIEETLRDSVESYKAFGILN

SEQ ID NO: 120710 - DNA, 1026 bp, Hordeum vulgare
  CDS (1)..(1026)
atggcgacgtcgtcgccgccccgcgtgtgcgtcaccggcggcaacggcttcataggctcgtgcctcgtcaagctgctcctctcccgcggctacgccgtccacgccaccgtccgcgacccacgtgacccgaagaacgcgttcctgacggagctggacggagccccggcgaacctgcggctgttcaaggcggacgtgctcgactacgacaccgtgacggccgccttcgccggctgcgagggcgtcttccatgtcgccactccggtgcccgacaaaaagatggttgatccacagaaagagatgatggaacctgctgtcaagggcaccatgaatgtgctcaaggcttgctcggctacgaaagttcataaactcatcgtggtctcgtccatcgccactagttgcttcaacccggattggcctcgagataaaatcaaagatgagagctgctggtcagacaaggagctctgcaaacagagtgagaactggtattctcttgcaaagactgaagccgaggagatggccctggaatacggagagaagaacgggttgcacgtcgtcacattttgccctggtctggttttaggccctctgttgcagcatgtggcggtcaataccagcagcaaggtcctcgtctacatgataaaaggaggccctgacacgatgaacaacaagttctttcccatagtagacgttcgcgatgttgccgatgcgttgctcctgttgtacaacaaggcagggccatctgagagatacatatgctcactggagcaaatggacctaaaggatctgctggcaatcatgaagagcatgtaccctaattacagttatgtagacaagatggttgatgtggatttcaacgttggagtcacttcggaaaagctgaagaatctagggtggaaaccaaggaagatcgaggagacactcgcggatagtatcgagtcctacaaaaaagcagggcttcttggggtttcagatgacgaaccatgccggcttccattcatctaccgaatgccgcctatccaggaatga

SEQ ID NO: 120711 - protein, 341 aa, Hordeum vulgare
MATSSPPRVCVTGGNGFIGSCLVKLLLSRGYAVHATVRDPRDPKNAFLTELDGAPANLRLFKADVLDYDTVTAAFAGCEGVFHVATPVPDKKMVDPQKEMMEPAVKGTMNVLKACSATKVHKLIVVSSIATSCFNPDWPRDKIKDESCWSDKELCKQSENWYSLAKTEAEEMALEYGEKNGLHVVTFCPGLVLGPLLQHVAVNTSSKVLVYMIKGGPDTMNNKFFPIVDVRDVADALLLLYNKAGPSERYICSLEQMDLKDLLAIMKSMYPNYSYVDKMVDVDFNVGVTSEKLKNLGWKPRKIEETLADSIESYKKAGLLGVSDDEPCRLPFIYRMPPIQE

SEQ ID NO: 120712 - DNA, 1020 bp, Hordeum vulgare
  CDS (1)..(1020)
atggcagagaagcagcgacaaggactgaacgtggaggaggggagctccggagcagcggggaagctcgtctgcgtcaccggcgcgtccgggtacatcgcgtcctggatcgtcaagctcctcctcgaccgcggctacaccgtccatggcaccgtccgggacaccgctgacccaaataaaacattgcacctgcgtgctcttgatggagcaaacgataggctgcacctgttcaacgcaaacttgttagaggaaggctctttcgacgctgccattgacggttgcgagtgtgtgttccatgcggcttctccagttttcttcgctgccaaagatcccaaggctgagttacttgattcagcagtcagtggaacgcttaatgttttgcgttcctgcaagaaggcttctgtcagaagagtggtcataacatcgtctatggcttctgttatcgtcaacgggaaaccaagaacccctgatgtaattgttgatgaaacatggttttcactaccagagctttgtaaaaagaatcagcaatggtataccttgtctaagacccttgcagaggaggctgcttggaagttctctaaagataacgaacaagaaataattgtaatgaaccccacaatggtcattggtcctctgctgcagcctacacttaacgctagtgttgaagcagtcttaaacctaatcaatggatcatctcctacatgccctaattatgcccatggctgggtaaatgtcagagatgtggccctggcacatatccttgcatatgaagttccttcagcaaatggaagatattgcattgttgaaagagttgctcactactcggagcttgtcaagatcatatgcaagatgtatccgaacattccactcccagataagtgtgcagatgatgaaccactttttccaacctaccaagtatccaaggacaagataagaagcttgggtatggaactgattcctctagagactagcattaaagagactatagaaagcttcaaagaaaagggttttgttgcattctga

SEQ ID NO: 120713 - protein, 339 aa, Hordeum vulgare
MAEKQRQGLNVEEGSSGAAGKLVCVTGASGYIASWIVKLLLDRGYTVHGTVRDTADPNKTLHLRALDGANDRLHLFNANLLEEGSFDAAIDGCECVFHAASPVFFAAKDPKAELLDSAVSGTLNVLRSCKKASVRRVVITSSMASVIVNGKPRTPDVIVDETWFSLPELCKKNQQWYTLSKTLAEEAAWKFSKDNEQEIIVMNPTMVIGPLLQPTLNASVEAVLNLINGSSPTCPNYAHGWVNVRDVALAHILAYEVPSANGRYCIVERVAHYSELVKIICKMYPNIPLPDKCADDEPLFPTYQVSKDKIRSLGMELIPLETSIKETIESFKEKGFVAF

SEQ ID NO: 120714 - DNA, 1035 bp, Hordeum vulgare
  CDS (1)..(1035)
atggcaccgccgcggcgcgtgtgcgtgaccggcggcggcgggtacatcgcctcgtggctcgtcaagctgctcctctcccggggctacgccgtccacgccaccgtccgcgacccatgtgattccaagaacgcgcatctgatgcagctggacggggcggcggagaacctgcgtctgttcaaggccgacgtgctcgacagcgccgcgctggccgccgccgtcgaggggtgcgagggcgtcttccatgtcgcctcccccgtccctgcggataagatcctcgatcctgagtcagaagtgatggtgcctgccgtgaagggcaccgtaaatatccttgaagtttgttcatctatgaaggttcagaaagttgtggtggtgtcatccacttcttctgttcatttcaaccccagctggcctcagggtaaacccaaggatgagagttgctggtcggacaaaaaagtgtgcgcacaacatgagctctggtactgtcttgctaaaactgtcgctgaagagacggctttgggatatgcagaaaagaatgggctcaatgttgttacagtatgcccttgtattgtttttggcccacaactacagcctgttgtcaacaccagcagcgagcttctcgtctatgttctaaaaggaggtcctaatgcgatgaacggcatgctgtggcacatagtcgatgtccgtgatgtggctgatgctttgcttctagtatatgagaaaccagaatcatctgggagatatatcagcgcaccaaattacattaccacaaaagcgattctggacttgctgaagaagacataccctgactacaattacgttaactgcaaggctgaggtggatcataattatcctatcaccccaatctcgtctgcaaaactgaagaatctgggctggaagccaagggaattggaggagacactcctggatagcatcgaatactaccggaagacgggaattctgcaggatggcgagggagacggacacccttgccgccttcctgatctcttccgtttctttcatgccgccgaagaatga

SEQ ID NO: 120715 - protein, 344 aa, Hordeum vulgare
MAPPRRVCVTGGGGYIASWLVKLLLSRGYAVHATVRDPCDSKNAHLMQLDGAAENLRLFKADVLDSAALAAAVEGCEGVFHVASPVPADKILDPESEVMVPAVKGTVNILEVCSSMKVQKVVVVSSTSSVHFNPSWPQGKPKDESCWSDKKVCAQHELWYCLAKTVAEETALGYAEKNGLNVVTVCPCIVFGPQLQPVVNTSSELLVYVLKGGPNAMNGMLWHIVDVRDVADALLLVYEKPESSGRYISAPNYITTKAILDLLKKTYPDYNYVNCKAEVDHNYPITPISSAKLKNLGWKPRELEETLLDSIEYYRKTGILQDGEGDGHPCRLPDLFRFFHAAEE

SEQ ID NO: 120716 - DNA, 969 bp, Hordeum vulgare
  CDS (1)..(969)
atggaggcggcggcgaagaggagcgttgtgtgcgtgaccggcgcaggaggcttcgtcgcctcatggctcgtcaagctcctcctctccaaggcccactacactgtccgcggcaccgtgcgcgatcccggtaatgctaagaatgctcatctcaaggcgctagaaggtgctggggaaaggctgcagctgctcagcgctgacctgctggactacgacagcattgcgtcggcggttgctggctgtgagggcgtcttccatgttgctagccctgtcccttctggtagatcgaccaaccctgaggaagaagttatagcccctgctgtaacaggcacactgaatgtgttgaaggcttgcaacgaggcaaaagttaagcgagttgtcatagtgtcttcatgtgctgctgtgttcaacaatcctaactggcccaagggcaaagtatttactgaagacagctggtcagacgaggatctgtgcagaaagggtgaggattggtatttgctttccaaaacgcgcgcagagcgtgaggcttttgcttatgcagcgaaaactgggatggatgttgtagctattctaccatcattggtacttggccccttgatgcagccaacagtgaatgcgagcagtaaaattctcctcaaatatctcaaaggagaacatgagactgtagaaaatagattctggaatctagtggatgtccgtgatgttgccgatgctcttcttctggcatatgaaaatccagaggcatctggacggtacatctgcagtccagtacgaataaaagtttctgatgtcataaacattctgaagaccttatatccaacatacacttatcccaaaaactttacggaggtggaagaaggtaaagttatgagttctgagaaacttcagaagctagggtggaccttcaggcctgtagagaagaccctcggagacagtgtcgaatcctacaaagcatctggcatcctgaactga

SEQ ID NO: 120717 - protein, 322 aa, Hordeum vulgare
MEAAAKRSVVCVTGAGGFVASWLVKLLLSKAHYTVRGTVRDPGNAKNAHLKALEGAGERLQLLSADLLDYDSIASAVAGCEGVFHVASPVPSGRSTNPEEEVIAPAVTGTLNVLKACNEAKVKRVVIVSSCAAVFNNPNWPKGKVFTEDSWSDEDLCRKGEDWYLLSKTRAEREAFAYAAKTGMDVVAILPSLVLGPLMQPTVNASSKILLKYLKGEHETVENRFWNLVDVRDVADALLLAYENPEASGRYICSPVRIKVSDVINILKTLYPTYTYPKNFTEVEEGKVMSSEKLQKLGWTFRPVEKTLGDSVESYKASGILN

SEQ ID NO: 120718 - DNA, 975 bp, Helianthus annuus
  CDS (1)..(975)
atggctggagaagggaaggtggtttgcgttacaggtgcttctgggtacatagcttcatggctcgttaaactcttgcttgaccacggttacaccgttcatgctaccgtccgatctctagatgatccaaaaaagacagaacatttacttgctcttgatggagctaaggaaagactatctttgtttgaggctaacttaagtgtagaaggctcttttgactctgcatttaatggctgcgtttgtgtctttcacacagcatctcctgtaacttttgcttcacttgatgacccacagatggaattgctagatccagcagtgaagggaacactgaatgtgcttaaatcagctgcgaaagttcaatcgctgaagagagtggtcttcacgtcttcactggctgcagttatatatggttacaaacctccaagtggtgtagtggatgaaacctggttttcagatccagtcttttgtgagcagacaaagttgtggtatcatctttcaaagactctggctgagactgccgctgtgaatttttcaaaagagaatggtctggatttggtggtcataaatcctggctttgtaattggtcctatcttacaacctactctcaacttcacttctgaggcatttatgagctttatagaaactggaaaggaagtctttgcagatggaatatacatgcttgttgatgtgagagatatcgctatcgcgcacatattagcatttgagaaagcagaagctaatggtagatattgcatagtcggggatgtggttcgatcatctgaaatcaagatgatcttagacaaactctaccctgatcttggcttttctcaacggtataaagacaagtgtgtcgaggcgcaactatatagtatatcaaaggtgaaggcggaaagtctaggtgttgattttactccattggaggtaagcctcagagataccattgaaagccttaaagagaagaaatttatgaagctataa

SEQ ID NO: 120719 - protein, 324 aa, Helianthus annuus
MAGEGKVVCVTGASGYIASWLVKLLLDHGYTVHATVRSLDDPKKTEHLLALDGAKERLSLFEANLSVEGSFDSAFNGCVCVFHTASPVTFASLDDPQMELLDPAVKGTLNVLKSAAKVQSLKRVVFTSSLAAVIYGYKPPSGVVDETWFSDPVFCEQTKLWYHLSKTLAETAAVNFSKENGLDLVVINPGFVIGPILQPTLNFTSEAFMSFIETGKEVFADGIYMLVDVRDIAIAHILAFEKAEANGRYCIVGDVVRSSEIKMILDKLYPDLGFSQRYKDKCVEAQLYSISKVKAESLGVDFTPLEVSLRDTIESLKEKKFMKL

SEQ ID NO: 120720 - DNA, 975 bp, Helianthus annuus
  CDS (1)..(975)
atggcgcaatcaaacacgaagatcgtgtgcgtaaccggcggcagtggcttcatcggctcgtggctcgtccgcctcctactggaccgcggctacaccgtcaacgccaccgttaaagatctcaaggacgaaaaggaaacaaagcatctagaagcgttagaaggtgcagaatcgcgtctccgattgtttcaaatcgatcttctggattatgactctattgtcgcggctgttaccggcgtaaccggtgtgttccacgtggcttctccttgcaccgttgataaagttcatgatcccgagaatgagctattggcacctgcaatcaagggtacaatcaatgtactgacagcagcaaaggagctgggagttaagcgcgtggttgtcacttcatctgtttcagccattgtgcctagtccttcctggccgtcagatgtcccaaagaacgaggattgctggaccgatgaagaattttgcaagcagaaggagttgtggtatccactctcaaaaacactagctgagaaagctgcatgggatttttctaaagagaaaggtttagatatagttgtggtgaaccctggaacagtaatgggccccattcttcctccaacaattaatgcaagcatgcagatgattcgtcttcttatccaaggatgtacggatgaatatgagaatttcttcatgggcgctgttcatgttaaagatgtggcgctagctcatatattggtgtatgaaaatacatcagcaacaggaagacatatgtgtgttgaatccatctgtcattatggtgatttcgccgctaaggttgcagaattataccccacgtataacatccccaggttaccaaaggacacccagccggggttaatgagatcaaagaagggaggtaagaagctcatggatttggggcttgagttcatccctatggagcagattatcagggacagtgttgagactttgaaagccaaaggctatctatcttga

SEQ ID NO: 120721 - protein, 324 aa, Helianthus annuus
MAQSNTKIVCVTGGSGFIGSWLVRLLLDRGYTVNATVKDLKDEKETKHLEALEGAESRLRLFQIDLLDYDSIVAAVTGVTGVFHVASPCTVDKVHDPENELLAPAIKGTINVLTAAKELGVKRVVVTSSVSAIVPSPSWPSDVPKNEDCWTDEEFCKQKELWYPLSKTLAEKAAWDFSKEKGLDIVVVNPGTVMGPILPPTINASMQMIRLLIQGCTDEYENFFMGAVHVKDVALAHILVYENTSATGRHMCVESICHYGDFAAKVAELYPTYNIPRLPKDTQPGLMRSKKGGKKLMDLGLEFIPMEQIIRDSVETLKAKGYLS

SEQ ID NO: 120722 - DNA, 987 bp, Helianthus annuus
  CDS (1)..(987)
atggagaaaggatgcatttgtgtgaccggaggaacagggtttttagcatcatggatcatcaagagactgcttcaggatgggtattctgttaataccaccatcagatctcatgcagcagggtcaaagaaagatgtgagctaccttacaaacctaccctgtgcatcagagaagcttaaaattttcgatgcggatttaagcaaaccggagaccttcgaggcaccaatcaaaggctgcattggtgtctttcatgttgcccacccgatggatgggagcaacgatgctatagaagccgtaaccgaaaaatcaatgaaggccagtttaggtattttacaagcatgtgttgattcaaagacagtaaagaaggttgtgtacacatctagcgtgtcagcagtaatgtttaacgagaaaaaacacaatggcgttgtagacgaggaatcttggagtgacgttgattatattcgcactcatgttaaattcggagattggtatcatatttcaaagacattgaccgagaaggcaatcctcgagtttggtgagaaagaaggactagatgtcgcaacggtccatccttcgtttattcatggtccatttcttggccctcgctgcccacaatctgtgcgcgacgtgatggctatgatatttggggacactcatctttatgcgatgctacgaagagcgccttatgttcatgttgatgatgtcgcaagcgcacatattcatctttttgagcaccctaatgcgaaggggagatatatttgttcgaaaactgaagttcctatagaggagctgtacaaactattatccaccaaatatccagaatacaaaataccaagtatcgactttttgaagtctgaggatggtgaaaaattgatgttccctagcgtctcatcgaaaaagctcttaggcactggatttgagttcaaatatgggattgaagagatgtttgatgatgcaattgaatgttgtaagcgaaacaacatactataa

SEQ ID NO: 120723 - protein, 328 aa, Helianthus annuus
MEKGCICVTGGTGFLASWIIKRLLQDGYSVNTTIRSHAAGSKKDVSYLTNLPCASEKLKIFDADLSKPETFEAPIKGCIGVFHVAHPMDGSNDAIEAVTEKSMKASLGILQACVDSKTVKKVVYTSSVSAVMFNEKKHNGVVDEESWSDVDYIRTHVKFGDWYHISKTLTEKAILEFGEKEGLDVATVHPSFIHGPFLGPRCPQSVRDVMAMIFGDTHLYAMLRRAPYVHVDDVASAHIHLFEHPNAKGRYICSKTEVPIEELYKLLSTKYPEYKIPSIDFLKSEDGEKLMFPSVSSKKLLGTGFEFKYGIEEMFDDAIECCKRNNIL

SEQ ID NO: 120724 - DNA, 966 bp, Brassica napus
  CDS (1)..(966)
atggcgaaggagacagtgtgtgtaaccggagccaacggtttcatcggatcctggattatccaaacattactcgacaacggatacaccaaaatccacgcctccatctacccaggatccgacccgactcatctcctcaaactaccaagacccgacgacacaaacaccgagatcaagatcttcgaagcagatctcctagaccccgacgccatcgccagagccgtagacggatgcgcaggagtgttccacgtggcgtcgccttgtacgttggatccaccggagaatcccgagaaggagctggtcgaaccagcggttaagggaacgatcaacgtgttgctagcagctaataggttcaacgtgaggcgcgtggtgatcacttcctctatttcggctttggttccgaacccaaattggccggaaggaaaacccgtcgatgagtcgtcgtggaccgatcttgattattgcaagtcgatgcagaaatggtatccaatttcgaagacgctagctgagaaagcggcttgggaattttcggagaagcatggaaccaacgttgtgaccatccatccatccacatgcctcggaccacttctgcaacctagccttaacgcaagctgcgccgttttgctacagctcttacaaggctcgacggagacacaagagtatcactggctcggtgtggtgcacgtgagagatgtggcgaaagctcacgtgatgctgttcgaaacacctgaagcttctggtcggtttctgtgcagtaatgggatctatcagttcagtcagtttgctgctcttgtgtccaaactcttccctgagtttgatgttcacaggtttgataaaaaaacgcaacctgcgcttacgccttgtaaagatgcggctaagagattgattgagctggggatggtgtttactccggtcgaagatgcggttaaggagacggtccagagtcttagagacaaaggcttcctctga

SEQ ID NO: 120725 - protein, 321 aa, Brassica napus
MAKETVCVTGANGFIGSWIIQTLLDNGYTKIHASIYPGSDPTHLLKLPRPDDTNTEIKIFEADLLDPDAIARAVDGCAGVFHVASPCTLDPPENPEKELVEPAVKGTINVLLAANRFNVRRVVITSSISALVPNPNWPEGKPVDESSWTDLDYCKSMQKWYPISKTLAEKAAWEFSEKHGTNVVTIHPSTCLGPLLQPSLNASCAVLLQLLQGSTETQEYHWLGVVHVRDVAKAHVMLFETPEASGRFLCSNGIYQFSQFAALVSKLFPEFDVHRFDKKTQPALTPCKDAAKRLIELGMVFTPVEDAVKETVQSLRDKGFL

SEQ ID NO: 120726 - DNA, 987 bp, Brassica napus
  CDS (1)..(987)
atggataaaccaaaacgaaaagtttgtgtgaccggagcttcaggcttcttagcttcttggcttgtgaagaggcttctccttgagggatatgaagttacaggaacagtcagagatccaggaaatgagaagaagcttgcgcacctttggaaattggaaggggcaaaggagagactaaggttggtgaaggcagatttaatggaagatggaagttttgataacgccataatgggatgccaaggagttttccatactgcttctcctgttctcaaacctacctctaatccagaggaggagattttgaaaccagctatagagggcacactgaatgtactgagatcatgcaggaagaatcagtctttgaagcgtgtggtcctcacctcatcctcctcaacagtcaggatcagagatgattttgatcccaatatccctcttgacgaatctgtttggacctctgttgaactctgcaagcgttttcaggtctggtatgcattatcaaaaacattagccgagcaagctgcatggaaattctgtgaagaaaatagtattgacctcgtcactgttctaccatccttcctcgttggacctagcctgcctcctgatctgtgttctacagcatctgatgtcctcggattgctgaaaggagaaacagagaagtttcaatggcatggacagatggggtacgttcatatcgatgacgtggcaagaacccacatactcgttttcgaacacgaagcagcccaaggcagatacatttgcagctctaacgttgtcagtctagaggaactggtttccttcttatccacacgttacccatcactccctatccccaagaggtttgagaagcttaacaggctgcattacgactttgacacttcgaagataaagagcctcgggctcaagttcaagtcccttgaagagatgttcgatgactgcattgcctcttttgtagagaaaggctatttatctcatgtcgttacattacaataa

SEQ ID NO: 120727 - protein, 328 aa, Brassica napus
MDKPKRKVCVTGASGFLASWLVKRLLLEGYEVTGTVRDPGNEKKLAHLWKLEGAKERLRLVKADLMEDGSFDNAIMGCQGVFHTASPVLKPTSNPEEEILKPAIEGTLNVLRSCRKNQSLKRVVLTSSSSTVRIRDDFDPNIPLDESVWTSVELCKRFQVWYALSKTLAEQAAWKFCEENSIDLVTVLPSFLVGPSLPPDLCSTASDVLGLLKGETEKFQWHGQMGYVHIDDVARTHILVFEHEAAQGRYICSSNVVSLEELVSFLSTRYPSLPIPKRFEKLNRLHYDFDTSKIKSLGLKFKSLEEMFDDCIASFVEKGYLSHVVTLQ

SEQ ID NO: 120728 - DNA, 996 bp, Brassica napus
  CDS (1)..(996)
atgcctgccgacgggaaacttgtttgcgtcactggagccggtggctacattgcttcttggatcgttaagttgcttttggagagaggctacaccgttcgaggaaccgtgcggaacccagctgatcccaagaacaaccatctcagagagcttgatggagctaaagaaagactcactcttcacagtgctgatcttcttgactatgaagctctttgtgccgcgatcgatggctgcgatggcgttttccacaccgcttctccgatgaccgatgaccccgagacaatgttggagccggcggtgaacggagccaagttcgtgatcgacgcggcggctaaagccaaggtgaagcgtgttgtgttcacgtcatctatcggtgctgtttacatgaaccctaaccgtgaccctcaaaccatagtcaacgaagattgttggagtgatcttgatttctgcaaaaacacaaagaattggtattgctacgggaagatggtggcggaacaatcagcatgggagacggcgaaggccaaaggtgtggacttagtggtgctaaatcctgttttagttcttggaccaccgctccagtcagcggtcaacgctagtctagtccatatcctcaagtacctcaccggctcagccaagacctacgctaacctgactcaggtgtacgtggacgtccgtgacgttgcactaggccatgttatggtctacgaatcaccttccgcctcaggccgttacatcctcgccgagacggcgcttcaccgtggggaggttgttgagattcttgctaaattcttcccggagtatccgcttcctatcaagtgttcagacgagaagaatccgagggcaaagccttacaagttcactactcaaaagataaaagacttagggttggagtttaaacccatcaagcaatctctctacgaatctgtcaagagcttgcaagagaaagggcatcttcctcttcctcaagattcgaaccaaaacgtcataatcgaatcctag

SEQ ID NO: 120729 - protein, 331 aa, Brassica napus
MPADGKLVCVTGAGGYIASWIVKLLLERGYTVRGTVRNPADPKNNHLRELDGAKERLTLHSADLLDYEALCAAIDGCDGVFHTASPMTDDPETMLEPAVNGAKFVIDAAAKAKVKRVVFTSSIGAVYMNPNRDPQTIVNEDCWSDLDFCKNTKNWYCYGKMVAEQSAWETAKAKGVDLVVLNPVLVLGPPLQSAVNASLVHILKYLTGSAKTYANLTQVYVDVRDVALGHVMVYESPSASGRYILAETALHRGEVVEILAKFFPEYPLPIKCSDEKNPRAKPYKFTTQKIKDLGLEFKPIKQSLYESVKSLQEKGHLPLPQDSNQNVIIES

SEQ ID NO: 120730 - DNA, 972 bp, Brassica napus
  CDS (1)..(972)
atgtcgacggaacgagaagtagtctgtgtcaccggcgcaagtggctgcatcgggtcgtggctcgtccatctgctcctcctccgcggctactccgttcacgccaccgtgaaaaacctccaggatgagaaagagaccaaacatctggaagctctcgaaggagcagccacgcgcctccatctattcgagatggatctactgaagtacgacactgtttccgccgccgtcaacggatgtgccggcgttttccacctcgcatctccctgtatcgtcgacgaagtccaagatccacagaagcaactacttgatccagcggttaaggggacattaaatgtactgacggcggcgaaagaagccggcgtgaagagggttgtggtgacgtcttccatatcggcgataaccccaagccccaactggcctgctgataagatcaagaacgaggagtgttgggctgatgaagacttctgcaagcaaaatggattgtggtatccactttctaagacgcttgctgagaaggcggcttgggagtttgccgaggagaagggattggatgtggttgtggtgaatccaggaaccgtcatgggtcctgtcattcctccatccatcaacgctagcttactcatgcttcaacgcctccttgaggggtgtacagagacatacgagaacttcttcatgggttcggtgcatttcaaggatgtggcattagctcatatacttgtctatgagaacccatctgctaaaggaagacacctgtgcgttgaggccatctctcactacggtgatttcgtagccaaagtagctgaactctatcctaattacagtgtccccaagttaccgagagagactcaaccgggtttactccgagccaagaacgcagcaaagaagctgatggaattggggttagagttcagttccacggaggttatcatcaaggatggtgtggagagtcttaaaagcaaaggatttatctcttaa

SEQ ID NO: 120731 - protein, 323 aa, Brassica napus
MSTEREVVCVTGASGCIGSWLVHLLLLRGYSVHATVKNLQDEKETKHLEALEGAATRLHLFEMDLLKYDTVSAAVNGCAGVFHLASPCIVDEVQDPQKQLLDPAVKGTLNVLTAAKEAGVKRVVVTSSISAITPSPNWPADKIKNEECWADEDFCKQNGLWYPLSKTLAEKAAWEFAEEKGLDVVVVNPGTVMGPVIPPSINASLLMLQRLLEGCTETYENFFMGSVHFKDVALAHILVYENPSAKGRHLCVEAISHYGDFVAKVAELYPNYSVPKLPRETQPGLLRAKNAAKKLMELGLEFSSTEVIIKDGVESLKSKGFIS

SEQ ID NO: 120732 - DNA, 1032 bp, Brassica napus
  CDS (1)..(1032)
atgccagtcgacgaatcctcaccggccggaaaaaccgtctgcgtcaccggagctggtggatacatagcttcttggattgttaagttactcctcgagagaggctacaccgtcaaaggaaccgtacggaatccagatgatccaaagaatacacatttgagagaactcgaaggagccaaggagagactgattctgtgcaaggcagatcttcaggactacgaggctcttaaaacggcgattgatggctgcgacggcgtgtttcacacggcttctccggtcactgacgatcccgagcaaatggtggagccggccgtgaacggagccaagttcgtaattaatgcggcagctgaagccaaggtcaagcgcgtggtcatcacctcctcaattggtgcagtctacatggacccgaaccgtgaccctgaagccgtcgttgacgaaagttgttggagtgatcttgagttttgcaaaaacacaaagaattggtattgttacggcaagatggtggcggagcaagccgcgtgggagacggcgaaggagaaaggtgttgacctggtggttttgaatcccgtgctggtcctgggaccaccgctacagccgacgatcaacgccagtctcttccacgtcctcaagtatctaaccggctccgctaagacttacgctaatctgactcaggcttatgtggatgttcgcgatgtcgcgctggcccatgtgctggtctacgaggcaccctcggcctctggacgttatctcctcgcagagagcgcctttcaccgcggcgaagttgttgagattctggctaagttattcccggaatacccacttccgaccaagtgcaaggacgagaagaacccaagagccaagccatacaaattcactaaccaaaagattaaggacttgggcttagagttcacttccaccaagcaaagcctttatgatacagttaagagcttgcaagagaagggtcatcttcctccacctcctcctccttcaacatcacaagaatccagccaaaatggcatcaagatcgagtcttga

SEQ ID NO: 120733 - protein, 343 aa, Brassica napus
MPVDESSPAGKTVCVTGAGGYIASWIVKLLLERGYTVKGTVRNPDDPKNTHLRELEGAKERLILCKADLQDYEALKTAIDGCDGVFHTASPVTDDPEQMVEPAVNGAKFVINAAAEAKVKRVVITSSIGAVYMDPNRDPEAVVDESCWSDLEFCKNTKNWYCYGKMVAEQAAWETAKEKGVDLVVLNPVLVLGPPLQPTINASLFHVLKYLTGSAKTYANLTQAYVDVRDVALAHVLVYEAPSASGRYLLAESAFHRGEVVEILAKLFPEYPLPTKCKDEKNPRAKPYKFTNQKIKDLGLEFTSTKQSLYDTVKSLQEKGHLPPPPPPSTSQESSQNGIKIES

SEQ ID NO: 120734 - DNA, 1158 bp, Brassica napus
  CDS (1)..(1158)
atggtagctcacaaagagaccgtgtgcgtaaccggcgcatcaggattcattggttcatggctcgtgatgcggctactggaacgtggttattttgtccgtgccactgttcgcgatcctggaaatttgaagaaagtgcaacatcttcttgatttgccaaacgcgaagacgcaactcactttatggaaagccgatttatctgacgaaggaagctacgatgacgccataaacggatgcgacggcgttttccacatagcaactcccatggattttgaatctaaggaccccgagaacgaagtgataaaaccgacagtgaatggagtgttggggataatgaaagcatgtgataaggcaaagaccgtacgaagaattgtgtttacttcgtctgctggaacggttaatgttgaggaacaccagaaaaatgtctatgatgaaaacgattggagtgatcttgactttatcatgtccaagaagatgacaggatggatgtatttcatgtcgaaaacgttagccgagaaagcagcttgggattacgcgaaggaaaaaggaatagatttcattagtattatcccgacattggtgatcggtccatttataacaacatctatgccgcctagccttattaccgcgctctctcctatcactcgtaacgaggcacattactccatcataagacaaggacagtatgtccacttggacgacttatgcaatgctcatatattcttgtacgaacaagctgctgccaagggacgttatgtttgttcctctcacgatgcaacgattcttactatctccgagtttctcaggcaaaaatatccagaatataacgtgccttcaacgtttgaaggagtggatgagaatctaaagagcattatgttcagttccaagaagctgattgatatgggatttaacttcaagtatagtctcgaggatatgttggtggaatcgattgagacatgtcgtcaaaagggttttctccctgtcactttaccggaacatttgaaatctgaggacaaagttccgggcagtgatgacaataaggagattaaaaacggatctgcaggtttaactgatggtatggtagcttgtaagaagaccgaaccagggatggccggcgagaaagccgatagtcacatgtcggcacagcagatctgtgcttag

SEQ ID NO: 120735 - protein, 385 aa, Brassica napus
MVAHKETVCVTGASGFIGSWLVMRLLERGYFVRATVRDPGNLKKVQHLLDLPNAKTQLTLWKADLSDEGSYDDAINGCDGVFHIATPMDFESKDPENEVIKPTVNGVLGIMKACDKAKTVRRIVFTSSAGTVNVEEHQKNVYDENDWSDLDFIMSKKMTGWMYFMSKTLAEKAAWDYAKEKGIDFISIIPTLVIGPFITTSMPPSLITALSPITRNEAHYSIIRQGQYVHLDDLCNAHIFLYEQAAAKGRYVCSSHDATILTISEFLRQKYPEYNVPSTFEGVDENLKSIMFSSKKLIDMGFNFKYSLEDMLVESIETCRQKGFLPVTLPEHLKSEDKVPGSDDNKEIKNGSAGLTDGMVACKKTEPGMAGEKADSHMSAQQICA

SEQ ID NO: 120736 - DNA, 1032 bp, Brassica napus
  CDS (1)..(1032)
atgccactcgccgaatcctcaccggccggaaaaaccgtctgcgtcaccggagctggtggatacatagcttcttggattgttaagttactcctcgagagaggctacaccgtcaaaggaaccgtacggaatccagatgatccaaagaatacacatttgagagaactcgaaggagccaaggagagactgattctgtgcaaggcagatcttcaggactacgaggctcttaaaacggcgattgatggctgcgacggcgtgtttcacacggcttctccggtcactgacgatcccgagcaaatggtggaacctgccgtgaacggagccaagttcgtaattaatgcggctgctgaagcaaaggtcaagcgcgtggtcatcacctcctcaattggtgccgtctacatggacccgaaccgtgaccctgaagccgtcgttgacgaaagttgttggagtgatcttgagttttgcaaaaacacaaagaactggtattgttacggcaagatggtggcggagcaagccgcgtgggagacggcgaaggagaaaggtgttgacctggtggttttgaatcccgtgctggtccttggaccgccgctacagccgacgatcaacgccagtctcttccatgtcctcaagtatctaaccggctccgctaagacttacgctaatctgactcaggcttatgtggatgttcgcgatgtcgcgctggcccatgtgctggtctacgaggcaccctcggcctctggacgttatctcctcgcagagagcgcctttcaccgcggcgaagttgttgagattctggctaagttattcccggaatacccacttccgaccaagtgcaaggacgagaagaacccaagagccaagccatacaaattcactaaccaaaagattaaggacttgggcttagagttcacttccaccaagcaaagcctttatgatacagttaagagcttgcaagagaagggtcatcttcctccacctcctcctccttctacatcacaagaatcgagccaaaatggcatcaagatcgagtcttga

SEQ ID NO: 120737 - protein, 343 aa, Brassica napus
MPLAESSPAGKTVCVTGAGGYIASWIVKLLLERGYTVKGTVRNPDDPKNTHLRELEGAKERLILCKADLQDYEALKTAIDGCDGVFHTASPVTDDPEQMVEPAVNGAKFVINAAAEAKVKRVVITSSIGAVYMDPNRDPEAVVDESCWSDLEFCKNTKNWYCYGKMVAEQAAWETAKEKGVDLVVLNPVLVLGPPLQPTINASLFHVLKYLTGSAKTYANLTQAYVDVRDVALAHVLVYEAPSASGRYLLAESAFHRGEVVEILAKLFPEYPLPTKCKDEKNPRAKPYKFTNQKIKDLGLEFTSTKQSLYDTVKSLQEKGHLPPPPPPSTSQESSQNGIKIES

SEQ ID NO: 120738 - DNA, 1023 bp, Brassica napus
  CDS (1)..(1023)
atgccggtcgacgaatctacagcggtcgggaaaacagtttgcgtcaccggagctggtggatacatcgcttcttggattgttaagttactacttgagagaggctacacggtcaaaggaaccgtacggaatccagatgatcccaagaatacacatttgagagaactcgaaggagccaaggagagactgattctgtgcaaagcagatcttcaggactacgatgctcttaagtcggctatcgatggttgtgacggcgtctttcatacggcttctccggtcactgacgatcccgagcagatggtggagccggccgtgaacggagccaagtttgtaattaatgctgcagctgaagccaaggttaagcgcgtggtaatcacctcctcaattggtgcggtctacatggacccgagccgtgaccctgaagccgtcgttgacgaaagttgttggagtgatcttgagttctgcaaaaacaccaagaattggtattgttacggcaagatggtggcggagcaagccgcgtgggaaacggcagaggagaaaggtgttgacatggtggttttgaatccagtgctggttcttggcccaccgttacagccgacgatcaacgctagtctcttccacgttctcaagtatctaaccggctccgctaagacttacgctaatttgactcaggcttatgtggatgttcgtgatgtcgcactagctcatgttctggtctacgaggccccctcggcctctggacgttatctcctggcggagagcgcacttcaccgcggtgaagttgttgagattctggctaagttattcccggagtacccaattccaaccaagtgtaaggacgagaagaaccctagagccaagccgtacaagttcactaatcaaaagattaaggacttaggcttagagttcacatccaccaagcaaagcctctacgacacagttaagagcttgcaagagaaaggtcatctccctcctccttcaacatctcaagaatccagccaaaatggcatcaagatcgagtcttga

SEQ ID NO: 120739 - protein, 340 aa, Brassica napus
MPVDESTAVGKTVCVTGAGGYIASWIVKLLLERGYTVKGTVRNPDDPKNTHLRELEGAKERLILCKADLQDYDALKSAIDGCDGVFHTASPVTDDPEQMVEPAVNGAKFVINAAAEAKVKRVVITSSIGAVYMDPSRDPEAVVDESCWSDLEFCKNTKNWYCYGKMVAEQAAWETAEEKGVDMVVLNPVLVLGPPLQPTINASLFHVLKYLTGSAKTYANLTQAYVDVRDVALAHVLVYEAPSASGRYLLAESALHRGEVVEILAKLFPEYPIPTKCKDEKNPRAKPYKFTNQKIKDLGLEFTSTKQSLYDTVKSLQEKGHLPPPSTSQESSQNGIKIES

SEQ ID NO: 120740 - DNA, 972 bp, Brassica napus
  CDS (1)..(972)
atgtcgacggaacgagaagtagtctgtgtcaccggcgcaagtggctgcatcgggtcgtggctcgtccatctgctcctcctccgcggctactccgttcacgccaccgtgaaaaacctccaggatgagaaagagaccaaacatctggaagctctcgaaggagcagccacgcgcctccatctattcgagatggatctactgaagtacgacactgtttccgccgccgtcaacggatgtgccggcgttttccacctcgcatctccctgtatcgtcgacgaagtccaagatccacagaagcaactacttgatccagcggttaaggggaccttaaatgtactgacggcggcgaaagaagccggcgtgaagagggttgtggtgacgtcttccatatcggcgataaccccaagccccaactggcctgctgataagatcaagaacgaggagtgttgggctgatgaagacttctgcaagcaaaatggattgtggtacccactttctaagacgcttgctgagaaggcggcttgggagtttgctgaggagaagggattggatgtggttgtggtgaatccaggaaccgtcatgggtcctgttattcctccatccatcaacgctagcatgctcatgcttcaacgcctccttgaggggtgtacagagacatacgagaacttcttcatgggttcggtgcatttcaaggatgtggcattagctcatatacttgtctacgagaacccatctgctaaaggaagacacttgtgcgttgaggccatctctcactacggtgatttcgtagccaaagtagctgaactctatcctaattacagtgtccccaagttaccgagagagactcaaccgggtttactccgagccaagaacgcagcaaagaagctgatggaattggggttagagttcagttccatggaggttatcatcaaggatggtgtggagagtcttaaaagcaaaggatttatctcttaa

SEQ ID NO: 120741 - protein, 323 aa, Brassica napus
MSTEREVVCVTGASGCIGSWLVHLLLLRGYSVHATVKNLQDEKETKHLEALEGAATRLHLFEMDLLKYDTVSAAVNGCAGVFHLASPCIVDEVQDPQKQLLDPAVKGTLNVLTAAKEAGVKRVVVTSSISAITPSPNWPADKIKNEECWADEDFCKQNGLWYPLSKTLAEKAAWEFAEEKGLDVVVVNPGTVMGPVIPPSINASMLMLQRLLEGCTETYENFFMGSVHFKDVALAHILVYENPSAKGRHLCVEAISHYGDFVAKVAELYPNYSVPKLPRETQPGLLRAKNAAKKLMELGLEFSSMEVIIKDGVESLKSKGFIS

SEQ ID NO: 120742 - DNA, 996 bp, Brassica napus
  CDS (1)..(996)
atgcctgccgacgggaaacttgtttgcgtcactggagccggtggctacattgcttcttggatcgttaagttactcttggagagaggctacaccgttagaggaaccgtgcggaacccagctgatcccaagaacaaccacctcagagagctcgatggagccaaagaaagactcactcttcacagtgctgatcttctcgactacgaagctctttgtgccgcaatagatggctgcgatggcgttttccacaccgcttctccgatgaccgatgaccccgagacaatgttggaaccggcggtgaacggagccaagttcgtgatcgacgcggcggctaaagccaaggtgaagcgtgtggtgttcacgtcatctatcggtgctgtttacatgaaccctaaccgtgaccctcaaaccatagtcgacgaaaattgttggagtgatcttgatttctgcaagaacacaaagaattggtattgctacgggaagatggtggcggaacaatcagcatgggagacggcgaaggccaaaggtgtggacttagtggtgctaaatcctgttttagttcttggaccaccgctccagtcagcggtcaacgctagtctagtccatatcctcaagtacctcaccggctcagccaagacctacgctaacctgactcaggtgtacgtggacgtccgtgacgttgcactaggccatgttatggtctacgaatcaccttccgcctcaggccgttacatcctcgccgagacggcgcttcaccgtggggaggttgttgagattcttgctaaattcttcccggagtatccgcttcctatcaagtgttcagacgagaagaatccgagggcaaagccttacaagttcactactcaaaagataaaagacttagggttggagtttaaacccatcaagcaatctctctacgaatctgtcaagagcttgcaagagaaagggcatcttcctcttcctcaagattcgaaccaaaacgtcataatcgaatcctag

SEQ ID NO: 120743 - protein, 331 aa, Brassica napus
MPADGKLVCVTGAGGYIASWIVKLLLERGYTVRGTVRNPADPKNNHLRELDGAKERLTLHSADLLDYEALCAAIDGCDGVFHTASPMTDDPETMLEPAVNGAKFVIDAAAKAKVKRVVFTSSIGAVYMNPNRDPQTIVDENCWSDLDFCKNTKNWYCYGKMVAEQSAWETAKAKGVDLVVLNPVLVLGPPLQSAVNASLVHILKYLTGSAKTYANLTQVYVDVRDVALGHVMVYESPSASGRYILAETALHRGEVVEILAKFFPEYPLPIKCSDEKNPRAKPYKFTTQKIKDLGLEFKPIKQSLYESVKSLQEKGHLPLPQDSNQNVIIES

SEQ ID NO: 120744 - DNA, 969 bp, Brassica napus
  CDS (1)..(969)
atgaacggtggaggaaaagtggtttgtgtcaccggagcttccggttacatagcgtcttggattgtgaagcttttgcttctccgtggctacaccgtcaaggctactgttcgagacccaaaggatcaaaagaaaacagatcatcttcttgcacttgacggtgcaagagaaagacttcaattattcaaagcaagtcttttagaagaaggttctttcgagcatgcaattgatgcatgtcacgctgtcttccacaccgcttcaccagtcaaaatcattgccactgatccacaggctgagctgatagaaccagccgtcaagggaactattaacgtactagcaacatgcactaaagtgtcttctgtcaagaggatcattttaacgtcgtccatggccacacttcattctcctaacttccccttggaaccaaacgtcttactagacgaaacaaccttctctgatccaagtgtctgtgaggaggaaaagcaatggtatatactctccaagactttggccgaaaatgcggcatggacgtttgccaagcacaacaacttggacttggtcataatgaatccaggactcgttattggaccagtcctacaaccaactattaatttctcagtagatgtggttatagattttataaaaggtaagaacacttttaataggaagcatcatagacttgtggacgtgagggatgttgctctagctcatatcaaggcgctcgagactccttcagccaaaggcagatacatcattgatgctccgattgtcacaacggaggagattgagaaaatcttacgtgaattctttcctgatttgtgtattgctcatgagaatgaagagattgatttgaattcgatgacttacaaagtaaatgtagaaaaggtgaaaagtttggggattgagtttactcctacagaaacaagccttagagacactgttcttagtctcaaggagaaacatcttgtgtga

SEQ ID NO: 120745 - protein, 322 aa, Brassica napus
MNGGGKVVCVTGASGYIASWIVKLLLLRGYTVKATVRDPKDQKKTDHLLALDGARERLQLFKASLLEEGSFEHAIDACHAVFHTASPVKIIATDPQAELIEPAVKGTINVLATCTKVSSVKRIILTSSMATLHSPNFPLEPNVLLDETTFSDPSVCEEEKQWYILSKTLAENAAWTFAKHNNLDLVIMNPGLVIGPVLQPTINFSVDVVIDFIKGKNTFNRKHHRLVDVRDVALAHIKALETPSAKGRYIIDAPIVTTEEIEKILREFFPDLCIAHENEEIDLNSMTYKVNVEKVKSLGIEFTPTETSLRDTVLSLKEKHLV

SEQ ID NO: 120746 - DNA, 969 bp, Brassica napus
  CDS (1)..(969)
atgaacggtggaggaaaagtggtttgtgtcaccggagcttccggttacatagcgtcttggattgtgaagcttttgcttctccgtggctacaccgtcaaggctactgttcgagacccaaaggatcaaaagaaaacagatcatcttcttgcacttgacggtgcaagagaaagacttcaattattcaaagcaagtcttttagaagaaggttctttcgagcatgcaattgatggatgtgacgctgtcttccacaccgcttcaccagtcaaaatcattgccactgatccacaggctgagctgatagaaccagccgtcaagggaactattaacgtactagcaacatgcactaaagtgtcttctgtcaagagggtcattttaacgtcgtccatggccacacttcattctcctaacttccccttgggaccaaacgtcttactagacgaaacaaccttctctgatccaagtgtctgtgaggaggaaaagcaatggtatatactctccaagactttggccgaaaatgcggcatggacgtttgccaaggacaacaacttggacttggtcgtaatgaatccaggactctttattggaccagtcctacaactaactattaatttctcagtagatgtggttatagattttataaaaggtaagaacacttttaataggaagcatcatagacttgtggacgtgagggatgttgctctagctcatatcaaggcgctcgagactccttcagccaaaggcagatacatcattgatgctccgattgtcacaacggaggagattgagaaaatcttacgtgaattctttcctgatttgtgtattgctcatgagaatgaagagattgatttgaattcgatgacttacaaagtaaatgtagaaaaggtgaaaagtttggggattgagtttactcctacagaaacaagccttagagacactgttcttagtctcaaggagaaacatcttgtgtga

SEQ ID NO: 120747 - protein, 322 aa, Brassica napus
MNGGGKVVCVTGASGYIASWIVKLLLLRGYTVKATVRDPKDQKKTDHLLALDGARERLQLFKASLLEEGSFEHAIDGCDAVFHTASPVKIIATDPQAELIEPAVKGTINVLATCTKVSSVKRVILTSSMATLHSPNFPLGPNVLLDETTFSDPSVCEEEKQWYILSKTLAENAAWTFAKDNNLDLVVMNPGLFIGPVLQLTINFSVDVVIDFIKGKNTFNRKHHRLVDVRDVALAHIKALETPSAKGRYIIDAPIVTTEEIEKILREFFPDLCIAHENEEIDLNSMTYKVNVEKVKSLGIEFTPTETSLRDTVLSLKEKHLV

SEQ ID NO: 120748 - DNA, 1041 bp, Zea mays
  CDS (1)..(1041)
atgccaacagcagaggcgacgacgcccgtgccgccggagctgtcctccgggcaagggcggacggtttgcgtgaccggagctggagggttcattgcctcctggctcgtcaagcgcctcctggagaagggctacacagtccgcggcacggtcaggaaccctgtggatccaaagaacgaccacctgagggcccttgacggcgccgacgaccgcctcgtcctcctccgcgccgacctgctggacccacagagccttgccgaggccttctccggctgtgacggcgtcttccacgccgcctccccggtcaccgatgaccctgagatgatgatcgagccagcgatccggggcacgcgctacgcgatggcggcggcggaagacgccggagtgaagcgcgtcgtgttcacgtcctccatcggcaccgtgtacatgaacccctaccgtgaccccagcaagcctgtggacgacacctgctggagcgacctcgagtattgcaagaacacccagaactggtactgctacgccaagacggtggcggagcagggcgcgtgggaggtggcgcggaagcgagggctggacctggtggtggtgaacccggtgctggtgctgggcccgctgctgcagccgacggtgaacgccagcacggaccacgtgatgaagtacctgacggggtcggccacgacctacgtgaacgcggcgcaggcgtacgtgcacgtcagggacgtggccgaggcgcacgtccgggtgtacgaggcgccccacgcgcacggccgctacatctgcgccgagagcaccctgcaccgcggcgacctctgccgcgtcctcgccaagctcttcccggagtaccccgtacccaccaagtgcaaggaccaggttaaccctccggtggtaggatacaagttcaccaaccagaggctcaaggatctggggatggacttcgtgccggtcctgcagtgcctatacgagacggtcaccagcctccaggagaaaggcatgctgcccgtgcttccgacaaaacaagaccatgaccaactcggcaaatcatga

SEQ ID NO: 120749 - protein, 346 aa, Zea mays
MPTAEATTPVPPELSSGQGRTVCVTGAGGFIASWLVKRLLEKGYTVRGTVRNPVDPKNDHLRALDGADDRLVLLRADLLDPQSLAEAFSGCDGVFHAASPVTDDPEMMIEPAIRGTRYAMAAAEDAGVKRVVFTSSIGTVYMNPYRDPSKPVDDTCWSDLEYCKNTQNWYCYAKTVAEQGAWEVARKRGLDLVVVNPVLVLGPLLQPTVNASTDHVMKYLTGSATTYVNAAQAYVHVRDVAEAHVRVYEAPHAHGRYICAESTLHRGDLCRVLAKLFPEYPVPTKCKDQVNPPVVGYKFTNQRLKDLGMDFVPVLQCLYETVTSLQEKGMLPVLPTKQDHDQLGKS

SEQ ID NO: 120750 - DNA, 1002 bp, Glycine max
  CDS (1)..(1002)
atgccaactgacacatcatcagtttccggcggcaaaatcgtgtgtgtgaccggtgccggcggtttcatagcctcttggcttgtcaaacatctcttagagaaaggctacactgtgagaggaaccgtgagaaacccagatgatccgaagaatggtcatttgaaagagttggaaggaggcaaggagaggctaactctgcataaagttgatctcttcgatattgactccattaaagaagctcttaacggttgccacggtgtcttccacaccgcttctccagtcaccgacaaccctgaagagatggtagagccagcagtgaaaggaacgaagaatgtgatcacagcagcagcagaagcaaaagtgcgacgggtggtgttcacttcgtcaattggcacagtctacatggaccccaatacgagtagggatgcgttggtcgatgaatcattctggagtgatttggagtactgcaagaacaccaagaattggtattgctacggaaagacggtggcagaacaaacagcatgggatgtagcaaaagagagaggggtggacttggttgtggtgaacccagttttggtaattggaccattactgcaaccaaccattaatgctagtacaattcacatcctaaagtaccttactggctctgccaaaacttatgtaaatgcaactcaggcttacgtacatgtgagggatgtggcattagcccacatacttgtttatgagaaaccttcagcttctggtcgatacatatgtgccgaaagctcgctgcatcgtggtgagctagttgaaattttggccaagtttttccccgagtacccaattcctaccaaatgttcagatgaaaagaacccgagagtaaaaccctacatattttcaaatcaaaagctgaaagatttgggattggaattcaccccagtgaagcagtgtctatatgacaccgttaaaaatctgcaagagaatggccaccttcctgtccccccaaagcaaaaagattcctattga

SEQ ID NO: 120751 - protein, 333 aa, Glycine max
MPTDTSSVSGGKIVCVTGAGGFIASWLVKHLLEKGYTVRGTVRNPDDPKNGHLKELEGGKERLTLHKVDLFDIDSIKEALNGCHGVFHTASPVTDNPEEMVEPAVKGTKNVITAAAEAKVRRVVFTSSIGTVYMDPNTSRDALVDESFWSDLEYCKNTKNWYCYGKTVAEQTAWDVAKERGVDLVVVNPVLVIGPLLQPTINASTIHILKYLTGSAKTYVNATQAYVHVRDVALAHILVYEKPSASGRYICAESSLHRGELVEILAKFFPEYPIPTKCSDEKNPRVKPYIFSNQKLKDLGLEFTPVKQCLYDTVKNLQENGHLPVPPKQKDSY

SEQ ID NO: 120752 - DNA, 1017 bp, Glycine max
  CDS (1)..(1017)
atgccttcttcagaatcatcaacaggcttctccgaaaccatttgtgtgaccggcgctggtggcttcatcgcctcttggatggtcaaactcctcttggagaaaggctacactgtccgaggaaccctcagaaacccagatgatcccaagaacgggcacttaaaagagtttgaaggagcttcccagagactaactctgcataaggttgacctccttcatcttgactccgttagatctgttattaacggctgtcatggtgtctttcacactgcttctcccgtcaccgataaccccgaagaaatggtggagcctgcggtgaatggagctaagaatgtgatcatagcagctgcagaggctaaagttagacgcgtggtgttcacctcatccattggtgccgtttacatggaccccaaaaggagcatcgatttggtggttgacgagtcctgttggagtgatttagaattttgcaagaacaccaagaattggtattgctatgggaaggctgtggctgaagaagcggcatgggacacagcaaaagagaaaggggtggacatggttgtagtgaacccagttttggtacttggaccattactgcaacccagcataaatgctagtacaattcacatcctcaagtacctcactggctctgctaagacctatgcaaatgccacacaggcgtatgttcatgttagggacgtggcattggcccacatacttgtttatgagaagccttctgcctctggtagatacatatgtgccgaaagctctctccaccgtggagaattagttgaaattctcgccaagtatttccccgactacccagttcccaccaagtgttcagatgaaaagaatccgagagcaaaaccctacactttttcaaatcaaaaactgaaagatttgggattggaattcaccccagtgagtcagtgtttatatgaagccgtcaagaacctgcaggagaaagggcaccttcctgttcctgcaaggcagcaggaagattcaactactgtgaaaccttaa

SEQ ID NO: 120753 - protein, 338 aa, Glycine max
MPSSESSTGFSETICVTGAGGFIASWMVKLLLEKGYTVRGTLRNPDDPKNGHLKEFEGASQRLTLHKVDLLHLDSVRSVINGCHGVFHTASPVTDNPEEMVEPAVNGAKNVIIAAAEAKVRRVVFTSSIGAVYMDPKRSIDLVVDESCWSDLEFCKNTKNWYCYGKAVAEEAAWDTAKEKGVDMVVVNPVLVLGPLLQPSINASTIHILKYLTGSAKTYANATQAYVHVRDVALAHILVYEKPSASGRYICAESSLHRGELVEILAKYFPDYPVPTKCSDEKNPRAKPYTFSNQKLKDLGLEFTPVSQCLYEAVKNLQEKGHLPVPARQQEDSTTVKP

SEQ ID NO: 120754 - DNA, 978 bp, Glycine max
  CDS (1)..(978)
atgagcagcagtgcagggaagttggtgtgtgtcaccggtgctgccggttatattgcttcatggattgtcaagttcctacttgaacgtggttacactgtcagggccactgttcgaaacccaaatgatcacacgaaggtagaacatttgctaaaacttgaaggtgcaaaggagagactgcacctttttaaggcagatcttttgggtgaaaattcttttgactccattgttgagggctgtgatggcgtctttcatactgcttctccttttattatcaacgtcaaagacccacaggctgacctacttgacccagcagtgaagggaactcttaacgttcttaaatcatgtgtaaaatcgccatctgtgaaacgagtcatcttaacatcttctgtggctgcagttgcatataataaaaggcctaaaagtcctgaagttgtagttgatgaaacctggtggtctgatccagattactgtagggaattaaagctgtggtatttactttcaaagactttggctgaagatgctgcctggaaatttgccaaagaaaacgaccttgacttggttgttgttaacccagcaatggttgtagggcctcttttgcaagcagagcttaacactagtgctgctattattttaaacctaataaatggttcagaaactttttcaaatgatacatatggatggatcaatgtgaaagatgttgcaaacgcccatattcaggcatatgagattgcttcagctagtggaagatattgtttagttgagagagtggcacactactctgaactcgccaggattttacgtgatcagtacccgacatatcaaattccagaaaagtctgcagacgataagccttatgtaccaacatttcaggtttccaaagaaaaggcaaagaccttggggattgaatttattcctttggaagtgagtcttagagagacagtggaaactttgaaagaaaagaactttgccaacttttag

SEQ ID NO: 120755 - protein, 325 aa, Glycine max
MSSSAGKLVCVTGAAGYIASWIVKFLLERGYTVRATVRNPNDHTKVEHLLKLEGAKERLHLFKADLLGENSFDSIVEGCDGVFHTASPFIINVKDPQADLLDPAVKGTLNVLKSCVKSPSVKRVILTSSVAAVAYNKRPKSPEVVVDETWWSDPDYCRELKLWYLLSKTLAEDAAWKFAKENDLDLVVVNPAMVVGPLLQAELNTSAAIILNLINGSETFSNDTYGWINVKDVANAHIQAYEIASASGRYCLVERVAHYSELARILRDQYPTYQIPEKSADDKPYVPTFQVSKEKAKTLGIEFIPLEVSLRETVETLKEKNFANF

SEQ ID NO: 120756 - DNA, 966 bp, Glycine max
  CDS (1)..(966)
atggcagcaaagaaggtgtgtgtaacaggtgctggaggattcgtagcgtcttggcttgttaagcttcttctttccaaaggctacattgtccatggaactgtgagagaccctgaacctgctactcagaaatatgaacacttgctcaaactccacggagcttctgaaaacctcactctcttcaaggcagatctcttgaactacgaatctcttcgctcagcaatttctggatgcactgcagttttccatcttgcttgccctgtaccctcaatcagtgttcccaaccctcaggttgaaatgattgagcctgctgtgaaaggaacaactaatgtacttgaagctagccttgaagctaaagtgcaacgacttgtctttgtatcatctttagctgctatttccaatagccccaatttgcctaaagataaagtgattgatgagtcctattggtctgataaagattactgcaaaacaactcagaactggtactgtttttccaagacagaggcggaggagcaggccttggactttgccaaaagaactggccttgatgtggtaagcatttgcccttcccttgttctcgggccaattttacagtcaaccactgttaatgcaagtagcctggctctcctcaaacttttaaaaggtgtcaactcaatggagaataagatccgttggatagtcgatgtacgagatgtagctgatgcaatacttttggcttatgagaagcttgaggcagaagggagatacatatgccattcacataccatcaagacacgggatatgctggagaaactaaagagtatatatcccaactacaaataccctgcgaagtatactgaggtggatgattacataagtttcagctcagagaaactgcaaaggttgggttggaaatacaggtcactggaggaaacactcgttgattctgttgagagctatcgggaagctggccatctgcaatcagaataa

SEQ ID NO: 120757 - protein, 321 aa, Glycine max
MAAKKVCVTGAGGFVASWLVKLLLSKGYIVHGTVRDPEPATQKYEHLLKLHGASENLTLFKADLLNYESLRSAISGCTAVFHLACPVPSISVPNPQVEMIEPAVKGTTNVLEASLEAKVQRLVFVSSLAAISNSPNLPKDKVIDESYWSDKDYCKTTQNWYCFSKTEAEEQALDFAKRTGLDVVSICPSLVLGPILQSTTVNASSLALLKLLKGVNSMENKIRWIVDVRDVADAILLAYEKLEAEGRYICHSHTIKTRDMLEKLKSIYPNYKYPAKYTEVDDYISFSSEKLQRLGWKYRSLEETLVDSVESYREAGHLQSE

SEQ ID NO: 120758 - DNA, 978 bp, Glycine max
  CDS (1)..(978)
atgagcagcggcgctggaaaggtggtgtgtgtcaccggcgcttccggttacattgcttcctggatagtcaaattcctcctcaatcgcggctacaccgttaaggccaccgttcgcgacacaagtgatccgaaaaaaataaaccacttggttggcctcgacggtgctaaggagaggctgcacctctacaaggcgaatcttctcgaagaaggttcctttaactctgtcgttcaaggttgccatgctgtgtttcacactgcttctcccttttatcacaatgtcaaggacccccaggctgaattgttagacccagctttgaaggggactctcaatgttctgaaatcgtgtgtaaacttgccgacgctggaacgcgttgttttaacctcttctgttgctgcagttgcgtacaacggaaagcctcgaactcccgatgtagtagttgatgagacttggttttctgacccgggtttctgtagggaatcacagatgtggtatacactttcaaagactttggccgaagatgctgcctggaaattcgtaaaagagaacaacattgacatggttactattaacccagcaatggtgataggacctctcttgcaaccagtccttaacacaagtgctgcttcaattttaaacgtaattaatggtgcacaaacatttccaaatgcatcttttggttgggtcaatgtgaaagatgttgcaaatgcccatattctagcatatgagaatgcttcagctaatggaaggtattgtttggtggagagagtggcacactactcagaaattgtgaagattttacgtgatttgtacccgacattacaacttccagagaagtgtgcagatgataacccatatgtgccaatatatcaggtatccaaagaaaaggcaaagagcttggggattgaatatactcctttggaagtgagcctcaaggagactgtggatagcttgaaagaaaagaagtttaccaacttttaa

SEQ ID NO: 120759 - protein, 325 aa, Glycine max
MSSGAGKVVCVTGASGYIASWIVKFLLNRGYTVKATVRDTSDPKKINHLVGLDGAKERLHLYKANLLEEGSFNSVVQGCHAVFHTASPFYHNVKDPQAELLDPALKGTLNVLKSCVNLPTLERVVLTSSVAAVAYNGKPRTPDVVVDETWFSDPGFCRESQMWYTLSKTLAEDAAWKFVKENNIDMVTINPAMVIGPLLQPVLNTSAASILNVINGAQTFPNASFGWVNVKDVANAHILAYENASANGRYCLVERVAHYSEIVKILRDLYPTLQLPEKCADDNPYVPIYQVSKEKAKSLGIEYTPLEVSLKETVDSLKEKKFTNF

SEQ ID NO: 120760 - DNA, 1104 bp, Glycine max
  CDS (1)..(1104)
atgatgtgggaaccgtaccgagcagctctgatctcactcaccaacctctttctttgttccgttctactttcccttcccaacaacaacaagaagatgccttctgcagaagcttcctccgaaaccatttgtgtcaccggcgctggtggcttcatcgcctcttggatggtcaaactcctcttggaaaaaggctacactgtccgaggaaccctcagaaatccagatgatcccaagaacgggcacttgaaggagtttgaaggagcctccgagaggttaactctgcataaggttgacctccttcatcttgactccgttagatcagttattaacggttgccatggtgtctttcacactgcttctcccgtcaccgataaccccgaagaaatggtggagccagcggtgagtggagctaagaatgtgatcatagctgctgcagaggctaaagttagacgtgtggtgttcacctcatccattggtgccgtctatatggaccccagtaggagcatcgatttggtggttgacgagtcctgttggagtgatttggaatattgcaagaacaccaagaattggtattgctatgggaaggctgtggctgaacaagcagcatgggacacagcaaaagagaatggggtggacttggttgtagtgaacccagttttggttcttggaccattactgcagcccacaatcaatgctagtacaattcacatcctcaagtacctcactggctctgctaagacctatgcaaatgccacacaggcttatgtgcatgttagggatgtggcattggcccacatacttgtttatgagaagccttctgcctctggtagatacctatgtgccgaaagctccctccaccgtggagaattagttgaaattctcgccaagtatttcccggagtacccagttcccaccaagtgttcagatgaaaagaatccgagagcaaaaccctacactttttcaaatcaaaagctgaaagatttgggattggaattcactccagtgagtcagtgtctatatgaaacagtgaagagcctgcaggagaaaggccaccttccagttcctgcaaagcagcaggaagaagattcaactaccgtgaaatcctaa

SEQ ID NO: 120761 - protein, 367 aa, Glycine max
MMWEPYRAALISLTNLFLCSVLLSLPNNNKKMPSAEASSETICVTGAGGFIASWMVKLLLEKGYTVRGTLRNPDDPKNGHLKEFEGASERLTLHKVDLLHLDSVRSVINGCHGVFHTASPVTDNPEEMVEPAVSGAKNVIIAAAEAKVRRVVFTSSIGAVYMDPSRSIDLVVDESCWSDLEYCKNTKNWYCYGKAVAEQAAWDTAKENGVDLVVVNPVLVLGPLLQPTINASTIHILKYLTGSAKTYANATQAYVHVRDVALAHILVYEKPSASGRYLCAESSLHRGELVEILAKYFPEYPVPTKCSDEKNPRAKPYTFSNQKLKDLGLEFTPVSQCLYETVKSLQEKGHLPVPAKQQEEDSTTVKS

SEQ ID NO: 120762 - DNA, 966 bp, Glycine max
  CDS (1)..(966)
atgtcgaaggtggtttgtgtcaccggagccagtggcgccattggatcatgggtggccctcctcctcctccagcgtggttatacggtccatgccaccgtccaagacatcaaggatgaaaatgagacgaaacatttggaggaaatggaaggagcaaagagtcgtctccatttttttgaaatggatcttcttgacatcgactccattgccgctgccataaagggttgctccggcgtaatccacctcgcatgtcctaacatcatcggtcatgtcgaagatcctgagaagcagatactggagccggcgataaaaggaacagttaatgtgttgaaggcggcgaaggaagcgggggtggagcgcgtggtggcgacttcgtcgatctcatccattatgccaagccctaactggccagctgataagattaaggcagaagagtgttggacagaccttgaatactgcaaacagaaggggttgtactatcccattgcaaagactctagcagagaaagcgggttgggaatttgcaaaggagacaggttttgatgttgtcatgataaaccctggtacagctttgggccctctgcttccaccaagaatcaattcaagcatggaaatgcttgttagtgttctcaaagggggcaaagagacgtacgaggacttctttatgggaatggctcacttcaaagacatagcattggcacatattttggcacttgagaacaagaaagcagcaggaaggcacttgtgtgtggaatctattcgtcactttagtgatcttgtggacaaggtttctgagttataccctgaatacgatgtggtcaagttgccaaaggatacccagccagggttgttgagggcaagtacaaaggatgcatcaacaaagctgattgatttaggtctagagttcactcctgtagaccaaatcatcaaggatgcagtggagagtctgaagagcaagggctatgtctga

SEQ ID NO: 120763 - protein, 321 aa, Glycine max
MSKVVCVTGASGAIGSWVALLLLQRGYTVHATVQDIKDENETKHLEEMEGAKSRLHFFEMDLLDIDSIAAAIKGCSGVIHLACPNIIGHVEDPEKQILEPAIKGTVNVLKAAKEAGVERVVATSSISSIMPSPNWPADKIKAEECWTDLEYCKQKGLYYPIAKTLAEKAGWEFAKETGFDVVMINPGTALGPLLPPRINSSMEMLVSVLKGGKETYEDFFMGMAHFKDIALAHILALENKKAAGRHLCVESIRHFSDLVDKVSELYPEYDVVKLPKDTQPGLLRASTKDASTKLIDLGLEFTPVDQIIKDAVESLKSKGYV

SEQ ID NO: 120764 - DNA, 966 bp, Glycine max
  CDS (1)..(966)
atgtcgaaggtggtttgtgtcaccggagccagtggcgccattggatcatgggtggccctcctcctcctccagcgtggttatacggtccatgccaccgtccaagacatcaaggatgaaaatgagacgaaacatttggaggaaatggaaggagcaaagagtcgtctccatttttttgaaatggatcttcttgacatcgactccattgccgctgccataaagggttgctccggcgtaatccacctcgcatgtcctaacatcatcggtcatgtcgaagatcctgagaagcagatactggagccggcgataaaaggaacaattaatgtgttgaaggcggcgaaggaagcgggggtggagcgcgtggtggcgacttcgtcgatctcatccattatgccaagccctaactggccagctgataagattaaggcagaagagtgttggacagaccttgaatactgcaaacagaaggggttgtactatcccattgcaaagactctagcagagaaagcgggttgggaatttgcaaaggagacaggttttgatgttgtcatgataaaccctggtacagctttgggccctctgcttccaccaagaatcaattcaagcatggaaatgcttgttagtgttctcaaagggggcaaagagacgtacgaggacttctttatgggaacggctcacttcaaagacatagcattggcacatattttggcacttgagaacaagaaagcagcaggaaggcacttgtgtgtggaatctattcgtcactttagtgatcttgtggacaaggtttctgagttataccctgaatacgatgtggtcaagttgccaaaggatacccagccagggttgttgagggcaagtacaaaggatgcatcaacaaagctgattgatttaggtctagagttcactcctgtagaccaaatcatcaaggatgcagtggagagtctgaagagcaagggctatgtctga

SEQ ID NO: 120765 - protein, 321 aa, Glycine max
MSKVVCVTGASGAIGSWVALLLLQRGYTVHATVQDIKDENETKHLEEMEGAKSRLHFFEMDLLDIDSIAAAIKGCSGVIHLACPNIIGHVEDPEKQILEPAIKGTINVLKAAKEAGVERVVATSSISSIMPSPNWPADKIKAEECWTDLEYCKQKGLYYPIAKTLAEKAGWEFAKETGFDVVMINPGTALGPLLPPRINSSMEMLVSVLKGGKETYEDFFMGTAHFKDIALAHILALENKKAAGRHLCVESIRHFSDLVDKVSELYPEYDVVKLPKDTQPGLLRASTKDASTKLIDLGLEFTPVDQIIKDAVESLKSKGYV

SEQ ID NO: 120766 - DNA, 966 bp, Glycine max
  CDS (1)..(966)
atgtcgaaggtggtttgtgtcaccggagccagtggcgccattggatcatgggtggccctcctcctcctccagcgtggttatacggtccatgccaccgtccaagacatcaaggatgaaaatgagacgaaacatttggaggaaatggaaggagcaaagagtcgtctccatttttttgaaatggatcttcttgacatcgactccattgccgctgccataaagggttgctccggcgtaatccacctcgcatgtcctaacatcatcggtcatgtcgaagatcctgagaaacagatattggaaccggcgataaaaggaacggttaatgtgttgaaggcggcgaaggaagcaggggtggagcgcgtggtggcgacttcatcgatttcgtcgattatgccaagtcctaattggccagctgataagattaagggagaagagtgttggacggaccttgaatactgcaagcaaaaggggttgtattatcccattgcaaagactctagcagagaaagcgggttgggactttgcgaaggagacaggttttgatgttgtcatgataaaccctggtacagcattgggccctctgcttcctccaagaatcaattcaagcatggctgtgcttgttagtgttctcaaagggggcaaagagacctacgaggacttctttatgggaacggctcacttcaaagacatagcattggcacatattttggcacttgagaacaagaaagcagcaggaaggcacttgtgtgtggaatctattcgtcactttagtgatcttgtggacaaggttgctgagttataccctgaatacgatgtggctaagttgccaaaggatacccaaccagggttgttgagagcaagtggaaaggatgcatcaaagaagctgattgatttaggtctagaattcactcctgttgagcaaatcatcaaggatgcagtggagagtttgaagagcaggggctatgtctaa

SEQ ID NO: 120767 - protein, 321 aa, Glycine max
MSKVVCVTGASGAIGSWVALLLLQRGYTVHATVQDIKDENETKHLEEMEGAKSRLHFFEMDLLDIDSIAAAIKGCSGVIHLACPNIIGHVEDPEKQILEPAIKGTVNVLKAAKEAGVERVVATSSISSIMPSPNWPADKIKGEECWTDLEYCKQKGLYYPIAKTLAEKAGWDFAKETGFDVVMINPGTALGPLLPPRINSSMAVLVSVLKGGKETYEDFFMGTAHFKDIALAHILALENKKAAGRHLCVESIRHFSDLVDKVAELYPEYDVAKLPKDTQPGLLRASGKDASKKLIDLGLEFTPVEQIIKDAVESLKSRGYV

SEQ ID NO: 120768 - DNA, 963 bp, Glycine max
  CDS (1)..(963)
atggagaaggtggtatgtgtgaccggcggcagcggctgcattggttcatggctcgtccatctcctcttggatcgcggctacaccgttcacgccaccgtccaaaacctcaacgatgaagccgagacgaagcatcttcaatcccccgacggagcgtccacgcgcctccgcctcttccagatggatctcctccgccacgacaccgtcctcgccgccgtgcgtggctgcgccggcgtcttccacctcgcctctccctgcattgtcgaccaagtccacgacccccagaaggagcttctggacccggcgattaagggaaccatgaacgtgctcacggcggcgaaggaagcaggggtgcggcgcgtggtgctcacgtcctccatctccgcggttacgccgagccccaattggcccggcgatgttgccaagacggaggagtgctggaccgacgttgaatattgcaagcaaaaggggttgtggtatccattgtcgaagactttagctgagaaagctgcttgggattttgctaaagagaatgatttggatgttgtggtggtgaatcctggcactgtgacgggtcgacgatttccaccaaggcttaatgcgagcatggtcatgctcgtgcgccttctacaaggctgtgccgaaacatatgaggacttttttatgggatcggtccactttaaggatgtagcattggcacatattttggtgtatgagaacaaatcagcggctggtaggcatttgtgtgttgaagctatctctcactatggtgactttgtggcaaaagttgctgaactctatccagagtataatgtgcctaagatgcaacgagatacccagccgggattattgagaacaaaggatggagcaaagaaactgatggatttgggtttgcaattcattccaatggagaagattattaaggatgctgtagaggatttgaagagcaaagggttcctttcttaa

SEQ ID NO: 120769 - protein, 320 aa, Glycine max
MEKVVCVTGGSGCIGSWLVHLLLDRGYTVHATVQNLNDEAETKHLQSPDGASTRLRLFQMDLLRHDTVLAAVRGCAGVFHLASPCIVDQVHDPQKELLDPAIKGTMNVLTAAKEAGVRRVVLTSSISAVTPSPNWPGDVAKTEECWTDVEYCKQKGLWYPLSKTLAEKAAWDFAKENDLDVVVVNPGTVTGRRFPPRLNASMVMLVRLLQGCAETYEDFFMGSVHFKDVALAHILVYENKSAAGRHLCVEAISHYGDFVAKVAELYPEYNVPKMQRDTQPGLLRTKDGAKKLMDLGLQFIPMEKIIKDAVEDLKSKGFLS

SEQ ID NO: 120770 - DNA, 1026 bp, Glycine max
  CDS (1)..(1026)
atgagggaagggtgcagcaaagtatgcgtcacaggagctagtggttacatagcttcctctctggtgaagaagctactggccaagggctacacagttcatgcaactctcagagacttgaagaatgagtcaaaggttggcctcttaaagagccttccacaatcagaaggaaaactggtgctgtttgaagctgatatttacaacccaaatgattttgaccttgcaattgaaggctgcaagtttgtgtttcatgttgctactcccatgatccatgaacctggctcccagtacaaggatactagtgaagcggcagttgctggaacaaaaagcattttcctgtcttgtgtgagagcagggacggtgaagcgtctcatctacaccgcgtctgttgtttctgcttctccattgaaagaagatgggagcggtttcaaagatgcaatggatgaaaattgctggacccctctcaatgattccttggcatatatataccgtgatgatccttttcttaagggctatacttattcaaagacactgtcggagagacatgtgctgagctacgggaacgaagaaaatggtggaggaatggaggtggtaacactcacttgtggactagtgggaggtgacacccttctatcttctacacccgctagcggagtagtttgtatcgctcagatcatgcagaatgaaagggcgtacatatcactcaagttcctaaagaaattgctggggaaaattcctcttgtacacattgatgatgtctgtgaagctcatattttctgcatggaaagcacctcgatcagtggaagattcttgtgtgcaagttcatatatttcattagaagagatggctaatcatttcgctcttcattatccagaattcaatgtgaaacaagaatatgaagatgagctgaagaaggatatcaagtgggcctcaacaaagctgtgtgacaaaggatttgtatacaaatatgacgccaagatgatattagatgattgtatcaaatgtgcaagaaggatgggtgatctctag

SEQ ID NO: 120771 - protein, 341 aa, Glycine max
MREGCSKVCVTGASGYIASSLVKKLLAKGYTVHATLRDLKNESKVGLLKSLPQSEGKLVLFEADIYNPNDFDLAIEGCKFVFHVATPMIHEPGSQYKDTSEAAVAGTKSIFLSCVRAGTVKRLIYTASVVSASPLKEDGSGFKDAMDENCWTPLNDSLAYIYRDDPFLKGYTYSKTLSERHVLSYGNEENGGGMEVVTLTCGLVGGDTLLSSTPASGVVCIAQIMQNERAYISLKFLKKLLGKIPLVHIDDVCEAHIFCMESTSISGRFLCASSYISLEEMANHFALHYPEFNVKQEYEDELKKDIKWASTKLCDKGFVYKYDAKMILDDCIKCARRMGDL

SEQ ID NO: 120772 - DNA, 1020 bp, Glycine max
  CDS (1)..(1020)
atgggttctaagtccgaaaccgtttgcgttactggggcttctggttacatcggatcatggcttgtcatgagactcatcgagcgtggctataccgttcgagccaccgtactcgacccagctgatatgagggaggtgaagcatttgctggatctgccaggtgcagagagcaagctgtctctgtggaaggcagaacttacagaagagggaagctttgatgaagccattaaagggtgcacaggtgttttccacttggccacccccgttgactttaagtccaaagacccagagaatgaaatgataaagcctacaattcaaggagtactaaacatcatgaaagcatgcctgaaggcaaaaactgtccgaaggctagtattcacgtcctcagccggaactaccaacattactgagcaccaaaagcctatcattgacgaaacctgctggactgatgttgagttctgccggagattaaatatgactggttggatgtatttcgtttctaaaacacttgcggagaaagaagcttggaaatttgcgaaagagcacggcatggacttcatcgctatccttccagctcttgtcattggtccctttctactgccaacaataccttctagcgtgatcagtgctctttcacctattaacggaattgaggcacattattcaatcataaagcaagctcaattcgtccacatagaagatatctgtcttgctcacatatttctgtttgaacagccaaaagcagaagggaggtatatatgcagtgcatgtgacgttactatccatgacattgtaaaattaattaacgaaaaatacccagagtacaaggttcccaccaagtttcagaacattccagatcaattggagcccgtgagattttcttccaagaaaatcacagacttgggattccaatttaaatacagcttagaggatatgtacactggagcaattgatacatgcatagagaaagggcttcttcctaaacctgcagaaattccagcgaatggcatcgagcataaataa

SEQ ID NO: 120773 - protein, 339 aa, Glycine max
MGSKSETVCVTGASGYIGSWLVMRLIERGYTVRATVLDPADMREVKHLLDLPGAESKLSLWKAELTEEGSFDEAIKGCTGVFHLATPVDFKSKDPENEMIKPTIQGVLNIMKACLKAKTVRRLVFTSSAGTTNITEHQKPIIDETCWTDVEFCRRLNMTGWMYFVSKTLAEKEAWKFAKEHGMDFIAILPALVIGPFLLPTIPSSVISALSPINGIEAHYSIIKQAQFVHIEDICLAHIFLFEQPKAEGRYICSACDVTIHDIVKLINEKYPEYKVPTKFQNIPDQLEPVRFSSKKITDLGFQFKYSLEDMYTGAIDTCIEKGLLPKPAEIPANGIEHK

SEQ ID NO: 120774 - DNA, 966 bp, Glycine max
  CDS (1)..(966)
atgtcgaaggtggtttgtgtcaccggagccagtggcgccattggatcatgggtggccctcctcctcctccagcgtggttatacggtccatgccaccgtccaagacatcaaggatgaaaatgagacgaaacatttggaggaaatggaaggagcaaagagtcgtctccatttttttgaaatggatcttcttgacatcgactccattgccgctgccataaagggttgctccggcgtaatccacctcgcatgtcctaacatcatcggtcatgtcgaagatcctgagaagcagatactggagccggcgataaaaggaacaattaatgtgttgaaggcggcgaaggaagcgggggtggagcgcgtggtggcgacttcgtcgatctcatccattatgccaagccctaactggccagctgataagattaaggcagaagagtgttggacagaccttgaatactgcaaacagaaggggttgtactatcccattgcaaagactctagcagagaaagcgggttgggaatttgcaaaggagacaggttttgatgttgtcatgataaaccctggtacagctttgggccctctgcttccaccaagaatcaattcaagcatggaaatgcttgttagtgttctcaaagggggcaaagagacgtacgaggacttctttatgggaatggctcacttcaaagacatagcattggcacatattttggcacttgagaacaagaaagcagcaggaaggcacttgtgtgtggaatctattcgtcactttagtgatcttgtggacaaggtttctgagttataccctgaatacgatgtggtcaagttgccaaaggatacccagccagggttgttgagggcaagtacaaaggatgcatcaacaaagctgattgatttaggtctagagttcactcctgtagaccaaatcatcaaggatgcagtggagagtctgaagagcaagggctatgtctga

SEQ ID NO: 120775 - protein, 321 aa, Glycine max
MSKVVCVTGASGAIGSWVALLLLQRGYTVHATVQDIKDENETKHLEEMEGAKSRLHFFEMDLLDIDSIAAAIKGCSGVIHLACPNIIGHVEDPEKQILEPAIKGTINVLKAAKEAGVERVVATSSISSIMPSPNWPADKIKAEECWTDLEYCKQKGLYYPIAKTLAEKAGWEFAKETGFDVVMINPGTALGPLLPPRINSSMEMLVSVLKGGKETYEDFFMGMAHFKDIALAHILALENKKAAGRHLCVESIRHFSDLVDKVSELYPEYDVVKLPKDTQPGLLRASTKDASTKLIDLGLEFTPVDQIIKDAVESLKSKGYV

SEQ ID NO: 120776 - DNA, 966 bp, Glycine max
  CDS (1)..(966)
atgtcgaaggtggtttgtgtcaccggagccagcggcgccatcggatcatgggtggtcctactcctcctccagcgtggttacaccgtccatgccaccgtccaagatatcaaggatgaaaatgagacgaaacatttggaggaaatggaaggagcaaagagtcatctccatttttttgaaatggatcttcttgacatcgactccattgccgctgccataaagggttgttccggcgtaatccaccttgcatgtcctaacatcattggtcaagtcgaagatcccgagaaacagatattggaaccggcgataaaaggaacggttaatgtgttgaaggcggcgaaggaagcaggggtggagcgcgtggtggcgacttcatcgatttcgtcgattatgccaagtcctaattggccagctgataagattaagggagaagagtgttggacggaccttgaatactgcaagcaaaaggggttgtattatcccattgcaaagactctagcagagaaagcgggttgggactttgcgaaggagacaggttttgatgttgtcatgataaaccctggtacagcattgggccctctgcttcctccaagaatcaattcaagcatggctgtgcttgttagtgttctcaaagggggcaaagagacctacgaggacttctttatgggaacggctcacttcaaagacatagcattggcacatattttggcacttgagaacaagaaagcagcaggaaggcacttgtgtgtggaatctattcgtcactttagtgatcttgtggacaaggttgctgagttataccctgaatacgatgtggctaagttgccaaaggatacccaaccagggttgttgagagcaagtggaaaggatgcatcaaagaagctgattgatttaggtctagaattcactcctgttgagcaaatcatcaaggatgcagtggagagtttgaagagcaggggctatgtctaa

SEQ ID NO: 120777 - protein, 321 aa, Glycine max
MSKVVCVTGASGAIGSWVVLLLLQRGYTVHATVQDIKDENETKHLEEMEGAKSHLHFFEMDLLDIDSIAAAIKGCSGVIHLACPNIIGQVEDPEKQILEPAIKGTVNVLKAAKEAGVERVVATSSISSIMPSPNWPADKIKGEECWTDLEYCKQKGLYYPIAKTLAEKAGWDFAKETGFDVVMINPGTALGPLLPPRINSSMAVLVSVLKGGKETYEDFFMGTAHFKDIALAHILALENKKAAGRHLCVESIRHFSDLVDKVAELYPEYDVAKLPKDTQPGLLRASGKDASKKLIDLGLEFTPVEQIIKDAVESLKSRGYV

SEQ ID NO: 120778 - DNA, 1020 bp, Glycine max
  CDS (1)..(1020)
atgccttcttcagaatcatcaacaggcttctccgaaaccatttgtgtgaccggcgctggtggcttcatcgcctcttggatggtcaaactcctcttggagaaaggctacactgtccgaggaaccctcagaaacccagatgatcccaagaacgggcacttaaaagagtttgaaggagcttcccagagactaactctgcataaggttgacctccttcatcttgactccgttagatctgttattaacggctgtcatggtgtctttcacactgcttctcccgtcaccgataaccccgaagaaatggtggagccagcggtgagtggagctaagaatgtgatcatagctgctgcagaggctaaagttagacgtgtggtgttcacctcatccattggtgccgtctatatggaccccagtaggagcatcgatttggtggttgacgagtcctgttggagtgatttggaatattgcaagaacaccaagaattggtattgctatgggaaggctgtggctgaacaagcagcatgggacacagcaaaagagaatggggtggacttggttgtagtgaacccagttttggttcttggaccattactgcaacccacaatcaatgctagtacaattcacatcctcaagtacctcactggctctgctaagacctatgcaaatgccacacaggcttatgtgcatgttagggatgtggcattggcccacatacttgtttatgagaagccttctgcctctggtagatacctatgtgccgaaagctccctccaccgtggagaattagttgaaattctcgccaagtatttcccggagtacccagttcccaccaagtgttcagatgaaaagaatccgagagcaaaaccctacactttttcaaatcaaaagctgaaagatttgggattggaattcactccagtgagtcagtgtctatatgaaacagtgaagagcctgcaggagaaaggccaccttccagttcctgcaaagcagcaggaagaagattcaactaccgtgaaatcctaa

SEQ ID NO: 120779 - protein, 339 aa, Glycine max
MPSSESSTGFSETICVTGAGGFIASWMVKLLLEKGYTVRGTLRNPDDPKNGHLKEFEGASQRLTLHKVDLLHLDSVRSVINGCHGVFHTASPVTDNPEEMVEPAVSGAKNVIIAAAEAKVRRVVFTSSIGAVYMDPSRSIDLVVDESCWSDLEYCKNTKNWYCYGKAVAEQAAWDTAKENGVDLVVVNPVLVLGPLLQPTINASTIHILKYLTGSAKTYANATQAYVHVRDVALAHILVYEKPSASGRYLCAESSLHRGELVEILAKYFPEYPVPTKCSDEKNPRAKPYTFSNQKLKDLGLEFTPVSQCLYETVKSLQEKGHLPVPAKQQEEDSTTVKS

SEQ ID NO: 120780 - DNA, 984 bp, Glycine max
  CDS (1)..(984)
atggcagagggaaaaggtagagtttgtgtcactggaggcactgggttccttggttcatggatcatcaagagactccttgaagatggatatgctgttaacaccactattagatctgacccaggacgaaagagagatgttagcttcctcacaaacctaccaggcgcatccgaaaagctaaaaattttcaacgctgatctcagcgacccagaaagttttgatccagcagttgagggatgtgttggaattttccacacagccacgccaattgattttgcagtgaacgagcctgaggaagtggtaaccaaaagagccatcgatggagcactaggcataatgaaagcaggcctaaaagcaaagacagtgaagagggttgtttacacttctagtggctccaccgtttccttcagcagccttgaagaaaaagatgtggtggatgagagtgtttggagtgatgtggatatgcttaggagtgtaaagccttttggttggtcctatgcagtttcaaaggtgttgactgagaaggctgtgcttgaatttggagaacataatgggttggaagttgcaactgttattgctccttttattgttggtccttttgtttgtcccaagcttcctgactctattgaaaaagctctgcttatggtgttgggcaaaaaagaagaaattggtgtcattcgttaccatatggtacatgtggatgatgtggctagagcacatatcttcctgcttgagcatcctaatccaaaagggagatataattgctcaccattcattgtacccattgaagagatgggtgaacttctttcagccaaatacccggaatttcaactaccaacagtagacgagctgaagggaattaaaggtgccaagcaaccacatttaacctccaagaaacttgttgatgctggttttgagttcaagtatagcttagaggacatgtttcaggatgcaattgaatgctgcaaggaaaagggttatctttaa

SEQ ID NO: 120781 - protein, 327 aa, Glycine max
MAEGKGRVCVTGGTGFLGSWIIKRLLEDGYAVNTTIRSDPGRKRDVSFLTNLPGASEKLKIFNADLSDPESFDPAVEGCVGIFHTATPIDFAVNEPEEVVTKRAIDGALGIMKAGLKAKTVKRVVYTSSGSTVSFSSLEEKDVVDESVWSDVDMLRSVKPFGWSYAVSKVLTEKAVLEFGEHNGLEVATVIAPFIVGPFVCPKLPDSIEKALLMVLGKKEEIGVIRYHMVHVDDVARAHIFLLEHPNPKGRYNCSPFIVPIEEMGELLSAKYPEFQLPTVDELKGIKGAKQPHLTSKKLVDAGFEFKYSLEDMFQDAIECCKEKGYL

SEQ ID NO: 120782 - DNA, 978 bp, Glycine max
  CDS (1)..(978)
atgagcagcaactcaggaaaagtggtgtgtgtgactggtgcttctggtttcattgcttcatggatcatcaaactgcttctccaacgtggttacactgtcagggccactgttcgcgacccatctaaacccgaaaaggttgatcacttgctcaaacttgatggtgcaaaggagaggctacatctctttaaggcagatctgctggaagaaggttcctttgactctgcttttgagggttgtgatggtgtctttcatactgcttcacccgttcatttcattgttactgatccacagaatcagttaattgatccagcgattaaaggaacccttaacgttgttaaatcatgtgccaaatcgccatctgtgaaacaagttattttaacttcttctgttgctgccgttttatataatggaaggcctcgtacccccgaggttgtagttgacgagacttggttttcggatccagacttcttaagggaaaatgagaggtggtatgcatttgcaaagacttcggcagaggatgctgccaggaaatttttaagcgaatacgacattaagttggttgttattaacccatcaatgtccatagggcctctcttgcaaccagagctgaatgcaagttcttcttcaattttaaacctaatcaatggttcaccaacgttttcaaataatagttttgggtggatcaatgtgaaagatgttgcaaacgcgcatattcaagcatatgagattgattcagctagtggaagatattgtctggttgaaagagtgatacacttctccgaacttgcaaaaattttacgtgatatgtacccaactttacagattccagacaagtgtgaagacgatgagccttttatgccaacatttcaggtttccaaagaaaaggcaaagagcttgggagttgaatttattcccttggaagtgagcctcagggagacagttgaaagtttaaaagaaaagaagtttgtggacttctag

SEQ ID NO: 120783 - protein, 325 aa, Glycine max
MSSNSGKVVCVTGASGFIASWIIKLLLQRGYTVRATVRDPSKPEKVDHLLKLDGAKERLHLFKADLLEEGSFDSAFEGCDGVFHTASPVHFIVTDPQNQLIDPAIKGTLNVVKSCAKSPSVKQVILTSSVAAVLYNGRPRTPEVVVDETWFSDPDFLRENERWYAFAKTSAEDAARKFLSEYDIKLVVINPSMSIGPLLQPELNASSSSILNLINGSPTFSNNSFGWINVKDVANAHIQAYEIDSASGRYCLVERVIHFSELAKILRDMYPTLQIPDKCEDDEPFMPTFQVSKEKAKSLGVEFIPLEVSLRETVESLKEKKFVDF

SEQ ID NO: 120784 - DNA, 999 bp, Zea mays
  CDS (1)..(999)
atgtcgtccaactgcggcgaggatgagaaggagctggtgtgcgtgaccggcgccggcggcttcatcggctcgtgggtggtgaatgagctgctccagcggggttaccgcgtcaggggaacggcgagggaccctgcggacagcaagaacgcgcacctgctggctctggagggagccaaggagcgcctcaccctgtgccgcgccgacgtcctcgaccgcgcctccctgcgcgccgccttcgccggctgccacggcgtcttccacgtcgcctccccggtgtccaacgacccggagcttgtcccggtggcggtggagggcaccaggaacgtcatcaacgccgcggcggacgagggcgcgcgccgtgtcgtcttcacctcctcctatggcgccgtgcacatggaccccagccggagccccgacgccgtcctcgacgagacctgctggagcgactacgacttctgcaagcgaaccgacaacctgtactgctgcgccaagatgatggcggaggtgacggcggcggcggaggcgggcgcgcggggcctgcagctggccgtggtgctgccctgcatgaccacgggccccatgctgcagcagacgctcaacttcagcaccaaccacgtcgcgcgctacctcatgggcaccaagcgctccatccccaacgccgtcgccgcctacgtcgacgtccgcgacgtcgcgcgcgcgcacgtgctcgcctacgagcgccccggagccaggggccggtacctctgcatcggcaccgtgctgcaccgcgccgacctcgtcgacatgctcagggacctcttcccgcagtaccccgtcacggccaagtgcgaggaggacggcaagccaatggcgaagccgttcaagttctccaaccagaggctcagggacctggggctggagttcactccgctgaggaagagcctgtacgagaccgtgctgtgcctgcagcagaagggccacctgcctgtcatccaaccacagcagcgcgcgtacctatga

SEQ ID NO: 120785 - protein, 332 aa, Zea mays
MSSNCGEDEKELVCVTGAGGFIGSWVVNELLQRGYRVRGTARDPADSKNAHLLALEGAKERLTLCRADVLDRASLRAAFAGCHGVFHVASPVSNDPELVPVAVEGTRNVINAAADEGARRVVFTSSYGAVHMDPSRSPDAVLDETCWSDYDFCKRTDNLYCCAKMMAEVTAAAEAGARGLQLAVVLPCMTTGPMLQQTLNFSTNHVARYLMGTKRSIPNAVAAYVDVRDVARAHVLAYERPGARGRYLCIGTVLHRADLVDMLRDLFPQYPVTAKCEEDGKPMAKPFKFSNQRLRDLGLEFTPLRKSLYETVLCLQQKGHLPVIQPQQRAYL

SEQ ID NO: 120786 - DNA, 1074 bp, Zea mays
  CDS (1)..(1074)
atggagggaggtgccggtgcgagcgagaaagggacggtgctggtcacgggggcgtcgggcttcgtcggctcctggctcgtcatgaagctcctccaggccggctacaccgtccgggcgaccgtgcgcgatcccgcgaacgttgggaagacgaagccattgatggaccttcccggagcaacggagcgcctgtccatatggaaagccgacctggcggaggaaggcagcttccacgacgccatcaggggctgcaccggcgtcttccacgtcgccacgcccatggacttcctgtccaaagaccctgagaatgaggtaatcaagccgacggtggaagggatgataagcatcatgcgggcatgcaaggaggccggcaccgtgcggcgcatcgtcttcacttcctccgccgggacggtcaacctggaggagcggcagaggcccgtctacgacgaggaaagctggaccgacgtcgacttctgccgtcgcgtcaagatgaccggatggatgtacttcgtgtctaaaaccctggcggagaaggcggccctggcgtacgcggcggagcacggcctggacctggtcaccatcatcccgacgctcgtggtcggcccgttcatcagcgcgtccatgccgcccagcctcatcaccgcgctggcgctcatcacggggaacgcgccgcactactcgatcctcaagcaggtgcagctcatccacctcgacgacctctgcgacgccgagatcttcctcttcgagaacccggccgcggccgggcgctacgtctgctcctcgcacgacgtcaccatccacggcctcgccgccatgctcagggataggtaccccgagtacgacgtcccgcagaggttccccgggatccaggacgacctccagccggtgcgcttctcgtccaagaagctccaggacctcgggttcaccttcaggtacaagacgctggaggacatgttcgacgccgccatccggacttgccaggagaagggcctcatccccctcgccactgccgccggaggggacggctttgcctcggtgcgcgcacccggcgagacggaggcgacgattggcgcttaa

SEQ ID NO: 120787 - protein, 357 aa, Zea mays
MEGGAGASEKGTVLVTGASGFVGSWLVMKLLQAGYTVRATVRDPANVGKTKPLMDLPGATERLSIWKADLAEEGSFHDAIRGCTGVFHVATPMDFLSKDPENEVIKPTVEGMISIMRACKEAGTVRRIVFTSSAGTVNLEERQRPVYDEESWTDVDFCRRVKMTGWMYFVSKTLAEKAALAYAAEHGLDLVTIIPTLVVGPFISASMPPSLITALALITGNAPHYSILKQVQLIHLDDLCDAEIFLFENPAAAGRYVCSSHDVTIHGLAAMLRDRYPEYDVPQRFPGIQDDLQPVRFSSKKLQDLGFTFRYKTLEDMFDAAIRTCQEKGLIPLATAAGGDGFASVRAPGETEATIGA

SEQ ID NO: 120788 - DNA, 963 bp, Zea mays
  CDS (1)..(963)
atggagccggtgcggaagagcgtgtgcgtgaccggcgctggcggcttcgtcgcgtcggagctggtgaagctcctcctctcccggggccaatacgcggtccgcggcaccgtgcgcgaccctggtgctagcaagaatgcccatctcaaggtgctggaaggagctgaggaaaggttgcagcttctcaaggctgatctgatggactacaacagcattgcatcagcagttgccggctgtgagggtgtcttccatgtagccagtcctgtcctttcccatcgaccctccaaccctgaggtggaggtcatagctcccgctgtaataggtacaaccaatgtgttaaaggcttgctatgaggcaaaagttaggcgagttgtggtggtgtcttcatgtggagctgtgtatgctaatcctatttatccgaagggtaaggtgtttgatgaagactgctggtcagatgaggattactgcaggaagaaggaggattggtatttagtttccaaaacactgtcggaacgagaagctcttgcttttgcagcaaaaacagggctggacgttgtaactgtttgtccgtcattagtatttggacccttgatgcagcctacagtaaattcgagcagcaaaatcatccttaaatatttcacaggagatcgcgagactgttgaaaacatactcagaaatatggtggatgttcgtgatgttgctgacgctcttcttctggcttacgaaaagccagaagcgtctggacgatacatctgcagttcacatgcaataaaagttgctgatatgataaacatactgaagaccttgtatccatcttacccttatcccaaaaatttcgtggaagatgatgacaactctgtatacagctctgagaaactgcagaagctggggtggagcttcaagcctatagaggaatccctccgcgacactgttgaatcctacaaagcatttggcatcctgaattga

SEQ ID NO: 120789 - protein, 320 aa, Zea mays
MEPVRKSVCVTGAGGFVASELVKLLLSRGQYAVRGTVRDPGASKNAHLKVLEGAEERLQLLKADLMDYNSIASAVAGCEGVFHVASPVLSHRPSNPEVEVIAPAVIGTTNVLKACYEAKVRRVVVVSSCGAVYANPIYPKGKVFDEDCWSDEDYCRKKEDWYLVSKTLSEREALAFAAKTGLDVVTVCPSLVFGPLMQPTVNSSSKIILKYFTGDRETVENILRNMVDVRDVADALLLAYEKPEASGRYICSSHAIKVADMINILKTLYPSYPYPKNFVEDDDNSVYSSEKLQKLGWSFKPIEESLRDTVESYKAFGILN

SEQ ID NO: 120790 - DNA, 1038 bp, Zea mays
  CDS (1)..(1038)
atgtccaccggacgcacagaggaggccgccgggagcgcggagacggcgtgcgtgacgggcgccggcgggtacatcgcctcgtggctcgtcaagctcctcctctcccgtggctacaccgtccacggcaccgtccgcgacctcagtgacaataaaaccgctcatctgaagcggttagagaatgcttccgaaaacctcaagcttttcaaggctgatgtccttgactacgacgctatggcgggtgcagtcgcagggtgccagggagtctttcatgtcgccactcctgtgccttcagggaagatcaccgatccagagcgagagatgctgggtcctgctgttaccggcaccataaacgcactcaaggctgcgtctgctgcaaatgctcgtcgagtggtcgtcgtttcatccatggttgccgttgagatcaacccgaaagactggcccagagacaagatcaaagatgagaactgctggtcagataaagagttctgcaggaacgaagagaactggtattctgtcgccaagatctcgtcagaagaggccgcacttgaatacgcgaagcagaccgggctggatgttgtgacggtcaatccagctgtggtctttggccctcttctgcagccgacgctcaacacgagctgccagttcctcgtctacttcctgaaaggaggacctgatcgaatgagggacaagctttggcacatcgtcgacgtcagggacactgccgatgctctcctgcttgtgtacgagacaccacaagcctccggcaggcacatctgcgctcctcatttcatcagcgcgcgtgacctgctggagctgctgaagacgatgtaccctgatgattaccctttcattagcaaggagagcatctacgacatggagcacccagctccaatgacgtccgacaagctcaagaaactgggatggaaggtcaggccgctgaaggaaacaattgcggaaaccgttgagttctgccagcatgctgggtttctcgaggacgtggagggattccgttttcctcccctgtacaacataatctag

SEQ ID NO: 120791 - protein, 345 aa, Zea mays
MSTGRTEEAAGSAETACVTGAGGYIASWLVKLLLSRGYTVHGTVRDLSDNKTAHLKRLENASENLKLFKADVLDYDAMAGAVAGCQGVFHVATPVPSGKITDPEREMLGPAVTGTINALKAASAANARRVVVVSSMVAVEINPKDWPRDKIKDENCWSDKEFCRNEENWYSVAKISSEEAALEYAKQTGLDVVTVNPAVVFGPLLQPTLNTSCQFLVYFLKGGPDRMRDKLWHIVDVRDTADALLLVYETPQASGRHICAPHFISARDLLELLKTMYPDDYPFISKESIYDMEHPAPMTSDKLKKLGWKVRPLKETIAETVEFCQHAGFLEDVEGFRFPPLYNII

SEQ ID NO: 120792 - DNA, 996 bp, Zea mays
  CDS (1)..(996)
atggcgagcgtggagggcaagagggagacggtgctggtcaccggcgccagcggcttcatcggatcgaccctcgtcggcctcctcctcgaccgcggctacaacgtccacgccagcgtcctcaaccccgatgacaaggcggagacggagcacctggtcgccctgggcgccggcgccggcgaaggccggctgcgagtcttcccgggcgacctcctcgacggcgccgcgctcatggccgccgcgcggggctgctcgggcgtgttccacctcgccaccccctgcaccgtctaccccgtgagcgacccgcaggggcagatggtggtgccggcggtggagggcacgctcaacgtcctgcgcgccgccaaggaggcccgcaccgtgcggcgggtggtggtcacctcgtccagctccgccatcatacccagccccgcgtggcccgccggcgagccccgcgacgagcggtgctgggccgacgtcgactactgcaagaagaacgaggtctggtaccctgtttccaagacgctggcagagaaggcggcgtggaggtttgcggaggagaacggggtagacgtggttgtcgtcaacccggtgactgccatgggcccaatgattccgcccaccatcaactgcagcatgatcgtgctcctacgcctgctacaaggttgcacggaggagtacagggacatctggatgggggcggtgcatgtgcacgacgccgccatggcgcatatcctggtgttcgagagcccggcagcgtccgggaggcacatctgcgcccagtccatctcccactggagcgacttcgcggccaaggtcgccgagctgtaccctgagtacaaggtgcccaagttccccaaggatacccagcctgggctggtgcgacagggagccgaggaggggtccaagaagctcgtcgcgttggggctgcacttcagccctctggagaagatcatcagggacgctgtggaggccctcaagagcagaggctacatttcgtag

SEQ ID NO: 120793 - protein, 331 aa, Zea mays
MASVEGKRETVLVTGASGFIGSTLVGLLLDRGYNVHASVLNPDDKAETEHLVALGAGAGEGRLRVFPGDLLDGAALMAAARGCSGVFHLATPCTVYPVSDPQGQMVVPAVEGTLNVLRAAKEARTVRRVVVTSSSSAIIPSPAWPAGEPRDERCWADVDYCKKNEVWYPVSKTLAEKAAWRFAEENGVDVVVVNPVTAMGPMIPPTINCSMIVLLRLLQGCTEEYRDIWMGAVHVHDAAMAHILVFESPAASGRHICAQSISHWSDFAAKVAELYPEYKVPKFPKDTQPGLVRQGAEEGSKKLVALGLHFSPLEKIIRDAVEALKSRGYIS

SEQ ID NO: 120794 - DNA, 1020 bp, Zea mays
  CDS (1)..(1020)
atggccggaggaggtgcaacggtgtgcgtgaccggagccggcgggttcatcgcctcgtgggtagtgaagctcctgctctcccgcgggtacaccgtgcacggcaccgtccgccacctcagtgacgagaagacaggccacctgaagcgcctggagaatgctgccggaaaccttaggatcttcaaggctgacctgctggactacgacgccatggcagctgcggtcgtcgggtgccagggggttttccatgtggccactcctgtgccttcggaggacctgactgacccagagctacaaatgctgggtcctgctgttaccggcaccacgaatgtgctcaaagctgcctccagcgcgaacgtccagcgagtggtggtggtgtcgtccatggttgccgtcgagatcagccccaaagattggcctgaaggtaaggtccgagatgagaggtgctggtcagaccgagagttctgcaggagcattgagagctggtacccggtggctaagatcatctcagaggaggcggcgctggcgtacgggcagcaaaccgggctcgatgtggtgactatcaatccagggttggtgttcggccccatgctgcagccgacggtcaacacgaccatccagttcctcatctacttcctcaaaggaggccccgacccggtgaagaacaagctctggcacatcgtcgacgtccgtgatgtggccgacgccatgctgctgctctacgaggtgcctgaagcgaccggcagacacatctgcgcgcctcatgttatcagtgcccgcgacctgctggatctgctgaagagcatgtaccctgactacccttgcattgccaacgagagcatacttgacagagaccacccagcgccgatgacctctgacaagctgaagaagatcgggtggagctgccgaccgctggaggagacgatcgtggacaccgtcgagtgctgcctgcgggctggatttctggaccatgtgggtggggagacttcctgtcgcttccctcctcttttaaaccagatctag

SEQ ID NO: 120795 - protein, 339 aa, Zea mays
MAGGGATVCVTGAGGFIASWVVKLLLSRGYTVHGTVRHLSDEKTGHLKRLENAAGNLRIFKADLLDYDAMAAAVVGCQGVFHVATPVPSEDLTDPELQMLGPAVTGTTNVLKAASSANVQRVVVVSSMVAVEISPKDWPEGKVRDERCWSDREFCRSIESWYPVAKIISEEAALAYGQQTGLDVVTINPGLVFGPMLQPTVNTTIQFLIYFLKGGPDPVKNKLWHIVDVRDVADAMLLLYEVPEATGRHICAPHVISARDLLDLLKSMYPDYPCIANESILDRDHPAPMTSDKLKKIGWSCRPLEETIVDTVECCLRAGFLDHVGGETSCRFPPLLNQI

SEQ ID NO: 120796 - DNA, 1074 bp, Zea mays
  CDS (1)..(1074)
atggagggaggtgccggtgcgagcgagaaagggaaggtgctggtcacgggagcgtcgggcttcgtcggctcctggctcgtcatgaagctcctccaggccggctacaccgtccgggcgaccgtgcgcgatcccgcgaacgttgggaagacgaagccattgatggaccttcccggagcaacggagcgcctgtccatatggaaagccgacctggcggaggaaggcagcttccacgacgccatcaggggctgcaccggcgtcttccacgtcgccacgcccatggacttcctgtccaaagaccctgagaatgaggtaatcaagccgacggtggaagggatgataagcatcatgcgggcatgcaaggaggccggcaccgtgcggcgcatcgtcttcacttcctccgccgggacggtcaacctggaggagcggcagaggcccgtctacgacgaggaaagctggaccgacgtcgacttctgccgtcgcgtcaagatgaccggatggatgtacttcgtgtctaaaaccctggcggagaaggcggccctggcgtacgcggcggagcacggcctggacctggtcaccatcatcccgacgctcgtggtcggcccgttcatcagcgcgtccatgccgcccagcctcatcaccgcgctggcgctcatcacggggaacgcgccccactactcgatcctcaagcaggtgcagctcatccacctcgacgacctctgcgacgccgagatcttcctcttcgagaacccggccgcggccgggcgctacgtctgctcctcgcacgacgtcaccatccacggcctcgccgccatgctcagggataggtaccccgagtacgacgtcccgcagaggttccccgggatccaggacgacctccagccggtgcgcttctcgtccaagaagctccaggacctcgggttcaccttcaggtacaagacgctggaggacatgttcgacgccgccatccggacttgccaggagaagggcctcatccccctcgccactgccgccggaggggacggctttgcctcggtgcgcgcacccggcgagacggaggcgacgattggcgcttaa

SEQ ID NO: 120797 - protein, 357 aa, Zea mays
MEGGAGASEKGKVLVTGASGFVGSWLVMKLLQAGYTVRATVRDPANVGKTKPLMDLPGATERLSIWKADLAEEGSFHDAIRGCTGVFHVATPMDFLSKDPENEVIKPTVEGMISIMRACKEAGTVRRIVFTSSAGTVNLEERQRPVYDEESWTDVDFCRRVKMTGWMYFVSKTLAEKAALAYAAEHGLDLVTIIPTLVVGPFISASMPPSLITALALITGNAPHYSILKQVQLIHLDDLCDAEIFLFENPAAAGRYVCSSHDVTIHGLAAMLRDRYPEYDVPQRFPGIQDDLQPVRFSSKKLQDLGFTFRYKTLEDMFDAAIRTCQEKGLIPLATAAGGDGFASVRAPGETEATIGA

SEQ ID NO: 120798 - DNA, 999 bp, Zea mays
  CDS (1)..(999)
atggcctctgctgctgcgacggctacgatggggacggggaaggtggtttgcgtcaccggcgcatcagggtacatcgcgtcctggattgtcaggctcctactcgaccgcggctacaccgtccgcgccaccgtgcgagacaccgctgacccaaagaaaacattgcacctgactgcgttggatggtgctaaggataggctgcacttatttaaagctagcctgctagaagagggttctttcgatgctgcagttcatggatgcgacactgtatttcatactgcctctcccttttatcacaatgtcaaggatgctaaggcagagttacttgacccagcagttaagggaacactcaatgttctcggttcatgcaagaaagcttctattaaaaaggtggttgtaacatcatctatggctgctgtagcctacaacaggaggccaaggactcctgaggtcacagttgacgagacatggttttctgatccacaaatttgtgaaacaaatcagcaatggtatattttgtccaagacgctggcagaggaggctgcttggaagttctcaagggataatggacttgaaatcgttactataaacccagcgatggttattggtcccctgctgcagcctacactaaataccagtgctgaagcaatcctgaagttaatcaatgggtcatcgtctacatatcccaatttttgctttggatgggttaatgtcaaggatgttgccctggcccatatccttgcatacgaggttccctcatcaaatggaaggtactgcatggtggaaagagttgttcactactcagaactggtgaacattatccgcaacatgtatcctacccttcctcttccggacaagtgtgcagatgacaagccgtttgtcccaccctaccaagtatcaaaggagaagataaaaagcataggcatcgagttgattccactggagacgagcgtcaaggagaccatcgaaagcttgaaagagaaggggttcgctagtttttga

SEQ ID NO: 120799 - protein, 332 aa, Zea mays
MASAAATATMGTGKVVCVTGASGYIASWIVRLLLDRGYTVRATVRDTADPKKTLHLTALDGAKDRLHLFKASLLEEGSFDAAVHGCDTVFHTASPFYHNVKDAKAELLDPAVKGTLNVLGSCKKASIKKVVVTSSMAAVAYNRRPRTPEVTVDETWFSDPQICETNQQWYILSKTLAEEAAWKFSRDNGLEIVTINPAMVIGPLLQPTLNTSAEAILKLINGSSSTYPNFCFGWVNVKDVALAHILAYEVPSSNGRYCMVERVVHYSELVNIIRNMYPTLPLPDKCADDKPFVPPYQVSKEKIKSIGIELIPLETSVKETIESLKEKGFASF

SEQ ID NO: 120800 - DNA, 984 bp, Zea mays
  CDS (1)..(984)
atggccgaggcagctgctgagaagctggtctgcgtgaccggagctggaggcttcatcgggtcatggctggtcaaggagctgctccaacgcggctatgttgtgaggggcaccgcgagggaccctgaggaccccaagaatgcccatctgctggcactggatggagctcaagaacggctatctctgtaccatgctgacgtgctggactacatgtcgctttgtcgtgcgttcagcttatgtcatggtgtcttccatgttgcctccccggtgtcgaatgatccgaacctcgtgccggttgctgttgagggaacaaagaacgttctgaacgctgcagccgacatgggagtgcaacgtgtggtgttcacctcatcttacggagctatccacatgaaccctaacaggagccctgaccagactctagacgaaagttgttggagtgaccctgaattctgcaaacaaacacagaactggtattgctatgcaaagatggctgctgaaaacattgcaatggaagaggcattaaagagagggatacaactacttataattgtcccatcagtgacaataggtagaatgctacaaccaacattaaacataagttcagctaatgttgctgcctacatgatgggcacaaagaaggcatactcaaatgtaattggcggatatgtcgatgtgcaagacgttgcccttgcccatattttggtgtatgaagatttacgcacgcatgggcggtacctctgcataggtgacatgctgcatctatcaaagtatgttcaaatgatgagagagctcttcccacaatacccgatcaccaacaaatgcaaggatgaaaacaagccaatggtcaagccttacaagttctccacacaacgccttggtgctttgggtatgaagttcactactttgaaagagagtctatacaacacagtggtcagcctacaggagaatggtcatatcccaatattgctacataagtcatccctatga

SEQ ID NO: 120801 - protein, 327 aa, Zea mays
MAEAAAEKLVCVTGAGGFIGSWLVKELLQRGYVVRGTARDPEDPKNAHLLALDGAQERLSLYHADVLDYMSLCRAFSLCHGVFHVASPVSNDPNLVPVAVEGTKNVLNAAADMGVQRVVFTSSYGAIHMNPNRSPDQTLDESCWSDPEFCKQTQNWYCYAKMAAENIAMEEALKRGIQLLIIVPSVTIGRMLQPTLNISSANVAAYMMGTKKAYSNVIGGYVDVQDVALAHILVYEDLRTHGRYLCIGDMLHLSKYVQMMRELFPQYPITNKCKDENKPMVKPYKFSTQRLGALGMKFTTLKESLYNTVVSLQENGHIPILLHKSSL

SEQ ID NO: 120802 - DNA, 1116 bp, Zea mays
  CDS (1)..(1116)
atgaccgtcgtcgacgccgtcgtctcctccaccgatgccggcgcccctgctgccgccgccaccgcggtaccggcggggaacgggcagaccgtgtgcgtgaccggcgcggccgggtacatcgcctcgtggttggtgaagctgctgctcgagaagggatacactgtgaagggcaccgtcaggaacccagatgacccgaagaacgcgcacctcaaggcgctggacggcgccgccgagcggctgatcctctgcaaggccgatctgctggactacgacgccatctgccgcgccgtgcagggctgccagggcgtcttccacaccgcctcccccgtcaccgacgacccggagcaaatggtggagccggcggtgcgcggcaccgagtacgtgatcaacgcggcggcggaggccggcacggtgcggcgggtggtgttcacgtcgtccatcggcgccgtgaccatggaccccaagcgcgggcccgacgtcgtggtcgacgagtcgtgctggagcgacctcgagttctgcgagaaaaccaggaactggtactgctacggcaaggcggtggcggagcaggcggcgtgggagacggcccggcggcggggcgtggacctggtggtggtgaaccccgtgctggtggtgggccccctgctgcaggcgacggtgaacgccagcatcgcgcacatcctcaagtacctggacggctcggcccgcaccttcgccaacgccgtgcaggcgtacgtggacgtgcgcgacgtggccgacgcgcacctccgcgtcttcgagagcccccgcgcgtccggccgccacctctgcgccgagcgcgtcctccaccgcgaggacgtcgtccgcatcctcgccaagctcttccccgagtaccccgtcccagccaggtgctccgacgaggtgaatccgcggaagcagccgtacaagttctccaaccagaagctccgggacctggggctgcagttccggccggtcagccagtcgctttacgacacggtgaagaacctccaggagaagggacacctgccggtgctcggagagcggacgacgacggaggccgccgacaaggatgcccccgcggccgagatgcagcagggagggatcgccatccgtgcctga

SEQ ID NO: 120803 - protein, 371 aa, Zea mays
MTVVDAVVSSTDAGAPAAAATAVPAGNGQTVCVTGAAGYIASWLVKLLLEKGYTVKGTVRNPDDPKNAHLKALDGAAERLILCKADLLDYDAICRAVQGCQGVFHTASPVTDDPEQMVEPAVRGTEYVINAAAEAGTVRRVVFTSSIGAVTMDPKRGPDVVVDESCWSDLEFCEKTRNWYCYGKAVAEQAAWETARRRGVDLVVVNPVLVVGPLLQATVNASIAHILKYLDGSARTFANAVQAYVDVRDVADAHLRVFESPRASGRHLCAERVLHREDVVRILAKLFPEYPVPARCSDEVNPRKQPYKFSNQKLRDLGLQFRPVSQSLYDTVKNLQEKGHLPVLGERTTTEAADKDAPAAEMQQGGIAIRA

SEQ ID NO: 120804 - DNA, 999 bp, Zea mays
  CDS (1)..(999)
atgtcgtccaactgcggcgaggatgagaaggagctggtgtgcgtgaccggcgccggcggcttcatcggctcgtgggtggtgaatgagctgctccagcggggttaccgcgtcaggggaaccgcgagggaccctgcggacagcaagaacgcgcacctgctggctctggagggagccaaggagcgcctcaccctgtgccgcgccgacgtcctcgaccgcgcctccctgcgcgccgccttcgccggctgccacggcgtcttccacgtcgcctccccggtgtccaacgacccggagcttgtcccggtggcggtggagggcaccaggaacgtcatcaacgccgcggcggacgagggcgcgcgccgtgtcgtcttcacctcctcctatggcgccgtgcacatggaccccagccggagccccgacgccgtcctcgacgagacctgctggagcgactacgacttctgcaagcgaaccgacaacctgtactgctgcgccaagatgatggcggaggtgacggcggcggcggaggcggacgcgcggggcctgcagctggccgtggtgctgccctgcatgaccacgggccccatgctgcagcagacgctcaacttcagcaccaaccacgtcgcgcgctacctcatgggcaccaagcgctccatccccaacgccgtcgccgcctacgtcgacgtccgcgacgtcgcgcgcgcgcacgtgctcgcctacgagcgccccggagccaggggccggtacctctgcatcggcaccgtgctgcaccgcgccgacctcgtcgacatgctcagagacctctttccgcagtaccccgtcacggccaagtgcgaggaggacggcaagccaatggcgaagccgttcaagttctccaaccagaggctcagggacctggggctggagttcactccgctgaggaagagcctgtacgagaccgtgctgtgcctgcagcagaagggccacctgcctgtcatccaaccgcagcagcgcgcgtacctgtga

SEQ ID NO: 120805 - protein, 332 aa, Zea mays
MSSNCGEDEKELVCVTGAGGFIGSWVVNELLQRGYRVRGTARDPADSKNAHLLALEGAKERLTLCRADVLDRASLRAAFAGCHGVFHVASPVSNDPELVPVAVEGTRNVINAAADEGARRVVFTSSYGAVHMDPSRSPDAVLDETCWSDYDFCKRTDNLYCCAKMMAEVTAAAEADARGLQLAVVLPCMTTGPMLQQTLNFSTNHVARYLMGTKRSIPNAVAAYVDVRDVARAHVLAYERPGARGRYLCIGTVLHRADLVDMLRDLFPQYPVTAKCEEDGKPMAKPFKFSNQRLRDLGLEFTPLRKSLYETVLCLQQKGHLPVIQPQQRAYL

SEQ ID NO: 120806 - DNA, 26 bp, Artificial sequence
  primer
atgactactgaaaaaaccgttgtttt

SEQ ID NO: 120807 - DNA, 27 bp, Artificial sequence
  primer
ttagcttttactttgaacttctagtaa

SEQ ID NO: 120808 - protein, 403 aa, Artificial sequence
  consensus sequence
  Variant (2)..(2): Xaa in position 2 is any amino acid
  Variant (7)..(7): Xaa in position 7 is any amino acid
  Variant (9)..(9): Xaa in position 9 is any amino acid
  Variant (11)..(17): Xaa in position 11 to 17 is any amino acid
  Variant (20)..(24): Xaa in position 20 to 24 is any amino acid
  Variant (25)..(26): Xaa in position 25 to 26 is any or no amino acid
  Variant (28)..(29): Xaa in position 28 to 29 is any amino acid
  Variant (33)..(62): Xaa in position 33 to 62 is any amino acid
  Variant (63)..(84): Xaa in position 63 to 84 is any or no amino acid
  Variant (86)..(86): Xaa in position 86 is any amino acid
  Variant (88)..(88): Xaa in position 88 is any amino acid
  Variant (92)..(100): Xaa in position 92 to 100 is any amino acid
  Variant (101)..(112): Xaa in position 101 to 112 is any or no amino acid
  Variant (115)..(116): Xaa in position 115 to 116 is any amino acid
  Variant (118)..(128): Xaa in position 118 to 128 is any amino acid
  Variant (129)..(134): Xaa in position 129 to 134 is any or no amino acid
  Variant (136)..(136): Xaa in position 136 is any amino acid
  Variant (140)..(140): Xaa in position 140 is any amino acid
  Variant (144)..(153): Xaa in position 144 to 153 is any amino acid
  Variant (154)..(171): Xaa in position 154 to 171 is any or no amino acid
  Variant (173)..(186): Xaa in position 173 to 186 is any amino acid
  Variant (187)..(206): Xaa in position 187 to 206 is any or no amino acid
  Variant (208)..(210): Xaa in position 208 to 210 is any amino acid
  Variant (212)..(213): Xaa in position 212 to 213 is any amino acid
  Variant (216)..(217): Xaa in position 216 to 217 is any amino acid
  Variant (219)..(233): Xaa in position 219 to 233 is any amino acid
  Variant (234)..(242): Xaa in position 234 to 242 is any or no amino acid
  Variant (244)..(247): Xaa in position 244 to 247 is any amino acid
  Variant (250)..(279): Xaa in position 250 to 279 is any amino acid
  Variant (280)..(306): Xaa in position 280 to 306 is any or no amino acid
  Variant (308)..(308): Xaa in position 308 is any amino acid
  Variant (312)..(312): Xaa in position 312 is any amino acid
  Variant (315)..(371): Xaa in position 315 to 371 is any amino acid
  Variant (372)..(402): Xaa in position 372 to 402 is any or no amino acid
VXVTGAXGXIXXXXXXXLLXXXXXXXVXXTVRXXXXXXXXXXXXXXXXXXXXXXXXXXXXXXXXXXXXXXXXXXXXXXXXXXXXVXHXASPXXXXXXXXXXXXXXXXXXXXXPAXXGXXXXXXXXXXXXXXXXXVXRVVXTSSXXXXXXXXXXXXXXXXXXXXXXXXXXXXEXXXXXXXXXXXXXXXXXXXXXXXXXXXXXXXXXXYXXXKXXAEXXAXXXXXXXXXXXXXXXXXXXXXXXXPXXXXGPXXXXXXXXXXXXXXXXXXXXXXXXXXXXXXXXXXXXXXXXXXXXXXXXXXXXXXXXXVXDVAXAHXXXXXXXXXXXXXXXXXXXXXXXXXXXXXXXXXXXXXXXXXXXXXXXXXXXXXXXXXXXXXXXXXXXXXXXXXXXXXXXXXXXXXXXXG

SEQ ID NO: 120809 - protein, 27 aa, Artificial sequence
  protein pattern
  Variant (2)..(2): Xaa in position 2 is any or no amino acid
  Variant (4)..(4): Xaa in position 4 is Ala, Gly or Ser
  Variant (5)..(5): Xaa in position 5 is Ala, Gly, Asn, Ser or Thr
  Variant (7)..(7): Xaa in position 7 is any amino acid
  Variant (8)..(8): Xaa in position 8 is Ile, Leu or Val
  Variant (9)..(9): Xaa in position 9 is Ala or Gly
  Variant (10)..(15): Xaa in position 10 to 15 is any amino acid
  Variant (18)..(22): Xaa in position 18 to 22 is any amino acid
  Variant (23)..(23): Xaa in position 23 is any or no amino acid
  Variant (25)..(25): Xaa in position 25 is any amino acid
  Variant (26)..(26): Xaa in position 26 is Ala, Gly or Thr
  Variant (27)..(27): Xaa in position 27 is Ala, Ser or Thr
VXGXXGXXXXXXXXXLLXXXXXXVXXX

SEQ ID NO: 120810 - DNA, 1422 bp, Arabidopsis thaliana; identical to SEQ ID NO: 93099
  CDS (1)..(1422)

SEQ ID NO: 120811 - protein, 473 aa, Arabidopsis thaliana; identical to SEQ ID NO: 93100

SEQ ID NO: 120812 - DNA, 1680 bp, Arabidopsis thaliana
  CDS (58)..(1476)
ggaattcggctcgatctcccgtgaagctctcgaatctctggttttgagttttggagaatggtgtttttccgcagcgtatcggcctttactaggctgaggtctcgcgtccagggccaacaatcttcactcagcaattctgtcagatggattcagatgcagagctctaccgacctggacctgaagtcgcagctgcaagagttaattccggaacacaaggaccgtctgaagaaactgaagtcagaacatgggaaggtccaactgggaaacatcactgttgatatggttattggtggaatgagagggatgactggattgctttgggaaacctcattgcttgacccggaagaggtattcgctttaggggattgtcgacttcctgagtgccagaaagccctattacctactgcccagtctggaggcttgaaccattaccggaggtcttttgtggcttctcttaactggaaaggtaccttagcaaagagcaagttgaagcactgtcgaaagacttggaaccgtgctgctgtgtcagattatgtgtacaatgccatcgatgctctgccttccacagctcatccaatgactcaatttgctagcggtgttatggccctccaggtgcaaagtgagtttcaaaaggcatatgagaatggaattcataagtcaaagttctgggagccaacatatgaggattgcctcaacctgattgctcgtgttcctgttgtagctgcatatgtttatcgaaggatgtataagaatggtgattccattccctcagataaatctttggattatggtgcaaatttttcccacatgttgggatttgatgatgaaaggttgaaagagctcatgaggcttacatcaccatccacagtgatgcatgaaggtggaaatgttagtgctcacactggtcacctggttggtagtgcactttcagacccatatctgtcatttgcagctgcattaaatggtttagctgggccactccatggtttggctaatcaggaagttttgctttggatcaaatcagtcgtagaggaatgtggagaagatatatcaaaagaacagttgaaagaatatgtttggaaaacattaaacagtggcaaggttattccgggatatggtcacggtgttctgcgcaatactgatccaagatatgtatgccaaagagaatttgccttgaagcatcatcctgacgaccctcttttccagtgttgcaagcttatgaagttggcctcctgtctcactgagcttgaaagtgaagaaccctggccaaatgttgatgctcacagtggggtcttgctgaaccactatggtctaaccgaagcaaggtactacaccgtgctctttggtgtttcaaggagtcttggcatctgctctcagcttatatgggaccgagagctcttgcttgcacttgagaggccaaagagtgttaccatggactggcttgaagcccattgtaagaaagcttcatctgcttaactcaccaccgagtcctgagttgtgccactctctgtgtttcaacaaaagtcattctcttccacactggatagttttttttgtttttaccttctattgacagaagaaagcatttgttcatgtagaaattgttcctgagaaacacatgcttggtgcaaatttgcatttccgggaaactcgtgataataataaataaacagttgtatt

SEQ ID NO: 120813 - protein, 472 aa, Arabidopsis thaliana
MVFFRSVSAFTRLRSRVQGQQSSLSNSVRWIQMQSSTDLDLKSQLQELIPEHKDRLKKLKSEHGKVQLGNITVDMVIGGMRGMTGLLWETSLLDPEEVFALGDCRLPECQKALLPTAQSGGLNHYRRSFVASLNWKGTLAKSKLKHCRKTWNRAAVSDYVYNAIDALPSTAHPMTQFASGVMALQVQSEFQKAYENGIHKSKFWEPTYEDCLNLIARVPVVAAYVYRRMYKNGDSIPSDKSLDYGANFSHMLGFDDERLKELMRLTSPSTVMHEGGNVSAHTGHLVGSALSDPYLSFAAALNGLAGPLHGLANQEVLLWIKSVVEECGEDISKEQLKEYVWKTLNSGKVIPGYGHGVLRNTDPRYVCQREFALKHHPDDPLFQCCKLMKLASCLTELESEEPWPNVDAHSGVLLNHYGLTEARYYTVLFGVSRSLGICSQLIWDRELLLALERPKSVTMDWLEAHCKKASSA

SEQ ID NO: 120814 - DNA, 2066 bp, Trifolium repens
  CDS (208)..(1626)
gaattcgattaagcagtggtaacaacgcagagtacgcggggagcacaacattacgttaattacattttctctttcgccattgttctttctcttctcaatataaagaccaattcaattcccaattcttttggatccgaaatcattcattctacgcttcttctctcttctctgcgtttcaaaccctagttgttttgttgattgatcttaatggcgttctttcgaagcgtttctgcgctttcaaaactacgatctcgtgtgggtcaacaacctagtcttgctaattcagttagatggctccaaactccaagctccagtaacactgatctttattctgagatgaaggagctagttccagagtatcaggaacgtgttaagaagttgaagaaagaccatggaagtgttgaattgggaaaaatcacagctgatatggtacttggtggaatgagaggaatgactgctttagtgtggctaggctcagctgttgacccagatgagggaattcgctttaggggcatgacaattcctgactgccagaaaacacttccaggtgcttttcctggtggggagcctttgcccgaggctatactgtggcttctattgaccggaaaggtaccaagtaaagagcaagtagattcattagctcacgaattgcgaagtcgtgcaaaaatcccagagtatgcttacaaggcaattgatgcactgcctgtttctgctcatccaatgacacaatttagtactggtgtaatggccctccaggtggagagtgagtttacaaaggcatacgagggtgggatacataagtcaaggtattgggagccaacttatgaggatagcttgaatttaattgctcgtttgcctggaattgctgcctatatttatcgacggatatacaaggatggaaaaatcataccattggatgattctttggattatggtgcaaactatgctcacatgttaggatttgatgatccagaaacgctggagtttatgaggctgtatatttctatccatagtgatcatgaaggtggcaacgttagttctcacacagctcacctagttgctagttcactatcagatccttatcttgcattcgcagctgctctgaatggtttagctggcccactgcatggtttagccaatcaggaagttctacgatggatcagaaacatagttaaggagtttggaactccaaacataagtacagaacaattgagcgactacattcataaaacattgaacagtggccaggttgtgcctggatatggacatggagttttgcgcaatacagacccaagatacacttgccagagggagtttgcattgaagcatttgcctaatgatccacttttccagctggtgtccaaaattaaagaagtcgtgcctcccattctgaccaagttaggaaaggttaaaaatccatggcctaatgttgatgctcatagtggagtactactaaactactatggtctaactgaagaaaactattataccgttctttttggtgtcgcgaggagtattggagttggccctcagctgatatgggaccgtgctcttggaatgccacttgaaaggccaaaaagtgtcacactggagaaacttgagaaactggtcggcgcatcgtcctaaaattgaaagcgcggttatctgtggattactaaaatacactctgcggttgtaggttgttggtaactctaaacatttggtgcaattgcaatgagaaatattttgcccaaatcccccttcccttatttttctggttgttttgtcagcattttttgattgaggagattttggtatttaggaaaagggtgggattatcaccctcacagttgtctttccatttttctacacagcataaattaggtcccaagggagcatcagaataaaggcattatgttttgggggtaatccctctgtattctttctaaataggattgacccctttgacaaaaaatacaaattatcaatatcactcgtctacttgaagattcgactaaaaaaaaaaaaaaaaaaaaaaaaaaaaaagtactctgcgttgttaccactgcttaatcactagtgaattc

SEQ ID NO: 120815 - protein, 472 aa, Trifolium repens
MAFFRSVSALSKLRSRVGQQPSLANSVRWLQTPSSSNTDLYSEMKELVPEYQERVKKLKKDHGSVELGKITADMVLGGMRGMTALVWLGSAVDPDEGIRFRGMTIPDCQKTLPGAFPGGEPLPEAILWLLLTGKVPSKEQVDSLAHELRSRAKIPEYAYKAIDALPVSAHPMTQFSTGVMALQVESEFTKAYEGGIHKSRYWEPTYEDSLNLIARLPGIAAYIYRRIYKDGKIIPLDDSLDYGANYAHMLGFDDPETLEFMRLYISIHSDHEGGNVSSHTAHLVASSLSDPYLAFAAALNGLAGPLHGLANQEVLRWIRNIVKEFGTPNISTEQLSDYIHKTLNSGQVVPGYGHGVLRNTDPRYTCQREFALKHLPNDPLFQLVSKIKEVVPPILTKLGKVKNPWPNVDAHSGVLLNYYGLTEENYYTVLFGVARSIGVGPQLIWDRALGMPLERPKSVTLEKLEKLVGASS

SEQ ID NO: 120816 - DNA, 1419 bp, Oryza sativa (japonica cultivar-group); identical to SEQ ID NO: 93095
  CDS (1)..(1419)

SEQ ID NO: 120817 - protein, 472 aa, Oryza sativa (japonica cultivar-group); identical to SEQ ID NO: 93096

SEQ ID NO: 120818 - DNA, 1419 bp, Oryza sativa (japonica cultivar-group); identical to SEQ ID NO: 93097
  CDS (1)..(1419)

SEQ ID NO: 120819 - protein, 472 aa, Oryza sativa (japonica cultivar-group); identical to SEQ ID NO: 93098

SEQ ID NO: 120820 - DNA, 1395 bp, Arabidopsis thaliana
  CDS (1)..(1395)
atggtgttttttcgcagcgtatcagccatttcaagactacggtctcgagcagtgcaacaatcctcacttagtaactccgtcagatggctccactcttctgaattggacttgaagtcgcagatgcaagagatcattccagaacaacaggaccgtttgaagaaactgaaatcagaacaaggaaaggttccagtggggaacatcaccgttgatatggtacttggtggaatgagagggatgactggattactctgggaaacctcattgcttgatgcagatgagggaatacggtttagaggcatgtcgattcctgaatgtcagaaaatattaccttcagctgagtctggagaagagcccttgcctgagagtcttctgtggcttctattaactggaaaggtgccaactaaagagcaagctaatgctttgtcaacagagttggctcatcgtgcggctgtgccagctatagatgctttgccttcaacagctcatccaatgactcaatttgctagtggtgttatggcccttcaggttcaaagtgagtttcaaaaggcgtatgagcagggtgatatttctaagtcaaagtactgggaaccaaccttcgaagatgccctaaacttgattgctcgtgttcctgttgtagcttcatacgtttatcggaggatgtacaaggatggtagcatcattccattagatgattctttggattatggtgcaaatttttcacacatgctgggatttgatagtcctcagatgaaagagctcatgaggctttatgtcactatccacagtgatcatgaaggtggaaatgttagtgctcacgctggtcacctggttgggagtgcactttcagatccatatctttcatttgctgctgcattgaatggtttagctgggccactccatggtttggctaatcaggaagttttgctgtggatcaaattagttgttgaggaatgtggagaaagtatatcaaaggaacagctaaaagattatgtctggaaaacgttaaacagtggcaaggttgttccaggatatggccatggtgttttgcgtaaaacggatccaagatatatatgccaaagagagtttgccttgaagcatctacctgatgatcctctttttcagctggtctcaaaactttatgaagtggtgcctcctattctaaccgagctgggaaaggtcaagaacccgtggcctaacgttgatgctcatagcggagtgcttctgaactactatggtctaaccgaagcaagatactacacggtgctttttggcgtctcaagaagtcttggaatctgctcgcagctgatatgggacagggcacttggactgccacttgagagaccaaagagtgtaaacatggactggctcgataacttcacgcgcttgaaccgctaa

SEQ ID NO: 120821 - protein, 464 aa, Arabidopsis thaliana
MVFFRSVSAISRLRSRAVQQSSLSNSVRWLHSSELDLKSQMQEIIPEQQDRLKKLKSEQGKVPVGNITVDMVLGGMRGMTGLLWETSLLDADEGIRFRGMSIPECQKILPSAESGEEPLPESLLWLLLTGKVPTKEQANALSTELAHRAAVPAIDALPSTAHPMTQFASGVMALQVQSEFQKAYEQGDISKSKYWEPTFEDALNLIARVPVVASYVYRRMYKDGSIIPLDDSLDYGANFSHMLGFDSPQMKELMRLYVTIHSDHEGGNVSAHAGHLVGSALSDPYLSFAAALNGLAGPLHGLANQEVLLWIKLVVEECGESISKEQLKDYVWKTLNSGKVVPGYGHGVLRKTDPRYICQREFALKHLPDDPLFQLVSKLYEVVPPILTELGKVKNPWPNVDAHSGVLLNYYGLTEARYYTVLFGVSRSLGICSQLIWDRALGLPLERPKSVNMDWLDNFTRLNR

SEQ ID NO: 120822 - DNA, 1437 bp, Drosophila melanogaster; identical to SEQ ID NO: 93101
  CDS (1)..(1437)

SEQ ID NO: 120823 - protein, 478 aa, Drosophila melanogaster; identical to SEQ ID NO: 93102

SEQ ID NO: 120824 - DNA, 1569 bp, Drosophila melanogaster; identical to SEQ ID NO: 93103
  CDS (1)..(1569)

SEQ ID NO: 120825 - protein, 522 aa, Drosophila melanogaster; identical to SEQ ID NO: 93104

SEQ ID NO: 120826 - DNA, 1326 bp, Geobacter sulfurreducens PCA; identical to SEQ ID NO: 93105
  CDS (1)..(1326): transl_table=11

SEQ ID NO: 120827 - protein, 441 aa, Geobacter sulfurreducens PCA; identical to SEQ ID NO: 93106

SEQ ID NO: 120828 - DNA, 1440 bp, Nasonia vitripennis
  CDS (1)..(1440)
atgaaaaaaggaaaaactgttcttacgacgtcgagtgcaggagccacggatctgaaggaggcgctctgcgagaagataccccttcaccacgatcttctgcggaagtttcgccagcagcacggactggacgtagtcagccagataaccgtcaatgacatctatcgcggcctcgacggtgtcactgccctcatcagggagacctccgagatcgactcgcaatgcggtataaaatacagagggctctcgatcccggagctctaccagctgttaccccggcgaggtaaatctccgagtccggaggccgtgttctggctgctgttaaccggcgacgttcccacacacgagcagaccgaagccctgacagcggactggacggaacgtcgggagcgtcgcaaggactggtggtggtcaggttcgtcaggcgagatcggcggcgtcgtcggtggcgtcctcagagctttacccaagaacgtcgcgcccgtcggtcgactcgccatcgccctgactgccctcgacgccgacaagcactaccgtaaggccgtagagagcggcgccatgagctacacctattgggaacacatttacgaggacagtatggaactgctggcctcgctgccggcgatagtcgccctcgtgagcgcttgtgagtcaagaccgacgccgttggctctcgagaaggccgactgggtcgacttcttcatcgactgtctgcacaacaccaccgacggcttcaccgaggctcagaggcagagtctcgctgattttttgaggctctacatcgccgtcaatgcagacgacgacggtggaataccaggggcgcacgtggcgcaaattatgggatcctgccaattcgacgccagtcgagccttagccgcgggtgtgcttgcctatgccaatgaacccaccagcggcactctatttcaatacatggatttcctggtacagttgcaaaacgccgttggccgagaaccaaagaacgatattctgcgaaatttcgtcagcaccctcatcgataagcgattccaaatcgctggacataaaattgctcagttcgaagacactcgatacacagtattgcgggactttgtgaagaaccacgtacccaacgatccggagatcaagttatcccaagaactgtccaacatctataagaagcagatcaaagaggccagaaatcgctcggtcgtcgctgagcagaacgcgatcgcggcacctctgttccaattttacggactgcgcgacatgaactacaatcagctgctgttgtgtatggctcgggctctcggtatcgtggcctcaatgatctggacgacggccctgaatgctccggtcgagagaccaagggccaaatgtacgcacagctatttcagcgactttcgaaacgaccatcacggccgtcgcggtaatacaagcagacatcagaaaaacactgggaagtag

SEQ ID NO: 120829 - protein, 479 aa, Nasonia vitripennis
MKKGKTVLTTSSAGATDLKEALCEKIPLHHDLLRKFRQQHGLDVVSQITVNDIYRGLDGVTALIRETSEIDSQCGIKYRGLSIPELYQLLPRRGKSPSPEAVFWLLLTGDVPTHEQTEALTADWTERRERRKDWWWSGSSGEIGGVVGGVLRALPKNVAPVGRLAIALTALDADKHYRKAVESGAMSYTYWEHIYEDSMELLASLPAIVALVSACESRPTPLALEKADWVDFFIDCLHNTTDGFTEAQRQSLADFLRLYIAVNADDDGGIPGAHVAQIMGSCQFDASRALAAGVLAYANEPTSGTLFQYMDFLVQLQNAVGREPKNDILRNFVSTLIDKRFQIAGHKIAQFEDTRYTVLRDFVKNHVPNDPEIKLSQELSNIYKKQIKEARNRSVVAEQNAIAAPLFQFYGLRDMNYNQLLLCMARALGIVASMIWTTALNAPVERPRAKCTHSYFSDFRNDHHGRRGNTSRHQKNTGK

SEQ ID NO: 120830 - DNA, 1434 bp, Magnaporthe grisea 70-15
  CDS (1)..(1434)
atgagcctcaggacaacgtcgcgggcgttgggggccttccggcctcttgcaacccgctcagcatgcacttccaacgtgcgatccaccagaaactactcggctagctcagagccagacctgaagaccacattgaagagtgtcattccagccaagcgcgaactcctcaagaaggtcaaggcccatggttccaaggtcatcggcgaagtcaaggtcgagaacactattggaggcatgcgtggcctgaaggccatggtatgggaaggatctgttcttgacgccgacgagggtattcgtttccacggccgcacaatcaaagactgccaacgtgagctgcccaagggcaagactggcactgaaatgctacccgaggctatgttctggctgcttctcactggccaggtccccagcaccaaccaggttcgcgttctgtctcgtcaacttgctgagcaggcccaactcccggcttttgtcaacaagatgttggatgacttcccccgcgacctgcaccccatgacgcagtttgctattgcagtttccgccctcaaccacacatccaaatttgccaaggcgtatgccgatggcctcaacaaggctgattactgggagcctacatttgacgacagcattagcttgctggccaagctgcccacaatcgcagccaagatctaccacaactcgtacaagggcggtggtgctctgcctgccgaggtggacctggagcaggattggtcatacaactttgctgccatgctgggcaagggtggcaagggaaacgagaacttccaggaccttctgcgattgtacctcgctcttcatggcgaccacgagggaggcaacgtctcagcccacgccacacatcttgtgggcagcgctcttagcgatccgttcctcagttacagtgccggtctgcagggtctggctggacctcttcatggtcttgctgcccaggaggttctccgctggatcatccagatgaaggaggctattcctgccacatactcggagaaggacgtaaccgactacctctggtcaacgctcaactcgggtcgcgtagtacccggctacggtcacgccgtgctgcgcaagcctgacccgcgattccaggcccttatggactacgctgcgtcgcgtcccgagatcgccaaagaccccgtcttccagctcgtccagctcaacagccaggttgctcccgaggttctcaaaaagcacggcaagaccaagaacccgtacccgaacgttgactcgagctccggcgtgcttttccaccactacggcttccacgaaacactatactacaccgccactttcggcgtgagccgtggtcttggaccgcttgcccagctcatctgggaccgggcgctgggtctgccaattgagaggcccaagagcatcaacttggagggaattctcaaaattgtcggtgacaagagctag

SEQ ID NO: 120831 - protein, 477 aa, Magnaporthe grisea 70-15
MSLRTTSRALGAFRPLATRSACTSNVRSTRNYSASSEPDLKTTLKSVIPAKRELLKKVKAHGSKVIGEVKVENTIGGMRGLKAMVWEGSVLDADEGIRFHGRTIKDCQRELPKGKTGTEMLPEAMFWLLLTGQVPSTNQVRVLSRQLAEQAQLPAFVNKMLDDFPRDLHPMTQFAIAVSALNHTSKFAKAYADGLNKADYWEPTFDDSISLLAKLPTIAAKIYHNSYKGGGALPAEVDLEQDWSYNFAAMLGKGGKGNENFQDLLRLYLALHGDHEGGNVSAHATHLVGSALSDPFLSYSAGLQGLAGPLHGLAAQEVLRWIIQMKEAIPATYSEKDVTDYLWSTLNSGRVVPGYGHAVLRKPDPRFQALMDYAASRPEIAKDPVFQLVQLNSQVAPEVLKKHGKTKNPYPNVDSSSGVLFHHYGFHETLYYTATFGVSRGLGPLAQLIWDRALGLPIERPKSINLEGILKIVGDKS

SEQ ID NO: 120832 - DNA, 1422 bp, Magnaporthe grisea 70-15; identical to SEQ ID NO: 93109
  CDS (1)..(1422)

SEQ ID NO: 120833 - protein, 473 aa, Magnaporthe grisea 70-15; identical to SEQ ID NO: 93110

SEQ ID NO: 120834 - DNA, 1419 bp, Gibberella zeae PH-1; identical to SEQ ID NO: 93111
  CDS (1)..(1419)

SEQ ID NO: 120835 - protein, 472 aa, Gibberella zeae PH-1; identical to SEQ ID NO: 93112

SEQ ID NO: 120836 - DNA, 1413 bp, Gibberella zeae PH-1; identical to SEQ ID NO: 93113
  CDS (1)..(1413)

SEQ ID NO: 120837 - protein, 470 aa, Gibberella zeae PH-1; identical to SEQ ID NO: 93114

SEQ ID NO: 120838 - DNA, 1389 bp, Apis mellifera; identical to SEQ ID NO: 93115
  CDS (1)..(1389)

SEQ ID NO: 120839 - protein, 462 aa, Apis mellifera; identical to SEQ ID NO: 93116

SEQ ID NO: 120840 - DNA, 1419 bp, Candida glabrata CBS 138; identical to SEQ ID NO: 93119
  CDS (1)..(1419)

SEQ ID NO: 120841 - protein, 472 aa, Candida glabrata CBS 138; identical to SEQ ID NO: 93120

SEQ ID NO: 120842 - DNA, 1422 bp, Kluyveromyces lactis NRRL Y-1140; identical to SEQ ID NO: 93123
  CDS (1)..(1422)

SEQ ID NO: 120843 - protein, 473 aa, Kluyveromyces lactis NRRL Y-1140; identical to SEQ ID NO: 93124

SEQ ID NO: 120844 - DNA, 1449 bp, Kluyveromyces lactis NRRL Y-1140; identical to SEQ ID NO: 93125
  CDS (1)..(1449)

SEQ ID NO: 120845 - protein, 482 aa, Kluyveromyces lactis NRRL Y-1140; identical to SEQ ID NO: 93126

SEQ ID NO: 120846 - DNA, 1398 bp, Yarrowia lipolytica CLIB122; identical to SEQ ID NO: 93129
  CDS (1)..(1398)

SEQ ID NO: 120847 - protein, 465 aa, Yarrowia lipolytica CLIB122; identical to SEQ ID NO: 93130

SEQ ID NO: 120848 - DNA, 1425 bp, Ustilago maydis 521; identical to SEQ ID NO: 93133
  CDS (1)..(1425)

SEQ ID NO: 120849 - protein, 474 aa, Ustilago maydis 521; identical to SEQ ID NO: 93134

SEQ ID NO: 120850 - DNA, 1401 bp, Tribolium castaneum; identical to SEQ ID NO: 93135
  CDS (1)..(1401)

SEQ ID NO: 120851 - protein, 466 aa, Tribolium castaneum; identical to SEQ ID NO: 93136

SEQ ID NO: 120852 - DNA, 1383 bp, Tribolium castaneum; identical to SEQ ID NO: 93137
  CDS (1)..(1383)

SEQ ID NO: 120853 - protein, 460 aa, Tribolium castaneum; identical to SEQ ID NO: 93138

SEQ ID NO: 120854 - DNA, 1320 bp, Symbiobacterium thermophilum IAM 14863; identical to SEQ ID NO: 93139
  CDS (1)..(1320): transl_table=11

SEQ ID NO: 120855 - protein, 439 aa, Symbiobacterium thermophilum IAM 14863; identical to SEQ ID NO: 93140

SEQ ID NO: 120856 - DNA, 1317 bp, Geobacter metallireducens GS-15; identical to SEQ ID NO: 93141
  CDS (1)..(1317): transl_table=11

SEQ ID NO: 120857 - protein, 438 aa, Geobacter metallireducens GS-15; identical to SEQ ID NO: 93142

SEQ ID NO: 120858 - DNA, 1326 bp, Geobacter metallireducens GS-15; identical to SEQ ID NO: 93143
  CDS (1)..(1326): transl_table=11

SEQ ID NO: 120859 - protein, 441 aa, Geobacter metallireducens GS-15; identical to SEQ ID NO: 93144

SEQ ID NO: 120860 - DNA, 1539 bp, Oryza sativa subsp
  CDS (1)..(1539)
atggcgttcttccggggcctgaccgcggtttcgaggattcgatcccgcatggcacaggaggccaccacgcttggtggtgtgagatggctgcagatgcagagtccatctgatcttgcggcgatggcgttcttccggggcctgaccgcggtttcgaggattcgatcccgcatggcacaggaggccaccacgcttggtggtgtgagatggctgcagatgcagagtccatctgatcttgatcttaagtcccagctgcaggaattgattcccgagcaacaggatcgcttaaagaaacttaaatcagaacatgggaaggtccagcttggaaacataactgttgatatggtccttggcgggatgagaggaatgattggaatgctttgggaaacatcattgcttgacccggaggagggtattcgtttcaggggtctctcgattccagagtgccagaaagtgctgccaacagcaattaaaggtggagaacctttgccggagggtctcctttggcttcttttgactggaaaggtgccaaccaaagagcaagtcgatgctctatcaaaggaattggttacccgttcgagtgttccaggccatgtgtataaggcaattgatgctctccctgtaactgctcatccaatgacacagtttaccacaggggtgatggcacttcaagttgagagtgagtttcaaaaagcttacgacaaaggaatgccaaaatcaaagttctgggagcctacctatgaagattgcttaaatttgatagctcgccttccaccagtggcttcgtatgtttaccggaggatcttcaaggatgggaaaactatagcagctgataatgcactggactatgcagcaaacttttcacacatgcttgggtttgatgatcccaaaatgctcgagttgatgcgactatatgtgacaatccacactgatcatgaaggtggaaatgtcagtgctcatactggacatctggttggaagtgctctgtcagatccttatctttcttttgcagctgcactgaatggtttagctggaccattgcacggcctggctaatcaggaagtgctgttgtggatcaaatctgtaataggtgagacaggtagtgatgttacaactgatcaactcaaagagtatgtgtggaagacactaaaaagtggaaaggttgttcctggcttcggtcatggagttctacgtaagaccgatccacgatatacatgtcagagggagtttgctttgaagtacttgcctgaggatccacttttccaactggtctccaagttgtatgaagttgtgcctccaatcctcactgagcttggcaaggtcaaaaacccatggcctaatgttgatgctcacagtggagttctgctgaaccactttggattatctgaagctcggtattacaccgtccttttcggagtttcgaggagcataggcataggatcccagctcatttgggaccgtgctcttggtctgccgctcgaaagaccgaagagtgtcaccatggagtggctggaaaaccactgcaagaaggctgctgcttga

SEQ ID NO: 120861 - protein, 512 aa, Oryza sativa subsp
MAFFRGLTAVSRIRSRMAQEATTLGGVRWLQMQSPSDLAAMAFFRGLTAVSRIRSRMAQEATTLGGVRWLQMQSPSDLDLKSQLQELIPEQQDRLKKLKSEHGKVQLGNITVDMVLGGMRGMIGMLWETSLLDPEEGIRFRGLSIPECQKVLPTAIKGGEPLPEGLLWLLLTGKVPTKEQVDALSKELVTRSSVPGHVYKAIDALPVTAHPMTQFTTGVMALQVESEFQKAYDKGMPKSKFWEPTYEDCLNLIARLPPVASYVYRRIFKDGKTIAADNALDYAANFSHMLGFDDPKMLELMRLYVTIHTDHEGGNVSAHTGHLVGSALSDPYLSFAAALNGLAGPLHGLANQEVLLWIKSVIGETGSDVTTDQLKEYVWKTLKSGKVVPGFGHGVLRKTDPRYTCQREFALKYLPEDPLFQLVSKLYEVVPPILTELGKVKNPWPNVDAHSGVLLNHFGLSEARYYTVLFGVSRSIGIGSQLIWDRALGLPLERPKSVTMEWLENHCKKAAA

SEQ ID NO: 120862 - DNA, 1747 bp, Nicotiana tabacum; identical to SEQ ID NO: 93145
  CDS (70)..(1479)

SEQ ID NO: 120863 - protein, 469 aa, Nicotiana tabacum; identical to SEQ ID NO: 93146

SEQ ID NO: 120864 - DNA, 1425 bp, Trichoderma reesei; identical to SEQ ID NO: 93147
  CDS (1)..(1425)

SEQ ID NO: 120865 - protein, 474 aa, Trichoderma reesei; identical to SEQ ID NO: 93148

SEQ ID NO: 120866 - DNA, 1425 bp, Phaeosphaeria nodorum
  CDS (1)..(1425)
atgtccttgagtgcacgaactgcttcacgcgctctgcgcgcggcgaagccttcggcagcgcgcccctttgcctctgtacaagcatgcagctactcttcttcctctgagccagatctcaaggagactttcaagaaagttctgcctgcgaagcgcgaactgctcaagaaggttaaggcgcaggccgacaagaagctcggcgatgtcaaggttgagaatgcgcttggtggaatgagaggcctgaaggctatggtctgggagggatccgttctcgacgccaacgagggtatccgcttccatggcaagaccatcaaggactgccaaaaggagcttcccaagggcacttccggcactgaaatgcttcccgaggctatgttctggctgcttctcacaggagaggttccttccgtatcccagactcgcgttctctctcgtgagcttgctgagaaggctggcatccccaaattcgtcgagaagatgctcgacgacttccccaaggacctccacccgatgacacaattcgcatgcgccgtctcagcattgaactatgagtcgaagttcgcaaaggcgtacgagaagggcatcaacaaggctgattactgggagccgactttcgacgacagcatcagcttgctcgcaaagctgccaaccatcgctgcaaagatctaccagaacgcgtaccgcggtggaggtgccctcccagcccaggtcgacctggagcaagattgggcgtacaacttcgctgccatgctgggcaagtccggcaaggagaacgagggcttccaagatctcctccgcctgtaccttgctctgcacggtgaccacgagggtggtaacgtctctgcacacaccactcacttggtcggatccgcgctcagtgaccccttcctcagctacagtgccggtctgcagggtcttgctggtcctctccacggtctagctgcccaggaagtgctccgctttatcatcgacatgcagaagactgtcggtacaaagttctctgacaaggatgtcaccgacttcctctggagcgtcctcaagtctggtcgtgtcattcccggttacggccacgctgtgctgaggaagcctgacccgcgtttcgaggctttgatggacttcgccaatgctcgacccgacattgcggcgaaccccgtctaccagctcgtcaagaagaactctgaagtcgctcctggtgtgcttactgagcacggaaagactaagaacccctaccccaacgtcgactcctcttctggtgtcctattccaccactacggattcacagagactctgtactacactgcgacattcggtgtcagccgtggtctcggccctcttgcacaactcatctgggaccgagcactgggtctgcccattgagcgccccaagtccatcaacctccagggcatccttgaccaggtaggcgcatag

SEQ ID NO: 120867 - protein, 474 aa, Phaeosphaeria nodorum
MSLSARTASRALRAAKPSAARPFASVQACSYSSSSEPDLKETFKKVLPAKRELLKKVKAQADKKLGDVKVENALGGMRGLKAMVWEGSVLDANEGIRFHGKTIKDCQKELPKGTSGTEMLPEAMFWLLLTGEVPSVSQTRVLSRELAEKAGIPKFVEKMLDDFPKDLHPMTQFACAVSALNYESKFAKAYEKGINKADYWEPTFDDSISLLAKLPTIAAKIYQNAYRGGGALPAQVDLEQDWAYNFAAMLGKSGKENEGFQDLLRLYLALHGDHEGGNVSAHTTHLVGSALSDPFLSYSAGLQGLAGPLHGLAAQEVLRFIIDMQKTVGTKFSDKDVTDFLWSVLKSGRVIPGYGHAVLRKPDPRFEALMDFANARPDIAANPVYQLVKKNSEVAPGVLTEHGKTKNPYPNVDSSSGVLFHHYGFTETLYYTATFGVSRGLGPLAQLIWDRALGLPIERPKSINLQGILDQVGA

SEQ ID NO: 120868 - DNA, 1404 bp, Phaeosphaeria nodorum
  CDS (1)..(1404)
atggcttcagctctgcgattgactggcgccttccgcgctgccgctcctctgcggaccactgccttcaatggcctccgcttctactccagcaagaccacttcgctgaaggagaccttcgccaacaagctccctggcgagattgagaagatcaagaagctccgcaaggagcacggcaacaaggtcatcggcgaggtcaccctcgaccaggtctacggtggtgcccgtggcatcaagtccctcgtgtgggagggctctgtcctcgactccgaggagggtatccgtttccgcggcaagaccatccccgaatgccagcagctcctccccaaggcccccggtggccaggagcctctcccagaaggtcttttctggctcttgttgaccggcgaggttccttccgagcagcaggtccgcgacctgtccgccgagtgggccgcccgctccgacatccccaagttcgttgaggagctcatcgaccgctgcccgagcgatctccacccaatggctcagttctccatcgccgtcactgctctcgagcacgagtccaacttcgccaaggcctatgctaagggcatgaagaagagcgagtactgggagcacacctttgaggacgccatggatctcattgccaagcttcccaccatcgccgcgaagatctaccgcaacgtctacaaggacggcaaggtcgcacccatccagaaggacaaggactactcgttcaacttggccaaccagctcggtttctccgagaacaaggacttcgttgagctgatgcgtctgtacctcaccatccacaccgaccacgagggtggaaacgtcagcgcccacaccacccacttggtcggcagcgcgctcagctcgccttacctctctctcgctgctggtctgaacggtcttgctggtcctctccacggactggccaaccaggaagtcctcgtctggctccagaagatgaagaaggctgttggcaacgacctcagcgaccaggccatcaaggattacctgtggtctaccctcaaggccggccaagtcgttcctggatacggccacgccgtcctccgcaagaccgacccccgctacgtttcccagcgcgagtttgcccagaagcacctgcccgatgaccccatgttcaagctcgtcagccaggtctacaagatcgcccccggtgttctcactgagcacggaaagaccaagaacccataccccaacgtcgatgcccactccggtgtcctcctccagtactacggcctcaccgagcagaactactacaccgttcttttcggtgtatcgcgtgcgctcggtgtccttcctcaactcatcatcgaccgtgccgtcggcgcacccatcgagaggcccaagtccttcagcaccgaggcctacgccaagcttgttggcgctactttgtag

SEQ ID NO: 120869 - protein, 467 aa, Phaeosphaeria nodorum
MASALRLTGAFRAAAPLRTTAFNGLRFYSSKTTSLKETFANKLPGEIEKIKKLRKEHGNKVIGEVTLDQVYGGARGIKSLVWEGSVLDSEEGIRFRGKTIPECQQLLPKAPGGQEPLPEGLFWLLLTGEVPSEQQVRDLSAEWAARSDIPKFVEELIDRCPSDLHPMAQFSIAVTALEHESNFAKAYAKGMKKSEYWEHTFEDAMDLIAKLPTIAAKIYRNVYKDGKVAPIQKDKDYSFNLANQLGFSENKDFVELMRLYLTIHTDHEGGNVSAHTTHLVGSALSSPYLSLAAGLNGLAGPLHGLANQEVLVWLQKMKKAVGNDLSDQAIKDYLWSTLKAGQVVPGYGHAVLRKTDPRYVSQREFAQKHLPDDPMFKLVSQVYKIAPGVLTEHGKTKNPYPNVDAHSGVLLQYYGLTEQNYYTVLFGVSRALGVLPQLIIDRAVGAPIERPKSFSTEAYAKLVGATL

SEQ ID NO: 120870 - DNA, 1676 bp, Aspergillus oryzae
  CDS (81)..(1505)
cggacgcgtgggcgatatacccagaccctctccattcttcaattatactcagccgctcaataaaggttgtttgattcgacatggcttcttccttgagaatcggaacttctgttcttcgatccacctctctcgccggtaagccggtcgtgcagtccgttgccttcaatggtttgcgctgctactctaccggcaaggccaagtccttgaaggagacattcgccgacaatctccctggcgagattgagaaggtcaagaagctcaggaaggactatggcaacaaggtcatcggcgaggtcaccctcgaccaggcctacggcggtgctcgtggtgtgaagtgcctcgtgtgggaaggttctgttttggattccgaagaaggtatccgtttccgtggatacaccatccccgaatgccagaagctgttacccaaggctcccggtggcgaggagcctcttcccgaaggtctcttctggctgctgttgaccggcgaaattccctctgagcagcaggttcgcgatctgtctgccgagtgggctgctcgttctgacctccccaaattcatcgaggagctcattgaccgctgtcccagcactcttcaccccatggctcagttctctctggctgtcactgcccttgagcacgagtccgctttcgccaaggcctacgctaaaggtatcaacaagaaggactactggaactacaccttcgaggattccatggacctcattgccaagcttcctactatcgccgcgaagatttaccgcaacgtcttcaaggacggcaaggtcgctcctatccagaaggacaaggattactcctacaacttggccaaccagctcggctttggtaacaacaatgacttcgttgagctcatgcgtttgtacctgaccatccactctgaccatgagggtggaaacgtcagcgctcacaccacccaccttgttggtagtgctctgagctcccctatgctgtctttgtctgctggtctgaacggattggctggcccccttcacggattggcaaaccaggaagtgcttaactggctcacaaagatgaaggctgccattggtaacgacctcagtgaccaggccatcaaggactacttgtggtccactctcaacgctggccaggttgttcccggatacggtcacgctgtcctgcgtaagactgatcctcgttacgtttctcagcgcgagtttgcacttcgcaagctccctgatgaccaaatgttcaatctcgtcagccaggtctacaagattgctcctggcgtgctgactgagcatggcaagaccaagaaccccttccccaatgttgatgctcactctggtgtccttcttcagtactatggcctgactgaggccaactattacaccgtcctgttcggtgtctctcgtgctctaggtgttctgcctcagctgatcattgaccgcgcccttggtgcccccattgagcgccccaagtccttcagcacggaggcttacgccaagcttgtcggtgccaagctgtaaattcgttgaatgacgcgagaccctggaggaggttttatgattaagcacaccattttgtatttttcccttactattttattagactaggatgcgacgagtgctgtggttagtttgattaatgtatgataggacctggcccaggcgggcccttgtaacagcgcacaaaaaaaa

SEQ ID NO: 120871 - protein, 474 aa, Aspergillus oryzae; identical to SEQ ID NO: 93150

SEQ ID NO: 120872 - DNA, 1404 bp, Aspergillus oryzae; identical to SEQ ID NO: 93151
  CDS (1)..(1404)

SEQ ID NO: 120873 - protein, 467 aa, Aspergillus oryzae; identical to SEQ ID NO: 93152

SEQ ID NO: 120874 - DNA, 1425 bp, Oryza sativa subsp
  CDS (1)..(1425)
atggcgttcttcaggggcctgaccgcggtgtcgaggcttcgatcccgcgtggcacaggaggccaccacgcttggtggtgtgcgatggctgcagatgcagagcgcatctgatcttgatctcaagtcccagctgcaggaattgattcctgaacaacaggaccgcttaaagaaacttaaatcggagcatggaaaggtccaacttggaaatataacagtcgatatggtccttggtgggatgagagggatgactggaatgctttgggaaacatcattgcttgacccggatgagggtattcgttttaggggtctctcgattccagagcgccagaaagtgctgccgacagcagttaaagatggggagcctttgcctgagggtctactttggcttcttttgaccggaaaggtgccaaccaaagagcaagttgatgctctatcaaaggaattggctagtcgttcgagtgttccaggtcatgtgtatgaggcaatcgatgctcttcctgtaactgctcatccgatgacccagtttaccacaggagtgatggcacttcaggtggagagtgagtttcaaaaaagccctatgacaaagggaatgtcaaaatcaaagttctgggagcctacctatgaaagattgcttaaatttgatagctcgccttccagcagtggcctttcatatgtttaccggaggatattcaagggagggaaaactatagcagctgataatgcactggattatgcagcaaatttttcacacatgcttgggtttgatgatcccaaaatgcttgagttgatgcgactatatataacaatccacactgatcatgaaggtggaaacgtcagtgctcatactggacatctggttggaagtgctctgtcagacccttatctttcttttgcagctgcactgaatggtttagctggaccgttgcacggcctggctaatcaggaagtgttgttgtggatcaaatctgtaataggtgagactggtagtgacgttacaactgatcaactcaaagagtatgtgtggaagacactaaaaggtggaaaggttgttcctggctttggtcatggagttctacgtaagaccgatccacggtatacatgtcagagggagtttgctttgaagtacttgcctgaggatccacttttccaactggtctccaagttgtatgaagttgtgcctcctatcctcactgagcttggcaaggtcaaaaacccatggcctaatgttgatgctcacagcggagttctactgaaccactttggattatctgaagctcggtattacactgttcttttcggagtttcaaggagcattggaataggatctcagctcatttgggaccgtgctcttggcctgccgctcgaaagaccgaagagtgtcaccatggagtggctggagaaccactgcaagaaggttgctgcttga

SEQ ID NO: 120875 - protein, 474 aa, Oryza sativa subsp
MAFFRGLTAVSRLRSRVAQEATTLGGVRWLQMQSASDLDLKSQLQELIPEQQDRLKKLKSEHGKVQLGNITVDMVLGGMRGMTGMLWETSLLDPDEGIRFRGLSIPERQKVLPTAVKDGEPLPEGLLWLLLTGKVPTKEQVDALSKELASRSSVPGHVYEAIDALPVTAHPMTQFTTGVMALQVESEFQKSPMTKGMSKSKFWEPTYERLLKFDSSPSSSGLSYVYRRIFKGGKTIAADNALDYAANFSHMLGFDDPKMLELMRLYITIHTDHEGGNVSAHTGHLVGSALSDPYLSFAAALNGLAGPLHGLANQEVLLWIKSVIGETGSDVTTDQLKEYVWKTLKGGKVVPGFGHGVLRKTDPRYTCQREFALKYLPEDPLFQLVSKLYEVVPPILTELGKVKNPWPNVDAHSGVLLNHFGLSEARYYTVLFGVSRSIGIGSQLIWDRALGLPLERPKSVTMEWLENHCKKVAA

SEQ ID NO: 120876 - DNA, 1314 bp, Desulfuromonas palmitatis; identical to SEQ ID NO: 93153
  CDS (1)..(1314): transl_table=11

SEQ ID NO: 120877 - protein, 437 aa, Desulfuromonas palmitatis; identical to SEQ ID NO: 93154

SEQ ID NO: 120878 - DNA, 1733 bp, Citrus junos; identical to SEQ ID NO: 93155
  CDS (32)..(1426)

SEQ ID NO: 120879 - protein, 464 aa, Citrus junos; identical to SEQ ID NO: 93156

SEQ ID NO: 120880 - DNA, 1422 bp, Saccharomyces castellii; identical to SEQ ID NO: 93157
  CDS (1)..(1422)

SEQ ID NO: 120881 - protein, 473 aa, Saccharomyces castellii; identical to SEQ ID NO: 93158

SEQ ID NO: 120882 - DNA, 1431 bp, Saccharomyces castellii; identical to SEQ ID NO: 93159
  CDS (1)..(1431)

SEQ ID NO: 120883 - protein, 476 aa, Saccharomyces castellii; identical to SEQ ID NO: 93160

SEQ ID NO: 120884 - DNA, 1440 bp, Saccharomyces bayanus; identical to SEQ ID NO: 93161
  CDS (1)..(1440)

SEQ ID NO: 120885 - protein, 479 aa, Saccharomyces bayanus; identical to SEQ ID NO: 93162

SEQ ID NO: 120886 - DNA, 1371 bp, Issatchenkia orientalis; identical to SEQ ID NO: 93163
  CDS (1)..(1371)

SEQ ID NO: 120887 - protein, 456 aa, Issatchenkia orientalis; identical to SEQ ID NO: 93164

SEQ ID NO: 120888 - DNA, 1873 bp, Prunus persica; identical to SEQ ID NO: 93165
  CDS (142)..(1563)
  misc_feature (576)..(576): k is g or t
  misc_feature (577)..(577): k is g or t
  misc_feature (721)..(721): w is a or t

SEQ ID NO: 120889 - protein, 473 aa, Prunus persica; identical to SEQ ID NO: 93166
  misc_feature (146)..(146): The Xaa at location 146 stands for Stop, or Glu.
  misc_feature (194)..(194): The Xaa at location 194 stands for Stop, or Lys.

SEQ ID NO: 120890 - DNA, 1523 bp, Oryza sativa; identical to SEQ ID NO: 93167
  CDS (105)..(1523)

SEQ ID NO: 120891 - protein, 472 aa, Oryza sativa; identical to SEQ ID NO: 93168

SEQ ID NO: 120892 - DNA, 1419 bp, Podospora anserina; identical to SEQ ID NO: 93169
  CDS (1)..(1419)

SEQ ID NO: 120893 - protein, 472 aa, Podospora anserina; identical to SEQ ID NO: 93170

SEQ ID NO: 120894 - DNA, 1428 bp, Saccharomyces kluyveri; identical to SEQ ID NO: 93171
  CDS (1)..(1428)

SEQ ID NO: 120895 - protein, 475 aa, Saccharomyces kluyveri; identical to SEQ ID NO: 93172

SEQ ID NO: 120896 - DNA, 1404 bp, Aedes aegypti
  CDS (1)..(1404)
atggctcttagccgtatctattcgtcaaagttggccagtgccaataagaacctcctgccggtgatcaccacctacgtgcgaaatgcatccgacagcaccgacctgaaggccgtactctccgaaaaaatccccaaggagcaggaacgcgtcaaaaacttccgcaagcagtttggtgccaccaaagttggcgaagtcaccgttgacatgatgtacggtggtatgcgtggcatcaagggtctggtgtgcgaaacctcggtgctcgaccccgatgagggcatccgattccgtggactgtccattcctgagtgccagaaggtgctcccaaaagccccaggtggtgctgaaccattgcccgagggtctgttctggttgttgatcactggtgatgttccgaccaaggctcaggtcgatgccctgtcccgcgaatgggccaaccgtgctgccctgccatcgcacgtcgtcacgatgctgaacaacatgccaacgacgttgcacccaatgtcgcagctgagctgcgcggtcactgccctgaaccacgagagcaagtacgccaaggcttactcggagggtgtgcacaagagcaagtactgggaatacgtgtacgaggacagcatggatctgattgccaaactgccagtcgttgctgccaccatctatcgcaacacgtaccgcgatggcaagggaatcggtgccatcgatcccaagaaggattggtccgccaacttcaccaagatgttgggctacgaagacgaacagttcaccgagctgatgcgtctctacctgaccatccacagtgaccacgaaggtggcaacgtgtccgctcacaccgtacatctggttggctctgctctgagcgacccatacctgtcgttcgctgccggtatgaacggattggctggtccactccacggtctcgccaaccaggaagtattagtgtggctgcagaagctgcgcaaggagctcggtgataacgccagcgaagataaggtcaaggactttatctggaagacactcaaatccggacaggttgttcctggctacggtcacgccgttctgcgaaagaccgatcctcgttacacttgccagcgcgagttcgccctgaagcatctgccaaacgatcccctgttccagctggtgtccaacatctacaaggtcgtgcccccaatcctgaccgaactcggcaaggtcaagaacccatggccaaatgtagatgcccactccggtgtcctgctgcagtactacggactgaaggagatgaactactacaccgtgctgttcggcgtgtcccgtgcccttggtgtgttggcttcgctcgtctgggatcgcgccctgggactgccaatcgaacgcccgaaatccatgtccaccgatggactgatgaaggccgttggcgcctccaagtaa

SEQ ID NO: 120897 - protein, 467 aa, Aedes aegypti
MALSRIYSSKLASANKNLLPVITTYVRNASDSTDLKAVLSEKIPKEQERVKNFRKQFGATKVGEVTVDMMYGGMRGIKGLVCETSVLDPDEGIRFRGLSIPECQKVLPKAPGGAEPLPEGLFWLLITGDVPTKAQVDALSREWANRAALPSHVVTMLNNMPTTLHPMSQLSCAVTALNHESKYAKAYSEGVHKSKYWEYVYEDSMDLIAKLPVVAATIYRNTYRDGKGIGAIDPKKDWSANFTKMLGYEDEQFTELMRLYLTIHSDHEGGNVSAHTVHLVGSALSDPYLSFAAGMNGLAGPLHGLANQEVLVWLQKLRKELGDNASEDKVKDFIWKTLKSGQVVPGYGHAVLRKTDPRYTCQREFALKHLPNDPLFQLVSNIYKVVPPILTELGKVKNPWPNVDAHSGVLLQYYGLKEMNYYTVLFGVSRALGVLASLVWDRALGLPIERPKSMSTDGLMKAVGASK

SEQ ID NO: 120898 - DNA, 1440 bp, Saccharomyces cerevisiae; identical to SEQ ID NO: 93175
  CDS (1)..(1440)

SEQ ID NO: 120899 - protein, 479 aa, Saccharomyces cerevisiae; identical to SEQ ID NO: 93176

SEQ ID NO: 120900 - DNA, 1404 bp, Aedes aegypti
  CDS (1)..(1404)
atggctcttagccgtatctattcgtcaaagttggccagtgccaataagaacctcctgccggtgatcaccacctacgtgcgaaatgcatccgacagcaccgacctgaaggccgtactctccgaaaaaatccccaaggagcaggaacgcgtcaaaaacttccgcaagcagtttggtgccaccaaagttggcgaagtcaccgttgacatgatgtacggtggtatgcgtggcatcaagggtctggtgtgcgaaacctcggtgctcgaccccgatgagggcatccgattccgtggactgtccattcctgagtgccagaaggtgctcccaaaagccccaggtggcgctgaaccattgcccgagggtctgttctggttgttgatcactggtgatgttccgaccaaggctcaggtcgatgccctgtcccgcgaatgggccaaccgtgctgccctgccatcgcacgtcgtcacgatgctgaacaacatgccaacgacgttgcacccaatgtcgcagctgagctgcgcggtcactgccctgaaccacgagagcaagtacgccaaggcttactcggagggtgtgcacaagagcaagtactgggaatacgtgtacgaggacagcatggatctgattgccaaactgccagtcgttgctgccaccatctatcgcaacacgtaccgcgatggcaagggaatcggtgccatcgatcccaagaaggattggtccgccaacttcaccaagatgttgggctacgaagacgaacagttcaccgagctgatgcgtctctacctgaccatccacagtgaccacgaaggtggcaacgtgtccgctcacaccgtacatctggttggctctgctctgagcgacccatacctgtcgttcgctgccggtatgaacggattggctggtccactccacggtctcgccaaccaggaagtattagtgtggctgcagaagctgcgcaaggagctcggtgataacgccagcgaagataaggtcaaggactttatctggaagacactcaaatccggacaggttgttcctggctacggtcacgccgttctgcgaaagaccgatcctcgttacacttgccagcgcgagttcgccctgaagcatctgccaaacgatcccctgttccagctggtgtccaacatctacaaggtcgtgcccccaatcctgaccgaactcggcaaggtcaagaacccatggccaaatgtagatgcccactccggtgtcctgctgcagtactacggactgaaggagatgaactactacaccgtgctgttcggcgtgtcccgtgcccttggtgtgttggcttcgctcgtctgggatcgcgccctgggactgcccatcgaacgcccgaaatccatgtccaccgatggactgatgaaggccgttggcgccgccaagtaa

SEQ ID NO: 120901 - protein, 467 aa, Aedes aegypti
MALSRIYSSKLASANKNLLPVITTYVRNASDSTDLKAVLSEKIPKEQERVKNFRKQFGATKVGEVTVDMMYGGMRGIKGLVCETSVLDPDEGIRFRGLSIPECQKVLPKAPGGAEPLPEGLFWLLITGDVPTKAQVDALSREWANRAALPSHVVTMLNNMPTTLHPMSQLSCAVTALNHESKYAKAYSEGVHKSKYWEYVYEDSMDLIAKLPVVAATIYRNTYRDGKGIGAIDPKKDWSANFTKMLGYEDEQFTELMRLYLTIHSDHEGGNVSAHTVHLVGSALSDPYLSFAAGMNGLAGPLHGLANQEVLVWLQKLRKELGDNASEDKVKDFIWKTLKSGQVVPGYGHAVLRKTDPRYTCQREFALKHLPNDPLFQLVSNIYKVVPPILTELGKVKNPWPNVDAHSGVLLQYYGLKEMNYYTVLFGVSRALGVLASLVWDRALGLPIERPKSMSTDGLMKAVGAAK

SEQ ID NO: 120902 - DNA, 1383 bp, Saccharomyces cerevisiae; identical to SEQ ID NO: 93177
  CDS (1)..(1383)

SEQ ID NO: 120903 - protein, 460 aa, Saccharomyces cerevisiae; identical to SEQ ID NO: 93178

SEQ ID NO: 120904 - DNA, 2790 bp, Saccharomyces cerevisiae
  CDS (650)..(2110)
aactgtttattaaatatataataacatatttatttgtttaacaagcctgaaataagaaattcttttataaatacatcatcgagatgatcatcaaagtgtctctatagttaatataagcttatgcaaaggttgaagccgttatgttgtcgtaattctaaattacaggttatattaaagagattatcttgactgatataaaatttcttatcatggtagtgatcacaaatagatcacatgatatattttttatttttaattttttttaattataaaaataatttttttctttaaattaaacaaaaataaaaaattgttttttgttggttaagatttccgaaaatagaaatattattcagttgaaagacaaaaaaacataaatatttctatgagcaaacaatttgaacagaaaaataaaattggggaagtgacacaccatggtagcggttctaaagcgaaatcggcaaagcggctaaatagcagttttgatgacttactccacactgaaaatggatgaccttaaataggagataaagctttttcatccctatgtatttaagatgactggcttgtcaagcattctaatcataaaaaaaagatcgtatttgatcaagaatttatacatagacgccgctaaataattgaatacaaaatggtacaaaggcttctaccgggcgcacatatatgcagaaggtccttcaattcgtctgcaattataaagtcttctgcattgactctcaaggaagcattagaaaacgtgatacctaagaaaagagatgctgtgaagaaattgaaggcctgttatggcagcacgtttgtcggaccgattaccatttcatcagttctaggtgggatgagaggtaatcagtcaatgttttggcaaggaacatcattagatcccgaacatggcattaaatttcaaggtttaacgattgaagaatgtcaaaatagattacctaatacaggtattgatggcgataatttcctgccagaatcaatgttatggctgttgatgacaggtggtgtgccaactttccagcaagctgcttctttcaggaaagaattggctattcgtggaaggaaattgccacattatacagagaaagttttgtcaagtttacccaaagatatgcaccctatgacccaacttgcaattggtttagcatcaatgaacaaaggatccctctttgctacaaactaccaaaagggcctcataggaaagatggaattttggaaagatactcttgaagattcgctaaatttaattgcttcactcccgctgctgactgggagaatttattcgaacattacaaatgagggacacccattaggtcaatatagtgaggaggtggattggtgtacaaacatatgttccctgctcggcatgacaaatggaacgaactcttctaatacatgcaaccttacttcccagcaatccctggacttcataaacttgatgcggttatataccggtatacatgtagaccatgaaggtggtaatgtttctgctcacaccacccacttggttggaagtgcgttgagtgacccgtatctcagctattcatctggaataatgggattagcgggtcctttgcatgggttagcagcacaagaagtagtaaggtttctcatagagatgaactctaatatttccagcattgcacgagaacaagaaatcaaagattatctttggaaaattttgaattcaaaccgtgtgatccccggttatgggcacgcagttttgcgtaaaccggatcctcgatttacagcaatgcttgaatttgcgcaaaagaggcctattgaatttgagaacgacaagaacgttttgttgatgcaaaaattggcagaaatagcgcctaaggttttgttggaacacggaaagagtaagaatccatttcccaatgttgactctgcatcggggattttgttttatcattatggaatcagggaattattattctttaccgtcatttttgggtgttcaagggccatgggacccttgacacaacttgtttgggatcgcattctaggtttaccaattgaaaggcccaagagtttgaacttggagggtctggaagcacttaccaaagcaagcaatgttaacaagttgtaacgcagttccaatttacaagaatgcttcgtttgctattacaatattgaaatataaataaaattccatacagcatgtctaatcatagctaatttatacatattcatcatgaaaacatataggggaaaatatggtcggttaacacacctatcaaaaaattattcagcaattccaatctcgttagtaaaatatattcttattttttttttttttctctgattgtattatttctggagttttgacttatttttttaccacatcgcgcttttcgtccccaatctctctgatatatgatgctgtctataggtagccacttccccgatgtcggacctcgggccgtttacaaactttattgagatgaccttatttctccacattctagtcattcaacttttaccctcatatgtttaccttcactaatgtgaaagcatgaccaaagaaagtgtataaggtatataaatctgccataatgtatgtataacttattaggactttctcaaatagtattttggtattttctactgttctctgatgatcgagagcaaacagaatgtttttagccaaaaatctaaaaaataataaaatcaaggtatgcttgcctaaaaagaaatttgctgcgctgagtacagcgtctatacaaactaatgaaagaccaaatccagataaggttttgaaggacatcg

SEQ ID NO: 120905 - protein, 486 aa, Saccharomyces cerevisiae; identical to SEQ ID NO: 93092

SEQ ID NO: 120906 - DNA, 1425 bp, Arabidopsis thaliana; identical to SEQ ID NO: 93179
  CDS (1)..(1425)

SEQ ID NO: 120907 - protein, 474 aa, Arabidopsis thaliana; identical to SEQ ID NO: 93180

SEQ ID NO: 120908 - DNA, 1302 bp, Arabidopsis thaliana; identical to SEQ ID NO: 93181
  CDS (1)..(1302)

SEQ ID NO: 120909 - protein, 433 aa, Arabidopsis thaliana; identical to SEQ ID NO: 93182

SEQ ID NO: 120910 - DNA, 1710 bp, Aspergillus niger; identical to SEQ ID NO: 93183
  CDS (66)..(1493)

SEQ ID NO: 120911 - protein, 475 aa, Aspergillus niger; identical to SEQ ID NO: 93184

SEQ ID NO: 120912 - DNA, 1404 bp, Candida tropicalis; identical to SEQ ID NO: 93185
  CDS (1)..(1404): transl_table=12

SEQ ID NO: 120913 - protein, 467 aa, Candida tropicalis; identical to SEQ ID NO: 93186

SEQ ID NO: 120914 - DNA, 1733 bp, Citrus maxima; identical to SEQ ID NO: 93187
  CDS (57)..(1472)

SEQ ID NO: 120915 - protein, 471 aa, Citrus maxima; identical to SEQ ID NO: 93188

SEQ ID NO: 120916 - DNA, 1859 bp, Daucus carota; identical to SEQ ID NO: 93189
  CDS (157)..(1575)

SEQ ID NO: 120917 - protein, 472 aa, Daucus carota; identical to SEQ ID NO: 93190

SEQ ID NO: 120918 - DNA, 1395 bp, Drosophila melanogaster; identical to SEQ ID NO: 93191
  CDS (1)..(1395)

SEQ ID NO: 120919 - protein, 464 aa, Drosophila melanogaster; identical to SEQ ID NO: 93192

SEQ ID NO: 120920 - DNA, 1425 bp, Emericella nidulans; identical to SEQ ID NO: 93131
  CDS (1)..(1425)

SEQ ID NO: 120921 - protein, 474 aa, Emericella nidulans; identical to SEQ ID NO: 93132

SEQ ID NO: 120922 - DNA, 1398 bp, Glossina morsitans morsitans; identical to SEQ ID NO: 93193
  CDS (1)..(1398)

SEQ ID NO: 120923 - protein, 465 aa, Glossina morsitans morsitans; identical to SEQ ID NO: 93194

SEQ ID NO: 120924 - DNA, 1410 bp, Neurospora crassa; identical to SEQ ID NO: 93195
  CDS (1)..(1410)

SEQ ID NO: 120925 - protein, 469 aa, Neurospora crassa; identical to SEQ ID NO: 93196

SEQ ID NO: 120926 - DNA, 1422 bp, Schizosaccharomyces pombe; identical to SEQ ID NO: 93197
  CDS (1)..(1422)

SEQ ID NO: 120927 - protein, 473 aa, Schizosaccharomyces pombe; identical to SEQ ID NO: 93198

SEQ ID NO: 120928 - DNA, 1891 bp, Solanum tuberosum; identical to SEQ ID NO: 93199
  CDS (73)..(1488)

SEQ ID NO: 120929 - protein, 471 aa, Solanum tuberosum; identical to SEQ ID NO: 93200

SEQ ID NO: 120930 - DNA, 1383 bp, Emericella nidulans; identical to SEQ ID NO: 93201
  CDS (1)..(1383)

SEQ ID NO: 120931 - protein, 460 aa, Emericella nidulans; identical to SEQ ID NO: 93202

SEQ ID NO: 120932 - DNA, 1428 bp, Brassica napus; identical to SEQ ID NO: 93203
  CDS (1)..(1428)

SEQ ID NO: 120933 - protein, 475 aa, Brassica napus; identical to SEQ ID NO: 93204

SEQ ID NO: 120934 - DNA, 1419 bp, Zea mays; identical to SEQ ID NO: 93205
  CDS (1)..(1419)

SEQ ID NO: 120935 - protein, 472 aa, Zea mays; identical to SEQ ID NO: 93206

SEQ ID NO: 120936 - DNA, 1419 bp, Glycine max; identical to SEQ ID NO: 93207
  CDS (1)..(1419)

SEQ ID NO: 120937 - protein, 472 aa, Glycine max; identical to SEQ ID NO: 93208

SEQ ID NO: 120938 - DNA, 1419 bp, Zea mays; identical to SEQ ID NO: 93209
  CDS (1)..(1419)

SEQ ID NO: 120939 - protein, 472 aa, Zea mays; identical to SEQ ID NO: 93210

SEQ ID NO: 120940 - DNA, 1419 bp, Zea mays; identical to SEQ ID NO: 93211
  CDS (1)..(1419)

SEQ ID NO: 120941 - protein, 472 aa, Zea mays; identical to SEQ ID NO: 93212

SEQ ID NO: 120942 - DNA, 23 bp, Artificial sequence
  primer
atggtgtttttccgcagcgtatc

SEQ ID NO: 120943 - DNA, 23 bp, Artificial sequence
  primer
ttaagcagatgaagctttcttac

SEQ ID NO: 120944 - protein, 462 aa, Artificial sequence
  consensus sequence
  Variant (3)..(9): Xaa in position 3 to 9 is any amino acid
  Variant (10)..(10): Xaa in position 10 is any or no amino acid
  Variant (12)..(17): Xaa in position 12 to 17 is any amino acid
  Variant (19)..(23): Xaa in position 19 to 23 is any amino acid
  Variant (24)..(24): Xaa in position 24 is any or no amino acid
  Variant (26)..(29): Xaa in position 26 to 29 is any amino acid
  Variant (31)..(38): Xaa in position 31 to 38 is any amino acid
  Variant (41)..(41): Xaa in position 41 is any amino acid
  Variant (44)..(49): Xaa in position 44 to 49 is any amino acid
  Variant (51)..(51): Xaa in position 51 is any amino acid
  Variant (53)..(53): Xaa in position 53 is any amino acid
  Variant (56)..(57): Xaa in position 56 to 57 is any amino acid
  Variant (65)..(66): Xaa in position 65 to 66 is any amino acid
  Variant (69)..(70): Xaa in position 69 to 70 is any amino acid
  Variant (72)..(73): Xaa in position 72 to 73 is any amino acid
  Variant (74)..(74): Xaa in position 74 is any or no amino acid
  Variant (77)..(80): Xaa in position 77 to 80 is any amino acid
  Variant (81)..(86): Xaa in position 81 to 86 is any or no amino acid
  Variant (92)..(94): Xaa in position 92 to 94 is any amino acid
  Variant (101)..(101): Xaa in position 101 is any amino acid
  Variant (104)..(106): Xaa in position 104 to 106 is any amino acid
  Variant (109)..(111): Xaa in position 109 to 111 is any amino acid
  Variant (113)..(117): Xaa in position 113 to 117 is any amino acid
  Variant (119)..(120): Xaa in position 119 to 120 is any amino acid
  Variant (121)..(121): Xaa in position 121 is any or no amino acid
  Variant (123)..(127): Xaa in position 123 to 127 is any amino acid
  Variant (128)..(145): Xaa in position 128 to 145 is any or no amino acid
  Variant (147)..(149): Xaa in position 147 to 149 is any amino acid
  Variant (153)..(153): Xaa in position 153 is any amino acid
  Variant (155)..(160): Xaa in position 155 to 160 is any amino acid
  Variant (163)..(165): Xaa in position 163 to 165 is any amino acid
  Variant (167)..(167): Xaa in position 167 is any amino acid
  Variant (169)..(169): Xaa in position 169 is any amino acid
  Variant (172)..(172): Xaa in position 172 is any amino acid
  Variant (174)..(175): Xaa in position 174 to 175 is any amino acid
  Variant (177)..(178): Xaa in position 177 to 178 is any amino acid
  Variant (179)..(179): Xaa in position 179 is any or no amino acid
  Variant (181)..(183): Xaa in position 181 to 183 is any amino acid
  Variant (185)..(188): Xaa in position 185 to 188 is any amino acid
  Variant (191)..(193): Xaa in position 191 to 193 is any amino acid
  Variant (195)..(195): Xaa in position 195 is any amino acid
  Variant (197)..(198): Xaa in position 197 to 198 is any amino acid
  Variant (200)..(201): Xaa in position 200 to 201 is any amino acid
  Variant (202)..(202): Xaa in position 202 is any or no amino acid
  Variant (204)..(206): Xaa in position 204 to 206 is any amino acid
  Variant (208)..(213): Xaa in position 208 to 213 is any amino acid
  Variant (214)..(214): Xaa in position 214 is any or no amino acid
  Variant (216)..(224): Xaa in position 216 to 224 is any amino acid
  Variant (225)..(225): Xaa in position 225 is any or no amino acid
  Variant (227)..(229): Xaa in position 227 to 229 is any amino acid
  Variant (231)..(234): Xaa in position 231 to 234 is any amino acid
  Variant (237)..(245): Xaa in position 237 to 245 is any amino acid
  Variant (246)..(261): Xaa in position 246 to 261 is any or no amino acid
  Variant (265)..(267): Xaa in position 265 to 267 is any amino acid
  Variant (269)..(269): Xaa in position 269 is any amino acid
  Variant (281)..(281): Xaa in position 281 is any amino acid
  Variant (290)..(290): Xaa in position 290 is any amino acid
  Variant (292)..(292): Xaa in position 292 is any amino acid
  Variant (295)..(296): Xaa in position 295 to 296 is any amino acid
  Variant (298)..(299): Xaa in position 298 to 299 is any amino acid
  Variant (316)..(316): Xaa in position 316 is any amino acid
  Variant (318)..(336): Xaa in position 318 to 336 is any amino acid
  Variant (337)..(338): Xaa in position 337 to 338 is any or no amino acid
  Variant (340)..(340): Xaa in position 340 is any amino acid
  Variant (342)..(342): Xaa in position 342 is any amino acid
  Variant (345)..(346): Xaa in position 345 to 346 is any amino acid
  Variant (348)..(348): Xaa in position 348 is any amino acid
  Variant (350)..(350): Xaa in position 350 is any amino acid
  Variant (353)..(353): Xaa in position 353 is any amino acid
  Variant (356)..(356): Xaa in position 356 is any amino acid
  Variant (366)..(367): Xaa in position 366 to 367 is any amino acid
  Variant (370)..(370): Xaa in position 370 is any amino acid
  Variant (373)..(381): Xaa in position 373 to 381 is any amino acid
  Variant (382)..(384): Xaa in position 382 to 384 is any or no amino acid
  Variant (386)..(386): Xaa in position 386 is any amino acid
  Variant (389)..(394): Xaa in position 389 to 394 is any amino acid
  Variant (395)..(395): Xaa in position 395 is any or no amino acid
  Variant (397)..(397): Xaa in position 397 is any amino acid
  Variant (398)..(398): Xaa in position 398 is any or no amino acid
  Variant (400)..(402): Xaa in position 400 to 402 is any amino acid
  Variant (405)..(405): Xaa in position 405 is any amino acid
  Variant (409)..(409): Xaa in position 409 is any amino acid
  Variant (414)..(415): Xaa in position 414 to 415 is any amino acid
  Variant (420)..(422): Xaa in position 420 to 422 is any amino acid
  Variant (425)..(426): Xaa in position 425 to 426 is any amino acid
  Variant (428)..(430): Xaa in position 428 to 430 is any amino acid
  Variant (440)..(441): Xaa in position 440 to 441 is any amino acid
  Variant (443)..(446): Xaa in position 443 to 446 is any amino acid
  Variant (448)..(449): Xaa in position 448 to 449 is any amino acid
  Variant (453)..(453): Xaa in position 453 is any amino acid
  Variant (455)..(455): Xaa in position 455 is any amino acid
  Variant (457)..(457): Xaa in position 457 is any amino acid
LKXXXXXXXXPXXXXXXKXXXXXXGXXXXGXXXXXXXXGGXRGXXXXXXEXSXLDXXEGIRFRGXXIPXXQXXXLPXXXXXXXXXXEPLPEXXXWLLLTGXVPXXXQVXXXSXXXXXRXXXPXXXXXXXXXXXXXXXXXXXXXXXPXXXHPMXQXXXXXXALXXXSXFXKAXYXXGXXXKXXXWXXXXEDXXXLXAXXPXXXAXXXYXXXXXXXGXXXXXXXXXXDXXXNXXXXLGXXXXXXXXXXXXXXXXXXXXXXXXXRLYXXXHXDHEGGNVSAHTXHLVGSALSXPXLSXXAXXNGLAGPLHGLANQEVLXWXXXXXXXXXXXXXXXXXXXXXYXWXTLXXGXVXPGXGHXVLRKTDPRYXXQRXFAXXXXXXXXXXXXFXLVXXXXXXXPXXLXXXGKXKNPXPNVDXXSGVLXXXYGXXEXXXYTVLFGVSRXXGXXXXLXXDRAXGXPXERPKS

SEQ ID NO: 120945 - protein, 60 aa, Artificial sequence
  protein pattern
  Variant (2)..(2): Xaa in position 2 is any amino acid
  Variant (3)..(3): Xaa in position 3 is any or no amino acid
  Variant (7)..(7): Xaa in position 7 is any amino acid
  Variant (8)..(8): Xaa in position 8 is Ala, Gly, Ser or Thr
  Variant (9)..(9): Xaa in position 9 is Ile or Leu
  Variant (11)..(11): Xaa in position 11 is Ala, Gly, Ser, Thr or Val
  Variant (22)..(22): Xaa in position 22 is Ala or Thr
  Variant (23)..(23): Xaa in position 23 is Gly, Ser, Thr or Val
  Variant (27)..(27): Xaa in position 27 is Ala or Gly
  Variant (32)..(32): Xaa in position 32 is Asp or Ser
  Variant (33)..(33): Xaa in position 33 is Ala or Pro
  Variant (34)..(34): Xaa in position 34 is any amino acid
  Variant (37)..(38): Xaa in position 37 to 38 is any amino acid
  Variant (39)..(39): Xaa in position 39 is Ala or Ser
  Variant (40)..(40): Xaa in position 40 is Ala, Gly or Ser
  Variant (41)..(41): Xaa in position 41 is Ile, Leu or Met
  Variant (42)..(42): Xaa in position 42 is any amino acid
  Variant (48)..(48): Xaa in position 48 is Phe or Leu
  Variant (49)..(49): Xaa in position 49 is Asp or His
  Variant (51)..(51): Xaa in position 51 is any amino acid
  Variant (53)..(53): Xaa in position 53 is Ala or Asn
  Variant (57)..(57): Xaa in position 57 is Leu or Val
  Variant (58)..(58): Xaa in position 58 is any amino acid
  Variant (59)..(59): Xaa in position 59 is Phe or Trp
  Variant (60)..(60): Xaa in position 60 is Ile or Leu
LXXRLYXXXHXDHEGGNVSAHXXHLVXSALSXXXLSXXXXXXGLAGPXXGXAXQEVXXXX

SEQ ID NO: 120946 - protein, 57 aa, Artificial sequence
  protein pattern
  Variant (3)..(3): Xaa in position 3 is Phe, Trp or Tyr
  Variant (8)..(8): Xaa in position 8 is Ala or Ser
  Variant (9)..(9): Xaa in position 9 is any amino acid
  Variant (13)..(13): Xaa in position 13 is Ile or Leu
  Variant (14)..(15): Xaa in position 14 to 15 is any amino acid
  Variant (16)..(16): Xaa in position 16 is His or Tyr
  Variant (17)..(17): Xaa in position 17 is Phe or Tyr
  Variant (18)..(18): Xaa in position 18 is Cys or Gly
  Variant (19)..(19): Xaa in position 19 is Phe, Leu, Met or Val
  Variant (20)..(20): Xaa in position 20 is any amino acid
  Variant (22)..(23): Xaa in position 22 to 23 is any amino acid
  Variant (24)..(24): Xaa in position 24 is any or no amino acid
  Variant (26)..(26): Xaa in position 26 is any or no amino acid
  Variant (28)..(28): Xaa in position 28 is Ala or Val
  Variant (29)..(29): Xaa in position 29 is any amino acid
  Variant (33)..(33): Xaa in position 33 is Ala, Gly or Ser
  Variant (35)..(35): Xaa in position 35 is Ala, Gly, Ser or Thr
  Variant (36)..(36): Xaa in position 36 is Phe, Ile, Leu or Met
  Variant (38)..(39): Xaa in position 38 to 39 is any amino acid
  Variant (40)..(40): Xaa in position 40 is Ala, Pro or Ser
  Variant (41)..(41): Xaa in position 41 is Asn, Gln or Ser
  Variant (42)..(42): Xaa in position 42 is Ile or Leu
  Variant (43)..(44): Xaa in position 43 to 44 is any amino acid
  Variant (45)..(45): Xaa in position 45 is Asp or Ser
  Variant (47)..(47): Xaa in position 47 is Ala or Gly
  Variant (48)..(48): Xaa in position 48 is any amino acid
  Variant (50)..(50): Xaa in position 50 is any amino acid
  Variant (51)..(51): Xaa in position 51 is Ala, Pro or Ser
  Variant (52)..(52): Xaa in position 52 is Ile or Leu
NPXPNVDXXSGVXXXXXXXXEXXXYXTXXFGVXRXXGXXXXXXXXRXXGXXXERPKS

SEQ ID NO: 120947 - protein, 45 aa, Artificial sequence
  protein pattern
  Variant (2)..(4): Xaa in position 2 to 4 is any amino acid
  Variant (5)..(5): Xaa in position 5 is Ile, Leu, Met or Val
  Variant (6)..(6): Xaa in position 6 is Asp or Gly
  Variant (7)..(9): Xaa in position 7 to 9 is any amino acid
  Variant (10)..(10): Xaa in position 10 is Ile, Leu or Val
  Variant (11)..(11): Xaa in position 11 is Ala, Asp, Glu, Asn or Ser
  Variant (12)..(14): Xaa in position 12 to 14 is any amino acid
  Variant (17)..(17): Xaa in position 17 is any amino acid
  Variant (19)..(19): Xaa in position 19 is Asp or Gly
  Variant (20)..(20): Xaa in position 20 is Ile, Leu, Met or Val
  Variant (21)..(21): Xaa in position 21 is any amino acid
  Variant (22)..(22): Xaa in position 22 is Ala, Cys, Gly or Ser
  Variant (23)..(23): Xaa in position 23 is Ile, Leu or Met
  Variant (24)..(24): Xaa in position 24 is Ile, Leu or Val
  Variant (25)..(27): Xaa in position 25 to 27 is any amino acid
  Variant (29)..(29): Xaa in position 29 is any amino acid
  Variant (30)..(30): Xaa in position 30 is Leu or Val
  Variant (32)..(32): Xaa in position 32 is Ala, Pro or Ser
  Variant (33)..(33): Xaa in position 33 is any amino acid
  Variant (39)..(39): Xaa in position 39 is His or Arg
  Variant (41)..(41): Xaa in position 41 is any amino acid
  Variant (42)..(42): Xaa in position 42 is Ser or Thr
  Variant (44)..(44): Xaa in position 44 is any amino acid
  Variant (45)..(45): Xaa in position 45 is Asp or Glu
GXXXXXXXXXXXXXGGXRXXXXXXXXXSXXDXXEGIRFXGXXIXX

SEQ ID NO: 120948 - protein, 21 aa, Artificial sequence
  protein pattern
  Variant (2)..(5): Xaa in position 2 to 5 is any amino acid
  Variant (6)..(8): Xaa in position 6 to 8 is any or no amino acid
  Variant (10)..(10): Xaa in position 10 is Ala, Cys, Ser, Thr or Val
  Variant (11)..(11): Xaa in position 11 is any amino acid
  Variant (12)..(12): Xaa in position 12 is Asp, Glu, Asn, Ser or Thr
  Variant (14)..(14): Xaa in position 14 is Ile, Leu or Val
  Variant (15)..(15): Xaa in position 15 is Ala, Gly or Ser
  Variant (16)..(16): Xaa in position 16 is any amino acid
  Variant (17)..(17): Xaa in position 17 is Ile, Leu or Val
  Variant (19)..(19): Xaa in position 19 is any amino acid
  Variant (20)..(20): Xaa in position 20 is Ile, Leu or Val
  Variant (21)..(21): Xaa in position 21 is Ala, Thr or Val
EXXXXXXXDXXXLXXXXPXXX

SEQ ID NO: 120949 - protein, 32 aa, Artificial sequence
  protein pattern
  Variant (2)..(4): Xaa in position 2 to 4 is any amino acid
  Variant (8)..(8): Xaa in position 8 is Ala, Ser, Thr or Val
  Variant (9)..(9): Xaa in position 9 is any amino acid
  Variant (10)..(10): Xaa in position 10 is Phe or Leu
  Variant (11)..(11): Xaa in position 11 is Ala, Gly, Ser or Thr
  Variant (12)..(12): Xaa in position 12 is any amino acid
  Variant (13)..(13): Xaa in position 13 is Ala or Gly
  Variant (14)..(14): Xaa in position 14 is Ile or Val
  Variant (15)..(15): Xaa in position 15 is any amino acid
  Variant (18)..(18): Xaa in position 18 is Glu, Asn or Gln
  Variant (19)..(19): Xaa in position 19 is any amino acid
  Variant (20)..(20): Xaa in position 20 is Asp, Glu, Gln or Thr
  Variant (22)..(23): Xaa in position 22 to 23 is any amino acid
  Variant (24)..(25): Xaa in position 24 to 25 is any or no amino acid
  Variant (27)..(28): Xaa in position 27 to 28 is any or no amino acid
  Variant (30)..(30): Xaa in position 30 is Ala, Asp, Glu, Gly, Asn or Ser
  Variant (31)..(31): Xaa in position 31 is any amino acid
PXXXHPMXXXXXXXXALXXXSXXXXAXXYXXG

SEQ ID NO: 120950 - protein, 21 aa, Artificial sequence
  protein pattern
  Variant (2)..(2): Xaa in position 2 is any amino acid
  Variant (3)..(3): Xaa in position 3 is Leu or Val
  Variant (6)..(6): Xaa in position 6 is Ala, Gly or Ser
  Variant (7)..(7): Xaa in position 7 is Ile, Leu, Met or Val
  Variant (8)..(8): Xaa in position 8 is Phe or Leu
  Variant (12)..(12): Xaa in position 12 is Ile, Leu or Met
  Variant (15)..(15): Xaa in position 15 is any amino acid
  Variant (16)..(16): Xaa in position 16 is Ile or Val
  Variant (18)..(18): Xaa in position 18 is Asn, Ser or Thr
  Variant (19)..(20): Xaa in position 19 to 20 is any amino acid
  Variant (21)..(21): Xaa in position 21 is Glu or Gln
EXXPEXXXWLLXTGXXPXXXX

SEQ ID NO: 120951 - protein, 25 aa, Artificial sequence
  protein pattern
  Variant (2)..(2): Xaa in position 2 is any amino acid
  Variant (3)..(5): Xaa in position 3 to 5 is any or no amino acid
  Variant (7)..(7): Xaa in position 7 is any amino acid
  Variant (10)..(13): Xaa in position 10 to 13 is any amino acid
  Variant (14)..(14): Xaa in position 14 is Asp, Glu, Lys or Arg
  Variant (15)..(15): Xaa in position 15 is any amino acid
  Variant (16)..(16): Xaa in position 16 is Ala or Val
  Variant (18)..(18): Xaa in position 18 is any amino acid
  Variant (19)..(19): Xaa in position 19 is Ile or Val
  Variant (21)..(23): Xaa in position 21 to 23 is any amino acid
PXXXXFXLVXXXXXXXPXXLXXXGK

SEQ ID NO: 120952 - DNA, 942 bp, Arabidopsis thaliana
  CDS (1)..(942)
atggcgatttcagatcttcctagggatttggtagaggaggtgctctctagagttccggtgacatctctgagaacagtgcgatctacttgcaaaaaatggaacattatatccaaagacgagagctttacaaagaagcacgttggtcaagcaaacgcagcagcaagggaaagtgagtttcaggtggtaataatgacggaatacaaagtttatctaatgagcgtcaatctccatggcattcaaaacaatgttgatccatctatagagtttaaatgtaaacttatcagcctagatgattcagatcgaatagtcgattttcacccagtttatgagactgaaatttacaactttcactctgattcatggaagaatattgttgattccactcctgaaggggatatgcaatattttaaacaaggcgtgtctcttaagggaaatacttactggtttgctagaaagtatgtgatctatgaaggaggacaagaagcatgggttagtttcttgatttgttttgattttacaacagagagatttggaccgcgacttactctgccttttgactattctacaaaggagagtgtgagtctcttgagtgctagagaagagcagcttgtgctgttatatcacccctggtttacaatgatgatggagatatgggttagtaataagattgagctcaatgcggtgtcatggataaagttcttagaggttaacatgataacattccctcattatcggtttagttttcaccatgtgagtttcttcattgacaagaagaataaggttgtagtggttttggataaagacaaagagacgcgttctcgcaacttaggatatttcattggagatgatggatatttcaaagaagtggaactgggaggatctagagacagaaatggttatccatttgtgttctcttatgttccaagttcagtgcaattttag

SEQ ID NO: 120953 - protein, 313 aa, Arabidopsis thaliana
MAISDLPRDLVEEVLSRVPVTSLRTVRSTCKKWNIISKDESFTKKHVGQANAAARESEFQVVIMTEYKVYLMSVNLHGIQNNVDPSIEFKCKLISLDDSDRIVDFHPVYETEIYNFHSDSWKNIVDSTPEGDMQYFKQGVSLKGNTYWFARKYVIYEGGQEAWVSFLICFDFTTERFGPRLTLPFDYSTKESVSLLSAREEQLVLLYHPWFTMMMEIWVSNKIELNAVSWIKFLEVNMITFPHYRFSFHHVSFFIDKKNKVVVVLDKDKETRSRNLGYFIGDDGYFKEVELGGSRDRNGYPFVFSYVPSSVQF

SEQ ID NO: 120954 - DNA, 1083 bp, Arabidopsis thaliana
  CDS (1)..(1083)
atgaggacaatctctgatcttccggtggctttggtagaagagatactctctagggttccattaacatctctgagtgccgtgcgatctacttgtaaaacgtggaacgctttatcaaaaactcagatttttggcaaaacgaggcagcagtttctagggttcatgatgatagattttgggctttattcaataaagttcgatctccaaggactcaattacgaaagcgacttcgttgaaccatctataaagcgagtaagtatacttgaccaactcgatatatttaaagtctttcattgcgaaggcttgttgttatgcgtcttcagaggtaaccgatggcctgtagtgtggaacccttatctggggggaacagggtggattcaacccataagcgatttccacaaatatcaagtatcagacaagtttgctttcggatacgagaacaagaaccacttttttggattttatgatatctacgatcttaactctagtgcatggaaggttcttgatgtcaatcccgattgtgatataaaatgtggcgtgtctttgaaaggaaaaacttacttttttgctaaagaaatagcaaaagctccaaatgtcaaagattttttagtgtgttttgattttactgctgagagatttggaccgcgccttcctctgccgtttcactcttgcggtttgttttcagaacatgtgactttatcttgtgtaagagatgagcacttagctgtcttatatcgacggtacaatggagtaatggagatatatattacaactaagattgagccgaatgaggtattctggagcaatttcttgaaagtggatctcactacttttccggacagattttatggaagtcgatctcactacttcttcattgacgaggagaaaaaagtcgctgtggttttcaagaatgaacctgaatggaccatggattgttcctaccaaacagcttacattattggaaaaggaggatatctcaaatctgtgaaattcggagaaactcctaatgaccggaaacataacaacgcatggaatattaactcgtttatgttatcttcttatgttccaagtttagtgcaactataa

SEQ ID NO: 120955 - protein, 360 aa, Arabidopsis thaliana
MRTISDLPVALVEEILSRVPLTSLSAVRSTCKTWNALSKTQIFGKTRQQFLGFMMIDFGLYSIKFDLQGLNYESDFVEPSIKRVSILDQLDIFKVFHCEGLLLCVFRGNRWPVVWNPYLGGTGWIQPISDFHKYQVSDKFAFGYENKNHFFGFYDIYDLNSSAWKVLDVNPDCDIKCGVSLKGKTYFFAKEIAKAPNVKDFLVCFDFTAERFGPRLPLPFHSCGLFSEHVTLSCVRDEHLAVLYRRYNGVMEIYITTKIEPNEVFWSNFLKVDLTTFPDRFYGSRSHYFFIDEEKKVAVVFKNEPEWTMDCSYQTAYIIGKGGYLKSVKFGETPNDRKHNNAWNINSFMLSSYVPSLVQL

SEQ ID NO: 120956 - DNA, 1113 bp, Arabidopsis thaliana
  CDS (1)..(1113)
atgcaaaaacaatcaacgacgatgctctcggatcttccaaaggatgtggcggaggaggtgctctcgaagtttccagtgacatctctgagaagagtacgattcacatgcaaaaagttgaacactttatccaaagatatgtcttttacaaggaagcacatcgataaagaagaagcaaagaagaagcagagtaaggagtttcatgttgtgatgatgctcgattttagggtttctttattcagtctcaatctactaaaccctaatcccatagagcgtttaggtcaacttgttagcttagacggtggtgcacaagtcgacatatctaacatttttcactgcgagggtttcttgttatgcaccactaaagacatatctagggttgttgtttggaacccttgtgttgggcaaacaatttggatcaaacccagaaactctttcaacaaatgggataggtatgctctgggctacgatgtgatgaagaatcataaagttttgagatttgtggatgacggtgagtatggaaggagacacttactttgtgagtttgaaatctacagttttgagtctgattcatgggaggttcttgatgtgaatccggattgggagatagattttgttcaccgtggtttgtctatcgatggaaacagttactggtttgcacgagacaaggttgttccatatggaggacaagatccttcttatttcttgctgtgttttgatttcacaacggagagatttagaccgcctctgcctctgccatttcagccttactttggtgatactgtggctctatctagcgttggggataaccagattgcggtcttgtgtcagcggtcttcttcgccgtataccttgaagatatggattagcagcaaggttgagcccaatgcagtgtcgtggaacaagttgttcttaaaggttgacatgaaacctctcactggtaattccttctcttattcgggtgggagtttctttgttgacgaggagaagaagatggctgtggttcttgataaaaacataggtggtggatttgacccgactcgcaacatagcttacatcattggaaaggagggctacttcaagaaagttgatcttggcgaatctaggcacctctag

SEQ ID NO: 120957 - protein, 370 aa, Arabidopsis thaliana
MQKQSTTMLSDLPKDVAEEVLSKFPVTSLRRVRFTCKKLNTLSKDMSFTRKHIDKEEAKKKQSKEFHVVMMLDFRVSLFSLNLLNPNPIERLGQLVSLDGGAQVDISNIFHCEGFLLCTTKDISRVVVWNPCVGQTIWIKPRNSFNKWDRYALGYDVMKNHKVLRFVDDGEYGRRHLLCEFEIYSFESDSWEVLDVNPDWEIDFVHRGLSIDGNSYWFARDKVVPYGGQDPSYFLLCFDFTTERFRPPLPLPFQPYFGDTVALSSVGDNQIAVLCQRSSSPYTLKIWISSKVEPNAVSWNKLFLKVDMKPLTGNSFSYSGGSFFVDEEKKMAVVLDKNIGGGFDPTRNIAYIIGKEGYFKKVDLGESRHL

SEQ ID NO: 120958 - DNA, 1275 bp, Arabidopsis thaliana
  CDS (1)..(1275)
atgacgacgatgatctctaatcttccaagggttttgatagaggagattttttttagggttcctttgaaatctttgagagcagtgagattaacttgcaaaagttggaacactctatccaaaagtaggagctttaggaagttgtacattagtaaaagagcaacaagagaagaggagtccatgatgatcgctatgatgaatttcgatctttattcaatgagggtcgtagttgacgacgacgttgatccatctaaagcgtttaaaaaaaaaaggaataaaaaatctatagcgtttaaacgtcaacctattttccttgatgaacaagtcaagatatctcaagtttttcactgtgaaggtttattgttatgcttcttaaaagaagacgatacaagggttgtcgtttggaatccgtattgcggacaaacaaggtggatccaactcagatattctcaccgtccacacaaagacaggttcatttacgctctaggatacaaggataaggaatctcgtggtagcttccaattattgaggtttgtagattatttcctaggagcacccaaaaatcaatatttttggtatgaaatttacgattttaactctgattcatggacaactcttgatgtcactccacactggtgtatatactgttgtgaccgtggtgtttctctcaacggaaacacttactggtgtgctaaagaaaggaaagcagaagacgatattgtcgatcacatcatatcttttgattttacaaacgagagatttgggccgcttttgcctttgccgtctaaggttatggaacatgaatatgaaattgtaactttatcttatgttaaagaagagaagcttgcagctttatttcagcattacgaagcagattggaatgagtttgatatatggattacgactaagattgatgctgaagtggtgtcgtggagcatgttcttgagaatggatacgggacctaggatagaggttccacatatatgtgaaggtttcttcattgatgaggagaagaaagtcgccatgggttttgaagaagacttcgatcgcaaaacatttatcatcattggagaagctggatacgtaagaaaattggatatcaaagcacatgtagacagaaaatgtcggccaactgtgtgttcttatgttccaagtttggtccaaatcaagaaacctgcacgaggcaaaaggaaaagacaaagcagcttagaaaagcgtctatttgatcaaaacatgttgagacttgaagcatttaaaaagctaggcggctacttctag

SEQ ID NO: 120959 - protein, 424 aa, Arabidopsis thaliana
MTTMISNLPRVLIEEIFFRVPLKSLRAVRLTCKSWNTLSKSRSFRKLYISKRATREEESMMIAMMNFDLYSMRVVVDDDVDPSKAFKKKRNKKSIAFKRQPIFLDEQVKISQVFHCEGLLLCFLKEDDTRVVVWNPYCGQTRWIQLRYSHRPHKDRFIYALGYKDKESRGSFQLLRFVDYFLGAPKNQYFWYEIYDFNSDSWTTLDVTPHWCIYCCDRGVSLNGNTYWCAKERKAEDDIVDHIISFDFTNERFGPLLPLPSKVMEHEYEIVTLSYVKEEKLAALFQHYEADWNEFDIWITTKIDAEVVSWSMFLRMDTGPRIEVPHICEGFFIDEEKKVAMGFEEDFDRKTFIIIGEAGYVRKLDIKAHVDRKCRPTVCSYVPSLVQIKKPARGKRKRQSSLEKRLFDQNMLRLEAFKKLGGYF

SEQ ID NO: 120960 - DNA, 1122 bp, Arabidopsis thaliana
  CDS (1)..(1122)
atgacattacaatcttctcccatgtccgttcttaccgaagatttggtagaggatatactctctagggttccagcgacatctctagttcgattacgatctacttgcaaacagtggaacgcaatattaaatgatcgtagattcatcaagaagcactttgatacagcagaaaaggagtatttggatatgttgttaaggagtcttagggtttcttcgatgagtgtcaatctccatggacttcatgacaacattgatccttctatagagctaaagcgtgaacttaacctaaaaggtctcctttgtaattcaggtaaagtcgagagttttgaagtctttcactgtaacgggttattgctattcaccaacactagcactatcgtggtttggaacccttgtacgggtcaaaccaagtggatccaaactgaaagtgctaacactagataccataagtatgctctcggatacgaaaacaaaaatttgtgccgtgattacaaaatcctaaggttcttggatgatggaactaattttgagttggaaatctacgagtttaattcgagttcatggagggttcttgatagtgtcgaaatagacttcgaactagacataggtagccaaggcatgtcagtaaaggggaatacttattggatcgttatagatgatcatgaagtagatggagaattagtcaattgtttcttaacaagttttgattttacaagagaaagatttgggccacatgtgtgccttccgtttcaaactagttggtatagcgatgtgatctcactatcttctgtaagagaagagcggctttcagtcttgtttcatgaagaagattctttaacgatggagatatgggtgacaaatgatatcactgacaccattgtcacgtcttggagcaaatttttaagagttgacttatacactcatcggttttataatggtgtaacttttttcattgacgaggagaataaagccgccgtgtttagtgaggatgtacccgatgatagtgatgacatacacagcattgtatacattattggacaagatagattgagaattgtggatcttgaagatggaccattttggccacaaatgttctgttatgttccaagtttagttcaaatctag

SEQ ID NO: 120961 - protein, 373 aa, Arabidopsis thaliana
MTLQSSPMSVLTEDLVEDILSRVPATSLVRLRSTCKQWNAILNDRRFIKKHFDTAEKEYLDMLLRSLRVSSMSVNLHGLHDNIDPSIELKRELNLKGLLCNSGKVESFEVFHCNGLLLFTNTSTIVVWNPCTGQTKWIQTESANTRYHKYALGYENKNLCRDYKILRFLDDGTNFELEIYEFNSSSWRVLDSVEIDFELDIGSQGMSVKGNTYWIVIDDHEVDGELVNCFLTSFDFTRERFGPHVCLPFQTSWYSDVISLSSVREERLSVLFHEEDSLTMEIWVTNDITDTIVTSWSKFLRVDLYTHRFYNGVTFFIDEENKAAVFSEDVPDDSDDIHSIVYIIGQDRLRIVDLEDGPFWPQMFCYVPSLVQI

SEQ ID NO: 120962 - DNA, 900 bp, Arabidopsis thaliana
  CDS (1)..(900)
atgacgttgccggagcttccaaaggatttagtagaagagatactctgttttgttccggccacatctctgaagcgattacgatccacttgcaaaggatggaatcgtttattcaaagatgacaagagattcgcaagaaagcacattgaaaaagccgcaaagcagtttcaacctctcacgttgaccaagaactacaggatttgtcctataaacgtcaatctccatggaaccactccatctctagaggttaaaaatgaggattctgaaatctacgagtttagctctgactcatggagggttattgatgatattatcaagccaccccactacatggagtactttagaaaatgtttgtctttgaagggaaacacttactggttgggtatagatagaagacgaaggccaccggaccttcgcataaccttgatcaaatttgattttggaacagagaaatttggttatgttcctctgcctcccccctgtcaagtgcatggttttgaggcttctaggctttccgctgtgggagacgagaagctttcactgttactagtgggagattctacatcaaatactgagttatgggtgacaagtaagattggtgaggccaatgtggtgtcgtggagcaaggtgttatcattgtatccaaagcctaacgttggtttttggcatggcctaagtttcttgctagacgaggagaagaaagtcttgttgtgttgtaagagtaagggatggatgaaggaagaagacgaagacaatgtttacattgttggggaggatactaaattcatactactgaattttggagttcagacaattggaggatattcgccaattattgttaattatgttccaagtttgggtcagatcgagctagctggaagcaaaaggaaaagagattactaa

SEQ ID NO: 120963 - protein, 299 aa, Arabidopsis thaliana
MTLPELPKDLVEEILCFVPATSLKRLRSTCKGWNRLFKDDKRFARKHIEKAAKQFQPLTLTKNYRICPINVNLHGTTPSLEVKNEDSEIYEFSSDSWRVIDDIIKPPHYMEYFRKCLSLKGNTYWLGIDRRRRPPDLRITLIKFDFGTEKFGYVPLPPPCQVHGFEASRLSAVGDEKLSLLLVGDSTSNTELWVTSKIGEANVVSWSKVLSLYPKPNVGFWHGLSFLLDEEKKVLLCCKSKGWMKEEDEDNVYIVGEDTKFILLNFGVQTIGGYSPIIVNYVPSLGQIELAGSKRKRDY

SEQ ID NO: 120964 - DNA, 1071 bp, Arabidopsis thaliana
  CDS (1)..(1071)
atgtccgatatctcgcaggatttgttagaggagattctctctagggttccaataacatctctgagagcagtgaaatctacttgcaaacgatggaaggatttattgaatgatccgagcttttcaaagaagtatggtggtaaacgagacaacgagtttctggcgatcatgacgagtggtagtagggcttctttaatgagcgtaaatctccatggacctcgtgacaataaagacttggaagatccttttataaagcaaataggtgaacttaatcaagaccagatatttaaagtgtttcattgtgatggtttattgttatgcatcaccaatgaggataatactaggctcgtggtatggaacccgtatttggcacaaaccaggtgcatccaacccatcgacaaattctacatatatgattggtattgtttgggctacgacaaggacaaaaaccacaaaattttagtggtttattcccctatgtttggccgcattgagtatgaaatctacagttttttgtctaaatcatggatagttcttagtttccctaccgattggcagatatcgcgtgatgaatgtctgtctctgaaaggaaatacttactttattgcttataaaaaaatggaagtggaagaagtagggtttcaagaatttttactctgttttgattttacaaatgagagatttggaccgcttctccctcttccattccaatgttataatcaaacttctctagttctatctactgttcaagaagagcagcttgcagtgttatgtaagaggtgtgatgcatatgagacgaagatatggattacaacaaagattgagcccaatgcagtgtcgtggagctacttcttaaaatttgatttcaaggttgatatatctggtggcagtttcttcgttgacgtggaagagaaagtagcagtgcttttttgtataaacagagaaaaagaaaaaggcatcaacaacaagacatacatgattggagaggatggatactacaaagaagtggatctcggagaatctaactggtgtccatctatgtgctcttatgttccaagttgtgtgcaagtctga

SEQ ID NO: 120965 - protein, 356 aa, Arabidopsis thaliana
MSDISQDLLEEILSRVPITSLRAVKSTCKRWKDLLNDPSFSKKYGGKRDNEFLAIMTSGSRASLMSVNLHGPRDNKDLEDPFIKQIGELNQDQIFKVFHCDGLLLCITNEDNTRLVVWNPYLAQTRCIQPIDKFYIYDWYCLGYDKDKNHKILVVYSPMFGRIEYEIYSFLSKSWIVLSFPTDWQISRDECLSLKGNTYFIAYKKMEVEEVGFQEFLLCFDFTNERFGPLLPLPFQCYNQTSLVLSTVQEEQLAVLCKRCDAYETKIWITTKIEPNAVSWSYFLKFDFKVDISGGSFFVDVEEKVAVLFCINREKEKGINNKTYMIGEDGYYKEVDLGESNWCPSMCSYVPSCVQV

SEQ ID NO: 120966 - DNA, 1113 bp, Arabidopsis thaliana
  CDS (1)..(1113)
atgatgatgtccgatcttccacatgatttggtggaggagattctctctaggcttccgttgatatctttaaaagcaatgcgatctacttgcaaaacctggaacgttctatccaaacatcggagctttgcaaataagcacatcggcaatgtaaccgcatcagggaaaagagatttgataatgattaaagattgtaaggtttattcaattggcgtcaatctccatggtattcagaacaacaacaacattattgatctatctataaagaataaaggtattcttcacctagaaaatttagatctaatattcaaggaaatattcaatgtctttcactgcaacggtttattgttgttatacggaagcatcactgatgatagtattaggcttgtggtttgtaacccgtattgggggaaacgtgaatgggtcaaacgcataaataattttgcaagttttgacaaacttgctttcggatacgacaaatcttgtggttgccacaaaatcttaagggttttcgatagttaccctaatagacttgaaatctacaatttgaggtctaattcacggatggtttctagtttccctcttaaatgggatatagcgtttatgcaagatggcgtgtctttgaagggaaatacttactggtatgctaaagatagaagatcagaagattgttatttaatatgctttgattttactagagagagattcggaccgcgtctgcctctacctcaacccttcatcgatgaatttttggggagtctatatgtggtaagagaagagaagcttgcggtgttagtaaagcggtggcggggtggcaaatctgagatcgatatttgggttacgaacaagattgagcccgatgaagtctcgtggagcaagttcttaaaagttgataacacaccaagattttttctgactgagggatacttgatttatgatgaagagaaagtcgtagtgttttttaataaagaggagacagaggggctcaaatccactgtccacatagcttacatcgttggagagaatggttatttcagaagagcggatctccgtgaacctctatatcaaccactttgccgtcttgtgtgctcttatgtaccaagttctgtgaagtag

SEQ ID NO: 120967 - protein, 370 aa, Arabidopsis thaliana
MMMSDLPHDLVEEILSRLPLISLKAMRSTCKTWNVLSKHRSFANKHIGNVTASGKRDLIMIKDCKVYSIGVNLHGIQNNNNIIDLSIKNKGILHLENLDLIFKEIFNVFHCNGLLLLYGSITDDSIRLVVCNPYWGKREWVKRINNFASFDKLAFGYDKSCGCHKILRVFDSYPNRLEIYNLRSNSRMVSSFPLKWDIAFMQDGVSLKGNTYWYAKDRRSEDCYLICFDFTRERFGPRLPLPQPFIDEFLGSLYVVREEKLAVLVKRWRGGKSEIDIWVTNKIEPDEVSWSKFLKVDNTPRFFLTEGYLIYDEEKVVVFFNKEETEGLKSTVHIAYIVGENGYFRRADLREPLYQPLCRLVCSYVPSSVK

SEQ ID NO: 120968 - DNA, 981 bp, Arabidopsis thaliana
  CDS (1)..(981)
atgacgatgcccgatcttccgccagatttggtcgaggaaatactttctagggttccggcgacatctgtgaaaaagttacgatctacttgcacacaatggaacgctatattcaaagatgaaagattcactgagaagcactttagtaaagcaccaaaggagtctatggttctcatgttgaaggagcatagggtttgcccggacaaaagactcgtggtttggaatccgtgtttgggggaaaccaagtggatccaactcaaagttgattaccggagatacgtctccaagttttgtctagggtatatccaaaacaacgaatctcgccgtagctataaaatcttgcggagttggtatagttacgatgacaaatcatcaccgcgccaaagagatttggggtttgaaatatacgagtttatctctgattcgtcatggagagttcttaatgacggaaatacttacttgcttgcttatgatgttgaagaaaattctagagttgtactaatgtttgattttacaacagagagattcaaacgtctacgccttccgcatttccaagatgttggtaatatggatctatcagttgttagagaagaacaactctcaatattacattggactcgtaatacatcaaagatggagatttggataactaataacattgatactgatgctacattgttgtggagactgcacttacacactcaagtcttctcacgtaattgtgttcgagtcttctcaagtctatatatcgacaaggagaagaaagttgtcttgtgttgtaatgttaatgatgatgcgaccagcaagaacatagtatacattatcggagaggacaatggatattacacagaaatccttttcctactccctataaacatacattgggttctacttgaccgtaataaaaaatggtattcatctattttcaattatgttccgcgtttggttcaaatctataatggtcatctcttatttttttcttaa

SEQ ID NO: 120969 - protein, 326 aa, Arabidopsis thaliana
MTMPDLPPDLVEEILSRVPATSVKKLRSTCTQWNAIFKDERFTEKHFSKAPKESMVLMLKEHRVCPDKRLVVWNPCLGETKWIQLKVDYRRYVSKFCLGYIQNNESRRSYKILRSWYSYDDKSSPRQRDLGFEIYEFISDSSWRVLNDGNTYLLAYDVEENSRVVLMFDFTTERFKRLRLPHFQDVGNMDLSVVREEQLSILHWTRNTSKMEIWITNNIDTDATLLWRLHLHTQVFSRNCVRVFSSLYIDKEKKVVLCCNVNDDATSKNIVYIIGEDNGYYTEILFLLPINIHWVLLDRNKKWYSSIFNYVPRLVQIYNGHLLFFS

SEQ ID NO: 120970 - DNA, 1293 bp, Arabidopsis thaliana
  CDS (1)..(1293)
atgatcaccgatcttccaaaggatttgatagaagaaatcctttcaagggtttccatgacatctatgagagttgtgcgattaacttgcaaaagttggaatactttatccaatagtgagagctttaagaagatgcacattggtaaagttacatcaacgagagaaggagaatctagggtgatcatgttgatagattacaatctttttttgatgagcgctgtcctcatggatgacgttgatccatctatagagtttaaaggtaaacttagttgtcttaaggaacaagtcaagatatctcaagtctttcactgtgagggtttattgttatgcatcttgaaagacgatactaggattgttgtttggaatccgtataggcaggaaacaaggtggatcatacctagatattctcaccgtccatacgtaatgaacaatatcagatatgctcttggatacgagaataataaatctggtcgtagccttaaattattgaggtttatagattattgctacaccgaaaagcacatttgttggcatgaaatctacgattttgactctgatttatggacaactcttgatgtcactccacattggtatatattgtctaattggtcttgtgtccaaggcgtctctctcaaagggaacacttactggtgtgctagagaagaaaactcagatggttacaatcatataatctgttttgattttacaagagagagatttggtccgcttctgcctctaccggttaacgttatagataatgaatatgaatatgtgacttcatcttgtgttagagaagggaagattgcggctttatttcagcacaacgattcatatccatatgagcttgagatatggattacgactaagattgaggcggaaatggtgtcgtggaacaagttcttgagaattgacattgaacctaacaataacataatggttccatttatatatgggggtttcttcattgacgaggagaagaagaaagtcgccttggggtttgatgaagagttcggtcgcaaaacatttaacattattggagaggatggatattttagagaattcgatcgcataacatttaacattattgaagaggctggagaacgtgcaggcgtaaactgtggttcatatgtgtgctcttatgttccaagtttggtccgaattaagaaacctgcacaaggcaaaaggaaaagacaaagcagtttagaaaagcttcgatttgatcaaaacacgtggatatttgacagcatttatcaagccactgccagtcaaatacgtaggaggaggccaacaagatga

SEQ ID NO: 120971 - protein, 430 aa, Arabidopsis thaliana
MITDLPKDLIEEILSRVSMTSMRVVRLTCKSWNTLSNSESFKKMHIGKVTSTREGESRVIMLIDYNLFLMSAVLMDDVDPSIEFKGKLSCLKEQVKISQVFHCEGLLLCILKDDTRIVVWNPYRQETRWIIPRYSHRPYVMNNIRYALGYENNKSGRSLKLLRFIDYCYTEKHICWHEIYDFDSDLWTTLDVTPHWYILSNWSCVQGVSLKGNTYWCAREENSDGYNHIICFDFTRERFGPLLPLPVNVIDNEYEYVTSSCVREGKIAALFQHNDSYPYELEIWITTKIEAEMVSWNKFLRIDIEPNNNIMVPFIYGGFFIDEEKKKVALGFDEEFGRKTFNIIGEDGYFREFDRITFNIIEEAGERAGVNCGSYVCSYVPSLVRIKKPAQGKRKRQSSLEKLRFDQNTWIFDSIYQATASQIRRRRPTR

SEQ ID NO: 120972 - DNA, 1251 bp, Arabidopsis thaliana
  CDS (1)..(1251)
atgactagaaaatatatatatatatatatatatataatattaaaagtgagagcacgggtcggagcaaacaataaaaccctaattaacaatcaaagccacctgatagagatgagaaacacattgatgttgtcggaccttccaggagatttgttagaggagatactttgtcgcgttcctgccacatctctgaagcagttacgatctacttgcaaacaatggaacaatttattcaacaatgggagattcacaagaaaacacttggataaagccccaaaggattttcagaatctcatgttgagcgactctagggtattttcgatgagtgtcagtttccatggaattccatctgtagaggccacatgtgaacttagcctaatcgactctttttctagttttgaagataaattcgagatttctcaagtctttcactgtgacggcttattgttatgcaccgacgcagacaacactagaatcgtggtttggaacccgtgtactggtaaaactaggtggattgaacccaataatcgttgctactactatgcttttggatcctacttggacaaatcctacggtaatagctacaaaatattgagctatagtggttatggctacgagaaccaagaactcgcaatctatgagattaactctcaatcatggaggtttcttgatgtcactcgtgactgcatcctcgaaagatatactgattacggtgtgtctttgaagggacatacttactggtttgcgtcagatgagaaagagaaaaatctcagcgtatttctagtcagttttgattatacaactgaaagatttagacgtctacgtctcccgtatcagtgccctgattataacactgcgtctttatccgttgttagagaagagaaacttgcggtgttgttacaacgcgaaaatacatcaaggacagagatatgggtgacaagtaggattggtgagaccaaagtggtgtcgtggagcatggtcttagcagtggatttcccgtccgaactattcattttgtctggcataagtttcttggtcgatgcggagaaaaaattcgtcgtatgttgtgataattacttcggagaggatgaatacgataccaaaaacttggttcacattgttggagagaacaacaaagtgagagaagttaatttcggagtatccgaatcatcttggccatttttgtttaattatgttccaagtttgattcaaatctgggaaggtgtaggaggcaaaagaaagagagtcgaataa

SEQ ID NO: 120973 - protein, 416 aa, Arabidopsis thaliana
MTRKYIYIYIYIILKVRARVGANNKTLINNQSHLIEMRNTLMLSDLPGDLLEEILCRVPATSLKQLRSTCKQWNNLFNNGRFTRKHLDKAPKDFQNLMLSDSRVFSMSVSFHGIPSVEATCELSLIDSFSSFEDKFEISQVFHCDGLLLCTDADNTRIVVWNPCTGKTRWIEPNNRCYYYAFGSYLDKSYGNSYKILSYSGYGYENQELAIYEINSQSWRFLDVTRDCILERYTDYGVSLKGHTYWFASDEKEKNLSVFLVSFDYTTERFRRLRLPYQCPDYNTASLSVVREEKLAVLLQRENTSRTEIWVTSRIGETKVVSWSMVLAVDFPSELFILSGISFLVDAEKKFVVCCDNYFGEDEYDTKNLVHIVGENNKVREVNFGVSESSWPFLFNYVPSLIQIWEGVGGKRKRVE

SEQ ID NO: 120974 - DNA, 1125 bp, Arabidopsis thaliana
  CDS (1)..(1125)
atgacgatgatgagcgatctttcggaggatttggtagaggagatattgtgtagggtttcgataacttctctaggagcagtgagatccacgtgcaaaggatggtatgttttatccaaaactagggttctatgtaaagcagaaacaaagcatcagtttctagggttcatgaagaagaattataagctttgctcaatgaggtttgatctccatggaaacttcaacgaagaaggaggtgaagaattcatgaatccatcaataaagaagtcaggtaatttacttgatcaacttgatatatgtaaagtttttcaatgcgacgggttattgttatgcgtgaccaaagaggaaaacactaggctcgtggtatggaacccttattcgggtcaaatcaggtggatcaaatgcaataactcttaccacagatacgaaggttatgctatcggatacaacaataaccgtaaacacaaaatcttgaggttttcggatatgtcattttctacttacaaaatctacgattttatctctaattcatggagggttcttgatattgctcccaactggcatataaaccctgatcaacgtggcgcgtctttgaaagggaacacttacttttttgctagggaaaaaagagaggatgaagaggatgaagatattctttggcagccggtagagtatttactctgttttgattttacaacggagaactttggtcagcttcatcctttaccgtttgagcaatatattgacgacgctggagctctctcttcttttggagaggagaaactcgcggcgttatttcagagcttcgctagttcagttgtggagatttgggttacaagtatgattgaggccaatgcagtgtcgtggatccctttcttaaaagttgatatgaaaccacactgtagttttcgttttcgtttgccctttgacggtggcagtttcttcattgacgaggagaagaaagtcgccgtggttattcatgttgatgttgtcgccgaatctgaaatgaaccgctacgaggacgtagcttacatcattggagagaatggctcttatgttccaagtttagcacagatcaaccaaagtgtagaattcgaaaatgaaagagaagaagaggaagcgaactaa

SEQ ID NO: 120975 - protein, 374 aa, Arabidopsis thaliana
MTMMSDLSEDLVEEILCRVSITSLGAVRSTCKGWYVLSKTRVLCKAETKHQFLGFMKKNYKLCSMRFDLHGNFNEEGGEEFMNPSIKKSGNLLDQLDICKVFQCDGLLLCVTKEENTRLVVWNPYSGQIRWIKCNNSYHRYEGYAIGYNNNRKHKILRFSDMSFSTYKIYDFISNSWRVLDIAPNWHINPDQRGASLKGNTYFFAREKREDEEDEDILWQPVEYLLCFDFTTENFGQLHPLPFEQYIDDAGALSSFGEEKLAALFQSFASSVVEIWVTSMIEANAVSWIPFLKVDMKPHCSFRFRLPFDGGSFFIDEEKKVAVVIHVDVVAESEMNRYEDVAYIIGENGSYVPSLAQINQSVEFENEREEEEAN

SEQ ID NO: 120976 - DNA, 1281 bp, Arabidopsis thaliana
  CDS (1)..(1281)
atgacgacgacaatctctcatcttccaacggagttattagatgagataatctctagagtaccattaaagtctacgagagcagtgagattgacttgcaaaaactgggactctttattcaaaaaccggagctttatgaaagaagaagcagcagcaaaggaaggagagtctaggatgatcgtgttgatggataaaaacctgtttgcaatgagcatcttcttcaatggaattgacattgatccatctgcagagcaaagaggtaaacttacttgcctatacgacgattcagaacaagtcaagatatctcaagtctttcactgcgagggtttgttactatgcgtcttggaagacgataagtgtagtcttgttgtttggaatccgtattggggacaaacaaggtggatcgaacctagatatttttcccggatacagaattgttatggcaggtacatgtacgtgtacgctcttggatacaataataagagtcgtagtcacaaaatcttgaggtttatagatggtgcattcgatttccctttttggtatgaaatctacgattttgactctgatttgtggacgactcttgacgttactccacaatggtttataaatttccctccccgtggttgttataaccgtggtgttactctcaagggaaacacttactggtgtgctataagaaggaagtcaaacactaattggtttgttgatcttgatcacataatctgttttgattttacaagtgagagatttggtccgcttatgcctttgccgtttgttagatatacgtccggaagccttgtgactctatcttgtgttagagaagagaagcttgcggttttgttttgtaacaatgctactgttgaggtatggattacgactaagattgagactgacaagatttcgtggagcaagttcttgacagtgaatatgtatgttgaccttctggaagggagttttttcattgacgaggtaaagaaagttgctatgatttttgatataccgatgaatcgcgagacagtttacatcgtgggagaggctggaaacgttaaagaactgcatctaggacaacctgttgatgttgacaaacacttttccccactatttgtgtgctcttatgttccaagtttagtgcaaatcaagcaacctccaggatgccaaaggaaacaagaaagcagtctagaaaaacgtcgatgtgatgatgaaaacatatctagacttattgcacatgaagagacatatgtagtctatgggagatatgtgccatcaaggaaaaaacctagatga

SEQ ID NO: 120977 - protein, 426 aa, Arabidopsis thaliana
MTTTISHLPTELLDEIISRVPLKSTRAVRLTCKNWDSLFKNRSFMKEEAAAKEGESRMIVLMDKNLFAMSIFFNGIDIDPSAEQRGKLTCLYDDSEQVKISQVFHCEGLLLCVLEDDKCSLVVWNPYWGQTRWIEPRYFSRIQNCYGRYMYVYALGYNNKSRSHKILRFIDGAFDFPFWYEIYDFDSDLWTTLDVTPQWFINFPPRGCYNRGVTLKGNTYWCAIRRKSNTNWFVDLDHIICFDFTSERFGPLMPLPFVRYTSGSLVTLSCVREEKLAVLFCNNATVEVWITTKIETDKISWSKFLTVNMYVDLLEGSFFIDEVKKVAMIFDIPMNRETVYIVGEAGNVKELHLGQPVDVDKHFSPLFVCSYVPSLVQIKQPPGCQRKQESSLEKRRCDDENISRLIAHEETYVVYGRYVPSRKKPR

SEQ ID NO: 120978 - DNA, 1038 bp, Arabidopsis thaliana
  CDS (1)..(1038)
atgatgtttgcttatcttccacctgatttagaatcggaaatactctctagggttcctgccacatttctaaaagaattgcaaactacttgcaaacgatggtacgctttatttagagatccgatattcgtcaagaagaacttgggtaaagcagcaacgcatgtgatctttaataatcttggggattattcagtgacagagatgaatactttggttcatagcatcaatctccgtggaatccaaaacagctttgatccatccattggtgttgaacgtaaactttacgagctaaatgatcctgaacatgataagatacttggtattatctctcactgcgatggtttattattgtgcgctaccaaggacaagactagactcgtggtttggaacccttgtactggtcaaaccaggtggatccaaatcaagaatgtgttcaagaacaatccccagcttattctcttggtaattaagtttaaaatctatgagttcaactctgattcatggagaattcttgatgacatctctcctgtttgtttcatacgctcaaatggcgtgaatttgaagggaaatgcttattttgttgcttcagataaagaaagcaaattcatactcaagtttgatttcacaacagagagattcctacgtctatcgtttccttctcagaacgatgatcaaattgcggttctatcagttgttagacaagagaaacttgccttgttacaacaaaggtttgatacatcttcaataaagatgaatatatgggtgaccaaaactaagatcgatgcggacaaagacttgtcttggagcaacttcttagtagtagattttggtaaagttacattaacaagtgagccgttgagtttcttggtggacgaggagaataaaatggtcgtgtgttcttcaaagattcgtcacattgaaaggaagactataatttactttgctaaagagggtatacaagttcatcaagagattgcacagaaaccaaaaggttgttgttcatttctcgtcagttatgttccaagtttggttcaattttag

SEQ ID NO: 120979 - protein, 345 aa, Arabidopsis thaliana
MMFAYLPPDLESEILSRVPATFLKELQTTCKRWYALFRDPIFVKKNLGKAATHVIFNNLGDYSVTEMNTLVHSINLRGIQNSFDPSIGVERKLYELNDPEHDKILGIISHCDGLLLCATKDKTRLVVWNPCTGQTRWIQIKNVFKNNPQLILLVIKFKIYEFNSDSWRILDDISPVCFIRSNGVNLKGNAYFVASDKESKFILKFDFTTERFLRLSFPSQNDDQIAVLSVVRQEKLALLQQRFDTSSIKMNIWVTKTKIDADKDLSWSNFLVVDFGKVTLTSEPLSFLVDEENKMVVCSSKIRHIERKTIIYFAKEGIQVHQEIAQKPKGCCSFLVSYVPSLVQF

SEQ ID NO: 120980 - DNA, 975 bp, Arabidopsis thaliana
  CDS (1)..(975)
atgacgaaaacgacgatgacgaagattcccaatcttccagacgatttggaatcggagatactctctaggattccggcaaagtctctaacgaaattgaaaactacttgtaaaagatggtacgttttattcagagatccgaaattcgcgaagaagaacttgggtaaatcagcgagagaggtgatgttagtgatgaatcaaaggttacactcaattagcgtcaatcgccatggaattcacgagggcgttgatccatccatggagttttcagaaaatcttcgtgtagctgagtttgaaatctttgattttggatctgattgtggaagggttattgatgatgctatcacttggggaatattctctgctggtgtgtctttcaatggtaatacttactggattggtggagagaaagaaactggttttttcttgatggattttgatttcacaacagagaggtttgggcgttttcctcttccgtatcagagttatgattatgaagatatcgcggttctatcggtagttaaggaagaaaaactctccttgatgaatcagaatattcatataaattcttcagagatgaagatatgggtgactaataagtttgatgaagccaaatacttgtcatggagccagttcttagtagtggattttgataaatttacgttaccaaatttgaacagcgtgataactttcttgttggacgaggagaataaagtggcactgtgttgtgatacagacatggaagatgaagagaggaccaaaatctatattgttggagtggatctttgtaaacaagtctttaaagaggttacaaagggatcagttcttaattggccatgtttcgtcagttatgctccaaatttggttcacattcagaaagacactcccaaagttaaaaagaaattgagagcaaaggaggtaagtctaatggatcaccttagtttctttttgcttttccttgtggtcatgtttctttga

SEQ ID NO: 120981 - protein, 324 aa, Arabidopsis thaliana
MTKTTMTKIPNLPDDLESEILSRIPAKSLTKLKTTCKRWYVLFRDPKFAKKNLGKSAREVMLVMNQRLHSISVNRHGIHEGVDPSMEFSENLRVAEFEIFDFGSDCGRVIDDAITWGIFSAGVSFNGNTYWIGGEKETGFFLMDFDFTTERFGRFPLPYQSYDYEDIAVLSVVKEEKLSLMNQNIHINSSEMKIWVTNKFDEAKYLSWSQFLVVDFDKFTLPNLNSVITFLLDEENKVALCCDTDMEDEERTKIYIVGVDLCKQVFKEVTKGSVLNWPCFVSYAPNLVHIQKDTPKVKKKLRAKEVSLMDHLSFFLLFLVVMFL

SEQ ID NO: 120982 - DNA, 1092 bp, Arabidopsis thaliana
  CDS (1)..(1092)
atgctctcggatcttccaaaggatgtggcggaggaggtgctctcgaagtttccagtgacatctctgagaagagtacgattcacatgcaaaaagttgaacactttatccaaagatatgtcttttacaaggaagcacatcgataaagaagaagcaaagaagaagcagagtaaggagtttcatgttgtgatgatgctcgattttagggtttctttattcagtctcaatctactaaaccctaatcccatagagcgtttaggtcaacttgttagcttagacggtggtgcacaagtcgacatatctaacatttttcactgcgagggtttcttgttatgcaccactaaagacatatctagggttgttgtttggaacccttgtgttgggcaaacaatttggatcaaacccagaaactctttcaacaaatgggataggtatgctctgggctacgatgtgatgaagaatcataaagttttgagatttgtggatgacggtgagtatggaaggagacacttactttgtgagtttgaaatctacagttttgagtctgattcatgggaggttcttgatgtgaatccggattgggagatagattttgttcaccgtggtttgtctatcgatggaaacagttactggtttgcacgagacaaggttgttccatatggaggacaagatccttcttatttcttgctgtgttttgatttcacaacggagagatttagaccgcctctgcctctgccatttcagccttactttggtgatactgtggctctatctagcgttggggataaccagattgcggtcttgtgtcagcggtcttcttcgccgtataccttgaagatatggattagcagcaaggttgagcccaatgcagtgtcgtggaacaagttgttcttaaaggttgacatgaaacctctcactggtaattccttctcttattcgggtgggagtttctttgttgacgaggagaagaagatggctgtggttcttgataaaaacataggtggtggatttgacccgactcgcaacatagcttacatcattggaaaggagggctacttcaagaaagttgatcttggcgaatctaggcacctctag

SEQ ID NO: 120983 - protein, 363 aa, Arabidopsis thaliana
MLSDLPKDVAEEVLSKFPVTSLRRVRFTCKKLNTLSKDMSFTRKHIDKEEAKKKQSKEFHVVMMLDFRVSLFSLNLLNPNPIERLGQLVSLDGGAQVDISNIFHCEGFLLCTTKDISRVVVWNPCVGQTIWIKPRNSFNKWDRYALGYDVMKNHKVLRFVDDGEYGRRHLLCEFEIYSFESDSWEVLDVNPDWEIDFVHRGLSIDGNSYWFARDKVVPYGGQDPSYFLLCFDFTTERFRPPLPLPFQPYFGDTVALSSVGDNQIAVLCQRSSSPYTLKIWISSKVEPNAVSWNKLFLKVDMKPLTGNSFSYSGGSFFVDEEKKMAVVLDKNIGGGFDPTRNIAYIIGKEGYFKKVDLGESRHL

SEQ ID NO: 120984 - DNA, 1185 bp, Arabidopsis thaliana
  CDS (1)..(1185)
atggcgataatgtcagatcttccacgggatttgttagcagagattctcagtagggttccattggcatctttaagatcagtgcggttcacttgcaaaaaatggaacgatttatccaaagatcggagctttctcaagaaacaaatcgtcgaagcaaagaagaagcaattgaaatcgaaggagtttgaggtgatcatgatgaggaattttagagtttatctaacgagcgtcgatctccacaacgatgttaatccatcttttacgcctaaaggtacacttactagctttagcgatgatgcaaatcagcatcaagtcgataatgtgtctagtgtctttcactgcgatggtttactcttatgcatcaccaaagacctcaactttaggcttgtggtttggaacccttattttgggcaaacaagatggatccaacccagaaattcttaccacataaaggacatttacgctattgggtacgatgagaataagaaccacaaaatcctgagattgaaggatcagtattacgattatgattcacatccacgggcacggatttgtgagtttgaactctacagttttgagtctaattcatggaaggttgttcttgatgttagtcctgactggtatatacactcttatcaccgtggcttgtctgtaaaggggaatacttactggtatgcaacagagaagcatggctatgttaatttcttgatctgttttgatttcacaactgagaaatttggaccgcgtttgcctctgccttttaacgctaccgagtcttttacttatgatgatgttgttactctctctagtgttggagaagagcagcttgcgctgttgtttcagagtgatgctacattgatgatggagatttgggttacgagcaaggttgaccccacagaggttttgtggaacaaattgttcttagcggttgatcatgatatgatagaattcgactatgagttaaagtttgtggcagacgctgggagtttcttcattgaccagaagaagaatgttgttgtggtttttgataaagatatgaatgagcatacccatcgtggcatggcttacattgttgggaagaacggatacttcaaaagagtggatattggggaagaagcatacacgagttgtttcccacttgtctgttcttatgttccaagctcagtgcaaatcaggcagctaacctga

SEQ ID NO: 120985 - protein, 394 aa, Arabidopsis thaliana
MAIMSDLPRDLLAEILSRVPLASLRSVRFTCKKWNDLSKDRSFLKKQIVEAKKKQLKSKEFEVIMMRNFRVYLTSVDLHNDVNPSFTPKGTLTSFSDDANQHQVDNVSSVFHCDGLLLCITKDLNFRLVVWNPYFGQTRWIQPRNSYHIKDIYAIGYDENKNHKILRLKDQYYDYDSHPRARICEFELYSFESNSWKVVLDVSPDWYIHSYHRGLSVKGNTYWYATEKHGYVNFLICFDFTTEKFGPRLPLPFNATESFTYDDVVTLSSVGEEQLALLFQSDATLMMEIWVTSKVDPTEVLWNKLFLAVDHDMIEFDYELKFVADAGSFFIDQKKNVVVVFDKDMNEHTHRGMAYIVGKNGYFKRVDIGEEAYTSCFPLVCSYVPSSVQIRQLT

SEQ ID NO: 120986 - DNA, 1248 bp, Arabidopsis thaliana
  CDS (1)..(1248)
atgacgacgatgtctaatctccctgcagaggttttggaagagattctctcaaggactccggttacatctctgaggacaatgcgatctacttgcaaaaagtggaacaatctctcaaaaaagaagattattcctgaagctgcaaggaagcagcaaggtttaatgttgattaaaaagaaaatctgttccttgagtttcagtctccatgaaattcacaaggatgactacgtcgttccgtgcattaatcaggtcgatattcctcgcaacatagaagtagagaaaatctttcactgtgacggcatattgttatgcgtcatagaggacaactgtagtcttttggtatggaatccatatctagggcaaacgaggaggatcgaagtaagttccgatgccgacatgaatgataggtatgctcttggttacgacaacaacaacagtagccacaaaatcttgaggattaagaaagattttaagaacagcgacggtttaggatacgaaatctacagattcgcgtcgaattcatggagtttgcttgatgaggaagtgatgaaaccagagtgggatgtatggtctgttcaacgaagctccgtgtctttgaagggaaatacgtatttcttacttcaagggaatgattatgatgaccaagaggacgaagaggaggaagatgacgaagagtacgaagatgacgacgacgtcctgccgaaagataattttttgctctgttttgattatacaacagagagatttggtccgcgtctgcttctaccgtttaaccctcatgttgaagagactgtggctttatcttgtataggagaagagcggctcgtaatgctatatcaaagcttcaagacatataagggaatagagatttgggttacagacaagattgatccgaaagcggtgtcgtggagcaagtttctgaaagtggatatcacaccactcactggttttccggttgacttttacgctgatagtttcgtcattgacgaggagaagaaagttgctgcggttttcgatatacattgtagctaccaaaaagctcacatcattggagaagatggatacctgaaatgtgtgaatatgggaagagcttcggatgttggaaatggtcagccacttgtgttctcttcttatgttccaagtttagtgaaagttcctgtcaagcaaccaaagggtaaaagaaaaggtagatcttctgaaaccaaaagcaacaagaacaaaaaaggaagaaagattaagattattggttaa

SEQ ID NO: 120987 - protein, 415 aa, Arabidopsis thaliana
MTTMSNLPAEVLEEILSRTPVTSLRTMRSTCKKWNNLSKKKIIPEAARKQQGLMLIKKKICSLSFSLHEIHKDDYVVPCINQVDIPRNIEVEKIFHCDGILLCVIEDNCSLLVWNPYLGQTRRIEVSSDADMNDRYALGYDNNNSSHKILRIKKDFKNSDGLGYEIYRFASNSWSLLDEEVMKPEWDVWSVQRSSVSLKGNTYFLLQGNDYDDQEDEEEEDDEEYEDDDDVLPKDNFLLCFDYTTERFGPRLLLPFNPHVEETVALSCIGEERLVMLYQSFKTYKGIEIWVTDKIDPKAVSWSKFLKVDITPLTGFPVDFYADSFVIDEEKKVAAVFDIHCSYQKAHIIGEDGYLKCVNMGRASDVGNGQPLVFSSYVPSLVKVPVKQPKGKRKGRSSETKSNKNKKGRKIKIIG

SEQ ID NO: 120988 - DNA, 1134 bp, Arabidopsis thaliana
  CDS (1)..(1134)
atgacgacgacgacgacgacgacgatgtcaactcttccaatggttttggtagacgagattctctctagggttcccattacatctcttagatcactaagatcaacgtgcaaaagatgggaggctcaatcgaaaaccaatcttgtaggtggtaaagcaaccgcaaggaaaagcagttacttagggtttatcctcattggtaacaagatctgttcaatgaagctcgacctaaatggcggcgatgactttgttgacacatcagtgaatcaaataagtgcattcgatgacttcgagatatctcaactctttcactgcgacggcttattgctttgcgtctccaataaacactactacagcaacacggtcatggtatgtaacatgtacttgggggaaactaggttgattgaacactgttgcttgttggagggattcgacaacttcggctcgtatgctttcggatatgatagcagcaaaaaccgtaaccacaaaatctttagaaagaaacttgtttctggtggttatgaaatctacagtttcaaatccgattcatggaaagatcttaatgttgatctcggggaatctacagaactttgtgaactaggaagcgtgtctttgaagggaaatgcttacttttcggttataacgaaacatgaagaagaagaactttgggaaaataatttactctgttttgacttcacgacggagagttttggaaagtttctgtctctgccgtttgacaatgtgactgctgaagaagaattcggcattatggttttatcttgtgttagagatgagcatcttgctgtgttatatcaacttgacactttaggtatttggatttcgactgagatcgagcccaataaggtgtcgtggagagagtttttgcaagtagacttgtatacgctggatggttttccggatgcatttacagctgggagattcattgttgacgaggagaagcaagtcgttgtagttttcaatgaagctacagagatcgatctcaaccacggaaacgctttcatctttggaagagatggatacttcacctcttttaacgttggagatactccgccccaagacttcacttcttatgttccaagcttagcctcattgcaaatcgagaagacgggtggctaa

SEQ ID NO: 120989 - protein, 377 aa, Arabidopsis thaliana
MTTTTTTTMSTLPMVLVDEILSRVPITSLRSLRSTCKRWEAQSKTNLVGGKATARKSSYLGFILIGNKICSMKLDLNGGDDFVDTSVNQISAFDDFEISQLFHCDGLLLCVSNKHYYSNTVMVCNMYLGETRLIEHCCLLEGFDNFGSYAFGYDSSKNRNHKIFRKKLVSGGYEIYSFKSDSWKDLNVDLGESTELCELGSVSLKGNAYFSVITKHEEEELWENNLLCFDFTTESFGKFLSLPFDNVTAEEEFGIMVLSCVRDEHLAVLYQLDTLGIWISTEIEPNKVSWREFLQVDLYTLDGFPDAFTAGRFIVDEEKQVVVVFNEATEIDLNHGNAFIFGRDGYFTSFNVGDTPPQDFTSYVPSLASLQIEKTGG

SEQ ID NO: 120990 - DNA, 885 bp, Arabidopsis thaliana
  CDS (1)..(885)
atggcgatttcagatcttcctagggatttggtagaggaggtgctctctagagttccggtgacatctctgagaacagtgcgatctacttgcaaaaaatggaacattatatccaaagacgagagctttacaaagaagcacgttggtcaagcaaacgcagcagcaagggaaagtgagtttcaggtggtaataatgacggaatacaaagtttatctaatgagcgtcaatctccatggcattcaaaacaatgttgatccatctatagagtttaaatgtaaacttatcagcctagatgattcagatcgaataggtatatctcaagtccatatctgtcacggggatatgcaatattttaaacaaggcgtgtctcttaagggaaatacttactggtttgctagaaagtatgtgatctatgaaggaggacaagaagcatgggttagtttcttgatttgttttgattttacaacagagagatttggaccgcgacttactctgccttttgactattctacaaaggagagtgtgagtctcttgagtgctagagaagagcagcttgtgctgttatatcacccctggtttacaatgatgatggagatatgggttagtaataagattgagctcaatgcggtgtcatggataaagttcttagaggttaacatgataacattccctcattatcggtttagttttcaccatgtgagtttcttcattgacaagaagaataaggttgtagtggttttggataaagacaaagagacgcgttctcgcaacttaggatatttcattggagatgatggatatttcaaagaagtggaactgggaggatctagagacagaaatggttatccatttgtgttctcttatgttccaagttcagtgcaattttag

SEQ ID NO: 120991 - protein, 294 aa, Arabidopsis thaliana
MAISDLPRDLVEEVLSRVPVTSLRTVRSTCKKWNIISKDESFTKKHVGQANAAARESEFQVVIMTEYKVYLMSVNLHGIQNNVDPSIEFKCKLISLDDSDRIGISQVHICHGDMQYFKQGVSLKGNTYWFARKYVIYEGGQEAWVSFLICFDFTTERFGPRLTLPFDYSTKESVSLLSAREEQLVLLYHPWFTMMMEIWVSNKIELNAVSWIKFLEVNMITFPHYRFSFHHVSFFIDKKNKVVVVLDKDKETRSRNLGYFIGDDGYFKEVELGGSRDRNGYPFVFSYVPSSVQF

SEQ ID NO: 120992 - DNA, 996 bp, Arabidopsis thaliana
  CDS (1)..(996)
atgatgtttgcttatcttccacctgatttagaatcggaaatactctctagggttcctgccacatttctaaaagaattgcaaactacttgcaaacgatggtacgctttatttagagatccgatattcgtcaagaagaacttgggtaaagcagcaacgcatgtgatctttaataatcttggggattattcagtgacagagatgaatactttggttcatagcatcaatctccgtggaatccaaaacagctttgatccatccattggtgttgaacgtaaactttacgagctaaatgatcctgaacatgataagatacttggtattatctctcactgcgatggtttattattgtgcgctaccaaggacaagactagactcgtggtttggaacccttgtactggtcaaaccaggtggatccaaatcaagaatgtgttcaagaacagttatgttttaggatatggaaacaacaacaacaacaacaaatcttgcgataactacaaaattttgacttatgactattttctcagatccccagcttattctcttgataaagaaagcaaattcatactcaagtttgatttcacaacagagagattcctacgtctatcgtttccttctcagaacgatgatcaaattgcggttctatcagttgttagacaagagaaacttgccttgttacaacaaaggtttgatacatcttcaataaagatgaatatatgggtgaccaaaactaagatcgatgcggacaaagacttgtcttggagcaacttcttagtagtagattttggtaaagttacattaacaagtgagccgttgagtttcttggtggacgaggagaataaaatggtcgtgtgttcttcaaagattcgtcacattgaaaggaagactataatttactttgctaaagagggtatacaagttcatcaagagattgcacagaaaccaaaaggttgttgttcatttctcgtcagttatgttccaagtttggttcaattttag

SEQ ID NO: 120993 - protein, 331 aa, Arabidopsis thaliana
MMFAYLPPDLESEILSRVPATFLKELQTTCKRWYALFRDPIFVKKNLGKAATHVIFNNLGDYSVTEMNTLVHSINLRGIQNSFDPSIGVERKLYELNDPEHDKILGIISHCDGLLLCATKDKTRLVVWNPCTGQTRWIQIKNVFKNSYVLGYGNNNNNNKSCDNYKILTYDYFLRSPAYSLDKESKFILKFDFTTERFLRLSFPSQNDDQIAVLSVVRQEKLALLQQRFDTSSIKMNIWVTKTKIDADKDLSWSNFLVVDFGKVTLTSEPLSFLVDEENKMVVCSSKIRHIERKTIIYFAKEGIQVHQEIAQKPKGCCSFLVSYVPSLVQF

SEQ ID NO: 120994 - DNA, 1170 bp, Arabidopsis thaliana
  CDS (1)..(1170)
atgacgaaaatttccgatcttcctcgggatttggcagaggaggtgctctctagggtcccagtgacatacctaagagcaatacgattcacttgcaaaaagtggaacactttaaccaaacgtagaagctttacaaagaagctgattggtcaagaaaaagccgaagcaaaagtgaaagagtttcatgcgatcatgacgttgaattctagacttcatctgatgagcgtcaatctagatggaattcacaaagacgaaaacgttgaatcatctataaagcagaaaggtaaacttattagcctaaccgttgctgatcctgatagaatagttatatctcaagtttatcactgcgatggtttgttgttatgcatcaccaatgaaataaactctaggcttgtagtttggaacccttatagtgggcaaactaggtggatcgaacctagaacttcttaccgcgaatgggacatctacgctctaggatacgagagtaagaacaacgccaaacgaagctacaaaattttgagatatttggatgcttacgaggacatgggcgatatgagtgtagagcctcgaactagagtttgcgagtttgaaatctacagtcttgacactaactcttggaaggtcatcgaggtcactaccgactgggatttatgttttcttcaccgtggcgtgactctcaagggaaatacttattggtttgctcgagagaagatcccaccacccccacgtgaaagagtgatagaagatatcccactagagaaatttggatcgcgtctgcctctgccatttcggccttgtgttgatgataccataactctatctagtgttagagaagagaaacttgcggtgttatatcagcgatgggatataacgtggacggggatatggattagtaataagattgagcctaatgcagtgtcgtggagcaagctattttttccaatgggtaggataagaccactcgaggctgcatctggtactttcttcgttgacgaagagaacaaactcgtggtgctttttgataaaggcgagagtatacttaaccccactcgtaacacagcttacatcgttggagaagatggatacatcaaaccagtggatctcggtgagtctgtacacaaatattgctttccacttgcgtgctcttatgttccaagttctgtgcaaatctag

SEQ ID NO: 120995 - protein, 389 aa, Arabidopsis thaliana
MTKISDLPRDLAEEVLSRVPVTYLRAIRFTCKKWNTLTKRRSFTKKLIGQEKAEAKVKEFHAIMTLNSRLHLMSVNLDGIHKDENVESSIKQKGKLISLTVADPDRIVISQVYHCDGLLLCITNEINSRLVVWNPYSGQTRWIEPRTSYREWDIYALGYESKNNAKRSYKILRYLDAYEDMGDMSVEPRTRVCEFEIYSLDTNSWKVIEVTTDWDLCFLHRGVTLKGNTYWFAREKIPPPPRERVIEDIPLEKFGSRLPLPFRPCVDDTITLSSVREEKLAVLYQRWDITWTGIWISNKIEPNAVSWSKLFFPMGRIRPLEAASGTFFVDEENKLVVLFDKGESILNPTRNTAYIVGEDGYIKPVDLGESVHKYCFPLACSYVPSSVQI

SEQ ID NO: 120996 - DNA, 1125 bp, Arabidopsis thaliana
  CDS (1)..(1125)
atgatgacattacaatcttctcccatgtccgttcttaccgaagatttggtagaggatatactctctagggttccagcgacatctctagttcgattacgatctacttgcaaacagtggaacgcaatattaaatgatcgtagattcatcaagaagcactttgatacagcagaaaaggagtatttggatatgttgttaaggagtcttagggtttcttcgatgagtgtcaatctccatggacttcatgacaacattgatccttctatagagctaaagcgtgaacttaacctaaaaggtctcctttgtaattcaggtaaagtcgagagttttgaagtctttcactgtaacgggttattgctattcaccaacactagcactatcgtggtttggaacccttgtacgggtcaaaccaagtggatccaaactgaaagtgctaacactagataccataagtatgctctcggatacgaaaacaaaaatttgtgccgtgattacaaaatcctaaggttcttggatgatggaactaattttgagttggaaatctacgagtttaattcgagttcatggagggttcttgatagtgtcgaaatagacttcgaactagacataggtagccaaggcatgtcagtaaaggggaatacttattggatcgttatagatgatcatgaagtagatggagaattagtcaattgtttcttaacaagttttgattttacaagagaaagatttgggccacatgtgtgccttccgtttcaaactagttggtatagcgatgtgatctcactatcttctgtaagagaagagcggctttcagtcttgtttcatgaagaagattctttaacgatggagatatgggtgacaaatgatatcactgacaccattgtcacgtcttggagcaaatttttaagagttgacttatacactcatcggttttataatggtgtaacttttttcattgacgaggagaataaagccgccgtgtttagtgaggatgtacccgatgatagtgatgacatacacagcattgtatacattattggacaagatagattgagaattgtggatcttgaagatggaccattttggccacaaatgttctgttatgttccaagtttagttcaaatctag

SEQ ID NO: 120997 - protein, 374 aa, Arabidopsis thaliana
MMTLQSSPMSVLTEDLVEDILSRVPATSLVRLRSTCKQWNAILNDRRFIKKHFDTAEKEYLDMLLRSLRVSSMSVNLHGLHDNIDPSIELKRELNLKGLLCNSGKVESFEVFHCNGLLLFTNTSTIVVWNPCTGQTKWIQTESANTRYHKYALGYENKNLCRDYKILRFLDDGTNFELEIYEFNSSSWRVLDSVEIDFELDIGSQGMSVKGNTYWIVIDDHEVDGELVNCFLTSFDFTRERFGPHVCLPFQTSWYSDVISLSSVREERLSVLFHEEDSLTMEIWVTNDITDTIVTSWSKFLRVDLYTHRFYNGVTFFIDEENKAAVFSEDVPDDSDDIHSIVYIIGQDRLRIVDLEDGPFWPQMFCYVPSLVQI

SEQ ID NO: 120998 - DNA, 936 bp, Arabidopsis thaliana
  CDS (1)..(936)
atgacgttgccggagcttccaaaggatttagtagaagagatactctgttttgttccggccacatctctgaagcgattacgatccacttgcaaaggatggaatcgtttattcaaagatgacaagagattcgcaagaaagcacattgaaaaagccgcaaagcagtttcaacctctcacgttgaccaagaactacaggatttgtcctataaacgtcaatctccatggaaccactccatctctagaggttaaaaatgagtggatcgaactcggcgatcgttacaacgaagacaaggattctgaaatctacgagtttagctctgactcatggagggttattgatgatattatcaagccaccccactacatggagtactttagaaaatgtttgtctttgaagggaaacacttactggttgggtatagatagaagacgaaggccaccggaccttcgcataaccttgatcaaatttgattttggaacagagaaatttggttatgttcctctgcctcccccctgtcaagtgcatggttttgaggcttctaggctttccgctgtgggagacgagaagctttcactgttactagtgggagattctacatcaaatactgagttatgggtgacaagtaagattggtgaggccaatgtggtgtcgtggagcaaggtgttatcattgtatccaaagcctaacgttggtttttggcatggcctaagtttcttgctagacgaggagaagaaagtcttgttgtgttgtaagagtaagggatggatgaaggaagaagacgaagacaatgtttacattgttggggaggatactaaattcatactactgaattttggagttcagacaattggaggatattcgccaattattgttaattatgttccaagtttgggtcagatcgagctagctggaagcaaaaggaaaagagattactaa

SEQ ID NO: 120999 - protein, 311 aa, Arabidopsis thaliana
MTLPELPKDLVEEILCFVPATSLKRLRSTCKGWNRLFKDDKRFARKHIEKAAKQFQPLTLTKNYRICPINVNLHGTTPSLEVKNEWIELGDRYNEDKDSEIYEFSSDSWRVIDDIIKPPHYMEYFRKCLSLKGNTYWLGIDRRRRPPDLRITLIKFDFGTEKFGYVPLPPPCQVHGFEASRLSAVGDEKLSLLLVGDSTSNTELWVTSKIGEANVVSWSKVLSLYPKPNVGFWHGLSFLLDEEKKVLLCCKSKGWMKEEDEDNVYIVGEDTKFILLNFGVQTIGGYSPIIVNYVPSLGQIELAGSKRKRDY

SEQ ID NO: 121000 - DNA, 1149 bp, Arabidopsis thaliana
  CDS (1)..(1149)
atgtacaatcttccaagagatttgccggaggaggtgctctgtagaattccgttgacatctctgaggcctgtccgatctacttgcaaaaagtggagcactttatccaaatgtgggagctttgcaaagaagcaccttgctcaagcaaaagtactagcagacgcaaaggagtttatggtggtcttgatgatgaattttagggtttatttgatgagagtcaatcttcaaaacaacgttgttgaatcatcatcatcatcatcatcatcatcatcatcatgtataaaacgtgaagctaaacttattagcttaggcgatgaagaagctgatatatctcaagtctttcactgtgacggtttattgttatgcatcagcatcaccgaatccaagactaggctcgttgtttggaacccgtattgggggcatacccggttattcgagcccacacatcaattcaacaaattcgatagctattcgtatgctctcggatacgacaagagccgcaaatcccacaaaatcttgaggggtattacttgtttggatcccttcaaaatctacgattttaactctgacttatggagggatcttgatgtaactccggagtggcacttatggcaaatgctccatggcgtgtctctcaagggaaatgcctactggtttgctagagagaattataccgaaacaatggacacagaccattttttcttactctgttttgatttcacaagcgagacatttgggccgcctttgcctcttccgtttgagtttgctgtttctgaagatactatgagtgtatctagtgttagagaagagcagcttgttgtattatatcagccgtgggattatttacagttggacatctgggtgacgtctaagattgagcccaacgctgtgtcgtggaacagcaaggtgttcttatcagtgagtttaaaacaactcgtcagccctcagtttcagttaacttttgggagtttcttcatcgacgaggagaagaaagtcgctgtggtttttgataaagactacgataataagcgcaacatagcttacatctttggagtggatggatcctttaaagcagttgatctcggagattcagaccgaaagtgttttccacttgtgtgctcttatgttccaagtctagtgcaacttaattag

SEQ ID NO: 121001 - protein, 382 aa, Arabidopsis thaliana
MYNLPRDLPEEVLCRIPLTSLRPVRSTCKKWSTLSKCGSFAKKHLAQAKVLADAKEFMVVLMMNFRVYLMRVNLQNNVVESSSSSSSSSSSCIKREAKLISLGDEEADISQVFHCDGLLLCISITESKTRLVVWNPYWGHTRLFEPTHQFNKFDSYSYALGYDKSRKSHKILRGITCLDPFKIYDFNSDLWRDLDVTPEWHLWQMLHGVSLKGNAYWFARENYTETMDTDHFFLLCFDFTSETFGPPLPLPFEFAVSEDTMSVSSVREEQLVVLYQPWDYLQLDIWVTSKIEPNAVSWNSKVFLSVSLKQLVSPQFQLTFGSFFIDEEKKVAVVFDKDYDNKRNIAYIFGVDGSFKAVDLGDSDRKCFPLVCSYVPSLVQLN

SEQ ID NO: 121002 - DNA, 1080 bp, Arabidopsis thaliana
  CDS (1)..(1080)
atgactatgatgtccgatatctcgcaggatttgttagaggagattctctctagggttccaataacatctctgagagcagtgaaatctacttgcaaacgatggaaggatttattgaatgatccgagcttttcaaagaagtatggtggtaaacgagacaacgagtttctggcgatcatgacgagtggtagtagggcttctttaatgagcgtaaatctccatggacctcgtgacaataaagacttggaagatccttttataaagcaaataggtgaacttaatcaagaccagatatttaaagtgtttcattgtgatggtttattgttatgcatcaccaatgaggataatactaggctcgtggtatggaacccgtatttggcacaaaccaggtgcatccaacccatcgacaaattctacatatatgattggtattgtttgggctacgacaaggacaaaaaccacaaaattttagtggtttattcccctatgtttggccgcattgagtatgaaatctacagttttttgtctaaatcatggatagttcttagtttccctaccgattggcagatatcgcgtgatgaatgtctgtctctgaaaggaaatacttactttattgcttataaaaaaatggaagtggaagaagtagggtttcaagaatttttactctgttttgattttacaaatgagagatttggaccgcttctccctcttccattccaatgttataatcaaacttctctagttctatctactgttcaagaagagcagcttgcagtgttatgtaagaggtgtgatgcatatgagacgaagatatggattacaacaaagattgagcccaatgcagtgtcgtggagctacttcttaaaatttgatttcaaggttgatatatctggtggcagtttcttcgttgacgtggaagagaaagtagcagtgcttttttgtataaacagagaaaaagaaaaaggcatcaacaacaagacatacatgattggagaggatggatactacaaagaagtggatctcggagaatctaactggtgtccatctatgtgctcttatgttccaagttgtgtgcaagtctga

SEQ ID NO: 121003 - protein, 359 aa, Arabidopsis thaliana
MTMMSDISQDLLEEILSRVPITSLRAVKSTCKRWKDLLNDPSFSKKYGGKRDNEFLAIMTSGSRASLMSVNLHGPRDNKDLEDPFIKQIGELNQDQIFKVFHCDGLLLCITNEDNTRLVVWNPYLAQTRCIQPIDKFYIYDWYCLGYDKDKNHKILVVYSPMFGRIEYEIYSFLSKSWIVLSFPTDWQISRDECLSLKGNTYFIAYKKMEVEEVGFQEFLLCFDFTNERFGPLLPLPFQCYNQTSLVLSTVQEEQLAVLCKRCDAYETKIWITTKIEPNAVSWSYFLKFDFKVDISGGSFFVDVEEKVAVLFCINREKEKGINNKTYMIGEDGYYKEVDLGESNWCPSMCSYVPSCVQV

SEQ ID NO: 121004 - DNA, 1170 bp, Arabidopsis thaliana
  CDS (1)..(1170)
atgacgatgatgagtgatcttacgcaggatttggtagaggagatactgtctagggttccgataacttctctaggagcagtgagatccacctgcaaaggatggaacgctttatccaaagaacggattctatgtataggagaaccaaaacagcagtttctagggttcatgatgttggattataggctttgctcaatgaggttcaatcttcacggaatcctcaacgaagactttgttagtatatcaatgtatcaagtcgaaacatctcaagtcttttactgcgccggcttattgttatgtgtaacaagggagaagtcatcaaggctcattatttggaacccgtatttaggacaaaccagatggatcaacaccaaaaccacaaaaacaggatacaatacgtatgctcttggatgtgacaacaacaagaatcacaagatattgaaagttttctgtgatgactaccagtgctactacgaaatttacgatgtaaagtctaattcatggagtgcttttaatgtcactgatcccaactggcatatagactatgatatatgcgcattggtaaatggaaatacttactttttgactaaagaaagaatactagtggaagattccgatgaagatgaagatgaagttgaaacccctgaaatcttaatctgttttgattttacggcagagagatttggcaagtttcttcatctaccgtttcagtttgatattgatttcggagataccggaggtctatcttgtgttaaagaagagaaactcgcggtgttacttaaacgctatgatcaaaatgtgatagagatttgggttactactaagattgagcccaatgtggtgttttggaaacccttcttaaaagttgatattgagacagtactcggtgctcttcttgattttcagcttgacagtttcttcattgacgaagagaagaaactcgcggtggtttttagttcaaacaaatcaaaatgctacaaaacagcttacattattggagaagatagatacttgaaagaagtggatcttggagaatgtaaaccattgcgtagcccaattgtgtgttttagctcgtatgttccaagtttagtgcaaatcaaccaaattgcagtacccaaaaggagagagaataagaggaagaggaagagcaaaggaaagggtagagaagtgtga

SEQ ID NO: 121005 - protein, 389 aa, Arabidopsis thaliana
MTMMSDLTQDLVEEILSRVPITSLGAVRSTCKGWNALSKERILCIGEPKQQFLGFMMLDYRLCSMRFNLHGILNEDFVSISMYQVETSQVFYCAGLLLCVTREKSSRLIIWNPYLGQTRWINTKTTKTGYNTYALGCDNNKNHKILKVFCDDYQCYYEIYDVKSNSWSAFNVTDPNWHIDYDICALVNGNTYFLTKERILVEDSDEDEDEVETPEILICFDFTAERFGKFLHLPFQFDIDFGDTGGLSCVKEEKLAVLLKRYDQNVIEIWVTTKIEPNVVFWKPFLKVDIETVLGALLDFQLDSFFIDEEKKLAVVFSSNKSKCYKTAYIIGEDRYLKEVDLGECKPLRSPIVCFSSYVPSLVQINQIAVPKRRENKRKRKSKGKGREV

SEQ ID NO: 121006 - DNA, 1233 bp, Arabidopsis thaliana
  CDS (1)..(1233)
atgactatgatctctgatctttcgaaggatttggtagaggagatactctctaaggctccgataacttctcttggagccgtgagatccactcacaaacaatggaacgccttatccaaaggtcggctgttgtataaagcggaagcgaaggatcagtttctagggttcatggtgatggatcataggtttttatcaatgatattccatctcaatggaattctaaaaggagacggtgaaggctttgatcgtccatctatcagggaggtaggtgatatagttaatcaaatcgacatctctaaagtgtttcaatgcgatggtttagtgttgtgcgttccaagtgacaactctagtgttgtggtttggaatccgtatttgggtcaaaccaagtggatcgaagcaagagaacctcacgacgaatcagacatgtttgctctcggttacgacaaggacaagaaccacaagatcttgaggttgtacgatgagtgttattactactacgaagtttacaatttcaagacagaatcatggggggaagaagatcaccttccaggctgggatatagattcttataaccgcggcgtatccttaaatggaaatacgtacttcttgactcaagagcaaagagcaaaagataagtatcgtgttttcttgctttgttttaacttcacaacggagaagtttgaaaattttattgctatgccgtttaagtatcataggaaatacgttggaacactttcttgtgttggaaatgaaaaactagcggctctatatcagcgctgggatacaggcgagatggccatatgggtaaccactaagattgagtccaatgaggtgttgtggagcaacttgtttaaagttgatatgaaaccactcgttaggtttggctttcaacaatgtaaagatgaagctggcagttttttcattgacgaagagaagaaactcgcggtggtttttaatctagataaaaaacgtggtaaaaggaataacaagacacgttgttaccacacagcttacattattggagagaagggatacttgaaaaaagaggttcttggagaagctgtggaggtccgaaaagacgtgtatcggagcgcacttgtgtgttctagctcttatgttccaagtttagagaagatcaaccaaattgaagaggaagaggaagataagtgcaaatcaatcaaaatggtggacacaaaaaggcaacgtaagaagaggaagaggaagagcaaaaggtaa

SEQ ID NO: 121007 - protein, 410 aa, Arabidopsis thaliana
MTMISDLSKDLVEEILSKAPITSLGAVRSTHKQWNALSKGRLLYKAEAKDQFLGFMVMDHRFLSMIFHLNGILKGDGEGFDRPSIREVGDIVNQIDISKVFQCDGLVLCVPSDNSSVVVWNPYLGQTKWIEAREPHDESDMFALGYDKDKNHKILRLYDECYYYYEVYNFKTESWGEEDHLPGWDIDSYNRGVSLNGNTYFLTQEQRAKDKYRVFLLCFNFTTEKFENFIAMPFKYHRKYVGTLSCVGNEKLAALYQRWDTGEMAIWVTTKIESNEVLWSNLFKVDMKPLVRFGFQQCKDEAGSFFIDEEKKLAVVFNLDKKRGKRNNKTRCYHTAYIIGEKGYLKKEVLGEAVEVRKDVYRSALVCSSSYVPSLEKINQIEEEEEDKCKSIKMVDTKRQRKKRKRKSKR

SEQ ID NO: 121008 - DNA, 1209 bp, Arabidopsis thaliana
  CDS (1)..(1209)
atgacgatgatgagtgatctttcgcaggatttgttagaggagatattgtctagggttccgagaacttctctaggagcagtacgatccacttgcaaacggtggaacactttattcaaagatcgaattctatgtaaagcagaagaaacaagggatcagtttcggttcataatgaagaagtataagctttgttcaatgaggtttgatctcaacggaaccttaaacgaagatggaggtaccgaattcgtggatccatctataaaggagttaggtcatttttttaatcaagtcaagatatctaaagtttttcaatgcgacgggttattgttgtgcgtgaccaaagaggacaacattaggctcgtggtatggaatccttatttgggtcaaatcaggtggatcgaatccggtaacactaattaccgcctattcgacaggtatgctatcggatacgacaataaccgtaaacacaaaatcttgaggtttctggaatattacaactttaacatgaagcacagatttcttgagtacgaaatctacgattttagctctaattcatggagggttcttgatatcgctccccgttgggaaatagagtcttatcaacgtggagcgtctttgaaaggaaacacttactttattgccaaggaaaaaatagaatacgaagaggatggagagtttccagagccggcagataatttactctgttttgattttacgacggagagctttggacagtttcttcctctgccgtttcagcactatctttacgatgttggagctctctcttctcttggagatgagaaacttgcggcgttatttcagtgcggggataccgatttatcagaggtggagatttgggttacaactttgactgagaccaatacagtgtcatggaatcctttcttaaaagttgatatggaaccacactacggtcgtagttttatgtttgactattacggtggcagtttcttcattgacgaggagaagaaactcgctgttgtttttcagtttgacgaatctggaatgacccgctacgaggacgcaacttacatcattggagagaatggctacgttaaaaaagtgcgtcttggagaagctcctgcgaatcaaggaggatattgtttcccatctgtgtgttttagctcttatgttccaagtttagtacagatcaaccaaattgtaggattcaaaaaagaaagagaagaagagtaa

SEQ ID NO: 121009 - protein, 402 aa, Arabidopsis thaliana
MTMMSDLSQDLLEEILSRVPRTSLGAVRSTCKRWNTLFKDRILCKAEETRDQFRFIMKKYKLCSMRFDLNGTLNEDGGTEFVDPSIKELGHFFNQVKISKVFQCDGLLLCVTKEDNIRLVVWNPYLGQIRWIESGNTNYRLFDRYAIGYDNNRKHKILRFLEYYNFNMKHRFLEYEIYDFSSNSWRVLDIAPRWEIESYQRGASLKGNTYFIAKEKIEYEEDGEFPEPADNLLCFDFTTESFGQFLPLPFQHYLYDVGALSSLGDEKLAALFQCGDTDLSEVEIWVTTLTETNTVSWNPFLKVDMEPHYGRSFMFDYYGGSFFIDEEKKLAVVFQFDESGMTRYEDATYIIGENGYVKKVRLGEAPANQGGYCFPSVCFSSYVPSLVQINQIVGFKKEREEE

SEQ ID NO: 121010 - DNA, 1287 bp, Arabidopsis thaliana
  CDS (1)..(1287)
atgactatgacgacgacaatctctcatcttccaacggagttattagatgagataatctctagagtaccattaaagtctacgagagcagtgagattgacttgcaaaaactgggactctttattcaaaaaccggagctttatgaaagaagaagcagcagcaaaggaaggagagtctaggatgatcgtgttgatggataaaaacctgtttgcaatgagcatcttcttcaatggaattgacattgatccatctgcagagcaaagaggtaaacttacttgcctatacgacgattcagaacaagtcaagatatctcaagtctttcactgcgagggtttgttactatgcgtcttggaagacgataagtgtagtcttgttgtttggaatccgtattggggacaaacaaggtggatcgaacctagatatttttcccggatacagaattgttatggcaggtacatgtacgtgtacgctcttggatacaataataagagtcgtagtcacaaaatcttgaggtttatagatggtgcattcgatttccctttttggtatgaaatctacgattttgactctgatttgtggacgactcttgacgttactccacaatggtttataaatttccctccccgtggttgttataaccgtggtgttactctcaagggaaacacttactggtgtgctataagaaggaagtcaaacactaattggtttgttgatcttgatcacataatctgttttgattttacaagtgagagatttggtccgcttatgcctttgccgtttgttagatatacgtccggaagccttgtgactctatcttgtgttagagaagagaagcttgcggttttgttttgtaacaatgctactgttgaggtatggattacgactaagattgagactgacaagatttcgtggagcaagttcttgacagtgaatatgtatgttgaccttctggaagggagttttttcattgacgaggtaaagaaagttgctatgatttttgatataccgatgaatcgcgagacagtttacatcgtgggagaggctggaaacgttaaagaactgcatctaggacaacctgttgatgttgacaaacacttttccccactatttgtgtgctcttatgttccaagtttagtgcaaatcaagcaacctccaggatgccaaaggaaacaagaaagcagtctagaaaaacgtcgatgtgatgatgaaaacatatctagacttattgcacatgaagagacatatgtagtctatgggagatatgtgccatcaaggaaaaaacctagatga

SEQ ID NO: 121011 - protein, 428 aa, Arabidopsis thaliana
MTMTTTISHLPTELLDEIISRVPLKSTRAVRLTCKNWDSLFKNRSFMKEEAAAKEGESRMIVLMDKNLFAMSIFFNGIDIDPSAEQRGKLTCLYDDSEQVKISQVFHCEGLLLCVLEDDKCSLVVWNPYWGQTRWIEPRYFSRIQNCYGRYMYVYALGYNNKSRSHKILRFIDGAFDFPFWYEIYDFDSDLWTTLDVTPQWFINFPPRGCYNRGVTLKGNTYWCAIRRKSNTNWFVDLDHIICFDFTSERFGPLMPLPFVRYTSGSLVTLSCVREEKLAVLFCNNATVEVWITTKIETDKISWSKFLTVNMYVDLLEGSFFIDEVKKVAMIFDIPMNRETVYIVGEAGNVKELHLGQPVDVDKHFSPLFVCSYVPSLVQIKQPPGCQRKQESSLEKRRCDDENISRLIAHEETYVVYGRYVPSRKKPR

SEQ ID NO: 121012 - DNA, 1239 bp, Arabidopsis thaliana
  CDS (1)..(1239)
atgcccttagaagagatactctcaagacttccattgaagtctacgagagcagtgagatcgacttgcaaaaagtgggactctttattcaaaaatcggagctttattagtaaagcagcagcagcaagagaaggagagtctcagatggtcgtgttgatggatcacaatcttcatttagtgagcttcttcttcggcagtgatacttctgtagagattaaaggtaaacgtatttgtctaaacgacgattcagattcagaacaagtcaagatatctcaagtttttcactgtgagggtttgttgttatgtatcttgaaagatgataactttagtcttgttgtttggaacccgtattggggacaaacaaggtggatcaaacccagatgttctttcgaaataccccagggatgtgacatgtacaggtacgctattggatacgacaacaagagacgcaaccacaagatcttgaggtttatagattatgaattccattaccctcgagacaacgttgttttgtggtatgaaatctatgattttgagtctgatttatggacgactcttgatgttactactccacattggttgataaattgtggtaaccgtggtgttactctcaagggaaacacttactggtgtgctaaaaaaaggaactctgacctttttctcaatgctgatcatataatctgttttgatttcacaagtgagaggtttggtccgcttctgcttttgccgtttagtgatttggatggtgttgttactctagcttgtgttagagaggagaagcttgcggctttagtttgtcacgaggatgttgttgaggtttggattacgattaagattgaggccaatgaggtattgtggagcaagttcttgacagtgaatgttgatttgggtgatgagattccgagttcactgacatatggtagttttttcatcgacgaggagaagaaagttgctatgatttttgataaaactttggatcgcggcgacacagttcacatcatgggagaggctggatatggtggacaagttgatctcggagaaccggttaataaaagacgttgcccacttgtgtgctcttatgttccgagtttagtgcaaatcaagaaacctgcaggattccaaaggaaacagcaaagcaagttagaaaagcgtcaatatgttcgaaacatatcgaaacttcgcgcacttaaaacccaaagttcttggacattaagtatgtcacttgaatgtcatcaacagtaa

SEQ ID NO: 121013 - protein, 412 aa, Arabidopsis thaliana
MPLEEILSRLPLKSTRAVRSTCKKWDSLFKNRSFISKAAAAREGESQMVVLMDHNLHLVSFFFGSDTSVEIKGKRICLNDDSDSEQVKISQVFHCEGLLLCILKDDNFSLVVWNPYWGQTRWIKPRCSFEIPQGCDMYRYAIGYDNKRRNHKILRFIDYEFHYPRDNVVLWYEIYDFESDLWTTLDVTTPHWLINCGNRGVTLKGNTYWCAKKRNSDLFLNADHIICFDFTSERFGPLLLLPFSDLDGVVTLACVREEKLAALVCHEDVVEVWITIKIEANEVLWSKFLTVNVDLGDEIPSSLTYGSFFIDEEKKVAMIFDKTLDRGDTVHIMGEAGYGGQVDLGEPVNKRRCPLVCSYVPSLVQIKKPAGFQRKQQSKLEKRQYVRNISKLRALKTQSSWTLSMSLECHQQ

SEQ ID NO: 121014 - DNA, 1089 bp, Arabidopsis thaliana
  CDS (1)..(1089)
atggagtggagaagccttccggtggaattgcaagaagagatactttctagggttccggctaaatatttggcacgattgcgatcaacatcgaaacaatggaacgctctatcgaaaactgggagttttgctaagaagcactctgctaatgcaacaaaggagcctctgattatcatgttgaaggattctagggtttacttagcaagtgtcaatctccatggagttcacaacaacgttgctcaatcttttgagttaggatctcgattgtaccttaaagatccgcacatttctaacgtctttcactgtgatggcttgttattgctctgctccattaaggagaatacactcgaggtttggaatccatgttcaggagaagccaagttaattaaacctagacacagctactacaaggaatcagacttttatgctcttggttatgacaacaaatcctcctgcaagaaatacaaagtcttgagggtgattagtcaagtccatgttcaaggtgacttcaagattgagtacgaaatctatgacttcaccaatgattcttggagggttcatggtgcgactaccgaactgtctataagacaaaagcatcccgtgtctgtgaaaggaagtacttattgggttgttcgtaataggtattttccatataaatacttcctaagttttgatttttcaaccgagagatttcaaagtctgtctcttcctcagccgtttccttatctggttacggatttatcagtggttagagaagagcaactctgtctgtttggttattataattggtcaacaacttcagaagacttaaatgtatgggtgacaactagtctcggatcagtcgtgtcatggagcaagttcttaacaatacaaatcattaagccgagagtggatatgtttgattatgggatgagtttcttggtcgacgagcaaaacaaatctttagtgtgttggatctcccaaaaagtcttacacattgtgggagaaatttatcacatacaagatttggatgatcatggtagagattctgcgttaagatcatcatgctcagttcttatgaattatgttccaagtttagcccaaatccaataa

SEQ ID NO: 121015 - protein, 362 aa, Arabidopsis thaliana
MEWRSLPVELQEEILSRVPAKYLARLRSTSKQWNALSKTGSFAKKHSANATKEPLIIMLKDSRVYLASVNLHGVHNNVAQSFELGSRLYLKDPHISNVFHCDGLLLLCSIKENTLEVWNPCSGEAKLIKPRHSYYKESDFYALGYDNKSSCKKYKVLRVISQVHVQGDFKIEYEIYDFTNDSWRVHGATTELSIRQKHPVSVKGSTYWVVRNRYFPYKYFLSFDFSTERFQSLSLPQPFPYLVTDLSVVREEQLCLFGYYNWSTTSEDLNVWVTTSLGSVVSWSKFLTIQIIKPRVDMFDYGMSFLVDEQNKSLVCWISQKVLHIVGEIYHIQDLDDHGRDSALRSSCSVLMNYVPSLAQIQ

SEQ ID NO: 121016 - DNA, 1137 bp, Arabidopsis thaliana
  CDS (1)..(1137)
atgacgaagatgtctaatctccctaatgatttggcggaagaggtgctctctagggtttcgttaacatctctgagaaacgtccgacttacttgtaaagattggaatactttatctaaaggtgagagctttgcaaagaatcaccttggttatcaagcaatagtagcagcgaaggaaaaagagtttatgatggtcctgatgatggattttagggtttatttgattcgagtcaacgttcacaatgacattgagtcgtgtattaagcctgaaggtgagcttattagcttgggcgatgaagtcgatgtatctcaagtctttcactgcgacggtttattgctatgcatcacggaagataacgaagataacgctaaggtcgttctttggaacccgtattgggggcaaacacggtggatcgagtctacaaataatttccacaaattggacatgtatacgtatgctctcggatacaagaagagcagcaaatcaagccgcagctacaaaatcttgagatttattgatttttctcccacttgttctgagttcaaaatctacaatatcaactctgattcatggaaggttcttgatgtgtctccagactggaagatagattcttatattcgtggcgtgtctctcaagggaaatacatactggattgctagagagaggcacggatacggccatactttcttagtctgttttgatttcacaagagagagatttaggtcgcgtttacctctgccgagtcagccgtgtgttttagataccgtgagtctatctagtgttagagaagagcagcttgctgttttatttcagtgctcaagtacattggagatgcagatctgggtaacaaccaaaattgagcccaatgcggtgttgtggaacagcaaggtgttcttagctgtggatatgcactcacttaagtttcagtttcaagttagagcttcgagtttctttatcgacgaggagaagagagttgttgttgtttttgataaagaaaaacgttatttagcgtcctctcgcaacaaagcttacatcgttggagtggatggaacctgggaacaagtggaccttggaatgtctgtagacaaatttgtttacccacttgtgtgctcttatgttccaagtttagtgcatttttga

SEQ ID NO: 121017 - protein, 378 aa, Arabidopsis thaliana
MTKMSNLPNDLAEEVLSRVSLTSLRNVRLTCKDWNTLSKGESFAKNHLGYQAIVAAKEKEFMMVLMMDFRVYLIRVNVHNDIESCIKPEGELISLGDEVDVSQVFHCDGLLLCITEDNEDNAKVVLWNPYWGQTRWIESTNNFHKLDMYTYALGYKKSSKSSRSYKILRFIDFSPTCSEFKIYNINSDSWKVLDVSPDWKIDSYIRGVSLKGNTYWIARERHGYGHTFLVCFDFTRERFRSRLPLPSQPCVLDTVSLSSVREEQLAVLFQCSSTLEMQIWVTTKIEPNAVLWNSKVFLAVDMHSLKFQFQVRASSFFIDEEKRVVVVFDKEKRYLASSRNKAYIVGVDGTWEQVDLGMSVDKFVYPLVCSYVPSLVHF

SEQ ID NO: 121018 - DNA, 1167 bp, Arabidopsis thaliana
  CDS (1)..(1167)
atgacgacaatttccgatctatcagatgatttggtaggtgatattctttctagggttccatttacatctctaatctcagtgcgatctacttgtaaaaagtggaatgctttatcgaaaaatcagatctttggtagaaaaacagcagcaaggaatcaatttctagagttcatgattctagattctagagtttgttctttgagattagatcttcaaggaatccgtaacgaagacaaagaagacttcgttgatccatctatgaagctaataagtatacctagtaatgatgatcaagtcgagatatctcaagtctatcattgcgatggcttattgttatgcatcgccaaagagaactcgaatgtctttgtgtggaatccgtatttggggcaaacgaaatggattcgaccaagaaacacattccacagatatgacaggtttgctcttggatacgacaacaaccgtaaccacaaaatcttgaggtttctctatgatgaagagagcaacgaaagcagtcgaagaactcacattgatgtatacgattttagctctgattcatggagggttcttgatgtcaatcctgactgtgatataccgttttatcagaccggagtgtctttgaagggaaatacttacttcttcggtcaagaagtgacacaagcgacgaaagtaacagagattgaaacttgtttactctgttttgattttacaacagagagatttggaccgtgtttgcctctgctgttttaccctccctgtcctagttttgaaactgtgactctatcttgggttagagatgagaagctcgctgtgttatacaaccactacgtcacagctgagattatagagattaggatttcgactaagattgaacccaatgcggtatcctggagctcttttttgactgtggatatgtcactagtcaatggtttaccggatcatttttcgatgtactttgaagctaagagcttcttcattgacgaggagaagaaagttgttgtgctttttgatagtaaagagatcaagacctgtcgctaccaaatggcttacatcgttggagatgatggatacttcaaatctgtcaacattggagtaagtccgaattcccagcggaaaccaggcagacttgtgtgctcttcttatgttccaagtttagttcaactgcaagattag

SEQ ID NO: 121019 - protein, 388 aa, Arabidopsis thaliana
MTTISDLSDDLVGDILSRVPFTSLISVRSTCKKWNALSKNQIFGRKTAARNQFLEFMILDSRVCSLRLDLQGIRNEDKEDFVDPSMKLISIPSNDDQVEISQVYHCDGLLLCIAKENSNVFVWNPYLGQTKWIRPRNTFHRYDRFALGYDNNRNHKILRFLYDEESNESSRRTHIDVYDFSSDSWRVLDVNPDCDIPFYQTGVSLKGNTYFFGQEVTQATKVTEIETCLLCFDFTTERFGPCLPLLFYPPCPSFETVTLSWVRDEKLAVLYNHYVTAEIIEIRISTKIEPNAVSWSSFLTVDMSLVNGLPDHFSMYFEAKSFFIDEEKKVVVLFDSKEIKTCRYQMAYIVGDDGYFKSVNIGVSPNSQRKPGRLVCSSYVPSLVQLQD

SEQ ID NO: 121020 - DNA, 1167 bp, Arabidopsis thaliana
  CDS (1)..(1167)
atgacgacaatttccgatctaccatatgatttggtaaaagagatattttcttgggttccatttacatctcttagagcagtgcgatctacttgtaaaacgtggaacgctttatcgaaaaatcagatctttggtaaaaaatcagtagcaaggaatcagtttctagagttaatgattctagattctagggtttgttccttgagattcgatctccaaaaaatccgtaacgaagacgaagaagacttggttgatccatctatgaaacaaataagcatacctaataatgatgatcaagtcgagatatctcgagtctatcactgcgatggcttattgttatgcatccccaaagataactcgagtcttatgttatggaatccgtatttggggcaaaccaaacggattcgacccaaaaacacattccacagagatgacagctttgctctgggatacaacaaccgtaaccacaaaatcttgaggttgaacgaggaaaacgaaagtcatattgatgtctacgattttagctctgattcatggaggacggttcctgatgataatccctatagggatgaactcatttatcaaagtggcgtgtctttgaagggaaatgcttactttttcgatcgagaggtaacgacagaggcagaagtggggacagaagacttgttgataacaggcattgaagattatttacgctgttttgatttcacaaccgagagatttggaccgcgtttgcctcttccgtttatccttccctctcctagttttgaatatttggctctatcttgggctagagatgataagctcgctgtgttatatagccactacgacacatttgacatcatagagatttggatttcgactaagattgagcccaatgcggtttcgtggagcacttttttgaaagtggatatgtcactaatcaatggtttaacggatgattttttgattagatttgaacctaaaagcttttttatcgacgaggagaagaaagtcgctgtactttttgatactaaagtgacagagacctgtcgctaccaaatggcttacatcgttggagatgatggatacttcaaatctgtcaacattggagtaatctcgaattcccattggataggaggcgaacttgtgcgctcttcttatgttccaagtttattgcaactgcaagtttag

SEQ ID NO: 121021 - protein, 388 aa, Arabidopsis thaliana
MTTISDLPYDLVKEIFSWVPFTSLRAVRSTCKTWNALSKNQIFGKKSVARNQFLELMILDSRVCSLRFDLQKIRNEDEEDLVDPSMKQISIPNNDDQVEISRVYHCDGLLLCIPKDNSSLMLWNPYLGQTKRIRPKNTFHRDDSFALGYNNRNHKILRLNEENESHIDVYDFSSDSWRTVPDDNPYRDELIYQSGVSLKGNAYFFDREVTTEAEVGTEDLLITGIEDYLRCFDFTTERFGPRLPLPFILPSPSFEYLALSWARDDKLAVLYSHYDTFDIIEIWISTKIEPNAVSWSTFLKVDMSLINGLTDDFLIRFEPKSFFIDEEKKVAVLFDTKVTETCRYQMAYIVGDDGYFKSVNIGVISNSHWIGGELVRSSYVPSLLQLQV

SEQ ID NO: 121022 - DNA, 1056 bp, Arabidopsis thaliana
  CDS (1)..(1056)
atgacaacgatttgcgatcttccacgggatttggtagcgaggatactgtctagggttccattgacatctatgagaagagtgcgattcacatgcaaaaggtggaacactatatccaaagatccgagctttgcgaagacgcactttggtaaagcggcgagacagtttattatgatgtctcaatcgagggtttcgttgatgagcgtaaaactccatggagacggtaacgaggacgagttggccgatccatatatatatgaagggtatagattagacgtgtatgctctaggatacgacaaaaacttgaaaaaccataaaatcttgaggtttgtggatagttacgaacctgctgtgaagcattctattatagaacacgaaatttttgatttgaagtctaatgcatggagggttcttgatgccactcctgactgggagatagattcttatcaacgtggcgtgtctttgaaaggaaatacttacttttttgctaaagagaaaatagtggtggaaggggatgatgttgtagtgattgaagatttcaaagattttttgatctgttttgattttacaagtgagagatttaatttggaccacgtctgcctctaccgtttcactcttacaatggagagacctgttagagaagagcagctagcagtgttatatcagcaggatacttgtttgatggagatatgggttacgaataagattgaaccggatgtggtgtcatggagcaaggtgtttttagcagtggatatggaaccactcactggttcttttatcccgtttgcttttttcgctgggagtttcttcattgacgaggagaaaaaaatcgctgtggtattcgataaagaccaagaggagatcaacgacagagcttacctgattggagagaatggatactacaaagaagtggatcttggatacatgaatggatactaccaacaacaagtagatcctaggggacctgatccagttttccctctcgtgtgctcgtattctccgagtttggtgacgatcccacaaggaacacgaggcaaaaggaaagaacgagattattag

SEQ ID NO: 121023 - protein, 351 aa, Arabidopsis thaliana
MTTICDLPRDLVARILSRVPLTSMRRVRFTCKRWNTISKDPSFAKTHFGKAARQFIMMSQSRVSLMSVKLHGDGNEDELADPYIYEGYRLDVYALGYDKNLKNHKILRFVDSYEPAVKHSIIEHEIFDLKSNAWRVLDATPDWEIDSYQRGVSLKGNTYFFAKEKIVVEGDDVVVIEDFKDFLICFDFTSERFNLDHVCLYRFTLTMERPVREEQLAVLYQQDTCLMEIWVTNKIEPDVVSWSKVFLAVDMEPLTGSFIPFAFFAGSFFIDEEKKIAVVFDKDQEEINDRAYLIGENGYYKEVDLGYMNGYYQQQVDPRGPDPVFPLVCSYSPSLVTIPQGTRGKRKERDY

SEQ ID NO: 121024 - DNA, 1062 bp, Arabidopsis thaliana
  CDS (1)..(1062)
atggagatactcgcgagggttccgaccgtaactttggtccgattacaatctacatccaaaagatggaacgttctgatcgaagataagagatttgctgagcagcactttactaatgcaccaaggcactctctgcttatcatgttgatgacctttagggtttatctcgtgagcgtcgatcttcatacaattcacaacaacaaggtaaacataataagtcaacttcgcctgaaagatcctctttcaaattttttagaagaagttgatatatgcaacgtctttcattgcgacggcttcttgctatgcaccaccgtagacaatagactcgttgtttcgaatccctgttctcgtgatactaagtggatccaaccaagaaatttctacaagaaattcgatatatttgctctcggtaaatcatcatgcaacaagtacaaaatcatgaggatggatcaattttatcctgataggccagaatttatgaactacgaaatctatgactttaactctaattcgtggagagttgttggtaagattacagactggttcataccaaggtgtatggaccgtggcatgtctgtgaatggaaacacttactggcttgcttctactaataaagacttgaccagtagtagttttttacttggttttgatttttcaacggagagatttgtaagggtgtctcttccgggtgatcatctctctgatcctgtttttgctttagcagttactagagaagatccaaaaatatgtgttgctatcattcaggaactccatatagatgtatggattgcaactacgattgagagtacgggagctgcgtcatggagcaagttcctatcagttgaattagcaaatctctacgagcgtatttgcttggatagttggatgaatttcttggtcgaccagaagaacaaagttttggtgtatcgtgatggtaactattggatctccaatgttttcttgcacgttgtgggagaggataaatgtatacaagtggatcatcatgattcagtgtctagatgctcacttgtcgtcaattatgttccaactttggttcatatctaa

SEQ ID NO: 121025 - protein, 353 aa, Arabidopsis thaliana
MEILARVPTVTLVRLQSTSKRWNVLIEDKRFAEQHFTNAPRHSLLIMLMTFRVYLVSVDLHTIHNNKVNIISQLRLKDPLSNFLEEVDICNVFHCDGFLLCTTVDNRLVVSNPCSRDTKWIQPRNFYKKFDIFALGKSSCNKYKIMRMDQFYPDRPEFMNYEIYDFNSNSWRVVGKITDWFIPRCMDRGMSVNGNTYWLASTNKDLTSSSFLLGFDFSTERFVRVSLPGDHLSDPVFALAVTREDPKICVAIIQELHIDVWIATTIESTGAASWSKFLSVELANLYERICLDSWMNFLVDQKNKVLVYRDGNYWISNVFLHVVGEDKCIQVDHHDSVSRCSLVVNYVPTLVHI

SEQ ID NO: 121026 - DNA, 1284 bp, Arabidopsis thaliana
  CDS (1)..(1284)
atgaggacgacaatgtcaaatcttccaaaggaactagtagaggacattgtctctagggttcctttacattgtttgagagcaatgcgattaacttgcaaaaactggaatgctttgttagaaagccagagctttaagaagatgcacatacggaaagaagaagaagcagcaagggaattaggagagaatcgaatgattgtgatgatggattacaacgtttatttaatgggcatcatcgtcaacgaaaacctatccataaagtctctaggtaaacttacttgcctacatggttctaaacaagtcaagatatctcaagtctttcattgtgagggtttattattatgcatcttaaaagacgatgatactaagattgtggttttgaatccgtatttggggcaaacaaggtggatccaaaccagaaagtatcaccgtacaagtgaatgggaaggacgagatgtttataactatgctctccgatacgaaactaacagtggaaaccgtagccccaaaatcttgaggtttatagatgatttccatcaccaccccgaaaaccccgctttacgatatgaaacctacgattttgatactgatttatggactactcttgatgtctctccacactggcggataatatctcgctgtggtggtgtttctcttaatggaaacacttattggggcgctgtagaacgaaacgcatctgcatatattggtcatatgatctgctttgattttacaagaggaggatttggaccgcttatacctctgccgtttaaggctaggggtttagtttttgcgccactatcttcggatagagcagagaagatcgcggctttatttcggacaagcaaaaaggttgtgatatggattacgactaagattgatgccacaaatgtaacttggagcaatttcttcacaatatatatatcgaaccttgagcgaaatctttcatgtaagagtttcttcacaatatatatatcgaaccttgagcgaaatctttcatgtaagagtttcttcattgacatggagaagaaagttgctatggtttttgataaagaaaaaggaaaaaaagtcgctcacaacattattaatatcattggagaggctggatgcgtgaggaaattggttcttaaagaatctggagacaaaagctgttggccacttgtgtgctcttatgttccaagtacagtgcaaatcaagcaacataatagaggcaaaaggcaaaaaaaagtgattaggaaaggcatcgacattgatatgagacatgataaacgtatcaaggttgattag

SEQ ID NO: 121027 - protein, 427 aa, Arabidopsis thaliana
MRTTMSNLPKELVEDIVSRVPLHCLRAMRLTCKNWNALLESQSFKKMHIRKEEEAARELGENRMIVMMDYNVYLMGIIVNENLSIKSLGKLTCLHGSKQVKISQVFHCEGLLLCILKDDDTKIVVLNPYLGQTRWIQTRKYHRTSEWEGRDVYNYALRYETNSGNRSPKILRFIDDFHHHPENPALRYETYDFDTDLWTTLDVSPHWRIISRCGGVSLNGNTYWGAVERNASAYIGHMICFDFTRGGFGPLIPLPFKARGLVFAPLSSDRAEKIAALFRTSKKVVIWITTKIDATNVTWSNFFTIYISNLERNLSCKSFFTIYISNLERNLSCKSFFIDMEKKVAMVFDKEKGKKVAHNIINIIGEAGCVRKLVLKESGDKSCWPLVCSYVPSTVQIKQHNRGKRQKKVIRKGIDIDMRHDKRIKVD

SEQ ID NO: 121028 - DNA, 1146 bp, Arabidopsis thaliana
  CDS (1)..(1146)
atgacgacaatgtctgatctttcaccagatttggtaggggagattctcactagggttccgatgacatctttgatttcagtacggtgtacttgcaaaatgtggaacgctttatccaaagaaggtattttctttaaagcagcaaggaagcagtttatgggattcacgatgatggattctagggtttgttcaatgaagtttgatctccaaggaatccgaaacaacgaacatgactttgttgatccatgtataaagcaaattgctaaacttgatcaaatcgaggtatctaaagtccttcaatgcgatggtttgttgttatgcgtcggtaaggacaactcgaggcttctagtgtggaatccttatttagggcaaacaaggtttatcaaaccaagaaaaaggtttaacaaactcgaatggtacgctctcggatatgacaataaccacaactacaaaatcttgatgaactatgatacagggcacctttttggttacgaaatctacgactttagctctgattcatggagggttcttgatgtcagtcccgactgccatataccgtttcatcaacagagcgtgtctttgaatggaaacacttattttcttgctcaagagaagataattgtggaaggagaagaagaagaagtagtagatgagattgaaaagtttttactctgttttgattttactacagagaggtttggaccgcgtcttcctctgccatttcactctgatgttttggaaactgtggctatatcttgtgttagagatgatcagcttgcggtgttatatcagcggtttgaaacatgggagatttgggtaaccactaagatcgatcccactgcggtgtcctggagcatgtttttgtcagtggatatggaaccacccactggttgtcagttcgatgatgaagctgggagcttctttattgacgaagagaacaaagtcgctgtattttttaattcagacttgtttaacccaagagtagaaaaccgaaaccgccgctacccgacagcttacatcattggacaagacggatacttcaaatccgcgactctccgggaagctcccgatctcgtaaaacctgacccctacgtgtattgttgcccacttgtgtggtcttcttatgctccaagcttagtgcaactctaa

SEQ ID NO: 121029 - protein, 381 aa, Arabidopsis thaliana
MTTMSDLSPDLVGEILTRVPMTSLISVRCTCKMWNALSKEGIFFKAARKQFMGFTMMDSRVCSMKFDLQGIRNNEHDFVDPCIKQIAKLDQIEVSKVLQCDGLLLCVGKDNSRLLVWNPYLGQTRFIKPRKRFNKLEWYALGYDNNHNYKILMNYDTGHLFGYEIYDFSSDSWRVLDVSPDCHIPFHQQSVSLNGNTYFLAQEKIIVEGEEEEVVDEIEKFLLCFDFTTERFGPRLPLPFHSDVLETVAISCVRDDQLAVLYQRFETWEIWVTTKIDPTAVSWSMFLSVDMEPPTGCQFDDEAGSFFIDEENKVAVFFNSDLFNPRVENRNRRYPTAYIIGQDGYFKSATLREAPDLVKPDPYVYCCPLVWSSYAPSLVQL

SEQ ID NO: 121030 - DNA, 1416 bp, Arabidopsis thaliana
  CDS (1)..(1416)
atggcgatgtccgatcttccaaatgatttggtggaggagatcatctctagggttccggtaaaatctataagagcagtaagctctacttgcaaaaactggaacactttatccaacgatcatagctttacgaggaagctctttggtaaaacaataacaacaaaggaaaatgagtgtttggtggtcatgatgatggattctaaggtttatttaatgagcgtcaatctccatagaattcacaaagaaaacgacgacaacaacattaaatcatctatcatgcataaagctaaactcattagcctaaacgatgatgacatactcaataatacatatataatttttcactgcaatggtttactgttattgttaggcttcaccgacgatggcatcaagcttgtggttacgaaccctcatttagggcaaacaaggtggatcaaacctagaaaagctaattaccagttttgtgacaagtacgctatcggatacgagaagaagaagaacaactctcttcgtaccaacaaaatgttgttatttcataaagaatccttctgcttccggatttattggtttgaaatctacaactttaactctgcttcatggaatgttttctatttcactcgtgactgggaattaccgtattctcaaggcgtgtctctcaagggaaacacttactggtttgctagagagataaatataagaggagaaagaatagatgatcctcctgacttcttgatctgttttgactttacaacagagagatttggaccgcgtcttcacctgccctttcactctcattctgatgatactgtgattctctctagtgttagagaagaacagcttgcggtgttgattaagcgcttcgatttatggaggatggagatttgggttacgactaagattgagcctaaggaggtctcatggaacaagttgttcttagcggttgatatgataccactgatcactgcttttcagttttgtaatgtgagttttttcattgacgagaagaagaatgtcgtcgtggttcttggtaaagatgtgttgaatacacgaaacatagctaatattattggaaatgatggatactttaaacaagtggatcttggagaatctacaaacaaatattgttacccacttgtgtgctcttatgttccaagttcagtgcaaatcaagcaagctacacgagtgatgcatcatcatcacattgtcttgagagcagttgttagagcggtgagggatagtgatagagagcggaagctaaataacggacgagaacataaaatctctagaagaactcggattcacgaacggatcttgtttagaatgttgaaacttgacgaagaagcaatagggataaggtcgagatcggttccaagggatcgatatcaacaaggttttgcaagttctccttgcagggcttga

SEQ ID NO: 121031 - protein, 471 aa, Arabidopsis thaliana
MAMSDLPNDLVEEIISRVPVKSIRAVSSTCKNWNTLSNDHSFTRKLFGKTITTKENECLVVMMMDSKVYLMSVNLHRIHKENDDNNIKSSIMHKAKLISLNDDDILNNTYIIFHCNGLLLLLGFTDDGIKLVVTNPHLGQTRWIKPRKANYQFCDKYAIGYEKKKNNSLRTNKMLLFHKESFCFRIYWFEIYNFNSASWNVFYFTRDWELPYSQGVSLKGNTYWFAREINIRGERIDDPPDFLICFDFTTERFGPRLHLPFHSHSDDTVILSSVREEQLAVLIKRFDLWRMEIWVTTKIEPKEVSWNKLFLAVDMIPLITAFQFCNVSFFIDEKKNVVVVLGKDVLNTRNIANIIGNDGYFKQVDLGESTNKYCYPLVCSYVPSSVQIKQATRVMHHHHIVLRAVVRAVRDSDRERKLNNGREHKISRRTRIHERILFRMLKLDEEAIGIRSRSVPRDRYQQGFASSPCRA

SEQ ID NO: 121032 - DNA, 1233 bp, Arabidopsis thaliana
  CDS (1)..(1233)
atggcgatgtccaatcttccaagagatttgttggaggaggtactctctagggttccggtaaagtctatagcagcagtgagatccacttgtaaaaattggaactctttaacctacggtcagagcttcacgaagaagctctatggtaaaacaatggcaacaaaggaaaaggagtttctggtggtcatgactatggatttggaggtttatttaatgagggtcaatctccatggaattcataaagatgataacaatgttaaatcatctatcatgcaaaaagctaaactcattaggctaaatgatgatcgagttcgagtcgatgatatatgtaaagtctttcactgcgacggtttattgttatgcatcactattgggatcaggcttgtggtttgtaatccttattgtgggcaaacaaggtgtatcaaaaccagaagagattaccatataaccgacaattacgctcttggacacgagaagatgaagaacagcccacttcgtaactacaaaatcttggtgtttcatgataaatccttcctccaaaattcttggtttgaaatctacaattttaactctgattcatggaaggttttatatttcacttgtgactggaaattaccgttttctcaacttgttgtgtctctcaagggaaatacttactggtttgctcgagagatgtatatacacggaccaagaatagatctccctgatttcttgatttgttttgattttacaacagagagatttggaccgcgtcttcatctgccgtttcactctcgttgtgttgatactgtgactctcgctagtgttagagaagagcagcttgcggtgttatttcaggactcaaaaacgttgatcctagaggtatggataacgactaagattgagcctaatgcggtctcatggagcagcaaggtgttcttagaagtgaatatgagtccactcactggttttcagtttaatcgtagctttgggagtttcttcattgttgaggagaaaaatgtcgttgtggttcctattaaaggagggcatttcaaacgaaacctagcttacatcattggaaaggatgaatacttcaaagaagtggatcttggagtgccaagttcatatatatatttttccccacatgtgtgctcttatgttccaagtttagtacaaatcaagaaagatgcacaagtgatgctgcaacaccataacgtctcagcagaaaagcatcatgagttttgtgcatctttgtga

SEQ ID NO: 121033 - protein, 410 aa, Arabidopsis thaliana
MAMSNLPRDLLEEVLSRVPVKSIAAVRSTCKNWNSLTYGQSFTKKLYGKTMATKEKEFLVVMTMDLEVYLMRVNLHGIHKDDNNVKSSIMQKAKLIRLNDDRVRVDDICKVFHCDGLLLCITIGIRLVVCNPYCGQTRCIKTRRDYHITDNYALGHEKMKNSPLRNYKILVFHDKSFLQNSWFEIYNFNSDSWKVLYFTCDWKLPFSQLVVSLKGNTYWFAREMYIHGPRIDLPDFLICFDFTTERFGPRLHLPFHSRCVDTVTLASVREEQLAVLFQDSKTLILEVWITTKIEPNAVSWSSKVFLEVNMSPLTGFQFNRSFGSFFIVEEKNVVVVPIKGGHFKRNLAYIIGKDEYFKEVDLGVPSSYIYFSPHVCSYVPSLVQIKKDAQVMLQHHNVSAEKHHEFCASL

SEQ ID NO: 121034 - DNA, 1164 bp, Arabidopsis thaliana
  CDS (1)..(1164)
atggcgacaatgatcaccaatcttcgaagggatttgatagaggagattatatctagggttcccttgagatctatgaaagcagtaagattaacttgcaaaagttggaataatatatccaaaagtgagatcttcacgaagatgcagattgataaagcaacaactagagaagggaagactatgatgatatcggtgatgcctcacaatctttctttaatgagcgtcgccgtcgacgacgttgatccatccgtagagtttaaaggtcagcttagttttctttgtaatcaagtcagtatacataaagttatccattgtgagggtttgttgttatgcttcttgaaagaccatactagggttgtggtttggaatccgtattccgggcaaacaaggtgggtcaaactcagatatccccaccctccaagtccaagcaaatgggattggttcagatatgcccttggatacgaggataaaggatcttgtcgtagcgttaaattcttaaggtttttagattatttacctgaagaaccagaaaaccaaaatgtttgctatgaaatctatgattttgactctgatttatggacaactcttgatgtcacttcacactcgtggatatgttattctagctgtggcgtgtttctcaagggaaacgcttactggcctgttgtaaaaagtagctcagaagctaacatcgatcacataatctattttgactttacaagagagagtttcgggccgcctctacctttaccgtttggcgctacagatcgtggatattcatatgtgaatttatcttgtgttaaagaagagaagcttgcagctttttttcagcactacatttcatataaatatgaatttgagatatgggttacgactaagattgaggccgaaatggtgtcgtggagcaaattcttgagaatggatttgggacctaatatagatattccaattactttcttcattgacgaggagaagaaagttttcatgggttttgagcatagagaatatcccaagagatttattaacatcatcggagaggctaaatatttaagaaaattggatctccaagtacctcaaggccaatactgttgcccacctttgtgctcttatgttccaagttcgatccaaatcaagaaacctgcactgaggcaaaaagatagagcaaaatag

SEQ ID NO: 121035 - protein, 387 aa, Arabidopsis thaliana
MATMITNLRRDLIEEIISRVPLRSMKAVRLTCKSWNNISKSEIFTKMQIDKATTREGKTMMISVMPHNLSLMSVAVDDVDPSVEFKGQLSFLCNQVSIHKVIHCEGLLLCFLKDHTRVVVWNPYSGQTRWVKLRYPHPPSPSKWDWFRYALGYEDKGSCRSVKFLRFLDYLPEEPENQNVCYEIYDFDSDLWTTLDVTSHSWICYSSCGVFLKGNAYWPVVKSSSEANIDHIIYFDFTRESFGPPLPLPFGATDRGYSYVNLSCVKEEKLAAFFQHYISYKYEFEIWVTTKIEAEMVSWSKFLRMDLGPNIDIPITFFIDEEKKVFMGFEHREYPKRFINIIGEAKYLRKLDLQVPQGQYCCPPLCSYVPSSIQIKKPALRQKDRAK

SEQ ID NO: 121036 - DNA, 1212 bp, Arabidopsis thaliana
  CDS (1)..(1212)
atggcgacaacgatctctaatcttccgagggagttgatagaggagattctttctagggttcccttgagagccatgaaagcaatgagattaacttgcaaaagttggaacaatttatctaaaagtgagagttttatgaagatgcacattggtaaagctgcaacaagagaagagaagaccatgatggttgcggtgatgcctcacactcttgctttagtgagcgttgtcgtcgacggcgttaatccatctacagagcttaaaggtcagtttagtttccttgacaaggaattctttatatatcgagtcatccactatgagggtttgctgttatgtattttgaaagacgctactaggattgtggtttggaatccgtatttggggcaagaaaggtggatccaaatcagatattctcaccgtccacatggtgtagaccatttcaaatatgctgttggatacgccgacaaggtatcttgtcgtagcgttaaattactgaggtttttagattatttccacaaagcatccgataaaccatttttttggtatgaaatctacgattttgactcttgtttatggacaactcttgatatcactccacattggggtatatcttggacttaccctagagtttcccttaagggaaacacttactggcctgctagagaaatgaacacaaaaggtttccaagatcacataatctgttttgattttacaagtgagagatttggtccgcttctacctctacctagggctcaaggatgtcatgtgagtttatcttgtgttaaagaagagaagcttgcagttttacttaagcaccggctgcaccacgattcatacgaatatgagtttgagatatggattacgactaagattgacgtcgaaatggtgtcgtggagcaagttcttgagaatggatatgagacctaagataaagcttccacttagtttctacgttgacgaagagaagaaagttttcatgggttttgatcatggggaatatcccaagttatttcttaacatcattggagagactggattcttaagaaaattggatctcggagtacatgaaggccaccgttcgccatgctcttatgttccaagtttggtccaaatcaagcatcctgcaggagacaaaatgataaaacaaagtagtttagaagaccgtcgatttgctcaaaacagtttgagacttgctgcaattgaaaagctcatcaattag

SEQ ID NO: 121037 - protein, 403 aa, Arabidopsis thaliana
MATTISNLPRELIEEILSRVPLRAMKAMRLTCKSWNNLSKSESFMKMHIGKAATREEKTMMVAVMPHTLALVSVVVDGVNPSTELKGQFSFLDKEFFIYRVIHYEGLLLCILKDATRIVVWNPYLGQERWIQIRYSHRPHGVDHFKYAVGYADKVSCRSVKLLRFLDYFHKASDKPFFWYEIYDFDSCLWTTLDITPHWGISWTYPRVSLKGNTYWPAREMNTKGFQDHIICFDFTSERFGPLLPLPRAQGCHVSLSCVKEEKLAVLLKHRLHHDSYEYEFEIWITTKIDVEMVSWSKFLRMDMRPKIKLPLSFYVDEEKKVFMGFDHGEYPKLFLNIIGETGFLRKLDLGVHEGHRSPCSYVPSLVQIKHPAGDKMIKQSSLEDRRFAQNSLRLAAIEKLIN

SEQ ID NO: 121038 - DNA, 1203 bp, Arabidopsis thaliana
  CDS (1)..(1203)
atggcgacgatgatctccaatcttccaagggatttgatagaggagattttttctagggttcccttgacatctatgaaagcagtgagattaacttgcaaaagttggaacaatttatctaaaagtgagagctttacgaaggtgcacattggtagagcagcaacaagagaagagaagactatgatagtcgatgtgatgcctcacaaacttaatttaatgagtattgtcatcgacgacgttactccatctgcagagtttaaaggtcagtttagtttacttcacaagaactaccgtataaatcaagtcttacactatgagggtttgttgttatgcattatgaaagatcctactaggattgtggtttggaatccgtatttgggacaaacaaggtggatccaactcaggtattttcaccgtccacatggaatagaccatttcagatatgctctcggatacgcggataaggaatcttgtagtagccttaaattcttaaggtttttagattatttctacaaagcacccgaagaggaatttttttggtatgaaatctacgattttgactctggtttatggacaactcttaatgtcactccacactggggtatttattcgacttgcccttgtgtttcccttaagggaaacacttactggcctgctaaagaaaggagcacacaaggtttccaagattatataatccgtttcgattttacaagagagagatttggaccccttctagctctgcctacggatcgtgaatcttcatttgtgagtttatcttgtgttaaagaagagaagcttgcagctttatttaagcaccggctgcaccatgattcatacgaatatgagtttgagatatggattacgactaagattgaggtcgaaatggtttcgtggagcaagttcttgagaatggatatgagacctaagatggagcttccacttactttctacattgacgaagagaagaaagttttcatgggatttgatcatggagaatatcccaagttattatttcttaacgtcgttggagagactggattcttaagaaaattcgagaatatccaataccgttcgccatgctcttatgttccaagtttggtccaagtcaagaaacttgcacgagacagactgagaaaacaacgtagtttagaaaaccgtcgatttgctcaaaacattttgagacttgcgcgcaatggaaaaagctaa

SEQ ID NO: 121039 - protein, 400 aa, Arabidopsis thaliana
MATMISNLPRDLIEEIFSRVPLTSMKAVRLTCKSWNNLSKSESFTKVHIGRAATREEKTMIVDVMPHKLNLMSIVIDDVTPSAEFKGQFSLLHKNYRINQVLHYEGLLLCIMKDPTRIVVWNPYLGQTRWIQLRYFHRPHGIDHFRYALGYADKESCSSLKFLRFLDYFYKAPEEEFFWYEIYDFDSGLWTTLNVTPHWGIYSTCPCVSLKGNTYWPAKERSTQGFQDYIIRFDFTRERFGPLLALPTDRESSFVSLSCVKEEKLAALFKHRLHHDSYEYEFEIWITTKIEVEMVSWSKFLRMDMRPKMELPLTFYIDEEKKVFMGFDHGEYPKLLFLNVVGETGFLRKFENIQYRSPCSYVPSLVQVKKLARDRLRKQRSLENRRFAQNILRLARNGKS

SEQ ID NO: 121040 - DNA, 1158 bp, Arabidopsis thaliana
  CDS (1)..(1158)
atgtcagatcttccacgggatttgttagcggagattctcagtagggttccgttgacatctctaagagcagtgcgattgacttgcaaaaagtggaacgatttatccaaagatcggagctttctcaagaagcaaatcgtcgaaacaaagaagaagcaattggaatcgaaggagattgaggtgatcatgatgaggaattttagggtttatctaacaagcatcgatatccacaacaatgttgatccatcatttacgcctaaaggtacacttattagcttaagcgatgatgcaaaccatcatcaagtcgataatgtatctagagtctttcactgcgatggtttactattatgcatcaccaaagacctccactataggcttgtggtttggaacccttattttggtcaaacaagatggatccaacccagaaattcttaccacagaaaggacaattacgctcttgggtacgatgagaagaagaaccacaaaatcctgagattgaaggataattattacgctccacgggaacggatttgtgagtttgaactctacagttttgagtctaattcatggaaggttgtacttgatgtcagtcctgactggtatataccttcttataaccgtggcttgtctctaaaggggaatacttactggtatgcaacagagaagcatgtcaatgttgatttcttgatttgtttcgatttcacaacagagaaatttggaccgcgtttgcctctgccttttaacgctaccgagtctcctacttatgaagatgttgttactctctctagtgttggagaagagcagcttgcggtgttgtttcagagtgagtatacattgatgatggagatttgggttacgagcaaggttgagtccacagaggttttgtggaacaaattgttcttagaggttgatttgatagcaatcagctctcactttcagtttctggcagaggctgggagtttcttcattgaccagaagaagaatgttgttgtggtttttgataaagatatggatgaggctaccgatcgcgacatggcttacgttgttgggaagaacggatacttcaaaaaagtggatattggggaagaagcatacacgagttgtttcccacttgtatgttcttatgttccaagctcagagcaaatcaggcagctaacctga

SEQ ID NO: 121041 - protein, 385 aa, Arabidopsis thaliana
MSDLPRDLLAEILSRVPLTSLRAVRLTCKKWNDLSKDRSFLKKQIVETKKKQLESKEIEVIMMRNFRVYLTSIDIHNNVDPSFTPKGTLISLSDDANHHQVDNVSRVFHCDGLLLCITKDLHYRLVVWNPYFGQTRWIQPRNSYHRKDNYALGYDEKKNHKILRLKDNYYAPRERICEFELYSFESNSWKVVLDVSPDWYIPSYNRGLSLKGNTYWYATEKHVNVDFLICFDFTTEKFGPRLPLPFNATESPTYEDVVTLSSVGEEQLAVLFQSEYTLMMEIWVTSKVESTEVLWNKLFLEVDLIAISSHFQFLAEAGSFFIDQKKNVVVVFDKDMDEATDRDMAYVVGKNGYFKKVDIGEEAYTSCFPLVCSYVPSSEQIRQLT

SEQ ID NO: 121042 - DNA, 1137 bp, Arabidopsis thaliana
  CDS (1)..(1137)
atgtcgacgatgtctgatcttttcccggatttggtagaagagatactctctagggttccaataacatctttgaaagcagtgaaattaacttgtaaacaatggaatgatttatccaaagattcgagctttacaaaaaaccattatggtaaagaagccaaggagattcaggtgatcatgatatgtgatttaaaggcttgtttaatgagcgtcaatctccataatcacaaagacttggcagatccatctataaagcaaataggtaaacttaatcaagtcgaaatagatagtgtgtttcattgtgatggcttattattattgttgttatgcaaccctaaggataactcgaagctcatggtttggaacccttacttgggtcaaaccaggtggatccaacctagaaacaactcgcataagcatagaccagctggcaggtttaatcatagaccagctggcagattttatatgggatacgacagcaacaacaaccacaaaatcttatggttttcgtctatgtaccgtgagtatgaaatctacgattttaagtctgatgcgtggacggttattgatgtcaataccgaccaagaccatataatagataatcagcgtgtgtccttgaagggtaatgtttactttattgctcatgacatattgaaagaggaagcatttttactttcttttgattttacatgtgaaagatttggaccgagtcttcctcttccatttcactgttgtcatgaggatactgtacttctatctactgttagagaagagcagcttgcagtgttatttcagaagtctgatgcgtatgagatgggaatatggattacaactaagattgagctcaatatagtgttgtggagcaagttcttaaaagttgatatgacattgcctaacagctattggtttgaagatttgagtttcttcctcgtcgacgagaagaagaaagtagcaatggttagtgaattagacatagaaacgtgtaagaactacaaaacttacattctcggagagaatggatactacagagaagtggatcttagaaaatccaaaggttgtgtctacttatgtgttcttatgttccaagtttggtgcaaatccagtaaggttccagtacttgcaagatgcgaaagaaaatga

SEQ ID NO: 121043 - protein, 378 aa, Arabidopsis thaliana
MSTMSDLFPDLVEEILSRVPITSLKAVKLTCKQWNDLSKDSSFTKNHYGKEAKEIQVIMICDLKACLMSVNLHNHKDLADPSIKQIGKLNQVEIDSVFHCDGLLLLLLCNPKDNSKLMVWNPYLGQTRWIQPRNNSHKHRPAGRFNHRPAGRFYMGYDSNNNHKILWFSSMYREYEIYDFKSDAWTVIDVNTDQDHIIDNQRVSLKGNVYFIAHDILKEEAFLLSFDFTCERFGPSLPLPFHCCHEDTVLLSTVREEQLAVLFQKSDAYEMGIWITTKIELNIVLWSKFLKVDMTLPNSYWFEDLSFFLVDEKKKVAMVSELDIETCKNYKTYILGENGYYREVDLRKSKGCVYLCVLMFQVWCKSSKVPVLARCERK

SEQ ID NO: 121044 - DNA, 1224 bp, Arabidopsis thaliana
  CDS (1)..(1224)
atgacgatgatgagcgatctttcggaggatttggtagaggagatattgtgtagggtttcgataacttctctaggagcagtgagatccacgtgcaaaggatggtatgttttatccaaaactagggttctatgtaaagcagaaacaaagcatcagtttctagggttcatgaagaagaattataagctttgctcaatgaggtttgatctccatggaaacttcaacgaagaaggaggtgaagaattcatgaatccatcaataaagaagtcaggtaatttacttgatcaacttgatatatgtaaagtttttcaatgcgacgggttattgttatgcgtgaccaaagaggaaaacactaggctcgtggtatggaacccttattcgggtcaaatcaggtggatcaaatgcaataactcttaccacagatacgaaggttatgctatcggatacaacaataaccgtaaacacaaaatcttgaggttttcggatatgtcattttctacttacaaaatctacgattttatctctaattcatggagggttcttgatattgctcccaactggcatataaaccctgatcaacgtggcgcgtctttgaaagggaacacttacttttttgctagggaaaaaagagaggatgaagaggatgaagatattctttggcagccggtagagtatttactctgttttgattttacaacggagaactttggtcagcttcatcctttaccgtttgagcaatatattgacgacgctggagctctctcttcttttggagaggagaaactcgcggcgttatttcagagcttcgctagttcagttgtggagatttgggttacaagtatgattgaggccaatgcagtgtcgtggatccctttcttaaaagttgatatgaaaccacactgtagttttcgttttcgtttgccctttgacggtggcagtttcttcattgacgaggagaagaaagtcgccgtggttattcatgttgatgttgtcgccgaatctgaaatgaaccgctacgaggacgtagcttacatcattggagagaatgggtacgttaaaaaagtgtgtcttgtagaagctgtgaatcaaggaggatctctcaacttgagcaaacgttcgtgttgtaattacccgcatgtgtgttgtagctcttatgttccaagtttagcacagatcaaccaaagtgtagaattcgaaaatgaaagagaagaagaggaagcgaactaa

SEQ ID NO: 121045 - protein, 407 aa, Arabidopsis thaliana
MTMMSDLSEDLVEEILCRVSITSLGAVRSTCKGWYVLSKTRVLCKAETKHQFLGFMKKNYKLCSMRFDLHGNFNEEGGEEFMNPSIKKSGNLLDQLDICKVFQCDGLLLCVTKEENTRLVVWNPYSGQIRWIKCNNSYHRYEGYAIGYNNNRKHKILRFSDMSFSTYKIYDFISNSWRVLDIAPNWHINPDQRGASLKGNTYFFAREKREDEEDEDILWQPVEYLLCFDFTTENFGQLHPLPFEQYIDDAGALSSFGEEKLAALFQSFASSVVEIWVTSMIEANAVSWIPFLKVDMKPHCSFRFRLPFDGGSFFIDEEKKVAVVIHVDVVAESEMNRYEDVAYIIGENGYVKKVCLVEAVNQGGSLNLSKRSCCNYPHVCCSSYVPSLAQINQSVEFENEREEEEAN

SEQ ID NO: 121046 - DNA, 1089 bp, Arabidopsis thaliana
  CDS (1)..(1089)
atggcgacagtaaccgatctaccggatgatttggtaagagaaatattttctagggttccattgacatctctaagagcagtgagatctacttgtaaaaagtggaacgctatatcgaaatatgacatcttaggtaaaaaagcagcagcaaagaatcagttcttggagttcatggttacagattctagggtttgttctttgagattagatcttcaaggaatccgtagcgaagaagatttgattgatctatctataaagcaaataagtatacctaataaagttgatcaagtcgagatatctcaagtctatcactgtgatggcttattgttatgcatcgccaaagacaactcgagtgttatggtatggaatccgtatttagggcagacgaaattgattcaaccaagaaaaaaactccacagatatgacaagtttgctcttggatacgacaacaaccgtaaccacaaaattttgaggtttctttatgaggggagtccaagaaacgtcattattgatgtttacgattttagctctgattcatggagggttcttgatattgatatagattggcatgaactgtttagtcacaatagcgtgtctttgaagggaaatacttacttttttggtcgaaagggaccacgtttgcctatgctgtttaaacctccatctcgtcgttttgaatatttgactctatcttgtgttagaaatgagaaactcgctgtgttatacagccacctcaacagatttggcacaatagagatttgtatttcgactaagattgatcccagtgcagtatcatggaccacttttttgagaattgatatgacactaatcaatggtttaccggataacttttttgttcactcttatgctacgagctttttcttcgatgaggagaagaaggtcgctgtgcttttcggtacaaacagatatagaggacgtgagacctgtcagtactaccagagagcttgcatcgttggagatagtggatacttcaaagctgtcaacatcgaactagttttcaattcacagctgcaatcttgccaacttgtgagctcttcttatgttccaagtttagtgcaactgcaagattag

SEQ ID NO: 121047 - protein, 362 aa, Arabidopsis thaliana
MATVTDLPDDLVREIFSRVPLTSLRAVRSTCKKWNAISKYDILGKKAAAKNQFLEFMVTDSRVCSLRLDLQGIRSEEDLIDLSIKQISIPNKVDQVEISQVYHCDGLLLCIAKDNSSVMVWNPYLGQTKLIQPRKKLHRYDKFALGYDNNRNHKILRFLYEGSPRNVIIDVYDFSSDSWRVLDIDIDWHELFSHNSVSLKGNTYFFGRKGPRLPMLFKPPSRRFEYLTLSCVRNEKLAVLYSHLNRFGTIEICISTKIDPSAVSWTTFLRIDMTLINGLPDNFFVHSYATSFFFDEEKKVAVLFGTNRYRGRETCQYYQRACIVGDSGYFKAVNIELVFNSQLQSCQLVSSSYVPSLVQLQD

SEQ ID NO: 121048 - DNA, 978 bp, Arabidopsis thaliana
  CDS (1)..(978)
atgacgacaatgtcagatctttctgtggatttggtaggggagatactctctagggttccgctaacatctctgagcgcagtgcgatgtacttgcaaatcgtggaacactttatctaagcatcagatttttggtaaagcagaattagcagcgactaagcagtttttggggttcactgtgatggattataaggtttgttccttgagattcgatctccaaggaatccgcaacgacggtgatgactttgttgatcacggtaaatccggtttaaaaataaggaataaagcggttaagaaaaatcacggtaacggacttcaccggaaaactggccgatgccacattgtcgaaagaacatgtccacaatactcagaaatctatgattttaactccagttcatggaggctggttgagatcaatcccgtctggtttttacatagcgaccgcgtgtctttgaagggaaatacttacttttttgctcaagatttactaaaggatgcaaagattgagaattatttactctgttttgattttacagcagaaagatttggaccgcatcttcctctgccggttcactcttatgatgacgtgactctatcttgtgtcagacaagagcagcttgctttgttatatgggaacaacgagacagatgattcattagagatttggattacaaatcagattgatcccaatgcagtgtcgtggagcatatttttgaaagtggatatcaaaccgcttattggttttccaaaagacttcgatcctgggagcttcttcattgacgaagagaagaaagtcgttgtggtttacgatttggacggacatttatatagtaccaagaagaactgtgcctaccaaaggctttacatcattggagaagatggatacttcacatctgtaaaaatcaaatgctctgactcacctgaattctctgcttatgctccaagtttagtgacatacaaaccaaccaactacgcaaaatga

SEQ ID NO: 121049 - protein, 325 aa, Arabidopsis thaliana
MTTMSDLSVDLVGEILSRVPLTSLSAVRCTCKSWNTLSKHQIFGKAELAATKQFLGFTVMDYKVCSLRFDLQGIRNDGDDFVDHGKSGLKIRNKAVKKNHGNGLHRKTGRCHIVERTCPQYSEIYDFNSSSWRLVEINPVWFLHSDRVSLKGNTYFFAQDLLKDAKIENYLLCFDFTAERFGPHLPLPVHSYDDVTLSCVRQEQLALLYGNNETDDSLEIWITNQIDPNAVSWSIFLKVDIKPLIGFPKDFDPGSFFIDEEKKVVVVYDLDGHLYSTKKNCAYQRLYIIGEDGYFTSVKIKCSDSPEFSAYAPSLVTYKPTNYAK

SEQ ID NO: 121050 - DNA, 1197 bp, Arabidopsis thaliana
  CDS (1)..(1197)
atgacgatgatgatgtctgatcttccgaatgatttggtagaagagattttgtctagggttccgataacatctctaggagcagtgagatctacttgcaaacgatggaacggtttatccaaagatcgtattgtatgtaaaggagatgcaaatcaacagtttacagggttcacgagatatgtgaacgaatctacggtttgttcaatgagacttgatcttaatgaaatccaaaatgaagacgttgaactagttgagctctctataaataagataaataaatttattgaacttgagttatttcaagtttattacagcgatggcttgttgttattggtaactgatgaggtagattccaagatcgtggtttggaatccgtatttgggacaaaccaggttgatccaatgcagagatactgagcatttcaaatataggtatgctctcggatacgacaacaaccgtaaccacaaaatcttgatgtataataggaaaaattgtgaaatctacgattttaaatctgattcatggaaggttcttgatatcattcccgacttgcatacaaatatttatgtacgtgacatgtcaataaagggaaatacttattttttctatcgaggtgagaaaataggggaaggactagctggttgcttactttcttttgattttacaagagagagatttgtgtcgtgtcttcctctcccatttcaaattgctaagtttgatgataatgtagctctatcttctgttagagaggaacatcttgtggtgttatttaataattgggaagaatctgagatggagatatgggtgacaactaagattgaacccaatgctgtgtcatggagcaacttcttaacatttactcattttagaattaagtttttagttacgagtttcttcattgaccaagagaagaaattagccgtagtgtttggtagaagcttatctaaacaaatgaggtgcaacatagcttacgtcattggagataatggatacttgagaatattggatttcggagtaactttcataccatctaacctaccagtctcttatgctcctagtttagtgaaaatcacccaaggccaagaactctcggttatcgaggaaaagaaaagatcgagattattagccagtcttgtttacagtacgttatttgtttctttcatcatcttcttctcgttcatttcttctgttttcatttga

SEQ ID NO: 121051 - protein, 398 aa, Arabidopsis thaliana
MTMMMSDLPNDLVEEILSRVPITSLGAVRSTCKRWNGLSKDRIVCKGDANQQFTGFTRYVNESTVCSMRLDLNEIQNEDVELVELSINKINKFIELELFQVYYSDGLLLLVTDEVDSKIVVWNPYLGQTRLIQCRDTEHFKYRYALGYDNNRNHKILMYNRKNCEIYDFKSDSWKVLDIIPDLHTNIYVRDMSIKGNTYFFYRGEKIGEGLAGCLLSFDFTRERFVSCLPLPFQIAKFDDNVALSSVREEHLVVLFNNWEESEMEIWVTTKIEPNAVSWSNFLTFTHFRIKFLVTSFFIDQEKKLAVVFGRSLSKQMRCNIAYVIGDNGYLRILDFGVTFIPSNLPVSYAPSLVKITQGQELSVIEEKKRSRLLASLVYSTLFVSFIIFFSFISSVFI

SEQ ID NO: 121052 - DNA, 1302 bp, Arabidopsis thaliana
  CDS (1)..(1302)
atgaggaggaggaggtgcgatcttcaaccgaagagaacgagaatgtgcgatcttcaaccgaagagaacgagtatgtgcgatcttccaccgaagctggtaggggagaagatcctcacgaggattccgataacatctctgagagcggtgcgatccacttgcaaattatggaacgctttaaccaaagatcgggttctgggtaaagcagcggcgcagtttttggggtttatgacgatggattcaaaggtctgttcagttagattccatctccgtcgcagcaaggaggaagaagaagacacgatggatctatctataaagcaggtagatttgcttaatcaagtcgagatatctagggtgtatcactgcgacggcttgttgttatgcgtggctaaggacaactcgagggtcgtggtttggaacccttatttggggcaaacaagatggatcagacccagaacagaatccaacataggagacagctatgctcttggatacgacatcaaccgtaaccacaaaatcttgaggatggtgcagacaagaaacgtttccgtttacaggtacgaaatctacgacttgcgctctaattcatggagggttctcgaggtcactcccaacggggaaatggaccctaatcatcccctctacggcgtttctgtgaagggaaatacctacttttttgcgcatgaggatagcagcagtggtgaaattgatgaagatggcgacataatcgatcttgaagatttcttactctgttttgattttacaacagagacatttggtctgcgtctgcctcttccgtttcactctactatcgatgcgactgtgaccctctcttgtgttagagaccagcagctcgcggtgctatatcataatgagggtcttcacagtgatgatcggtttaccacagttgagttttgggttactactagtattgagcccaactctgtgtcctggagcaagtttttgacagtggatatgagaccattggcactcactggtgttcggtttgacaatgatatgggtgccaccttcttcattgacgaggatgagaaagtcgctgtggttttcgatctagacggatacctaagcaccgagagcgctcgttaccacaccgcttttatcagtggaaaggatggattctttaaacctgtgactctaggagtagctcccaatgtcggggaaccttgtcccagaaccgggcatattccgactacatatcgtcccccgcttgtctgctcgtctacttaccttccgagtttagtgcaagtcaaccaacagcgcaaaaggaaagaaagacatgtttag

SEQ ID NO: 121053 - protein, 433 aa, Arabidopsis thaliana
MRRRRCDLQPKRTRMCDLQPKRTSMCDLPPKLVGEKILTRIPITSLRAVRSTCKLWNALTKDRVLGKAAAQFLGFMTMDSKVCSVRFHLRRSKEEEEDTMDLSIKQVDLLNQVEISRVYHCDGLLLCVAKDNSRVVVWNPYLGQTRWIRPRTESNIGDSYALGYDINRNHKILRMVQTRNVSVYRYEIYDLRSNSWRVLEVTPNGEMDPNHPLYGVSVKGNTYFFAHEDSSSGEIDEDGDIIDLEDFLLCFDFTTETFGLRLPLPFHSTIDATVTLSCVRDQQLAVLYHNEGLHSDDRFTTVEFWVTTSIEPNSVSWSKFLTVDMRPLALTGVRFDNDMGATFFIDEDEKVAVVFDLDGYLSTESARYHTAFISGKDGFFKPVTLGVAPNVGEPCPRTGHIPTTYRPPLVCSSTYLPSLVQVNQQRKRKERHV

SEQ ID NO: 121054 - DNA, 1188 bp, Arabidopsis thaliana
  CDS (1)..(1188)
atgacgaccatgggcgatcttccaggcgatttggtagaggagatactctctagggttccgctgacatctctgagggctatacgatctacttgccaaaagtggaactctttatcgaaaagtcagatttgtggtagaaaagcaacagcagcagagaataagtttctggggtttatgatgaaggattcaagggtttgttcaatgaaatttgatctccaaggaatcagaaacgacgacggggagttggttgagccatctataaagcaagtaagtaaactcgatcaaatcgaggtctctcaagtttttcactgtgacggtttagtcctatgcatcattaaggacaacacagggctcttggtatggaacccttatttggggcaaactaggtggatccatccgagaaacaattaccagatagaagataggtatgctcttggatatgataacaaccgtaaccacaaaatattgaggattttcgatttgtatccaagcagcaaccgcgtttttgggtacgaagtctacgattttagctctaattcatggaaggttcttgatgtcattcctgagtgggatatacagtctcattttcgtggcgcgtctttgaaagggaatgcttattttcctgcgcaaaagaaagaaacagtgggaggaataaagacaataaatattgaagatgttctactttgtttcgattttacaagggagagatttggaccgcctctgccactgccgtttcactcttacaatgcagacttttttgtgtctctagcttgtgttagggaagagcagctcgctgtgttatatcaacgctggggggcatttgagacaatcgagatttgtgttacaaataagattgatcccaatacggtttcgtggagcaagtttttgataacgtccactggttttccggttgacactttttctgggagctttttcattgatgaggagaagaaagttgctgtggtttttgatttagatagatataaaccgactgagacctgtcgctaccaaatagtttatattattggacaagatgaatacttcaaatctgtcaacatgggagttgccccaaatatcgcgaagaactcgtaccaagcttactgtgttccacttgtgtgctcttcttcctatgttccaagcttagttcaactacaaatcaacaaaccgggcaaaaggaaagaaagtaactag

SEQ ID NO: 121055 - protein, 395 aa, Arabidopsis thaliana
MTTMGDLPGDLVEEILSRVPLTSLRAIRSTCQKWNSLSKSQICGRKATAAENKFLGFMMKDSRVCSMKFDLQGIRNDDGELVEPSIKQVSKLDQIEVSQVFHCDGLVLCIIKDNTGLLVWNPYLGQTRWIHPRNNYQIEDRYALGYDNNRNHKILRIFDLYPSSNRVFGYEVYDFSSNSWKVLDVIPEWDIQSHFRGASLKGNAYFPAQKKETVGGIKTINIEDVLLCFDFTRERFGPPLPLPFHSYNADFFVSLACVREEQLAVLYQRWGAFETIEICVTNKIDPNTVSWSKFLITSTGFPVDTFSGSFFIDEEKKVAVVFDLDRYKPTETCRYQIVYIIGQDEYFKSVNMGVAPNIAKNSYQAYCVPLVCSSSYVPSLVQLQINKPGKRKESN

SEQ ID NO: 121056 - DNA, 1176 bp, Arabidopsis thaliana
  CDS (1)..(1176)
atggttcagatttccgatcttccacgggatttgacagaggaggtgctctctaggattccggtgacatctatgagagcagtgagatttacttgcaaaaagtggaacaccttatcgaaagatcggagctttacaaagaagcacctgcgtggagcaagagcagcagcaaagaagaagcagacgaaggagtttcaggtgatcatgatgattcaatttagggtttatttatacagcgtcaacctccttaatccatcaatagagcgtataggtaaacttattagcctagacgttgaagatcatgtcgacatatctaaaatctttcactgcggcggtttattgttatgtatcaccaaagacatatctaggcttgtggtttggaacccttattctgggcaaacaaggtggatcaaacctagaaattcttaccacagattggacaggtacgctttaggatacgaagagaagaacaagtcgtgtcgttgctacaaaatcttgagatttatggatgattacgaggatgacagggcactgcgcctaattcgtgagtttgaaatctacgacttaaactctgattcatggaaggttgttaatgtcactcccgactgggatgtagagttttatcaccgtggcctgtctctcaaggggaatacttactggtttgctcaagagaagcttccaccattaccacgcggaagagtgataacaatatcagatatggctgatttcttactctgttttgattttacaagggagagatttggaccgcgcctgcctctgcctttccactcttttgttgaagatactgtgactctatccagtgttagagataagaaacttgcagtgttatttcagccatgtagtgcatctaccgtgaagatatggattagtcgcaagattgagcccaatgcagtgtcgtggaggaaggttttcttagcggttgatatgaaatcactcactggttttcagtttgacattaacgctgcaagtttctttgttgacgagaagaaaaaggtcgccatggttctggataaagacaggttcagttataaatttactcgcaacatagcttacatcattgggaagaaggggtacttcgaaaaagtggatcttggagaatctacagtttcaagttgtgcctcacttgtgtgctcttacgttccaagctcagtgcaaatctag

SEQ ID NO: 121057 - protein, 391 aa, Arabidopsis thaliana
MVQISDLPRDLTEEVLSRIPVTSMRAVRFTCKKWNTLSKDRSFTKKHLRGARAAAKKKQTKEFQVIMMIQFRVYLYSVNLLNPSIERIGKLISLDVEDHVDISKIFHCGGLLLCITKDISRLVVWNPYSGQTRWIKPRNSYHRLDRYALGYEEKNKSCRCYKILRFMDDYEDDRALRLIREFEIYDLNSDSWKVVNVTPDWDVEFYHRGLSLKGNTYWFAQEKLPPLPRGRVITISDMADFLLCFDFTRERFGPRLPLPFHSFVEDTVTLSSVRDKKLAVLFQPCSASTVKIWISRKIEPNAVSWRKVFLAVDMKSLTGFQFDINAASFFVDEKKKVAMVLDKDRFSYKFTRNIAYIIGKKGYFEKVDLGESTVSSCASLVCSYVPSSVQI

SEQ ID NO: 121058 - DNA, 1098 bp, Arabidopsis thaliana
  CDS (1)..(1098)
atgacaaagatgtccaaacttccgaatgatttgttggaggagatactctctagaagtccactgtattctatgagagcaatacgattgacttgcaaaaagtggaacactttagccaaagaagaaagctttacaaagaagcaactcgttcaaacaaaagctgccaaggaatttatggtgatcatgatgatggattctaagttttgtttaatgaacatcaatctcaacaaggaagaagacgttgaaccatctataaagtgtaatggtaaaattattaacccaatcggtatgtgtcgagtctatcattgcggtggtttggtatgcatcacaaaaagcttcagtaacactagagatgtggtttggaatccgtatttggggcaaactcggtggatcaaacctagaagccatcacgcatatatatatgctattggatacgagacgaaaaaatcgtgccgcagctacaaaattttgagttctgaacacaattatataaatattgatgatgaacgtgttgactacgaaatctatgagttagactctaattcatggagggctcttgatgtcaattccaattgggcgacagccttttataaaatggatgtctctgtgaaaggaaattcttatacgtatactgattataggggtgacttcttgatttcttttgattttacaacagagagatttggaccgactctgcctctgccgttccactctcgttgtggagatattgtggctctctctagtgttagagaagagaaacttgcagtgttacttcaccgctgcaatatatcaaggatggagatatggattactaacaagattgagcccaacaatgtgtcgtggggaaagttgttcttaacagtggacatgaaaccactcattattgatgatggaattttcttcattgacgaggagaagaaagtagttgtggtttttgataaggacaaagagatgagaaaccgtatcacagcttacatcattggagagaatggatacttcagaaaagtggatctcggagattctgaaagttttcctgttaggtgctcttatgtaccaagttcagtggaaatcaagcaactggcaaaaggcaaaagcaactag

SEQ ID NO: 121059 - protein, 365 aa, Arabidopsis thaliana
MTKMSKLPNDLLEEILSRSPLYSMRAIRLTCKKWNTLAKEESFTKKQLVQTKAAKEFMVIMMMDSKFCLMNINLNKEEDVEPSIKCNGKIINPIGMCRVYHCGGLVCITKSFSNTRDVVWNPYLGQTRWIKPRSHHAYIYAIGYETKKSCRSYKILSSEHNYINIDDERVDYEIYELDSNSWRALDVNSNWATAFYKMDVSVKGNSYTYTDYRGDFLISFDFTTERFGPTLPLPFHSRCGDIVALSSVREEKLAVLLHRCNISRMEIWITNKIEPNNVSWGKLFLTVDMKPLIIDDGIFFIDEEKKVVVVFDKDKEMRNRITAYIIGENGYFRKVDLGDSESFPVRCSYVPSSVEIKQLAKGKSN

SEQ ID NO: 121060 - DNA, 1146 bp, Arabidopsis thaliana
  CDS (1)..(1146)
atgtttaccgatcttccacgagatttagaaacagaaatactctcaagagttcccgccacatctctacaaaaattgaagcctacttgcaaacggtggtacactttattcaaagatccggaattcctcaagaagcatgtgggtagagcggaaagggaggtgatttcgctgatgagtctcagggtttattcacttagtgttaatctctctggaatccacagcagcgttgaaatgacaggtatgttaaacagtctcaaggattctgaagatgtcaaaatatctgacatcactgagtgcaacggtttattattgtgcaccaccgatgacagtagacttgtggtttggaacccttatactggtgaaaccaggtggatcccttacaaatccaactcaccttatgaaatgtaccagaagtttgttttgggatacgacaacaccaataaatctcgctatagctacaaaatcttgaggtgttaccacggcttgatcgactttggttatgagtttgaaatctatgagtttaactctcattcatggaggagattttatgacaactctcctaattgttcctttgaatctaagggcgtgacactgaagggcaacacttactggtttgcttcagatactgaaggccgccacatcatactcaggtttgatttcgcaacagagagatttggacgtctctctcttctttatcagagtggtggttatgttgataatgttgtggaaactggggttttatcggctgttagagaagagaaacttgcgttgttatatgagaggtttgatgagctgaatgattcatcagagatgaagatatgggtgacgaatactaaaatcgtcgaggccaaagacttgtcgtggagcgacttcttggtagtggattcctctaaatttatggtaacaaggatgacgaatgtgatgagtttcctggtggacgaggagaaaaaaatggtggtggtttgtgatacagacattgatcaacatatgaacagattttacattgtcggagaggatatatacaaagaagtttataaagatattgcacagggatggttttcctattggccacttctcatcagttatgctccaagtctggttcaaattcagcaaggtaaagtgattcccggaggcaaaagaaaaaggtga

SEQ ID NO: 121061 - protein, 381 aa, Arabidopsis thaliana
MFTDLPRDLETEILSRVPATSLQKLKPTCKRWYTLFKDPEFLKKHVGRAEREVISLMSLRVYSLSVNLSGIHSSVEMTGMLNSLKDSEDVKISDITECNGLLLCTTDDSRLVVWNPYTGETRWIPYKSNSPYEMYQKFVLGYDNTNKSRYSYKILRCYHGLIDFGYEFEIYEFNSHSWRRFYDNSPNCSFESKGVTLKGNTYWFASDTEGRHIILRFDFATERFGRLSLLYQSGGYVDNVVETGVLSAVREEKLALLYERFDELNDSSEMKIWVTNTKIVEAKDLSWSDFLVVDSSKFMVTRMTNVMSFLVDEEKKMVVVCDTDIDQHMNRFYIVGEDIYKEVYKDIAQGWFSYWPLLISYAPSLVQIQQGKVIPGGKRKR

SEQ ID NO: 121062 - DNA, 1089 bp, Arabidopsis thaliana
  CDS (1)..(1089)
atgatgatgtcaaatcttccaaaggatttggtggaggagattctctctagggttccgtttaaatacctgagagcaatacgatctacttgcaaaaattggtacgatttatcaaaaaatcggagctttgcgaataagaacatcgacaaagcagcggtatcaggggaaaaagagtttctgatgatcacacaatttaatgttttttgggtcggcgtcaatctccatagaagtcagaacaacagctttgatctatctattcagcttaaggctaaaattgttagcagagacaaaaaagatgatttattccaaaaatctcaagtcattcactgcaacggtgtatttttatgcgtacgggaaaaaatgcttgtggttttgaacccgtattggggacaaacaaaacggatcatgccaagacctcctttcgggtgcttcgacaggtatgctctcggatacgacaaatccagcggtagccacaaaatcctgaggcttttcggtgtcaaccaaaataacctcaatatctacgatttgagctctagttcatggatgattcctgatggcactcttgaacgagatatggagtatatgaaacaaggcgtgtctttgaatggagatacttactggtatgctaaagataaggaatcaatagactggtacttattatgttttgattttacaagagagagatttggaacacctctgcctctgccctttagtaatgaaggttatactctacacaaaggttataagtctctatctgctcttaaagaagagaagcttgcggtgttactatgggatacaatggttatttgggttacgaacaagattgagcctgatgcggtgtcgtggagcatcttcttaaaacttgatatggaaccaagtatttattgtcgctatgggaatttcttcattgacgaggaaaagaaagtcgcagttgtgtttgagaaagacagctcgtcatggtcatggatgtataaccccaattacaacaaagcttacatagctggagagaatggttatttcaaaagtgtgaatcttcttaaatctccaaacacactacagcttggccatcttgtgtgctcatatgctctatga

SEQ ID NO: 121063 - protein, 362 aa, Arabidopsis thaliana
MMMSNLPKDLVEEILSRVPFKYLRAIRSTCKNWYDLSKNRSFANKNIDKAAVSGEKEFLMITQFNVFWVGVNLHRSQNNSFDLSIQLKAKIVSRDKKDDLFQKSQVIHCNGVFLCVREKMLVVLNPYWGQTKRIMPRPPFGCFDRYALGYDKSSGSHKILRLFGVNQNNLNIYDLSSSSWMIPDGTLERDMEYMKQGVSLNGDTYWYAKDKESIDWYLLCFDFTRERFGTPLPLPFSNEGYTLHKGYKSLSALKEEKLAVLLWDTMVIWVTNKIEPDAVSWSIFLKLDMEPSIYCRYGNFFIDEEKKVAVVFEKDSSSWSWMYNPNYNKAYIAGENGYFKSVNLLKSPNTLQLGHLVCSYAL

SEQ ID NO: 121064 - DNA, 1119 bp, Arabidopsis thaliana
  CDS (1)..(1119)
atgatgatgtccgatctttctttggatttggtagaggaaatactctctagggttccagccacatctctcaaacgattacgatctacttgcaaactatggaacgctttatttaaaaacccgggatttaccaagaagcaatttcttaaagcaccaaaggagtcactggttctcatgttgaaggagtatagcgtttgtccaatgatcgccaatctcagcgtttctgctccgtctatagagtttaaaggtgcacttaacctaaagaattatcctccttattcagaagaagtcgatatacatgaagcttgtcactgtgatggtttattgctatgtacaactatggactatagaatagtggtttggaacccgtgtttgggggaaacaaggtggatccgatggcccaaaaacatttactctaggtttgctctaggatacgagaaaaacaaatatggccgtatctacaaaatcttgaggtgttgggatcgtcacaattcaccaactggccgagttgatgagtttgaaatctatgagtttagctctgattcatggagggttcttgatctcgtcgctcttgattgccacatagcatcacatattggcgtttctttcaagggaaatacttattggcttgcgtctgataaaaaagacaaatatggactcttgctttgcttcgattttacaacagaaagatttacgcgtctgtgtcttccaccatctcaggatgtgtctaagatggctctatcagttgttggaggaaaacaactctcactgttaagtcaaagtgatagtacatcaaagataatggagatgtgggtgaccaatattattgaagatgtactgatgtggagcaaatcttttaccgtggatatacccattcgcggtgattattgtccgtatttgacgagttatctagtcgacgaagaaaagaaagtggctgtgtgttataatgaaaattttgagaaaagcaacaagaaagtatacattattggagaggacaatggatactacacagaaatccctttagtagaatctagttaccaagtgtggggatatccaattattttcaattatgttccaagtttggttcaaatcgaggaaggtggatgcattataaaagaatga

SEQ ID NO: 121065 - protein, 372 aa, Arabidopsis thaliana
MMMSDLSLDLVEEILSRVPATSLKRLRSTCKLWNALFKNPGFTKKQFLKAPKESLVLMLKEYSVCPMIANLSVSAPSIEFKGALNLKNYPPYSEEVDIHEACHCDGLLLCTTMDYRIVVWNPCLGETRWIRWPKNIYSRFALGYEKNKYGRIYKILRCWDRHNSPTGRVDEFEIYEFSSDSWRVLDLVALDCHIASHIGVSFKGNTYWLASDKKDKYGLLLCFDFTTERFTRLCLPPSQDVSKMALSVVGGKQLSLLSQSDSTSKIMEMWVTNIIEDVLMWSKSFTVDIPIRGDYCPYLTSYLVDEEKKVAVCYNENFEKSNKKVYIIGEDNGYYTEIPLVESSYQVWGYPIIFNYVPSLVQIEEGGCIIKE

SEQ ID NO: 121066 - DNA, 1176 bp, Arabidopsis thaliana
  CDS (1)..(1176)
atgacgatgatgttcgatcttacgcaggatttggtgaaagagatattgtctagggttccgataacttccctaggagcagtgagatccacttgcaaaggatggaacgctttatccaaagatcggattctatgtaaagcaaaaccaaaacagcagtttcatcaagggttcatgctgtctgattataggcttcgttcaatgaggttcaatatctctggaaccttcaaggaaaatggtgaagaattcgttaacttatcagtaaaggagattggtaattttcttaataaagttgagatatctcatatgtattactgcggcggtatattgttatgtgtcaccacggatactaggctcgtgatttggaacccgtatttggggcaaatcaggtggatccaactcaaaacagaaactatgtattccacgttttgtctcagatatgacaacaacaaaaaccacaagatattgaggtttctcgataataaacagggctcatacgaaatttacgatttgaagtcttattcatggagggcttttgatgtcattcccaagtgggatatagatgatgatgggcagagtgcatcggtaaagggaaatacttactttaggacgatagatgaaaccccaaatttactaatctgttttgattttacggcagaaagatttggaaagcttcttgatccaccttttcagcatggttggatgagtctatcctgggttagagaagagaaactcgtagccttatatcagcacttggatacatctatgatagagatttggattactactaagatagagcccaatgcactatcgtggacctccttcttaaaatgttatattgagcaactcattgctcttgatttttggtttgatatagattacaacaatttcttcattgacgaggagaagaaactcgcggtggttattgataaagtcgaatctgaagactgcaaaagatctaattctcacatcaattcttacatcattggagatgatggctacttgaaaaaaatgaatagtcttggaaacactgcaagatcttataccgcaattatgttatctagctgttacgtttcaagtttagtgcaaattgatgatcccattgcaagacgcagaagaagagagaggaacagcaaacgaaaagagaagaagaggaagggaaccaccaacaacaaggtgtaa

SEQ ID NO: 121067 - protein, 391 aa, Arabidopsis thaliana
MTMMFDLTQDLVKEILSRVPITSLGAVRSTCKGWNALSKDRILCKAKPKQQFHQGFMLSDYRLRSMRFNISGTFKENGEEFVNLSVKEIGNFLNKVEISHMYYCGGILLCVTTDTRLVIWNPYLGQIRWIQLKTETMYSTFCLRYDNNKNHKILRFLDNKQGSYEIYDLKSYSWRAFDVIPKWDIDDDGQSASVKGNTYFRTIDETPNLLICFDFTAERFGKLLDPPFQHGWMSLSWVREEKLVALYQHLDTSMIEIWITTKIEPNALSWTSFLKCYIEQLIALDFWFDIDYNNFFIDEEKKLAVVIDKVESEDCKRSNSHINSYIIGDDGYLKKMNSLGNTARSYTAIMLSSCYVSSLVQIDDPIARRRRRERNSKRKEKKRKGTTNNKV

SEQ ID NO: 121068 - DNA, 1044 bp, Arabidopsis thaliana
  CDS (1)..(1044)
atggtgagattggatcttccatgggatttggtagatgaaatactctctcgacttcccgcaacatctctaggtcgactacgatttacatgcaaacgatggaatgctttattcaaagatccggaattcatcacaaagcaatttcataaagcagcaaagcaagatttggttctcatgttgagtaattttggggtttactcgatgagtaccaatctcaaagaaattcccaacaacattgaaatagcgcaagtttttcattgcaacggcttattgttatgttccacggaagagggtaacaagactaaactcgtggttgtgaatccgtgtactggtcagaccaggtggatcgaaccaagaactgattacaattataatcatgatatcgctctaggttacggaaacaacagcaccaagaaatcgtacgacagctacaaaatcttgaggattacgtatggttgcaaactcgttgaaatctttgagctaaagtctaattcatggagggttctttctaaagtccatcccaacgtggaaaaacactattatggaggcgtgtctttcaagggaaatacctactggctttcgtatacgaaattcaatatattgagttttgatttcacaacagagacatttagaagtgtgcctcttccgtttctgtatcaggatggtttcgttactttagctctatcagttgttagagaagagcaacttctgttgttacgttcgaggtttgatatgggacaggttgggatatggatgtgtaataagattgatactgaaactgtgttgtcgtggagcaaatcctttacattggaatttgattctctgcgtgatcttcctgttatgagtattctgagaatcttcattgaagaagacaagaaagtgattgttgtggattgtgatgacagatggaaggagaacatgatatacattgttggaaagaatggattcaaaaagttaagttatgagaaagaccgatctaatctttggcgtctgccgtttttctttagttatgttccgagtttagttggtttatatccaccaatgtaa

SEQ ID NO: 121069 - protein, 347 aa, Arabidopsis thaliana
MVRLDLPWDLVDEILSRLPATSLGRLRFTCKRWNALFKDPEFITKQFHKAAKQDLVLMLSNFGVYSMSTNLKEIPNNIEIAQVFHCNGLLLCSTEEGNKTKLVVVNPCTGQTRWIEPRTDYNYNHDIALGYGNNSTKKSYDSYKILRITYGCKLVEIFELKSNSWRVLSKVHPNVEKHYYGGVSFKGNTYWLSYTKFNILSFDFTTETFRSVPLPFLYQDGFVTLALSVVREEQLLLLRSRFDMGQVGIWMCNKIDTETVLSWSKSFTLEFDSLRDLPVMSILRIFIEEDKKVIVVDCDDRWKENMIYIVGKNGFKKLSYEKDRSNLWRLPFFFSYVPSLVGLYPPM

SEQ ID NO: 121070 - DNA, 1131 bp, Arabidopsis thaliana
  CDS (1)..(1131)
atgtctgatcttccaccggatttggtggaagacatactctctagggtcccagccacatctctgaaacgattacggtttacttgcaaacaatggaactctttattcaaaaaccgaagattcacagagaagcacttttgtaaagctccaaagcagtctcatgttctcttatggaaggattatacggtttgtccaatgagcatcaatctcaacttttctggttcgtctatagagtttaagagtgtacttagcctaaaggattcacattataattcagaacaagtctatatagccaaagtttttcactgcgatggtttgttgttatgcaccaccaaggatcatagactcttagtttggaatccgtgtttgggggaaaccaggtggatcaactttgaaaatgattacaagccatattctaggttttctctaggatacaaaaataacaaatcatgccgtagctacaaaatcttgaggttttggacatcttatttgacaccaaaccatattggcctaaggtataatatctatgagtttaccactgattcatggagggttcttattgataaagtctctctcaactactttctcatagaatcagagaatggtgtgtctttcaaaggaaatacttattggcttgctttagatgaagaaacaaatttcttactcggttttgattttacaatggagagatttaaacgtttgtgtcttccctcaaataagaattgtgatacgatggttctatcggttgttagagaagaaaaactctcagtatcacatcagaacttttgttcatcaaagatggatatttggatgaccaatagaattgatagtgaaaccgccatgtcctggaagaggtacttttctgtggagtttaaaatccttagtatgtgtcattctttaccgttttgcaatagttttctgatcgatgaggaaaagaaaattgtcatatcgactgtaaggggtaatgagaacatggtaaacattattggagcgtacaatgcgtattatgcagaagtccctgtggaatctacaaattggccatgtagtccatattttgtcagttatgttccaagtttggttcaaatccagcaatgtaaaagcaaagaaaataataaaactagtcttgaaatgtaa

SEQ ID NO: 121071 - protein, 376 aa, Arabidopsis thaliana
MSDLPPDLVEDILSRVPATSLKRLRFTCKQWNSLFKNRRFTEKHFCKAPKQSHVLLWKDYTVCPMSINLNFSGSSIEFKSVLSLKDSHYNSEQVYIAKVFHCDGLLLCTTKDHRLLVWNPCLGETRWINFENDYKPYSRFSLGYKNNKSCRSYKILRFWTSYLTPNHIGLRYNIYEFTTDSWRVLIDKVSLNYFLIESENGVSFKGNTYWLALDEETNFLLGFDFTMERFKRLCLPSNKNCDTMVLSVVREEKLSVSHQNFCSSKMDIWMTNRIDSETAMSWKRYFSVEFKILSMCHSLPFCNSFLIDEEKKIVISTVRGNENMVNIIGAYNAYYAEVPVESTNWPCSPYFVSYVPSLVQIQQCKSKENNKTSLEM

SEQ ID NO: 121072 - DNA, 20 bp, Artificial sequence
  primer
atggcgatttcagatcttcc

SEQ ID NO: 121073 - DNA, 20 bp, Artificial sequence
  primer
ctaaaattgcactgaacttg

SEQ ID NO: 121074 - protein, 463 aa, Artificial sequence
  consensus sequence
  Variant (2)..(3): Xaa in position 2 to 3 is any amino acid
  Variant (6)..(6): Xaa in position 6 is any amino acid
  Variant (7)..(7): Xaa in position 7 is any or no amino acid
  Variant (9)..(9): Xaa in position 9 is any amino acid
  Variant (16)..(17): Xaa in position 16 to 17 is any amino acid
  Variant (19)..(22): Xaa in position 19 to 22 is any amino acid
  Variant (24)..(24): Xaa in position 24 is any amino acid
  Variant (28)..(28): Xaa in position 28 is any amino acid
  Variant (30)..(31): Xaa in position 30 to 31 is any amino acid
  Variant (33)..(62): Xaa in position 33 to 62 is any amino acid
  Variant (63)..(114): Xaa in position 63 to 114 is any or no amino acid
  Variant (116)..(116): Xaa in position 116 is any amino acid
  Variant (117)..(117): Xaa in position 117 is any or no amino acid
  Variant (119)..(123): Xaa in position 119 to 123 is any amino acid
  Variant (124)..(131): Xaa in position 124 to 131 is any or no amino acid
  Variant (133)..(133): Xaa in position 133 is any amino acid
  Variant (136)..(137): Xaa in position 136 to 137 is any amino acid
  Variant (139)..(142): Xaa in position 139 to 142 is any amino acid
  Variant (144)..(146): Xaa in position 144 to 146 is any amino acid
  Variant (147)..(196): Xaa in position 147 to 196 is any or no amino acid
  Variant (199)..(201): Xaa in position 199 to 201 is any amino acid
  Variant (203)..(204): Xaa in position 203 to 204 is any amino acid
  Variant (206)..(210): Xaa in position 206 to 210 is any amino acid
  Variant (211)..(228): Xaa in position 211 to 228 is any or no amino acid
  Variant (230)..(230): Xaa in position 230 is any amino acid
  Variant (236)..(238): Xaa in position 236 to 238 is any amino acid
  Variant (239)..(272): Xaa in position 239 to 272 is any or no amino acid
  Variant (277)..(277): Xaa in position 277 is any amino acid
  Variant (279)..(279): Xaa in position 279 is any amino acid
  Variant (281)..(284): Xaa in position 281 to 284 is any amino acid
  Variant (285)..(285): Xaa in position 285 is any or no amino acid
  Variant (288)..(294): Xaa in position 288 to 294 is any amino acid
  Variant (295)..(302): Xaa in position 295 to 302 is any or no amino acid
  Variant (305)..(305): Xaa in position 305 is any amino acid
  Variant (307)..(308): Xaa in position 307 to 308 is any amino acid
  Variant (310)..(310): Xaa in position 310 is any amino acid
  Variant (312)..(313): Xaa in position 312 to 313 is any amino acid
  Variant (315)..(320): Xaa in position 315 to 320 is any amino acid
  Variant (321)..(330): Xaa in position 321 to 330 is any or no amino acid
  Variant (333)..(333): Xaa in position 333 is any amino acid
  Variant (335)..(336): Xaa in position 335 to 336 is any amino acid
  Variant (337)..(337): Xaa in position 337 is any or no amino acid
  Variant (339)..(342): Xaa in position 339 to 342 is any amino acid
  Variant (343)..(344): Xaa in position 343 to 344 is any or no amino acid
  Variant (347)..(348): Xaa in position 347 to 348 is any amino acid
  Variant (349)..(350): Xaa in position 349 to 350 is any or no amino acid
  Variant (353)..(364): Xaa in position 353 to 364 is any amino acid
  Variant (365)..(384): Xaa in position 365 to 384 is any or no amino acid
  Variant (386)..(387): Xaa in position 386 to 387 is any amino acid
  Variant (389)..(391): Xaa in position 389 to 391 is any amino acid
  Variant (393)..(404): Xaa in position 393 to 404 is any amino acid
  Variant (405)..(417): Xaa in position 405 to 417 is any or no amino acid
  Variant (419)..(419): Xaa in position 419 is any amino acid
  Variant (421)..(424): Xaa in position 421 to 424 is any amino acid
  Variant (425)..(459): Xaa in position 425 to 459 is any or no amino acid
LXXDLXXEXILSRVPXXSXXXXRXTCKXWXXLXXXXXXXXXXXXXXXXXXXXXXXXXXXXXXXXXXXXXXXXXXXXXXXXXXXXXXXXXXXXXXXXXXXXXXXXXXXXXXXXXXGXXLXXXXXXXXXXXXXVXNPXXGXXXXIXXXXXXXXXXXXXXXXXXXXXXXXXXXXXXXXXXXXXXXXXXXXXXXXXXXXXIYXXXSXXWXXXXXXXXXXXXXXXXXXXXXXXSXKGNTYXXXXXXXXXXXXXXXXXXXXXXXXXXXXXXXXXXXXXFDFTXEXFXXXXXLPXXXXXXXXXXXXXXXLSXVXXEXLXXLXXXXXXXXXXXXXXXXIWXTXXXIXXXXXXSWXXXXFLXXXXXXXXXXXXXXXXXXXXXXXXXXXXXXXXFXXDXXXKXXXXXXXXXXXXXXXXXXXXXXXXXIXGXXXXXXXXXXXXXXXXXXXXXXXXXXXXXXXXXXXXXXXYVPS

SEQ ID NO: 121075 - protein, 28 aa, Artificial sequence
  protein pattern
  Variant (2)..(2): Xaa in position 2 is any amino acid
  Variant (3)..(3): Xaa in position 3 is any or no amino acid
  Variant (5)..(7): Xaa in position 5 to 7 is any amino acid
  Variant (8)..(8): Xaa in position 8 is any or no amino acid
  Variant (10)..(10): Xaa in position 10 is any amino acid
  Variant (11)..(11): Xaa in position 11 is Pro or Ser
  Variant (12)..(17): Xaa in position 12 to 17 is any amino acid
  Variant (18)..(18): Xaa in position 18 is Ile, Leu, Met or Val
  Variant (19)..(20): Xaa in position 19 to 20 is any amino acid
  Variant (23)..(24): Xaa in position 23 to 24 is any amino acid
  Variant (26)..(27): Xaa in position 26 to 27 is any amino acid
  Variant (28)..(28): Xaa in position 28 is Ile or Leu
LXXEXXXXRXXXXXXXXXXXTCXXWXXX

SEQ ID NO: 121076 - DNA, 957 bp, Escherichia coli
  CDS (1)..(957): transl_table=11
atgtcatacccgctttttgacaaagacgaacactggcataagccagagcaggcgtttctcaccgatgaccaccggaccattctgcgcttcgccgtagaggcgctaatgtccggtaaaggagcggtgctggtgacgctggtggagatacgcggcggcgcggcgcgcccgctcggggcgcagatggtggtgcgcgaagatggtcgttactgcggttttgtctctggcggctgcgtggaggccgctgccgcttttgaagcgctggagatgatgggctcaggccgcgatcgcgaaattcgctatggcgaaggttcgccgtggtttgacatcgttctgccctgcggcggtgggatcacgctgacgctccataaactacgctcggcacagcctctgctcgccgtgctgaaccgcctggaacagagaaaaccggtggggctgcgctacgatccgcaagcacaatcgctggtgtgcctgcccacgcaaacccggacgggctggaatctcaatggctttgaggtggggttcaggccatgcgtcaggctgatgatttacggacgttctcttgaggcgcaggcaaccgcgagtcttgcagcagccacaggctatgacagccatatcttcgatctttttccggcctcagccagcgctcagatcgataccgatacggcggtcattttgctgtgccatgatctcaaccgggagctgccagtgttgcaggccgcgcgagaagcaaaacccttttatctcggcgcattgggcagctatcgaacccacacgttacgtctgcaaaagctccacgagctgggatggtccagggaggaaacaacgcaaatccgggcacccgtcgggatattccccaaagcccgggatgcgcatactctggcactctccgtgctggcagaagtcgcctctgtacgtctccatcaggaggaggattcatgcctgcccccgtcgtcctaa

SEQ ID NO: 121077 - protein, 318 aa, Escherichia coli
MSYPLFDKDEHWHKPEQAFLTDDHRTILRFAVEALMSGKGAVLVTLVEIRGGAARPLGAQMVVREDGRYCGFVSGGCVEAAAAFEALEMMGSGRDREIRYGEGSPWFDIVLPCGGGITLTLHKLRSAQPLLAVLNRLEQRKPVGLRYDPQAQSLVCLPTQTRTGWNLNGFEVGFRPCVRLMIYGRSLEAQATASLAAATGYDSHIFDLFPASASAQIDTDTAVILLCHDLNRELPVLQAAREAKPFYLGALGSYRTHTLRLQKLHELGWSREETTQIRAPVGIFPKARDAHTLALSVLAEVASVRLHQEEDSCLPPSS

SEQ ID NO: 121078 - DNA, 957 bp, Escherichia coli O157:H7 EDL933
  CDS (1)..(957): transl_table=11
atgtcatacccgctttttgataaagacgaacactggcataagccagagcaggcgtttctcaccgatgaccaccggaccattctgcgcttcgccgtagaggcgctaatgtccggtaaaggagcggggctggtgacgctggtggagatacgcggcggcgcggcgcgcccgctcggggcgcagatggtggtgcgcgaagatggtcgttactgcggttttgtctctggcggctgcgtggaggccgctgccgcttttgaagcgctggagatgatgggctcaggctgcgatcgcgaaattcgctatggcgaaggttcgccgtggtttgacatcgttctgccctgcggcggtgggatcacgctgacgctccataaactacgctcggcacagcctctgctcgccgtgctgaaccgcctggaacagagaaaaccggcggggctgcgctacgatccgcaagcacaatcgttggtgtgcctgcccacgcaaacccgaacgggctggaatctcaatggctttgaggtggggttcaggccatgcgtcaggctgatgatttacggacgttctcttgaggcgcaggcaaccgcgagtcttgcagcagccacaggctatgacagccatatcttcgatctttttccggcctcagccagcgctcagatcgataccgatacggcggtcattttgctgtgccatgatctcaaccgggagctgccagtgttgcaggccgcgcgagaagcaaaacccttttatctcggcgcattgggcagctatcgaacccacacgttacgtctgcaaaagctccacgagctgggatggtccagggaggagacagcgcaaatccgggcacccgtcgggatattccccaaagcccggaatgcgcatacactggccctctccgtgctggcagaagtcgcctctgtacgtctccatcaggaggaggattcatgcctgcccccgtcgtcctga

SEQ ID NO: 121079 - protein, 318 aa, Escherichia coli O157:H7 EDL933
MSYPLFDKDEHWHKPEQAFLTDDHRTILRFAVEALMSGKGAGLVTLVEIRGGAARPLGAQMVVREDGRYCGFVSGGCVEAAAAFEALEMMGSGCDREIRYGEGSPWFDIVLPCGGGITLTLHKLRSAQPLLAVLNRLEQRKPAGLRYDPQAQSLVCLPTQTRTGWNLNGFEVGFRPCVRLMIYGRSLEAQATASLAAATGYDSHIFDLFPASASAQIDTDTAVILLCHDLNRELPVLQAAREAKPFYLGALGSYRTHTLRLQKLHELGWSREETAQIRAPVGIFPKARNAHTLALSVLAEVASVRLHQEEDSCLPPSS

SEQ ID NO: 121080 - DNA, 990 bp, Agrobacterium tumefaciens str. C58
  CDS (1)..(990): transl_table=11
atgacgcaatcggccgatatcatccgacataacggcggtgcaccacgttggttgcctcgcaatgccgacattccaacggtggcggtgccgcaaaaggctttttcgaccgataccgcctgcgacatcctgagcttcgccatcgcgaatataaaggctgggcttcaggtgggcctatgcacgttggtggagatacgtggcggctcgtcgcgtccgctcggtgcccatatggctgtcgcccaagatggacgttattgcggctacgtgtctggtggatgcacggaagcggctgtcgccgctgaagccttgcaggctatgaaaagcggccatgatcgtttcgtgttgctgggtgaaggttcgcccttcttcgatatcgtccttccgtgcggaggcggcattacagttgccattcatcttctgaaagacgtggaccctctctgttccgtcaacatgctggtagatgggcgccggagtgcaacgctttgctattcacccggcctggaggagctttcactcggttccccaggtgcgcgaactggctgggatggggatatttttctcacgtcatatcggccaaaaccgcgcgtcattttttcggggcgctcactcgaggtggaaacagccgtaaatgttgcgaaagccggaggatacgaggtcatctttttcgatcacacggccggcgacagcttcgatagctccctgattgatgctgatacagccgttgcgcttctgctgcatgacctggatctggaaatgccgatcctcggcgccgcacttgttgcgacgcccttttatattggggctctcggcagttcccgcacgcatgaaaagcgcgtcgagcgcctgcggcaaattggtcattcggaagaagcaatcgctcgcatcaaggcaccgatcggacttttcggacgggcgagagacgcgcagtctctggccttttcggtcgtcgctgacattgcggcatcacgccagtcttgcgtgatgcacagctag

SEQ ID NO: 121081 - protein, 329 aa, Agrobacterium tumefaciens str. C58
MTQSADIIRHNGGAPRWLPRNADIPTVAVPQKAFSTDTACDILSFAIANIKAGLQVGLCTLVEIRGGSSRPLGAHMAVAQDGRYCGYVSGGCTEAAVAAEALQAMKSGHDRFVLLGEGSPFFDIVLPCGGGITVAIHLLKDVDPLCSVNMLVDGRRSATLCYSPGLEELSLGSPGARTGWDGDIFLTSYRPKPRVIFSGRSLEVETAVNVAKAGGYEVIFFDHTAGDSFDSSLIDADTAVALLLHDLDLEMPILGAALVATPFYIGALGSSRTHEKRVERLRQIGHSEEAIARIKAPIGLFGRARDAQSLAFSVVADIAASRQSCVMHS

SEQ ID NO: 121082 - DNA, 942 bp, Caulobacter crescentus CB15
  CDS (1)..(942): transl_table=11
atgcacggcctggctgacgatgcccgcccggccttggcccaggcgctttccagaggccctgcggccctggcgacgatcgttgcgctgggcggcggcggcccgcgcccggtcggcgcccagatggtcttcagcgaaaaaattgtttccgggtttctgtccggcggctgcatcgaggcggatgtcgaggtccacgcccgcgcctgcctcggagacggggtttcgcgtcggctggtctatggcgagggcagtccctggccggacatccgtctgctgtgcggcgcgcgtatcgaaatcctggtcgagcggatcgcccccgacgatcaagccgcccgggctctcctcgatctggccgccgcccgcctgccggccttctgggtcagcgacgggatgcgtcgcctctgcgccgaggcgccggaggttccctgggccggcgcctttgagcgggcctatgacccaaccccgcgcgtggtggtgatcggtggtgacccgacggcgctggcgatcgccagtctggccgcccagtccggccatgagaccttcctgctgcgccccaagggtccggctgaagcgccaccgctcgcgggggtggcgtaccgccgcgagccgctggacgaggccctgggctccatcggtctggacgcctggacatccgtggcggtgtgcggccatgacctggagcaggatcacaccgccctgatgaccgccctgccctcgccggcgccctatgtcggcctgctgggcgcgcggcgacgcctgcccgagcggatcgcgcggctgaaggcggcggggctgggcgaacgggagctgggcaagctgcgcgctccgatcggccttgatctgggcggcaaggccccgttcgaggtggcggtggcggtgatcggcgagatcatggccgcccgccacggccagccggcgctggcgcggcgggtggtggaggcctga

SEQ ID NO: 121083 - protein, 313 aa, Caulobacter crescentus CB15
MHGLADDARPALAQALSRGPAALATIVALGGGGPRPVGAQMVFSEKIVSGFLSGGCIEADVEVHARACLGDGVSRRLVYGEGSPWPDIRLLCGARIEILVERIAPDDQAARALLDLAAARLPAFWVSDGMRRLCAEAPEVPWAGAFERAYDPTPRVVVIGGDPTALAIASLAAQSGHETFLLRPKGPAEAPPLAGVAYRREPLDEALGSIGLDAWTSVAVCGHDLEQDHTALMTALPSPAPYVGLLGARRRLPERIARLKAAGLGERELGKLRAPIGLDLGGKAPFEVAVAVIGEIMAARHGQPALARRVVEA

SEQ ID NO: 121084 - DNA, 981 bp, Silicibacter pomeroyi DSS-3
  CDS (1)..(981): transl_table=11
gtggaggcatctatggaacgatttgacaacgcacccgaaaccgcgctggcctggcaccgccaagggctgggcgcagccctggccacggtggtggaaacctggggcagcgccccgcgccgggtgggcgcgcaactggtgatcggcggcgatggccggatcgagggatcggtctcgggcggctgtgtcgagggcgcggtgatcgtcgaggcgctggaggcgctggaggaaggtcaggcgcgcctgctggaattcggggtcagcgacgaggacgcctttgccgtgggtctggcctgtggcggcaccatccgcgtgctggtcgagccggtgggccaggtcctgtccgaggtgatgctggccgagctggtcgccgcccgcgcctcccgtcaggcgctggcctatgtggtcgataccgcgcgcggcaccagggcgctggtgcgtgatgcctatcctgaacggatgcgaatggaccggtccggcttcgacgaggatgggcggacatttgtcgccgtgcacaacccgcccctgcggctgatcgtcgtgggcgcggtgcatatcgcccaggcgctggtgccaatggcgcgtatcgcgggctatgatccggtggtgatcgacccgcgcgaggcctttgccagcgacgcgcgctttcccggcgagaccatcctgcatgactggcccgacgaggcggtggcaaagctgggtcttgatgcgcgcaccgcgctggtgctgctgacccatgaccccaagctggacgatcccgcgcttgaggcggcgctggccgcggatgtgttctatatcggcgcgctgggctccacccggacccatgcgaaacgggttgcccggatgcaggaggccgggttcaccgaggcacagatcgggcgcattcacgggcccgtcggcctcgatatcggggcggcgggcccggccgagatcgcggtggcgatcctggcgcaaatgacggctgtactgcggggccgggcatga

SEQ ID NO: 121085 - protein, 326 aa, Silicibacter pomeroyi DSS-3
MEASMERFDNAPETALAWHRQGLGAALATVVETWGSAPRRVGAQLVIGGDGRIEGSVSGGCVEGAVIVEALEALEEGQARLLEFGVSDEDAFAVGLACGGTIRVLVEPVGQVLSEVMLAELVAARASRQALAYVVDTARGTRALVRDAYPERMRMDRSGFDEDGRTFVAVHNPPLRLIVVGAVHIAQALVPMARIAGYDPVVIDPREAFASDARFPGETILHDWPDEAVAKLGLDARTALVLLTHDPKLDDPALEAALAADVFYIGALGSTRTHAKRVARMQEAGFTEAQIGRIHGPVGLDIGAAGPAEIAVAILAQMTAVLRGRA

SEQ ID NO: 121086 - DNA, 978 bp, Novosphingobium aromaticivorans DSM 12444
  CDS (1)..(978): transl_table=11
atggtcgccacaacgccactcgatatcctgcgcttcatcgcttcccgaaccgccgaggggctggagtgcgtgctcgtcacgctcgtcgggatcgagggcggatcgtcgcgcgcggtgggggcgcagatggcggtggcggcggacggacggcggattggctccttttccggtggctgcatcgaggatgcggtcgccgccgaagcgctcgaggcgctggccgagggatgggggcgagtggtgcgctacggcatcggttcgccctatatcgacatccgcctgccctgtggcggcgggatcgacctgctcttcacgcctcgtcccgatcctgtggcaatttccagggtactttcgacacttgcgcggcgggaggccggggcgttggtgctgggctgcgatggcatcgcccttgccgacgaagcggtctcggcgccgtgggacggccacgcgctaacccatgcctaccagccgacgctgcgcatccacgccttcggacagggagaggatcttgtcgcgctggcccggctgggcaccgccttcggagccgaggtccacgcccttgcgcccgatgaatcaacccgcaacctcctgaccgaacagggaattttggtaacaccgctaatctcgcgagccgtcctgccaccgctcgcgagcgatccctggtcggcaatcgtgttcctgttccacggccgcgactgggaggaaatgctgctgccgcaagcaattgccctgcccgccttctatcacggcgcgatcggcagccgtcgcacccacgcggcccgcctcgcggcactgcatgcagccgaagtcccgcccgaacatatagatcggttgcgcggccacatcggcgtgatcccggcaacgcgcgatccggcaacgctggccctgtctatccttggagagatagtgcctgaatacaacgccttggctcattgggctacgtggatgggtgagccgctcctgaccgccgctgcgacgtga

SEQ ID NO: 121087 - protein, 325 aa, Novosphingobium aromaticivorans DSM 12444
MVATTPLDILRFIASRTAEGLECVLVTLVGIEGGSSRAVGAQMAVAADGRRIGSFSGGCIEDAVAAEALEALAEGWGRVVRYGIGSPYIDIRLPCGGGIDLLFTPRPDPVAISRVLSTLARREAGALVLGCDGIALADEAVSAPWDGHALTHAYQPTLRIHAFGQGEDLVALARLGTAFGAEVHALAPDESTRNLLTEQGILVTPLISRAVLPPLASDPWSAIVFLFHGRDWEEMLLPQAIALPAFYHGAIGSRRTHAARLAALHAAEVPPEHIDRLRGHIGVIPATRDPATLALSILGEIVPEYNALAHWATWMGEPLLTAAAT

SEQ ID NO: 121088 - DNA, 1029 bp, Silicibacter sp. TM1040
  CDS (1)..(1029): transl_table=11
atgacaattgcgggcatgacatctggcacactctccaatgcagaagagggatcgctctctcgttttgacgcggcccctgaactggcccttgcatggcatcgcgcgggtcagggcgctgttctatgtacggttgtgcagacctggggatccgcgccgcggcgcaccggttcgcagcttgtggtcggtggcgacgggcgcatcgaaggctccgtgtctggcggctgcgtcgagggcgccgtcgtcgttgaggcgcaggaggctttggcgcagggctgtcacaagctgttggaattcggcgtgagcgatggcgacgcctttgcggttggactggcatgcggcggcaccatcaaggttctgttggaacctgtggggtccgtattgaaagaagagacgctcgacgcgctggtgacggcccgcagagaaagagaggcggtcgcctatgaagtgagcctgaaaagcggcaaaggccgattggtcgaggcgggcgcctatcccgaacgcctgcggatggatcgctccggggtggaggaagacggcaatacctttgttgccgtgcataacccgcccctgcgcttgatcgtggtcggagccgtccatatcgcgcaggcgcttgtccccatggcgcagatcgcgggctatgatccggttgtgatcgagccccgcgcggcctttggctctgaagagcggtttcccggggtgcgtattctcgaggattggccggatgacgcggtggcccagatcggctttgacagccgttgcgccctggtcctgctgacccatgatcccaagctcgatgatccggcgctgatggccgcgttgcggtcagagtgtttctacatcggcgcacttggctccaatcgcacgcacgggcaacgccgcgaacgaatgatcgaggccggatttggcactgctgacatcgcgcgcatccatggcccggtcgggttggacatcggcgccgccagcccctcggaaattgcggtgtcgatccttgccgagatcacagcagtgctgcggggcaaggcggaatga

SEQ ID NO: 121089 - protein, 342 aa, Silicibacter sp. TM1040
MTIAGMTSGTLSNAEEGSLSRFDAAPELALAWHRAGQGAVLCTVVQTWGSAPRRTGSQLVVGGDGRIEGSVSGGCVEGAVVVEAQEALAQGCHKLLEFGVSDGDAFAVGLACGGTIKVLLEPVGSVLKEETLDALVTARREREAVAYEVSLKSGKGRLVEAGAYPERLRMDRSGVEEDGNTFVAVHNPPLRLIVVGAVHIAQALVPMAQIAGYDPVVIEPRAAFGSEERFPGVRILEDWPDDAVAQIGFDSRCALVLLTHDPKLDDPALMAALRSECFYIGALGSNRTHGQRRERMIEAGFGTADIARIHGPVGLDIGAASPSEIAVSILAEITAVLRGKAE

SEQ ID NO: 121090 - DNA, 930 bp, Rhizobium leguminosarum bv. viciae 3841
  CDS (1)..(930): transl_table=11
atggatcagacacttgcgcccatcacggcgccaattcccgtcagggccgcgtccaccgacgatccggcggaactgcttcgcttcgcgatagacgcccatggtctcggcgcggcggcacttgccaccctcgtcgaaatccggggcggagcggcgcgggcgctcggcgctcatatggccgttgcagcagacgggcggttctgcggctatgtctccggcggatgcgtcgaagccgccgtcgcttccgaagcacttctggcaatggcggaaggacgggaccgcacggtcaagttcggcgacggctctcccttcttcgacattgtccttccctgcggcggcgggatcgctgttgcaatccatgtcctcaaagatgtcggagctttgcagcatgttcttgatcgtctcgaacgcaggcaggcagccggccttgcatattcgccggagcggcagacgctcgaagcggtagacccactgccacgggcgtgctggcacgagcgagattttctgaccgtctaccgtccccgtacccgcattgtcctttccgggcggaccatcgaagcgcaggccgtcgcacgactggccgaggcttccgcctacgacgtgatcgtcagggggcaggacgagggggccaaggtcgcagccgacatcatcgaccccttcacggccgtcgtgctcctgcatcatgacctcgacgccgaagccgccattctcgagaccgcgcttcactcacccgccttttatatcggcgcgctcggcagcacccggacgcatcatcggcgtgtcgagcggttgacagccatggctttcggaaaggatgatatcggtcgcatcaaggcgcccatcgggatgttcggcccgacgcgagatgcaacctcgctcgccctgtctgttctggcggatgtcgccgcggcaagactggtggcttatgcgtga

SEQ ID NO: 121091 - protein, 309 aa, Rhizobium leguminosarum bv. viciae 3841
MDQTLAPITAPIPVRAASTDDPAELLRFAIDAHGLGAAALATLVEIRGGAARALGAHMAVAADGRFCGYVSGGCVEAAVASEALLAMAEGRDRTVKFGDGSPFFDIVLPCGGGIAVAIHVLKDVGALQHVLDRLERRQAAGLAYSPERQTLEAVDPLPRACWHERDFLTVYRPRTRIVLSGRTIEAQAVARLAEASAYDVIVRGQDEGAKVAADIIDPFTAVVLLHHDLDAEAAILETALHSPAFYIGALGSTRTHHRRVERLTAMAFGKDDIGRIKAPIGMFGPTRDATSLALSVLADVAAARLVAYA

SEQ ID NO: 121092 - DNA, 1005 bp, Rhizobium leguminosarum bv. viciae 3841
  CDS (1)..(1005): transl_table=11
ttgtcgatgcaatgtgagttgcaagccgcgcccttgctgtcagcagcgcatccggcgctggccgatccatgggaacttgccatcaatgccagcggggatgtggtgatggccgtcctgactgagacccgcggccccgcttatcgcttgccgggggcagccatggcaatccttccagacggaagtttttccggggcgatcacatccggctgcgtcgaagcagacctcatcttgaatgcaagtgatgttcgcaacaccggtgacgtgcgggtgcttcgctatggcgagggatcgactttcatcgacatccgtctaccctgcggcggtggcatcgaagtcatgttgtttccgctgctcgatgtcgaggtgctggggaaacttgcaaaggccaggaagctccgacggccggtcagcctgcagatttcgaaatccggccggctcaccctgggcccaatcactgaaacaaagaacgatgcgcatggtttcgcacttgggttcgagcctccgctgcagttcttgacgttcggagctggaccggaggcgtcggtctttgccgccttagtagaggggctcggttacgaacagcagctggtctctcatgacgccatgacacttgcatcgacgcgcgcgtccggtaacaagtgccgcgagctgacgaacctttcagagcttttcgcattgcagatcgatgcgcgcacagcagccgtgctcttttatcacgatcacgattacgagccggaaatcatcaagcatctgctgtcgaccccggccttctatattggcgcccagggcagtcgcgccacccaacgctcaagattgcagcggctggaagagattggagtctcccttaaccggtcgagccgagttcgcgggccgatcggtgtgatcccgtcatcgcgtgatccgaagtcgctggcggtgtcggtgctggccgaaatcatggcagccggttcgcaagtctccaaagcctccgagcagcctaacctgaagaaggagtgctgcctgtga

SEQ ID NO: 121093 - protein, 334 aa, Rhizobium leguminosarum bv. viciae 3841
MSMQCELQAAPLLSAAHPALADPWELAINASGDVVMAVLTETRGPAYRLPGAAMAILPDGSFSGAITSGCVEADLILNASDVRNTGDVRVLRYGEGSTFIDIRLPCGGGIEVMLFPLLDVEVLGKLAKARKLRRPVSLQISKSGRLTLGPITETKNDAHGFALGFEPPLQFLTFGAGPEASVFAALVEGLGYEQQLVSHDAMTLASTRASGNKCRELTNLSELFALQIDARTAAVLFYHDHDYEPEIIKHLLSTPAFYIGAQGSRATQRSRLQRLEEIGVSLNRSSRVRGPIGVIPSSRDPKSLAVSVLAEIMAAGSQVSKASEQPNLKKECCL

SEQ ID NO: 121094 - DNA, 1044 bp, Magnetospirillum magnetotacticum MS-1
  CDS (1)..(1044): transl_table=11
atgtgcctcgacgccatcaaatgcgaccccgccgatatggccgccgatgattgcgaggttctggcgaccgctttgaagtggatggatggggggcgccgggtggtcatggccgtggtcatggccacctggggctcggcgcctcggtccatcggctcctatatggcggtggacgccgacggcaccttcgccggatcggtctcgggaggctgcgtcgaatccgccgtcatctccgaggcgcgcgatctggaggaaggtgaggctccccggttgctgtcctttggcgtggaggacgaaaccgcttgggccgtcggcttgccctgcggcggcaatatccgggtggcggtgttccatcccgaacgcgatctcctggaagaggcggtgcggagccaagcatcgcgcaggcccaccgccctggtccttgacctgaacagcggcgctcaggcgctggtcggtgatgcgggggtgatcggtccgctttccctcgacgagacacggttggtggcggcccagatgcatctgggccaaggcacctgcggcgtggtggccgacgaagtcttcgtgcgcacccacgaggcgccctggaccctgatcgtcgcgggcgccgtccatatcactcaggtgctggccgggatggcgcgtcaggcaggttttgccgtcaccgtggtcgatccccgccgcgcctttgccgacgaggcgcgctttcccggcacgaccctcatttgtggcgagcccgacgaggtgctggctagtatcacgctcgaccgccgcagcgcggtggtgagcctcacccatgtgccacgcctggacgacgcggcgcttagggcggcattgggctcggaggccttctatatcggcgctctgggcagtacgcggacccacgccaagcgctgtcagcggctggaagatctgggaccggcgctaaagcgtatcgccgctccggtgggcttcgacatcggcgcgcgcactccggccgaaatcgcggtgtccatcctggccgagctgatcgcagcgcggcgcggcaagcccatgcgggtccggggctga

SEQ ID NO: 121095 - protein, 347 aa, Magnetospirillum magnetotacticum MS-1
MCLDAIKCDPADMAADDCEVLATALKWMDGGRRVVMAVVMATWGSAPRSIGSYMAVDADGTFAGSVSGGCVESAVISEARDLEEGEAPRLLSFGVEDETAWAVGLPCGGNIRVAVFHPERDLLEEAVRSQASRRPTALVLDLNSGAQALVGDAGVIGPLSLDETRLVAAQMHLGQGTCGVVADEVFVRTHEAPWTLIVAGAVHITQVLAGMARQAGFAVTVVDPRRAFADEARFPGTTLICGEPDEVLASITLDRRSAVVSLTHVPRLDDAALRAALGSEAFYIGALGSTRTHAKRCQRLEDLGPALKRIAAPVGFDIGARTPAEIAVSILAELIAARRGKPMRVRG

SEQ ID NO: 121096 - DNA, 969 bp, Sulfitobacter sp. EE-36
  CDS (1)..(969): transl_table=11
atggagattttcgagaacgcaccggaacgcgcctatgcatgggcgcaagcgggccgcggggccgcgctggccacggtggtggagacatggggctctgccccgcgacgggttggcgcgcagctggccatcgccgcagatggcgagatgcagggctctgtctcgggcggttgtgtcgagggggccgtggtggtcgaagcgctcgaggcgatcgaggacggcacgccgcggttgctggaatatggcgtcagcgatggcgacgcctttgccgtggggctggcctgtggcggaaagattcgcgtattggtcgaacctgtgggcgaaaaggcgatgccgtttgacgttctgggcgacctcgtccgcgcccgcgccgcgcgccagcccgtggcctatcaggtgcccctgtcgggcggggtggggcgcttggtcacgggcggctatgcagaccgctttcgcatggaccgttccggcgttgaagaggatggcgatacatttgtcgcgatccacaacccgccgctgcggctggtgatcgtcggggcggtacatatcgcgcaagccttggtgcccatggcgcaggtcgcgggctttgacgccgtggtcatcgacccgcgcgaggcgtttggatcgcaagcgcgttttcccgatgcacaggtgatcaacgactggccggacgcggcgatggacactgtcggcgtcgatacccgcagcgccgttgtgctgctgacccacgaccccaaactggacgaccccgcgctgcatatcgcactccggtccgacgccttctatatcggggcgctcggatcgaaacgcacccatgcctcccgcgtggcacggctggaagaggcggggtttaccgctgccgacatcgcgcgcatcaacggccccgtcgggctggacatcggggccgccagcccgcccgagatcgcggtgtcgatcctgtcgcagatgatccaagccctgagaaaaccgtga

SEQ ID NO: 121097 - protein, 322 aa, Sulfitobacter sp. EE-36
MEIFENAPERAYAWAQAGRGAALATVVETWGSAPRRVGAQLAIAADGEMQGSVSGGCVEGAVVVEALEAIEDGTPRLLEYGVSDGDAFAVGLACGGKIRVLVEPVGEKAMPFDVLGDLVRARAARQPVAYQVPLSGGVGRLVTGGYADRFRMDRSGVEEDGDTFVAIHNPPLRLVIVGAVHIAQALVPMAQVAGFDAVVIDPREAFGSQARFPDAQVINDWPDAAMDTVGVDTRSAVVLLTHDPKLDDPALHIALRSDAFYIGALGSKRTHASRVARLEEAGFTAADIARINGPVGLDIGAASPPEIAVSILSQMIQALRKP

SEQ ID NO: 121098 - DNA, 966 bp, Roseovarius nubinhibens ISM
  CDS (1)..(966): transl_table=11
atggacaggtttgatgacattcccgaacaggcgctggcctggttccgcgagggccggggggcggcgctcgccaccgtggtcgagacatggggcagcgcgccgcgccgggtgggcagtcagctcgccatttccggggcgggcgagattgccggatcggtctcgggcggctgtgtcgagggcgctgtggtggccgaggcgctcgacgcgatcgagcgcgggacgtcggcgacgctcactttcggggtgagcgatgatgatgccttcgccgtggggcttggctgtggcggcacgatccgggtgatggtcgagccgctgggatcggtgctgagcgaagcgctgatggccgagttggtggcggcaagggcggcgcaggagccggtggcggtgatttcgggcggcgaccgcccggcagagatcacccgcgaggggttcgaggcgcggtttcggcaggatctgtcggggttcgaggcggatgggcggtttgtcaccatccacaacccgccgctgcggctcatcgtggtgggggcggtgcatatcgcgcaggcgctggtgccgatggcgcggattgcgggctatgacgtggtgatcgtcgacccgcgcgagagctttgccagcgcggcgcggtttcccggcgagagattgatcgatgactggccggacgaggcgctggcggcgctcggcatcgacgcgcgcacggcggtggtggtgctcagccatgatccgaagatcgacgatccggcgctgatggcggcgctgcggtcagaggcctattacatcggtgctctgggttcgacccggtcgcgggacaagcgggcggtgcgattgggcctgctgggcgccagcgccgaggagatcgggcgcatacacgggccggtggggctcgatatcggggcggcgacaccggcggagattgcggtctcgaccctggccgagatgatcgcggtcttgcgcggcaagagcgcctga

SEQ ID NO: 121099 - protein, 321 aa, Roseovarius nubinhibens ISM
MDRFDDIPEQALAWFREGRGAALATVVETWGSAPRRVGSQLAISGAGEIAGSVSGGCVEGAVVAEALDAIERGTSATLTFGVSDDDAFAVGLGCGGTIRVMVEPLGSVLSEALMAELVAARAAQEPVAVISGGDRPAEITREGFEARFRQDLSGFEADGRFVTIHNPPLRLIVVGAVHIAQALVPMARIAGYDVVIVDPRESFASAARFPGERLIDDWPDEALAALGIDARTAVVVLSHDPKIDDPALMAALRSEAYYIGALGSTRSRDKRAVRLGLLGASAEEIGRIHGPVGLDIGAATPAEIAVSTLAEMIAVLRGKSA

SEQ ID NO: 121100 - DNA, 969 bp, Oceanicola batsensis HTCC2597
  CDS (1)..(969): transl_table=11
atggaccagatacccgaacaggctctcgcgtggcaccaggccggcaagggcgcggcgcttgccacggtggtcgagacctggggcagtgccccccgccgggtcggggcgatgctcgccgtgtcgggagagggggaactcgccggatcggtctccggcggatgcgtcgagggggcggtgatcaccgaggcgttcgacgcgatcgacagcggcaggagcgcggtcctgacctacggtgtctcggacgacgatgcctttgccgtgggcctcgcctgcggcggcacgatccgcatcctgttgcagccggtcggcttcccgcagggcctgccggtcgacactctcgaggacctgtgcgcagcgcgggccgcccggacccccgtcgcccatgtggtcgacaccgccgactggagcgggcgcctcgccggtcgcgacgacttcaccgaccggttccgtgcggatcgttcgggctttctcgaggatggcgcgaccttcgtggccatccacaacccgccgctgcgcatgaccatcgtcggcgcggtccacatcgcgcaggcgctggtccccatggcgcgccttgctggttacgatccgctgatcatagacccgcgtcccgccttcgccgccggaagccgctttccgggcgagacgatccgcgacgcctatcccgacgaggtcctggccgatatcgcgccggatacccgcacggccctcgtgctgctgacgcatgatcccaagatcgacgaccccgcgctcgagatcgggctgcgctccgaggcgttctacatcggtgcgctcggctcgacccgcacccatgccaagcgtgtcacccggcttgaggaaaagggcttcaccggcgccgagatcgaccgcatccacgcccccgtggggctcgacatcggcgcggcgggtcccgccgagatcgccgtcgccatcatggccgagatcacgcaggttctgaggaaaggcgcctga

SEQ ID NO: 121101 - protein, 322 aa, Oceanicola batsensis HTCC2597
MDQIPEQALAWHQAGKGAALATVVETWGSAPRRVGAMLAVSGEGELAGSVSGGCVEGAVITEAFDAIDSGRSAVLTYGVSDDDAFAVGLACGGTIRILLQPVGFPQGLPVDTLEDLCAARAARTPVAHVVDTADWSGRLAGRDDFTDRFRADRSGFLEDGATFVAIHNPPLRMTIVGAVHIAQALVPMARLAGYDPLIIDPRPAFAAGSRFPGETIRDAYPDEVLADIAPDTRTALVLLTHDPKIDDPALEIGLRSEAFYIGALGSTRTHAKRVTRLEEKGFTGAEIDRIHAPVGLDIGAAGPAEIAVAIMAEITQVLRKGA

SEQ ID NO: 121102 - DNA, 945 bp, Erythrobacter sp. NAP1
  CDS (1)..(945): transl_table=11
ttggacctgaagcacgtttgccaattcctcgccgatgccgctcgcgcggaaaagaactgcgtccttgtcacggtggtcgcggtcgaagggtcgtcgatgcgcaatccgggcacgatcatgggcgttgccgaggatggcacctacgccggttccttatccggaggctgcatcgagaacgcggtggtcgccgaagcgcgcgaggtctttactagtggcgacgctcggatcgtgcgctttggcgccgggtcgccctatctcgacatcaagctcccatgcggtggcgggttggatctccactttcagcctttggagggcgcggagctttcagaacagtgcctcagttccatcgcggagcgcgctcccttctccatcgcccttggccccgatggcgcaaggcacgtgggagaatggttgcccccgaccttcgatgccaacgtcggcatggcagcgtttggccattggccagagccgctgttgcagatcatcggtcacggtgcgggggtcgaggctctggctgtgcttgggcggacacatgggtgctcgacgcggatcctgacgccggatgagcggatcgtttctggcttgcgcgagaagggcatcgaagcgctgctgctagagcgtacgagccagacggacctcctcaaaagcgacccgtggaccgcgacgatcttcctcttccacgaccacgattgggagatcgagctgatggagcgcgctctcacgcagccgcatttctatctgggcgcgatgggtggtagaaaagcgcatgcatttcgtagtgaagccctcgccgcacgaggcgttagtgatgagtcgctcgccatgatccgcgcgccgatagggctgtttcactcctctcgcgatccgcagaccctcgcgctgtcgacgcttggagaggtcattcgcacatacgaggctacccggttcgagggcgatcttggatga

SEQ ID NO: 121103 - protein, 314 aa, Erythrobacter sp. NAP1
MDLKHVCQFLADAARAEKNCVLVTVVAVEGSSMRNPGTIMGVAEDGTYAGSLSGGCIENAVVAEAREVFTSGDARIVRFGAGSPYLDIKLPCGGGLDLHFQPLEGAELSEQCLSSIAERAPFSIALGPDGARHVGEWLPPTFDANVGMAAFGHWPEPLLQIIGHGAGVEALAVLGRTHGCSTRILTPDERIVSGLREKGIEALLLERTSQTDLLKSDPWTATIFLFHDHDWEIELMERALTQPHFYLGAMGGRKAHAFRSEALAARGVSDESLAMIRAPIGLFHSSRDPQTLALSTLGEVIRTYEATRFEGDLG

SEQ ID NO: 121104 - DNA, 25 bp, Artificial sequence
  primer
atgtcatacccgctttttgacaaag

SEQ ID NO: 121105 - DNA, 22 bp, Artificial sequence
  primer
ttaggacgacgggggcaggcat

SEQ ID NO: 121106 - protein, 301 aa, Artificial sequence
  consensus sequence
  Variant (2)..(2): Xaa in position 2 is any amino acid
  Variant (4)..(4): Xaa in position 4 is any amino acid
  Variant (6)..(8): Xaa in position 6 to 8 is any amino acid
  Variant (10)..(12): Xaa in position 10 to 12 is any amino acid
  Variant (14)..(15): Xaa in position 14 to 15 is any amino acid
  Variant (17)..(23): Xaa in position 17 to 23 is any amino acid
  Variant (24)..(24): Xaa in position 24 is any or no amino acid
  Variant (26)..(28): Xaa in position 26 to 28 is any amino acid
  Variant (30)..(31): Xaa in position 30 to 31 is any amino acid
  Variant (36)..(36): Xaa in position 36 is any amino acid
  Variant (38)..(38): Xaa in position 38 is any amino acid
  Variant (40)..(42): Xaa in position 40 to 42 is any amino acid
  Variant (45)..(50): Xaa in position 45 to 50 is any amino acid
  Variant (52)..(58): Xaa in position 52 to 58 is any amino acid
  Variant (60)..(68): Xaa in position 60 to 68 is any amino acid
  Variant (69)..(69): Xaa in position 69 is any or no amino acid
  Variant (71)..(71): Xaa in position 71 is any amino acid
  Variant (75)..(75): Xaa in position 75 is any amino acid
  Variant (77)..(97): Xaa in position 77 to 97 is any amino acid
  Variant (98)..(103): Xaa in position 98 to 103 is any or no amino acid
  Variant (105)..(135): Xaa in position 105 to 135 is any amino acid
  Variant (136)..(162): Xaa in position 136 to 162 is any or no amino acid
  Variant (164)..(170): Xaa in position 164 to 170 is any amino acid
  Variant (172)..(186): Xaa in position 172 to 186 is any amino acid
  Variant (188)..(204): Xaa in position 188 to 204 is any amino acid
  Variant (205)..(224): Xaa in position 205 to 224 is any or no amino acid
  Variant (226)..(228): Xaa in position 226 to 228 is any amino acid
  Variant (230)..(232): Xaa in position 230 to 232 is any amino acid
  Variant (234)..(234): Xaa in position 234 is any amino acid
  Variant (237)..(243): Xaa in position 237 to 243 is any amino acid
  Variant (245)..(246): Xaa in position 245 to 246 is any amino acid
  Variant (248)..(252): Xaa in position 248 to 252 is any amino acid
  Variant (255)..(255): Xaa in position 255 is any amino acid
  Variant (258)..(258): Xaa in position 258 is any amino acid
  Variant (261)..(261): Xaa in position 261 is any amino acid
  Variant (263)..(266): Xaa in position 263 to 266 is any amino acid
  Variant (268)..(270): Xaa in position 268 to 270 is any amino acid
  Variant (272)..(274): Xaa in position 272 to 274 is any amino acid
  Variant (276)..(283): Xaa in position 276 to 283 is any amino acid
  Variant (284)..(286): Xaa in position 284 to 286 is any or no amino acid
  Variant (288)..(288): Xaa in position 288 is any amino acid
  Variant (290)..(300): Xaa in position 290 to 300 is any amino acid
LXTXVXXXGXXXRXXGXXXXXXXXGXXXGXXSGGCXEXAXXXEAXXXXXXGXXXXXXXGXXXXXXXXXXLXCGGXIXXXXXXXXXXXXXXXXXXXXXXXXXXXRXXXXXXXXXXXXXXXXXXXXXXXXXXXXXXXXXXXXXXXXXXXXXXXXXXXXXXXXXXPXXXXXXXGXXXXXXXXXXXXXXXGXXXXXXXXXXXXXXXXXXXXXXXXXXXXXXXXXXXXXDXXXAXXXLXHDXXXXXXXLXXAXXXXXFYXGAXGSXRXXXXRXXXLXXXGXXXXXXXXXXXPXGXXXXXXXXXXXA

SEQ ID NO: 121107 - protein, 40 aa, Artificial sequence
  protein pattern
  Variant (2)..(3): Xaa in position 2 to 3 is any amino acid
  Variant (4)..(4): Xaa in position 4 is Cys, Ser or Thr
  Variant (6)..(6): Xaa in position 6 is any or no amino acid
  Variant (8)..(8): Xaa in position 8 is any or no amino acid
  Variant (10)..(10): Xaa in position 10 is any amino acid
  Variant (11)..(11): Xaa in position 11 is any or no amino acid
  Variant (13)..(13): Xaa in position 13 is Asp, Gly or Val
  Variant (14)..(16): Xaa in position 14 to 16 is any amino acid
  Variant (17)..(17): Xaa in position 17 is Asp or Glu
  Variant (18)..(19): Xaa in position 18 to 19 is any amino acid
  Variant (20)..(20): Xaa in position 20 is Ala, Ile, Leu or Val
  Variant (21)..(21): Xaa in position 21 is Ile or Leu
  Variant (22)..(23): Xaa in position 22 to 23 is any amino acid
  Variant (24)..(24): Xaa in position 24 is Ala, Gly or Leu
  Variant (25)..(28): Xaa in position 25 to 28 is any amino acid
  Variant (29)..(29): Xaa in position 29 is Ala, Cys, Pro or Val
  Variant (30)..(30): Xaa in position 30 is Phe or Tyr
  Variant (32)..(32): Xaa in position 32 is any amino acid
  Variant (35)..(35): Xaa in position 35 is any amino acid
  Variant (38)..(39): Xaa in position 38 to 39 is any amino acid
  Variant (40)..(40): Xaa in position 40 is Ser or Thr
DXXXAXVXLXXHXXXXXXXXXXXXXXXXXXYXGAXGSXXX

SEQ ID NO: 121108 - protein, 41 aa, Artificial sequence
  protein pattern
  Variant (2)..(13): Xaa in position 2 to 13 is any amino acid
  Variant (15)..(15): Xaa in position 15 is any amino acid
  Variant (16)..(16): Xaa in position 16 is Phe, Leu or Val
  Variant (21)..(21): Xaa in position 21 is any amino acid
  Variant (23)..(23): Xaa in position 23 is Ala, Asp, Gly, Asn or Ser
  Variant (25)..(25): Xaa in position 25 is Ala or Val
  Variant (26)..(26): Xaa in position 26 is Ala, Ile or Val
  Variant (27)..(27): Xaa in position 27 is any amino acid
  Variant (30)..(34): Xaa in position 30 to 34 is any amino acid
  Variant (35)..(35): Xaa in position 35 is any or no amino acid
  Variant (37)..(40): Xaa in position 37 to 40 is any amino acid
  Variant (41)..(41): Xaa in position 41 is Ile, Leu or Val
GXXXXXXXXXXXXGXXSGGCXEXAXXXEAXXXXXXGXXXXX

SEQ ID NO: 121109 - protein, 17 aa, Artificial sequence
  protein pattern
  Variant (2)..(3): Xaa in position 2 to 3 is any amino acid
  Variant (4)..(6): Xaa in position 4 to 6 is any or no amino acid
  Variant (8)..(8): Xaa in position 8 is Ala, Gly or Pro
  Variant (12)..(12): Xaa in position 12 is any amino acid
  Variant (13)..(13): Xaa in position 13 is Ile or Leu
  Variant (14)..(14): Xaa in position 14 is any amino acid
  Variant (15)..(15): Xaa in position 15 is Ile, Leu or Val
  Variant (16)..(16): Xaa in position 16 is any amino acid
  Variant (17)..(17): Xaa in position 17 is Phe, Ile, Leu or Val
DXXXXXLXCGGXXXXXX

SEQ ID NO: 121110 - protein, 11 aa, Artificial sequence
  protein pattern
  Variant (2)..(2): Xaa in position 2 is Ile, Leu or Val
  Variant (4)..(4): Xaa in position 4 is Ala, Glu, Gly or Gln
  Variant (5)..(6): Xaa in position 5 to 6 is any amino acid
  Variant (8)..(8): Xaa in position 8 is Gly or Ser
  Variant (9)..(9): Xaa in position 9 is Ala, Gly or Ser
  Variant (10)..(10): Xaa in position 10 is any amino acid
TXVXXXGXXXR

SEQ ID NO: 121111 - DNA, 1473 bp, Escherichia coli
  CDS (1)..(1473): transl_table=11
atgtcccgaatggcagaacagcagctttatatacatggtggttatacctccgccaccagcggtcgcaccttcgagaccattaacccggccaacggtaacgtgctggcgaccgtgcaggccgccgggcgcgaggatgtcgatcgcgccgtgaaaagcgcccagcaggggcaaaaaatctgggcgtcgatgaccgccatggagcgctcgcgtattctgcgtcgggccgttgatattctgcgtgaacgcaatgacgaactcgcaaaactggaaaccctcgacaccggaaaagcatattcggaaacctcaaccgtcgatatcgttaccggtgcggacgtgctggagtactacgccgggctgatcccggcgctggaaggcagccagatcccgttgcgtgaaacgtcctttgtgtatacccgccgcgaaccgctgggcgtagtggcagggattggcgcatggaactacccgatccagattgccctgtggaaatccgccccggcgctggcggcaggcaacgcaatgattttcaaaccgagcgaagttaccccgcttaccgcgttaaagctggctgaaatttacagcgaagcgggcctgccggacggcgtatttaacgtgttgccgggcgtgggcgcggagaccgggcaatatctgaccgagcatccgggcattgccaaagtgtcatttaccggcggtgtcgccagcggcaaaaaagtgatggctaactcggcggcctcttccctgaaagaagtgaccatggaactgggcggtaaatcaccgctgatcgttttcgatgatgcggatctcgatctcgccgccgatatcgccatgatggcaaacttcttcagctccggtcaggtgtgtaccaatggcacccgcgtcttcgttccggcgaaatgcaaagccgcatttgagcagaaaattctggcgcgcgttgagcgcattcgcgcgggcgacgttttcgatccgcaaactaacttcggcccgctggtcagcttcccgcatcgcgataacgtgctgcgctatatcgccaaaggcaaagaggaaggcgcgcgcgtactgtgcggcggcgatgtactgaaaggcgatggcttcgataacggcgcatgggttgcaccgacagtgttcaccgattgcagcgacgatatgaccatcgtgcgtgaagagatcttcgggccagtgatgtccattctgacctacgagtcggaagacgaagtcattcgccgcgctaacgataccgactacggcctggcggcgggcatcgtgacagcggacctgaaccgcgcgcatcgcgtcattcatcagctggaagcgggtatttgctggatcaacacctggggcgaatccccggcagagatgcccgttggcggctacaaacactccggcattggtcgcgagaacggcgtgatgacgctccagagttacacccaggtgaagtccatccaggttgagatggctaaattccagtccatattctaa

SEQ ID NO: 121112 - protein, 490 aa, Escherichia coli
MSRMAEQQLYIHGGYTSATSGRTFETINPANGNVLATVQAAGREDVDRAVKSAQQGQKIWASMTAMERSRILRRAVDILRERNDELAKLETLDTGKAYSETSTVDIVTGADVLEYYAGLIPALEGSQIPLRETSFVYTRREPLGVVAGIGAWNYPIQIALWKSAPALAAGNAMIFKPSEVTPLTALKLAEIYSEAGLPDGVFNVLPGVGAETGQYLTEHPGIAKVSFTGGVASGKKVMANSAASSLKEVTMELGGKSPLIVFDDADLDLAADIAMMANFFSSGQVCTNGTRVFVPAKCKAAFEQKILARVERIRAGDVFDPQTNFGPLVSFPHRDNVLRYIAKGKEEGARVLCGGDVLKGDGFDNGAWVAPTVFTDCSDDMTIVREEIFGPVMSILTYESEDEVIRRANDTDYGLAAGIVTADLNRAHRVIHQLEAGICWINTWGESPAEMPVGGYKHSGIGRENGVMTLQSYTQVKSIQVEMAKFQSIF

SEQ ID NO: 121113 - DNA, 1530 bp, Drosophila melanogaster; identical to SEQ ID NO: 37873
  CDS (1)..(1530)

SEQ ID NO: 121114 - protein, 509 aa, Drosophila melanogaster; identical to SEQ ID NO: 37874

SEQ ID NO: 121115 - DNA, 1467 bp, Bombyx mori; identical to SEQ ID NO: 37875
  CDS (1)..(1467)

SEQ ID NO: 121116 - protein, 488 aa, Bombyx mori; identical to SEQ ID NO: 37876

SEQ ID NO: 121117 - DNA, 1542 bp, Bombyx mori; identical to SEQ ID NO: 37877
  CDS (1)..(1542)

SEQ ID NO: 121118 - protein, 513 aa, Bombyx mori; identical to SEQ ID NO: 37878

SEQ ID NO: 121119 - DNA, 1509 bp, Oryza sativa (japonica cultivar-group); identical to SEQ ID NO: 38083
  CDS (1)..(1509)

SEQ ID NO: 121120 - protein, 502 aa, Oryza sativa (japonica cultivar-group); identical to SEQ ID NO: 38084

SEQ ID NO: 121121 - DNA, 1524 bp, Oryza sativa (japonica cultivar-group); identical to SEQ ID NO: 37879
  CDS (1)..(1524)

SEQ ID NO: 121122 - protein, 507 aa, Oryza sativa (japonica cultivar-group); identical to SEQ ID NO: 37880

SEQ ID NO: 121123 - DNA, 1662 bp, Oryza sativa (japonica cultivar-group); identical to SEQ ID NO: 38089
  CDS (1)..(1662)

SEQ ID NO: 121124 - protein, 553 aa, Oryza sativa (japonica cultivar-group); identical to SEQ ID NO: 38090

SEQ ID NO: 121125 - DNA, 1650 bp, Oryza sativa (japonica cultivar-group); identical to SEQ ID NO: 38095
  CDS (1)..(1650)

SEQ ID NO: 121126 - protein, 549 aa, Oryza sativa (japonica cultivar-group); identical to SEQ ID NO: 38096

SEQ ID NO: 121127 - DNA, 1497 bp, Bacillus halodurans C-125
  CDS (1)..(1497): transl_table=11
atgcaaaaaatctcaacaaacgatagcaaattaaatccaaggttagtggcgtttttaaacggtggaccaaagaagctatttattaatggggaatgggttgattcattctctggacaatcttttgaaacgatgaatccagcaaccggagaaacattagctctcgtagcagaagctgggtcagaggacatcgattttgcagtgaaagcggcaaggaaagcgttcgatgaagggccttggtctaaaatgagcgcagcggaaagaagtcgactcatatacaagctggctgatttgattgaggatcataaagaagcgttagctcagcttgagacgttagataatggtaagccaattcgtgagacggccaatgctgatattccattagtaattgaacactttcgttactttgcagggtgggcgacaaaaattgtgggccaaaccatccctgtacaaggccattattttaactacacgcgccatgaagccattggcgttgtgggccaaatcattccttggaatttcccgttattgatggctgcttggaaacttggtgccgctctagctacaggttgtacggttgtgttaaaaccggcagagcagactccactttccgccttatatttaggagaattgatcaatgaagcaggttttccaaaaggggttgtgaacattgtccctggatttgggcattcggctggaactccccttgtgaatcacccagctgtagataaagtggcttttacagggtcgactgatgtcggaaagttaattatgaaacaagcgagtgaatcattaaaaagagtaacgcttgaacttgggggcaagtcaccaaatatcattttacctgatgctgatttgtcaaaggccgttcctggctcacttatgggcattatgttcaatcaaggccaagtgtgttgcgcaggaagtcgtttatatgtacaaaagaaacagtatgatcatgtcgttgctgacctggtgtcgttaacgaacgagattcagcaaggggatggattattagaacaaacgaccatgggacctctgatttcaaatcaacaacaaagtcgagtgaaaaattacatcgatcgtggggttgaggaaggggcagaactactaacaggtgggaacattccgtatgatcaagggtattttgtcgccccaaccatttttgctgacgtggatcattccatgacgatcgccaaggaggaaatttttggtccagttgtagccgcaatgccgtttgatagcatagacgacctaattgataaagccaacgattctgattatggactagctgccggtgtttggacacaggatattaaaaaagcacactacattgcccaccgaatcaaggcagggaccatttgggtgaattgctacaatgtattcgatgccgcgagcccgtttggtggttacaaacaatcggggattggccgggaaatggggagctatgcattagaaaattatactgaagtgaaaagtgtttgggtgaatatggattaa

SEQ ID NO: 121128 - protein, 498 aa, Bacillus halodurans C-125
MQKISTNDSKLNPRLVAFLNGGPKKLFINGEWVDSFSGQSFETMNPATGETLALVAEAGSEDIDFAVKAARKAFDEGPWSKMSAAERSRLIYKLADLIEDHKEALAQLETLDNGKPIRETANADIPLVIEHFRYFAGWATKIVGQTIPVQGHYFNYTRHEAIGVVGQIIPWNFPLLMAAWKLGAALATGCTVVLKPAEQTPLSALYLGELINEAGFPKGVVNIVPGFGHSAGTPLVNHPAVDKVAFTGSTDVGKLIMKQASESLKRVTLELGGKSPNIILPDADLSKAVPGSLMGIMFNQGQVCCAGSRLYVQKKQYDHVVADLVSLTNEIQQGDGLLEQTTMGPLISNQQQSRVKNYIDRGVEEGAELLTGGNIPYDQGYFVAPTIFADVDHSMTIAKEEIFGPVVAAMPFDSIDDLIDKANDSDYGLAAGVWTQDIKKAHYIAHRIKAGTIWVNCYNVFDAASPFGGYKQSGIGREMGSYALENYTEVKSVWVNMD

SEQ ID NO: 121129 - DNA, 1491 bp, Pseudomonas aeruginosa PAO1
  CDS (1)..(1491): transl_table=11
gtgttcgaactcagcgattggcaacggcgcgccgcgacacagcgcttcatcgaccaggccctgatcggcggccgccagcgtccagccgccagcggcgctaccttcgacgccatcgatccggcgagcaatcgcctgctggcgcgggtcgcggcctgcgatgcggccgacgtcgacgcggcagtggccgccgcccgccgcgccttcgacgaaggcccctgggcgcgtctcgccccggtcgagcgcaagcgcgtgctgctgcgcctggccgagctgatgctggcccatcgcgaagagctggcgctgctcgactcgctgaacatgggcaagccggtgatggacgcctggaacatcgatgtacccggcgccgcccacgtcttcgcctggtatgcggaaagcctcgacaagctctacgaccaggtcgcgccgaccgcccagcagaccctggccaccattacccgcgtgccgctgggggtgatcggcgcggtggtgccgtggaacttcccgctcgacatggccgcctggaagctcgccccggccctggccgccggcaactcggtggtgctcaagccggccgagcagtcgccgttctccgccctgcgcctggccgagctggccctggaggcgggggtgccggaaggcgtgctgaacgtggtgccgggcctcggcgagcaggccggcaaggccctcggcttgcacccggaggtggacgcactggtgttcaccggctccaccgaggtcggcaagtacttcatgcagtattccgcgcaatccaacctcaagcaggtctggctggagtgcggcggcaagagtccgaacctggtgttcgccgattgccgcgatcttgacctggcggcggaaaaggccgccttcggcattttcttcaaccagggcgaggtctgttcggcgaactcgcgcttgctggtggagcgttcgatccacgacgagttcgtcgagcgcctgctggccaaggcccgcgactggcagccgggcgatccgctggacccggccagccgcgccggcgccatcgtcgaccgccggcagaccgccgggattctcgccgccatcgagcgggcgcaaggcgagggcgcgaccctgctcggcggtggccgccagttgacgatcaacggttcggacaacttcatcgaaccgaccctgttcggcgacgtacgcccggacatgcagctggcccgcgaggaaatcttcggtccggtgctggcgatcagcgccttcgactccgaggacgaggccatacgcctggccaacgacagccgctacggcctcgccgcctcgctgtggagcgacgacctgcaccgtgcacaccgggtggcgcggcgcttgaatgccggaacggtgtcggtgaataccgtggacgcgctggacgtcgcggtgcctttcggcggcggcaagcagtccggcttcggtcgcgacctgtcgctgcattccttcgacaagtacacccagttgaagacgacctggttccagttgcgctga

SEQ ID NO: 121130 - protein, 496 aa, Pseudomonas aeruginosa PAO1
MFELSDWQRRAATQRFIDQALIGGRQRPAASGATFDAIDPASNRLLARVAACDAADVDAAVAAARRAFDEGPWARLAPVERKRVLLRLAELMLAHREELALLDSLNMGKPVMDAWNIDVPGAAHVFAWYAESLDKLYDQVAPTAQQTLATITRVPLGVIGAVVPWNFPLDMAAWKLAPALAAGNSVVLKPAEQSPFSALRLAELALEAGVPEGVLNVVPGLGEQAGKALGLHPEVDALVFTGSTEVGKYFMQYSAQSNLKQVWLECGGKSPNLVFADCRDLDLAAEKAAFGIFFNQGEVCSANSRLLVERSIHDEFVERLLAKARDWQPGDPLDPASRAGAIVDRRQTAGILAAIERAQGEGATLLGGGRQLTINGSDNFIEPTLFGDVRPDMQLAREEIFGPVLAISAFDSEDEAIRLANDSRYGLAASLWSDDLHRAHRVARRLNAGTVSVNTVDALDVAVPFGGGKQSGFGRDLSLHSFDKYTQLKTTWFQLR

SEQ ID NO: 121131 - DNA, 1488 bp, Deinococcus radiodurans R1
  CDS (1)..(1488): transl_table=11
atgaccgctgaacctcaagtttcccctgcgcccaccccgccgcccgccgcgcccctgctggttcgtgaccgcctgtttatcggcggggaatgggtcacgccctgcggtcagggcaccctggaagtcgtcaattcggccaccgaagaagtcatgggcacggtgcccgaaggcacgccggaggacgccgagcgcgcaattctggccgcccgcgccgccttcgactcgtggtcgcagacccccgccgaggagcgggccgctctgctggagcgcatcagccggggcctgaacgagcgccagagcgaaattgccgcgctggtcgcgcaggaagtcgggatgccgttcgtgctcagcaacgtgattcaggtggggctgcccgccgtcaccttcatgtcgatggccgaggaaatccggcagctgcccgccgaggaaacgcttgccagttcactgctgctgcgcgagccggtgggcgtggtggcggccattaccccctggaactatccgctgcaccagattgccgccaaggtcgctccggcgctcgccgctggctgcacggtggtgctcaagcccagcgaagtggcgccgctcaacgccttcgtgctcgccgaaattatcgaggcggcgggcgccccggcgggggtgttcaacctcgtgaccggcaccggcccggtggtgggcgaggtgctcgccgcgcaccccgaggtggatatggtgtcgtttaccggctccacggcggcgggcaagcgcgtgagcgaactcgcggcgcgcaccgtcaagcgggtcgccctcgaactcggtggcaagagcccgtacctgattctggacgacgccgacctgagcggtgaggcgctggtgcaggccgtcatgaacgggattcagggctgttacctcaactccggtcagacctgctcggcgctcacccggatgctggtgccgcgttcgcgtctgcccgaagtcgaagcggtcgcgcaggcggtcgtttcacaggtgaaggtcggcagccccttcgacgccgcgaccaccctggggccgctggtgtcggacgtgcagcgcgagcgggtgcgcggccatatccggcagggcgtggccgagggcgcgcggctgatcgcgggcggcgccgagtcgccagaggggctggaacgcggctactacgtgcagcccaccatcttctcggacgtgacgccggagatgaccattgcccgcgaggagattttcgggccggtgctcgtcattcagccttacgaggacgaggaagacgccgttcgcatcgccaacgccacccactacgggctggcgggcggcgtgtggtcgagtgaccgcgagcgtgccgtgcgggtcgcccgccgcctgcggaccgggcaggtttcgatcaacggcggcgccttcaacccggtggccccttttggcggctacaagcagtcgggcaacggacgcgaattcgggcggctgggcctggaggaatttatggaggtaaaggccctccagttttga

SEQ ID NO: 121132 - protein, 495 aa, Deinococcus radiodurans R1
MTAEPQVSPAPTPPPAAPLLVRDRLFIGGEWVTPCGQGTLEVVNSATEEVMGTVPEGTPEDAERAILAARAAFDSWSQTPAEERAALLERISRGLNERQSEIAALVAQEVGMPFVLSNVIQVGLPAVTFMSMAEEIRQLPAEETLASSLLLREPVGVVAAITPWNYPLHQIAAKVAPALAAGCTVVLKPSEVAPLNAFVLAEIIEAAGAPAGVFNLVTGTGPVVGEVLAAHPEVDMVSFTGSTAAGKRVSELAARTVKRVALELGGKSPYLILDDADLSGEALVQAVMNGIQGCYLNSGQTCSALTRMLVPRSRLPEVEAVAQAVVSQVKVGSPFDAATTLGPLVSDVQRERVRGHIRQGVAEGARLIAGGAESPEGLERGYYVQPTIFSDVTPEMTIAREEIFGPVLVIQPYEDEEDAVRIANATHYGLAGGVWSSDRERAVRVARRLRTGQVSINGGAFNPVAPFGGYKQSGNGREFGRLGLEEFMEVKALQF

SEQ ID NO: 121133 - DNA, 1482 bp, Agrobacterium tumefaciens str. C58
  CDS (1)..(1482): transl_table=11
ttgcggagtaaggtgatgcgccgttttcagtgctatatcgacggacgtttcgaggatggtgaggccagcttttccagcctcgatcccgcaaccggccagccctgggccgaaatgccggaaagtcgcgaggcggatatcggccgtgtggtcgaggccgcgcatcgggcgctttacgaggatactgtctggtcgaaactgacggcgacgcagcgcggcaagctcctctacaggctggccgatctcgtcgcggaaaatgcgaagacgctcgctgaactcgaaacccgcgataccggcaagatcatccgcgaaacgtcggcgcagatcgcttatgtcgctgactattatcgctattatgcgggcctcgcggacaagatcgaaggcgcctacctgcccatcgacaagccggatatggatgtctggctccggcgcgaaccggtcggcgttgtcgcggcgatcgtgccgtggaacagtcagctgtttcttgccgccgtgaagatcggtccggcgctggccgccggctgcactatcgtcgtcaaggcatcggaagatgggccggcaccgcttctggaatttgcccggctggtgcatgaggccggttttcctgccggtgtcgtcaacgttgttaccggtttcggcgcgtcatgcggcaacgccctcaccacgcatccgaaggtcgcccatatcgccttcaccggcggcccggaaacggcccgacatatcgtccgcaactcggccgaaaaccttgcctccacatcgctggaactcggcggcaaatcgccgatcctcgtttttgccgatgccgatctcgaaagtgccgccaacgcccaggtggcaggcatttttgcagcgaccggccagagttgcgtggctggttcgcggctgatcatcgaaaaaagcgtcaaggaccggttcctccagattctggcggcaaaggccgaggcgatccgcatcggttcgcctttggatatggcgacggaagtggggccgcttgcaacggagcgtcagaggaagcacatcgtttcgctggtttccgcctcggtagatgccggcgcgaaggtggtgacgggcggtgagcctgtggagggtgaaggctatttttaccggccgaccattctcgattgtgacggcattcgctcgccttccttggaaaaggagtttttcggccctgttctttcggtcgtttccttcgaaaccgaagcggaagccatttcgcttgccaatgacacggtctatggccttgcgtcgggcgttttcacgcagaacctgacacgggctcaccggctgatgaaggcgatccgcgcgggcatcgtctgggtgaatacctatcgcgctgtttcgccgattgcgccctttggcggcttcggcctttcgggcgacggccgtgagggcgggcttgcggcggcgctcgattacacacgcaccaagaccatatggctcagaacttccgacgatccgatccccgatcctttcgtgatgcggtga

SEQ ID NO: 121134 - protein, 493 aa, Agrobacterium tumefaciens str. C58
MRSKVMRRFQCYIDGRFEDGEASFSSLDPATGQPWAEMPESREADIGRVVEAAHRALYEDTVWSKLTATQRGKLLYRLADLVAENAKTLAELETRDTGKIIRETSAQIAYVADYYRYYAGLADKIEGAYLPIDKPDMDVWLRREPVGVVAAIVPWNSQLFLAAVKIGPALAAGCTIVVKASEDGPAPLLEFARLVHEAGFPAGVVNVVTGFGASCGNALTTHPKVAHIAFTGGPETARHIVRNSAENLASTSLELGGKSPILVFADADLESAANAQVAGIFAATGQSCVAGSRLIIEKSVKDRFLQILAAKAEAIRIGSPLDMATEVGPLATERQRKHIVSLVSASVDAGAKVVTGGEPVEGEGYFYRPTILDCDGIRSPSLEKEFFGPVLSVVSFETEAEAISLANDTVYGLASGVFTQNLTRAHRLMKAIRAGIVWVNTYRAVSPIAPFGGFGLSGDGREGGLAAALDYTRTKTIWLRTSDDPIPDPFVMR

SEQ ID NO: 121135 - DNA, 1491 bp, Staphylococcus aureus subsp. aureus Mu50
  CDS (1)..(1491): transl_table=11
atggaacttttaaaacatttatctcagcgtcaatatattgatggtgagtgggttgaaagcacgaataaaaatacaagagatattatcaatccttacaatcaagaagtgatatttacggtttctgaagggacaaaagaggatgcagaacgtgcaatcttagctgcaagacgtgcgtttgagtctggtgaatggtcgcaagaaactgctgaaaaaagaggtaaaaaagtacgtgccatcgcggacaagatcaaagaacatcgcgaagcgttagcacgattagaaacattagatactggaaaaacgttagaagaatcatatgcagatatggatgatattcataatgtgtttatgtattttgctggattagcagataaagatggtggcgaaatgattgattcaccaattccagatacagaaagcaaaattgttaaagaaccagtaggtgtagttacacaaattacaccttggaattatccgttattacaagcatcatggaaaattgcgccagcgcttgctacgggttgttcactagttatgaaaccaagtgaaattacaccattaacaacaatacgtgtttttgaattaatggaagaagttggtttccctaaaggaacaattaatcttattctaggtgcaggttctgaagttggtgacgtaatgtcaggtcataaagaggttgaccttgtatcatttacaggtggcattgagactggtaagcatattatgaaaaatgctgctaataatgttacgaatattgccttggaacttggcggtaaaaatccaaacattatctttgatgatgctgattttgaattggcagtagaccaagcgttaaatggtggatattttcatgcaggtcaagtttgttcagcaggatcaagaatattagtacaaaacagtattaaagacaaatttgagcaagcacttattgatcgcgtgaaaaaaatcaaattaggtaatggttttgatgctgatactgaaatgggaccagtgatttcaacagaacatcgtaataagatcgaatcttatatggatgtagctaaagcagaaggcgcaacaattgctgttggtggtaaacgtccagatagagacgatttaaaagatggtctattcttcgagccaacagtcattacaaattgtgatacgtcaatgcgtattgtacaagaagaggttttcggacctgtcgttactgtagaaggctttgaaactgaacaagaagcgattcaattagcgaatgattctatatatggtttagcaggtgctgtattttctaaagatattggaaaagcacaacgcgttgctaacaagttgaaacttggaacggtgtggattaatgatttccatccatattttgcacaagcgccatggggtggatacaaacaatcaggtatcggtagagaattaggcaaagaaggcttagaagagtaccttgtttcaaaacacattttaacaaatacaaatccacaattagtgaattggtttagcaaataa

SEQ ID NO: 121136 - protein, 496 aa, Staphylococcus aureus subsp. aureus Mu50
MELLKHLSQRQYIDGEWVESTNKNTRDIINPYNQEVIFTVSEGTKEDAERAILAARRAFESGEWSQETAEKRGKKVRAIADKIKEHREALARLETLDTGKTLEESYADMDDIHNVFMYFAGLADKDGGEMIDSPIPDTESKIVKEPVGVVTQITPWNYPLLQASWKIAPALATGCSLVMKPSEITPLTTIRVFELMEEVGFPKGTINLILGAGSEVGDVMSGHKEVDLVSFTGGIETGKHIMKNAANNVTNIALELGGKNPNIIFDDADFELAVDQALNGGYFHAGQVCSAGSRILVQNSIKDKFEQALIDRVKKIKLGNGFDADTEMGPVISTEHRNKIESYMDVAKAEGATIAVGGKRPDRDDLKDGLFFEPTVITNCDTSMRIVQEEVFGPVVTVEGFETEQEAIQLANDSIYGLAGAVFSKDIGKAQRVANKLKLGTVWINDFHPYFAQAPWGGYKQSGIGRELGKEGLEEYLVSKHILTNTNPQLVNWFSK

SEQ ID NO: 121137 - DNA, 1491 bp, Caulobacter crescentus CB15; identical to SEQ ID NO: 37885
  CDS (1)..(1491): transl_table=11

SEQ ID NO: 121138 - protein, 496 aa, Caulobacter crescentus CB15; identical to SEQ ID NO: 37886

SEQ ID NO: 121139 - DNA, 1470 bp, Sinorhizobium meliloti 1021
  CDS (1)..(1470): transl_table=11
atgcaaagttaccaaattcgcgaaatggcgacgccgctctgtcagccggccgcttcacattttatcgacggcacctttattgaggatcgcaccggtcctgagatcctctccgtcaatccggtggatggtgagatcatcgccaaattgcatggggcgacttcctgcatcatcgagaaggcaattgcctcggcgaaacgggcgcagaaagaatgggctcggaaagagccggcggagcggggtcgcgtcctcagtcgcgccgctgacatcatgcgggcgcgaaacagggaactgtcggttctcgaaacgcgcgatacaggcaagccaatttctgaaacactggtggcggacgccgctagcggtgccgattgcctcgagtattttggcgcaatcgcggcgacactttcgggagacagcatccagttcggagaagattgggtctacacacggcgggagccgcttggggtctgtctcggaataggggcctggaactaccccatccagattgcggcctggaaggcagcccccgcgcttgcttgcgggaatgccatgatattcaagccgtcggaagtgaccccattgtcagcgctcaagctcgcggaaattctgactgaagcggggcttcctcctggcgttttcaatattgtgcaaggtgccggtgatgttggggctgagctcgccacccatccggcgatcgccaaagtctccctcaccggctcggtcaagactggcgcgagggtcgcctcggccgccatggccggcatccggccagtaacgatggagcttggtggaaagtctgcgctgatcgtcttcgacgatgcagatgttgaggcagccgtcagcggcgcaattctcgggaatttttattcggccggccagatctgctcaaacggtacgcgcgttttcctgcagcgcggaataagggaagcgttccttgcgcgcttgctggcccgggtcgcggctttgaagattggtgatccgatggacgaggagaccgacatcgggccgctagtcagcgccgcccatcgcaaccgggttgccacatacgtcgcccgcgccgaggttgagggagcataccagatggcgcctccgcgcaagcttccaccaggggatgcctggcacgagcccgtagtcttcacgaatgttacggattggatgacgcttgctcgggaagaagtgttcggtccggtcatggccgtcctggacttcgatgacgagcaagatgtcgtcgcaagagccaatgcaacggacttcggattggcagcaggcatattcacgagagacctcgttcgtgcccataggttggcggctgagctcgaagccggaaccgtgtggatcaacgcttacaacttgacgccagctggcatggcgttcggcggaatcaagagatcaggcatcgggcgcgaaaacgggcgtgtcgcgatcgaccactatacccagctcaagtctgtgttcgtcagcatgcagacataa

SEQ ID NO: 121140 - protein, 489 aa, Sinorhizobium meliloti 1021
MQSYQIREMATPLCQPAASHFIDGTFIEDRTGPEILSVNPVDGEIIAKLHGATSCIIEKAIASAKRAQKEWARKEPAERGRVLSRAADIMRARNRELSVLETRDTGKPISETLVADAASGADCLEYFGAIAATLSGDSIQFGEDWVYTRREPLGVCLGIGAWNYPIQIAAWKAAPALACGNAMIFKPSEVTPLSALKLAEILTEAGLPPGVFNIVQGAGDVGAELATHPAIAKVSLTGSVKTGARVASAAMAGIRPVTMELGGKSALIVFDDADVEAAVSGAILGNFYSAGQICSNGTRVFLQRGIREAFLARLLARVAALKIGDPMDEETDIGPLVSAAHRNRVATYVARAEVEGAYQMAPPRKLPPGDAWHEPVVFTNVTDWMTLAREEVFGPVMAVLDFDDEQDVVARANATDFGLAAGIFTRDLVRAHRLAAELEAGTVWINAYNLTPAGMAFGGIKRSGIGRENGRVAIDHYTQLKSVFVSMQT

SEQ ID NO: 121141 - DNA, 1446 bp, Salmonella typhimurium LT2
  CDS (1)..(1446): transl_table=11
atgacgatatgggaaaatgctatgcaatatcaattactgattaatggcgtgctggtggacggcgagggagaaaggcagtctgtttataacccggcgacaggcgaggtcatacttgagattgcggaagcgtcgcccgcgcaggttgacgccgcagtgcaggccgccgataacgcgtttgccgaatgggggcagaccacacccaaagcacgggcggaatgtctgttaaaactggcggacagcatcgagcaaaacgcccttgagttcgcccggcttgaatcgcaaaactgcggtaagcctttgcactgcgtaattaatgatgaaattccggcaatcgtggatgtctttcgcttttttgccggcgcggcccgttgtttgagtgggctggcggcgggcgaatatctggaaggacatacgtcgatgatccgccgggatccgattggcgtggttgcctctatcgcgccgtggaattatccgctcatgatggcggcctggaagctggcgccagcgctggcggcaggtaactgcgtggtgattaagccttctgaaatcacgccgctgacggcgcttaaacttgccgtgctggcgaaggatatctttccgccgggggtgctcaatgtcctgttcggacgagggcaaactgttggcgatgtattgaccggccatgaaaaagtacgcatggtctctttaaccggttctatcgcgaccggggagcatattctgcgccatactgcgccagcgataaaacgtacgcatatggaactcggtggtaaagccccggtgattgtttttgatgacgccgatctggatgcggtggcgcagggcgtccggacttttggtttctataatgccggacaggattgtactgcggcgtgccgtatatacgcgcagcgcggtatctatgatgcgctggtcgaaaagctagggaacgcagtgagcagcctgaaaatgggcgcgccggaggatgagtcgacagagctggggccgttaagttcgctggcgcacctgaagcgcgtcacagcggctgtagaggaggcgaaggccctcagccatatccgtgtgattactggcggaagtcaaacggaaggtaaaggttactatttcgctccgacgttgctggcagacgcaaaacaggaagatgccatcgtgcaacgcgaggtcttcggcccggtggtcagtataaccgtctttgatgatgaagatcaggttctgaggtgggccaacgattctcgctatggtctggcatcctccgtctggactcaggacgtcgggcgggcgcaccggcttagcgccagattgcagtatggctgtacctggattaatacccatttcatgttggttagcgaaatgccgcatggagggcaaaaacagtcgggatacggcaaagatatgtcattgtatggtctggaagactacacccttgtccgccacatcatggttaagcattaa

SEQ ID NO: 121142 - protein, 481 aa, Salmonella typhimurium LT2
MTIWENAMQYQLLINGVLVDGEGERQSVYNPATGEVILEIAEASPAQVDAAVQAADNAFAEWGQTTPKARAECLLKLADSIEQNALEFARLESQNCGKPLHCVINDEIPAIVDVFRFFAGAARCLSGLAAGEYLEGHTSMIRRDPIGVVASIAPWNYPLMMAAWKLAPALAAGNCVVIKPSEITPLTALKLAVLAKDIFPPGVLNVLFGRGQTVGDVLTGHEKVRMVSLTGSIATGEHILRHTAPAIKRTHMELGGKAPVIVFDDADLDAVAQGVRTFGFYNAGQDCTAACRIYAQRGIYDALVEKLGNAVSSLKMGAPEDESTELGPLSSLAHLKRVTAAVEEAKALSHIRVITGGSQTEGKGYYFAPTLLADAKQEDAIVQREVFGPVVSITVFDDEDQVLRWANDSRYGLASSVWTQDVGRAHRLSARLQYGCTWINTHFMLVSEMPHGGQKQSGYGKDMSLYGLEDYTLVRHIMVKH

SEQ ID NO: 121143 - DNA, 1467 bp, Listeria monocytogenes EGD-e
  CDS (1)..(1467): transl_table=11
ttgagtattaaagaaacagcattaccaaaagttcaaacaaaattatttattaatggaaaatggacggatggagataataaagaaacaaaagatattgtaaatccagcaaacggagatgttattgcaaaaatcgctcaagctggaccaagtgaaacaaaaaaagctattaaagcggcaaaagatgcatttcctgattgggcaaaaatggaactagctgaccgtgtcaaattattacacaaaattgccgatttaatggaagaaaaagcagatacgttagcaaaaattatgacgcttgaacaaggtaaaccgctaaaagaatcaaaaggagaagtcttaactggcgtagaaaacttccgattcgctgcggaagaagcaagaagattatatggtgaaacaatccctgctccaaacaatcatgcgtttatcgtgaaaaaacaaccaattggcgtagttgctgctattactccttggaatttcccaggtggtatggtgacgcggaaacttgcaccggcgctggcaactgggaatacaattgtattaaaaccttctggagatacgccgctttcggctctagctatttttgaaatttttgaagaagctggcttgccaaaaggcgttgcaaatatcgttatgggtagctccaaagaaatcggtgaaacgttaactgatagtgatgatgttcgtaaactaactttcactggttccacgaaagttggtcaaacactctttaaacaatcagccgatacactgaaaaaaatctcactcgaacttggtggtcatgcgccatttatcgtatttgatgatgcgaatcttgatgccgctgtaaatgatttagttgctgcaaaattccgcaacaacggtcaagtatgcgtgtcaccaaaccgaattttcgttgccaaagaaatcaaagaaaaattcactaaagcgttagttgctaaagtagaacaattaaaagttggtaacggtttagatgacgtgaatgttggtccgcttatccgcgaagatgcgatagataaaattgataaacaacttaaaaacgccacagaaaaaggtgctaaagtcttaactggtggcggtcgtctaacaggctctgactatgataaaggaaacttttataaacccactgtcttagataatgttacccgtaaaatggacattttttatgaagaaacatttggtccagtaatcccgctcatcacatttgaaacggaagacgaagcaatcgaaatggcgaatgacagtgaattcggtcttgcttcttacttctacactaaagacttagcacgcgtagaaaaagtgggagcagcactagaatacggaatggtcggagcaaatgaaattgccatctctaacccagaaactccatttggtggagtaaaacattctggtttcggtcgcgaaaacggtcattatggaatggaagaatacatccaagtgaaattcatcaacttaaaatatcgtgattaa

SEQ ID NO: 121144 - protein, 488 aa, Listeria monocytogenes EGD-e
MSIKETALPKVQTKLFINGKWTDGDNKETKDIVNPANGDVIAKIAQAGPSETKKAIKAAKDAFPDWAKMELADRVKLLHKIADLMEEKADTLAKIMTLEQGKPLKESKGEVLTGVENFRFAAEEARRLYGETIPAPNNHAFIVKKQPIGVVAAITPWNFPGGMVTRKLAPALATGNTIVLKPSGDTPLSALAIFEIFEEAGLPKGVANIVMGSSKEIGETLTDSDDVRKLTFTGSTKVGQTLFKQSADTLKKISLELGGHAPFIVFDDANLDAAVNDLVAAKFRNNGQVCVSPNRIFVAKEIKEKFTKALVAKVEQLKVGNGLDDVNVGPLIREDAIDKIDKQLKNATEKGAKVLTGGGRLTGSDYDKGNFYKPTVLDNVTRKMDIFYEETFGPVIPLITFETEDEAIEMANDSEFGLASYFYTKDLARVEKVGAALEYGMVGANEIAISNPETPFGGVKHSGFGRENGHYGMEEYIQVKFINLKYRD

SEQ ID NO: 121145 - DNA, 1503 bp, Brucella melitensis 16M
  CDS (1)..(1503): transl_table=11
ttgccttactgccctattgccttacacaaggaaacaacaatgaaagcacagcccaaagcctcgcacttcattggcggcgcattcgtggaagacaaggcgggcaagccgctgcccgtgatctatccggcaaccggcgaggaaatcgccagtctttattccgcgacgccaggcattatcgaagcggcttacgcagcagcactgaaagcgcaaggcgaatgggcagcattgaaacccgtcgagcgcgggcgcatcctgcgccgcacggcggaaatcctgcgcgagaagaaccggaaattgtcgaagctcgaaacgctggataccggcaaggcgcttcaggaaacgctcgttgcagatgccgcttcggctgccgatgcgctggagtttttcggcggcattatttccggcttcaatggcgagttcgtggagcttggcggctcgtttgcctatacacgccgcgaggcactcggcatctgcgtcggtatcggcgcatggaactatccgatccagatcgcagcgtggaaatcggcaccggcgcttgccatgggcaatgccttcatcttcaaaccatccgaaaacacgccgctttcagcactggcactggcggaagcctataaggaagcggggcttcctgacgggctgttcaatgtcgtgcagggttatggcgatgtgggtgctgcgctcgtcaatcatcgcctgacggcaaaggtttcgctgacgggttccgtgccgaccggcagacgcatcatggcgcaggctggcgaacagctgaaacatgtcaccatggagcttggcggcaagtcgccgctcatcgtcttcgatgacgccgaccttgaaagcgccatcggcggcgcaatgctcggcaatttctattcgaccggtcaggtctgctcgaacggcacccgcgtcttcgttcacaagaatatccgcgaacgtttcatcgagcgccttgtcgagcgcacgcgaaaaatccgtatcggcgatcccttcgatgaagccacgcagatgggtccgctcatcagcgccgcccagcgcgacaaggttctatcctatatcaaaaaaggcaaggcggaaggcgcaacacttgcctgtggcggcggcgtgccgaaattgcagggcttcgataagggcttcttcatcgagccgacggtctttgcagatgttaccgacactatgaccatcgcacgcgaggaaatcttcgggccggtgatgagcgtgctggaattttccgatgaggacgaagtgattgcgcgcgccaatgatagcgaattcggccttgcggcaggcgtcttcactgccgatctttcccgcgggcatcacgtgatcggccagatcaaggccggcacatgctggatcaatgcctataatctgacgcccgtggaagtgcctttcggcggctacaagcaatcgggcatcggccgtgaaaacgggatcgccgcgcttgcccattacagccagatcaagaccgtctatgtggagatgggcaaggtagacagcccctactga

SEQ ID NO: 121146 - protein, 500 aa, Brucella melitensis 16M
MPYCPIALHKETTMKAQPKASHFIGGAFVEDKAGKPLPVIYPATGEEIASLYSATPGIIEAAYAAALKAQGEWAALKPVERGRILRRTAEILREKNRKLSKLETLDTGKALQETLVADAASAADALEFFGGIISGFNGEFVELGGSFAYTRREALGICVGIGAWNYPIQIAAWKSAPALAMGNAFIFKPSENTPLSALALAEAYKEAGLPDGLFNVVQGYGDVGAALVNHRLTAKVSLTGSVPTGRRIMAQAGEQLKHVTMELGGKSPLIVFDDADLESAIGGAMLGNFYSTGQVCSNGTRVFVHKNIRERFIERLVERTRKIRIGDPFDEATQMGPLISAAQRDKVLSYIKKGKAEGATLACGGGVPKLQGFDKGFFIEPTVFADVTDTMTIAREEIFGPVMSVLEFSDEDEVIARANDSEFGLAAGVFTADLSRGHHVIGQIKAGTCWINAYNLTPVEVPFGGYKQSGIGRENGIAALAHYSQIKTVYVEMGKVDSPY

SEQ ID NO: 121147 - DNA, 1491 bp, Schizosaccharomyces pombe 972h-; identical to SEQ ID NO: 86862
  CDS (1)..(1491)

SEQ ID NO: 121148 - protein, 496 aa, Schizosaccharomyces pombe 972h-; identical to SEQ ID NO: 86863

SEQ ID NO: 121149 - DNA, 1476 bp, Fusobacterium nucleatum subsp. nucleatum ATCC 25586
  CDS (1)..(1476): transl_table=11
atggagaatatattaaagaaatcatataaaatgtttataaatggggaatggatagattcaagtaatggagttatggtaaagtcttatgctccttacaacaatgaattattatctgaatttcctgatgcaagtgaaagtgatattgattttgcaattaaaagtgcaaaagaagcttttaaaacttggagaaagacaacagtaaaagaaagagcaagaattttaaataaaattgctgatattatagatgaaaacaaggatttgttagcaacggttgaaactatggataatggtaaaccaataagagaaacaaagttagtagatattccactggcagcaactcattttagatattttgcaggatgtattttagcagatgaaggacaagctactgtattagatgaaaaatttttaagtttaattttaagagaacctataggggttgttgggcaaattattccttggaactttccattcttaatggcagcttggaagttagcaccagctcttgcagcaggagatacagttgttttaaaaccatctagtacaacaacattaagtttattagttttaatggaacttattcaagatgtaattccaaaaggagttgtaaacttagttacaggaaaaggaagtacagcaggagaattcttaaagaatcaccctgatttagataaattagctttcacaggttcaacagcagttggtagagatatagctcttgcagcggcagaaaaattaattccagcaactcttgaattaggtggaaaatcagcaaatattattttagatgatgctgatatagaaaaagctcttgaaggagctcaacttgggatactatttaaccaaggacaagtttgttgtgcaggttcaagaatatttgtacaagaaggaatatatgatgagtttatatcaaaacttgtaaagaaatttgaaaatattaaaattggaaacccattagaccctacaactataatgggaagtcaaatagatgcaagacaagtaaaaactattttagattatgttgaaatagctaaacaagaaggtggagttattttaacaggaggagtgaaatatactgaaaatggttgtgacaaaggaaattttgtaagacctactttaataactaatgttaataatggttgtcgtgtttctcaagaagaaatttttggaccagtagctgttgtaattaagtttaaaacagatgatgaggttattgcacaagcaaatgatagtgaatatggacttggaggagcagtatttacaaaaaatatcaatagagctttaaaacttgcaagagaaattcaaacaggtagagtgtggataaatacttataatcaaattccagaacatgccccatttggaggatataaaaaatctggtataggaagagaaacacataaagtaatcttagaacactatacacaaatgaaaaatatcttaattgatttagaagaaggaacttctggattatattaa

SEQ ID NO: 121150 - protein, 491 aa, Fusobacterium nucleatum subsp. nucleatum ATCC 25586
MENILKKSYKMFINGEWIDSSNGVMVKSYAPYNNELLSEFPDASESDIDFAIKSAKEAFKTWRKTTVKERARILNKIADIIDENKDLLATVETMDNGKPIRETKLVDIPLAATHFRYFAGCILADEGQATVLDEKFLSLILREPIGVVGQIIPWNFPFLMAAWKLAPALAAGDTVVLKPSSTTTLSLLVLMELIQDVIPKGVVNLVTGKGSTAGEFLKNHPDLDKLAFTGSTAVGRDIALAAAEKLIPATLELGGKSANIILDDADIEKALEGAQLGILFNQGQVCCAGSRIFVQEGIYDEFISKLVKKFENIKIGNPLDPTTIMGSQIDARQVKTILDYVEIAKQEGGVILTGGVKYTENGCDKGNFVRPTLITNVNNGCRVSQEEIFGPVAVVIKFKTDDEVIAQANDSEYGLGGAVFTKNINRALKLAREIQTGRVWINTYNQIPEHAPFGGYKKSGIGRETHKVILEHYTQMKNILIDLEEGTSGLY

SEQ ID NO: 121151 - DNA, 1563 bp, Drosophila melanogaster; identical to SEQ ID NO: 37889
  CDS (1)..(1563)

SEQ ID NO: 121152 - protein, 520 aa, Drosophila melanogaster; identical to SEQ ID NO: 37890

SEQ ID NO: 121153 - DNA, 1479 bp, Methanosarcina mazei Go1
  CDS (1)..(1479): transl_table=11
gtgattcgggagtataagttactgataggtgggaagtcggtagactcatcaaccggagaaacttttgatgacatcaatccggctactcttgaaaaccttgccacgttacaggtcgcaggaatcgaagatgtggaccgggcagttgaggctgcagaggcagggttcagggtatggagtgaagttccggctcctggaagggctgaggtccttttcagggcagcgcgcataatgcaggagagaaaagaaggccttgccagactcatgacagaagagatgggaaaggtcctgcccgagaccaggggtgatgtacaggaagcaatagacattaccatttacgctgcaggggaaggcagaaggatgtttggggaaacaacgacctcagaactcagggacaagttctgcatgaccgtgctaaggcctgtaggagttgtgggcatgataacaccctggaactttcctattgcgattcccagctggaagatcatgccagcccttattgcagggaatgcgatcgtgttcaagcctgcaagcgatacgcccctgcttaccataaaacttgtagaaatcctgatggaggcgggcctgcctccaggagtcataaacatcgttcccggacctggaggaagtaccggaaaagcaatagtccagcacccccgaataagagcaatttcatttacaggaagccttgataccgggaaatggatcatggaagagtgtgcaaaatccatgaagcgggtctctttagagctgggtggaaaaaatcctgttattgtaatggatgatgcaaaccttgagcttgcccttgaaggcgtggtctggggagctttcgggacaacaggccagcgctgtacagctacgagcaggctgatccttcacgaaaaaataaaggatgaattcataaaaaggctgctcgcaaaaacaaagtctctcagggtgggaaacgggctcctgcctgaaacggacgtggggcctgtaattaataaagcccagcttgagaaaatagaaaagtacgtcaggataggaaaggaagaaggtgcagctatcctggttggagggaacaggatagatccgggtcttcccggttatttcttcgaaccgaccatatttacggatgtcagtcctgaaatgaggattgcacaggaagaaatcttcgggcccgtgctaagcataatcactgtttcggattttgacgaggctattgaggttgcaaataacatcaagtacggtctctcatctgcgatttatactgaaaatgttagaaccgctttcagggcaattgaaaaactggaagcaggaatcacatatgttaatgcccctactataggtgccgaagtccatcttcctttcgggggcataaaaggaaccgggaacggtttcagggaagctggaacagaggcgattaaagaattcaccgaggtaaaagccgtatatatagattacagcggcaggctacaaaaagcccagatagatacagaataa

SEQ ID NO: 121154 - protein, 492 aa, Methanosarcina mazei Go1
MIREYKLLIGGKSVDSSTGETFDDINPATLENLATLQVAGIEDVDRAVEAAEAGFRVWSEVPAPGRAEVLFRAARIMQERKEGLARLMTEEMGKVLPETRGDVQEAIDITIYAAGEGRRMFGETTTSELRDKFCMTVLRPVGVVGMITPWNFPIAIPSWKIMPALIAGNAIVFKPASDTPLLTIKLVEILMEAGLPPGVINIVPGPGGSTGKAIVQHPRIRAISFTGSLDTGKWIMEECAKSMKRVSLELGGKNPVIVMDDANLELALEGVVWGAFGTTGQRCTATSRLILHEKIKDEFIKRLLAKTKSLRVGNGLLPETDVGPVINKAQLEKIEKYVRIGKEEGAAILVGGNRIDPGLPGYFFEPTIFTDVSPEMRIAQEEIFGPVLSIITVSDFDEAIEVANNIKYGLSSAIYTENVRTAFRAIEKLEAGITYVNAPTIGAEVHLPFGGIKGTGNGFREAGTEAIKEFTEVKAVYIDYSGRLQKAQIDTE

SEQ ID NO: 121155 - DNA, 1623 bp, Drosophila melanogaster
  CDS (1)..(1623)
atgttggcacaattgagaaatatttcgaagctggcgctgccgcgccgcctcgttacccaaaccgccagctactcatcgtcctcgtcatatctcattgaccagccggagtacagtttcctgaaagaattgggactggagcgcgacaatccaggtgtttattcgggtcagtggcagggtcgtgggccatccgttaccagctacgatcccggaactggtcaaccgattgccaaagtgcgtcagggaaatgtccaggagctcgagcataccatcgggctggcggtggaagcctacaagcagtggcgacaggttccagctcccgttcgcggcgaaatagtgcgccaaatcggcgatgagctgagaaagtacaaggaaccactgggaaagctcgtctccctggaggtgggcaaaatctacagcgagggacagggcgaggttcaggagttcatagatatctgcgactatgcggttggcctctcaaggatttactccggccagctgatcaactcggagcgtgcggatcattcgattctggaggcctggcgtccgctgggagtggtgggcgttatttcggcctacaattttcccaatgctgtgttcggctggaatgctgccatcgccctaaccaccggcaacagtgtgctgtggaaaggagctcccagcactcccttggtctcggtggcgaccacaaaaattgtggctgaagtgctgcgtaggaacaatctgccgccggtggtgaccctctgccaaggaggaaccgatgttggtcagaccttggtggctgataagagagttaacctcgtttccttcaccggcagctgccaaactggtcgggatgtgggtgttgaagtgcagcgcagattcggcaaggtgatcctcgagctaggcggcaataatgccctaatcatcgatgaatctgccaacgtgaagatggccctggacgccgcacttttcggctgcattggcaccagtggtcaaagatgcaccaccaccaggaggattattgtccacgaaaagctgcacgatcagttcgtaaaggagctggttggtaaatataagcagctaatttccaagattggacaccagctcgaagctcaaactctggtgggtcccgtgcacacgcaacaaaacgtggagaactacaaggcggccatcgcggaagcgaaatccttaggaggaacggtggccttcggaggtaatgtcatccagcgggatggtttttacgtagagcccacagtgatcactggattgccgcacgatgccagcgttgtccatcgcgaaacctttgcaccaattgtgtacatcctcaaagccaaaaacgtggaccaggccatcgaatggaacaatgaggtggaacagggcttatcctctgccattttcacggagaacatcgggcaggcgttcaagtggattggagccaagggttccgattgcggtatagttaacatcaacaccaccaccaacggcgccgagattggtggagctttcggaggcgaaaaagccactggaggaggtcgcgagtccggatccgatgcctggaagcagtattgcaagcgggccaccattacagtcaatcactccggagaattggcctgcgcccagggtgttgtcttcaatgtggagtag

SEQ ID NO: 121156 - protein, 540 aa, Drosophila melanogaster
MLAQLRNISKLALPRRLVTQTASYSSSSSYLIDQPEYSFLKELGLERDNPGVYSGQWQGRGPSVTSYDPGTGQPIAKVRQGNVQELEHTIGLAVEAYKQWRQVPAPVRGEIVRQIGDELRKYKEPLGKLVSLEVGKIYSEGQGEVQEFIDICDYAVGLSRIYSGQLINSERADHSILEAWRPLGVVGVISAYNFPNAVFGWNAAIALTTGNSVLWKGAPSTPLVSVATTKIVAEVLRRNNLPPVVTLCQGGTDVGQTLVADKRVNLVSFTGSCQTGRDVGVEVQRRFGKVILELGGNNALIIDESANVKMALDAALFGCIGTSGQRCTTTRRIIVHEKLHDQFVKELVGKYKQLISKIGHQLEAQTLVGPVHTQQNVENYKAAIAEAKSLGGTVAFGGNVIQRDGFYVEPTVITGLPHDASVVHRETFAPIVYILKAKNVDQAIEWNNEVEQGLSSAIFTENIGQAFKWIGAKGSDCGIVNINTTTNGAEIGGAFGGEKATGGGRESGSDAWKQYCKRATITVNHSGELACAQGVVFNVE

SEQ ID NO: 121157 - DNA, 1521 bp, Oceanobacillus iheyensis HTE831
  CDS (1)..(1521): transl_table=11
ttgaggtacgcaaatccaaataaacaagatgcaatcgtaaattttgaaaaaaggtatgataactttattggtggaaagtatcagcctccaataaacggaaattacttcgaaaatgttagtcctgtaactggtgaagtattctgtgaaatagcacgttcaacgaaagaagatgtggatgcagcaattgatgcagctcatgctgctaaagacgcttggggaaagacatctgttgcagaaagagcggtaatcctaaataagattgcagacagaatcgaagagaatttagagaaacttgcagttgcagaaacatgggataatgggaaggcggtacgtgaaacacttgctgcagatattcctttagctgttgatcattttagatattttgcaggtgttataagagcacaggaaggtacgttaagtcagattgatgaagatacagtcgcttatcattttcatgaacctttaggcgttgtaggtcagattataccgtggaattttccaatcttaatggcaacatggaaattagcgccggcactagcagctggaaattgcgtagtacttaaaccagcagagcaaacacctgcttccatccatgttttacttgatttaattaaggatttactaccggatggtgtattaaatgtggtaaacggatttggtgtagaggctggtaaaccattagcatcaaatagtcgtattgcaaaaatcgcatttactggtgaaacaaccacaggaagattaatcatgcaatatgcctctgaaaatataattcctgtaactttagaattaggtggtaaatcaccaaatattttctttgaagatgtaatggataaagatgatgcatttgtagataaagcaattgagggcatggttatgtttgccctaaatcaaggagaagtatgtacttgtccatctcgtgctttagtacatgaatctatctatgatcgatttatggaaaaagtaattcaacgcgtaaatcaaataaaaataggtcatccattagatacggatacgatgatgggtgcacaagcatcacaagaacaaatggaaaaaataaaatcatatcttgatatcggaaaacaagaaggggcagaagttcttactggtggaaatgttaatgcactagaaggagaattagctgcgggttactatgtagagccaaccatatttaagggaaataataagatgcgtattttccaagaggagatatttggtccagttttatctgttactacgtttaaagataaagatgaggcaatggaagttgctaacgatactttatacggattaggtgcaggaatatggacaagagatataaatactgcttataggttcggcagaggtattgaagctggtcgtgtttggaccaattgttatcaccaatatcctgcacacgctgcttttggcggatataaaaaatcaggaattggtcgtgaaaatcatctcatgatgcttggtcattatcaacaaacaaaaaatctacttattagctatggtgaaggaacagccggattattctag

SEQ ID NO: 121158 - protein, 506 aa, Oceanobacillus iheyensis HTE831
MRYANPNKQDAIVNFEKRYDNFIGGKYQPPINGNYFENVSPVTGEVFCEIARSTKEDVDAAIDAAHAAKDAWGKTSVAERAVILNKIADRIEENLEKLAVAETWDNGKAVRETLAADIPLAVDHFRYFAGVIRAQEGTLSQIDEDTVAYHFHEPLGVVGQIIPWNFPILMATWKLAPALAAGNCVVLKPAEQTPASIHVLLDLIKDLLPDGVLNVVNGFGVEAGKPLASNSRIAKIAFTGETTTGRLIMQYASENIIPVTLELGGKSPNIFFEDVMDKDDAFVDKAIEGMVMFALNQGEVCTCPSRALVHESIYDRFMEKVIQRVNQIKIGHPLDTDTMMGAQASQEQMEKIKSYLDIGKQEGAEVLTGGNVNALEGELAAGYYVEPTIFKGNNKMRIFQEEIFGPVLSVTTFKDKDEAMEVANDTLYGLGAGIWTRDINTAYRFGRGIEAGRVWTNCYHQYPAHAAFGGYKKSGIGRENHLMMLGHYQQTKNLLISYGEGTAGLF

SEQ ID NO: 121159 - DNA, 1458 bp, Drosophila melanogaster; identical to SEQ ID NO: 37897
  CDS (1)..(1458)

SEQ ID NO: 121160 - protein, 485 aa, Drosophila melanogaster; identical to SEQ ID NO: 37898

SEQ ID NO: 121161 - DNA, 1536 bp, Streptomyces coelicolor A3(2)
  CDS (1)..(1536): transl_table=11
atgcacaacccgggcaacgccaccccggaccgattcccggcccaggaccgcttcgcggacggggcccagtacatcgcgggccgcctcacgaagggcacctcgggacggacccacaccgtcgtcgacccggccaccggcgaggacgtcctgacctacgacctcgccggacccgacgacgtggacgcggccgtcgccgccgcacgggcggcgttccccggctgggccggtgccacccccggcgagcgctccgacgccctgcaccggttcgccgccgtcctcgccgagcgcgccgaggacttcgcccgcgcggagtccctgcagtgcggcaagccgctgaagctgacccgcgagttcgacgtgccgggcacggtggacaacgccgccttcttcgccggagccgcccggcacctccaggggcagtcggcgggggagtactccggcgaccacacctcgtacgtccgccgcgagcccatcggcgtggtcgggtcgatcgcgccgtggaactacccgctccagatggccgcctggaagatcctcccggcgatcgccgcgggcaacaccatcgtgctcaagcccgccgagatcaccccgctcacctccctgatgttcgcccaggcagcgaccgaggccggtatcccggacggcgtgatcaacgtcgtcagcggcaccggacgggaggccggcgagcacctcgtcgcgcatcccgacgtcgccatgacctccttcaccggctccaccgccgtcggcaagcgcgtcgccgaggtcgccaccgccaccgtcaagcgcctccacctggaactcggcggcaaggcccccttcctcgtcttcgacgacgccgatctcgacgccgccgtccacggcgcggtcgcgggctcgctcatcaacaccggccaggactgcacggccgccacgcgcgcgtacgtgcagcggcccctgtacgaggcgttcgtcgagaagaccgccgccctcatggacaccgtccgcgtcggcgaccccttcgctcccggcaccgacctcggcccgctggtcagccacgtccagcgggaccgcgtcgccgccttcgtcgaccgggcccgctcctacgcgcgcgtggtgaccggcggcgaggtaccgcagggcgacctgaaggacggcgcctactaccggcccaccctcgtggcggacgccgcgcaggacagcgaggtcgtccagtcggagatcttcggcccggtcctggtcgtgctgcccttcgacaccgacgacgagggcatccggctggccaacgacacgccgtacgggctcgccgcctccgcctggagccgggacgtgtaccgcgcgaaccgcgccacccgtgagatcaaggcgggctgcgtgtggatcaacgaccacattccgatcatcagcgagatgccgcacggcggatacaaggcgtccgggttcggcaaggacatgtccgcctactccttcgaggagtacacgcaggtcaagcacgtcatgttcgacaacaccgcggtggcggccaaggactggcaccgcaccgtcttcggggaccggtag

SEQ ID NO: 121162 - protein, 511 aa, Streptomyces coelicolor A3(2)
MHNPGNATPDRFPAQDRFADGAQYIAGRLTKGTSGRTHTVVDPATGEDVLTYDLAGPDDVDAAVAAARAAFPGWAGATPGERSDALHRFAAVLAERAEDFARAESLQCGKPLKLTREFDVPGTVDNAAFFAGAARHLQGQSAGEYSGDHTSYVRREPIGVVGSIAPWNYPLQMAAWKILPAIAAGNTIVLKPAEITPLTSLMFAQAATEAGIPDGVINVVSGTGREAGEHLVAHPDVAMTSFTGSTAVGKRVAEVATATVKRLHLELGGKAPFLVFDDADLDAAVHGAVAGSLINTGQDCTAATRAYVQRPLYEAFVEKTAALMDTVRVGDPFAPGTDLGPLVSHVQRDRVAAFVDRARSYARVVTGGEVPQGDLKDGAYYRPTLVADAAQDSEVVQSEIFGPVLVVLPFDTDDEGIRLANDTPYGLAASAWSRDVYRANRATREIKAGCVWINDHIPIISEMPHGGYKASGFGKDMSAYSFEEYTQVKHVMFDNTAVAAKDWHRTVFGDR

SEQ ID NO: 121163 - DNA, 1686 bp, Corynebacterium efficiens YS-314
  CDS (1)..(1686): transl_table=11
atgtgcccgctgtcacaaaggttgatcaggtgtcacctggcacacaatacggacccatggtgggggacggtaaccctacgctcatccctactgtcgcccccagccgtggctcgtgacccgctctgtggtcgcctgatctgcgattttcctagcgaaggagacaccatgaccgtctatgccaacccgggaaccgaaggctcgatcgtcaactacgagaagcggtatgacaactacatcggtgggcagtgggtaccaccggtggagggccagtacatggacaacatcaccccggtcaccggtgaggtcttctgtgaggtcgcccgttccaccgccgccgatgttgaggccgccctggacgccgcccacaaggcggcaccggcatggggtcgcacctccgttgcggagcgtgcactgatcctgcaccgcatcgccgaccgcatggaggagcacctcgaggagatcgccgtcgccgagacctgggagaacggcaaggcggtccgtgagaccctcgccgccgacatcccgctggccattgatcacttccgttatttcgccggcgccatccgcgcccaggaggaccgttcctcccagatcgaccacaacaccgttgcctaccactacaacgagcctatcggcgtggtcggacagatcatcccgtggaacttccccatcctcatggccacctggaagatcgccccggcgctggccgccggcaacgccatcgtgatgaagcccgcggagcagaccccggcctccatcctctacctgatgaacatcgtcggtgacctcatcccggacggtgtgctcaacatcgtcaacggactcggtgaggaggcgggcaccgccctgtccagctctgaccgcatcggcaagatcgccttcaccggttccacccaggtgggcaagatcatcaacagggccgcctccgacaagatcatccccgtcaccctcgaactgggcggcaagtccccgtcgatcttcttcgccgacgtcatggcccaggatgatgccttccgtgagaaggccgtcgagggctttgccatgttcgccctcaaccagggtgaggtctgcacctgcccgtcccgtgccctggtgcacgagtccatcgccgatgagttcctcgagctcggtgtcaagcgcgtccagaacatcaagctgggcaacccgctggataccgagaccatgatgggtgcccaggcatcccaggagcagatggacaagatctccagctacctcaagatcggccccgacgagggtgcggaaaccctcaccggcggcaaggtcaacaagatcgacggtctggacaatggttactacatcgaaccgaccgtgttccgtggcaccaatgacatgcggatcttccgtgaggagatcttcggaccggtactctccgtggccaccttctccgatttcgatgaggccatccagatcgccaacgacaccaactacggtctcggcgccggtgtgtggagccgcgaccagaacaccgtctaccgtgcgggccgtgccatccaggccggtcgtgtctgggtgaaccagtatcacaactacccggcacactccgccttcggcggatacaaggagtccggtatcggccgtgagaaccacctcatgatgctggcccactaccagcagaccaagaacctgctggtctcctacgatccgaacccgaccggcctgttctag

SEQ ID NO: 121164 - protein, 561 aa, Corynebacterium efficiens YS-314
MCPLSQRLIRCHLAHNTDPWWGTVTLRSSLLSPPAVARDPLCGRLICDFPSEGDTMTVYANPGTEGSIVNYEKRYDNYIGGQWVPPVEGQYMDNITPVTGEVFCEVARSTAADVEAALDAAHKAAPAWGRTSVAERALILHRIADRMEEHLEEIAVAETWENGKAVRETLAADIPLAIDHFRYFAGAIRAQEDRSSQIDHNTVAYHYNEPIGVVGQIIPWNFPILMATWKIAPALAAGNAIVMKPAEQTPASILYLMNIVGDLIPDGVLNIVNGLGEEAGTALSSSDRIGKIAFTGSTQVGKIINRAASDKIIPVTLELGGKSPSIFFADVMAQDDAFREKAVEGFAMFALNQGEVCTCPSRALVHESIADEFLELGVKRVQNIKLGNPLDTETMMGAQASQEQMDKISSYLKIGPDEGAETLTGGKVNKIDGLDNGYYIEPTVFRGTNDMRIFREEIFGPVLSVATFSDFDEAIQIANDTNYGLGAGVWSRDQNTVYRAGRAIQAGRVWVNQYHNYPAHSAFGGYKESGIGRENHLMMLAHYQQTKNLLVSYDPNPTGLF

SEQ ID NO: 121165 - DNA, 1512 bp, Pseudomonas putida KT2440
  CDS (1)..(1512): transl_table=11
atgaggtaccccatgaaagattccagcgatacccatccgaatcaccttcccgacagctgctacggcctgtttatcgacaaccagtgggttacggccgaatacggtgaaaccctcgacattatcaaccccgccaacggaaaaattctcaccaacattccaaacgccacagctgccgacgtcgaccgcgcggtgcaggccgcacagcgcgccttcgtgacctggcgtaccacctcaccagcggaacgcgccaatgcgctgttgaagatcgccgacctactggaagccgatgccgatcggttcgcggttctggaaacccttgatgtaggcaaacccattcgtgaaagtcgctccgtcgacatcccactggcgattgatcacttccgctacttcgctggcgtaatccgcagccaatcggatgaggcggtcatgctggatgagcaaacactcagcatcgctctcagtgaacccctcggcgtcgtgggccaagtgattccgtggaacttcccgcttcttatggccgcctggaagatcgctccagccatcgcggcgggtaacaccgtagttatcaaaccttctgagctgaccccggtaaccatccttgaactagcgaagatcttcgccaaggtacttccggccggcgtggtcaacatcgtcacaggcttaggcaccacagttggacaggcgttactggatcatccggacctacgcaagcttgccttcaccggctcgacgcgtgtcggcgaactcgtcgccaatgcggcagcgaagaaaataattcccgccacccttgaactgggcggcaagtcggccaacatcgttttccccgatgcgaactgggacaaggccgtggaaggcgcagtcctcgccatcctgtggaaccaaggccaagtctgcgaatccggcgctcggctgttcgttcacgaatccatctacgagcgattcctggctgagctcaagcataagttcgaagctgtgcgtgtgggtgacccattgaacccggacaccatgatgggcgcacaggtcagcaagacccagatggaacggatcctcggctacgtcgatatcgccaaagaggaaggtgccgaggtactgatcggcggcggtcgtcttacaggtgccgattacgatgccggcttcttcatccagccaacgattctggtcggtgttcgcaacgatatgcgcgtcgcctacgaggaaattttcggcccagttctgtgcgtcattcctttcaaggatgaagcggaggtcatcgccatggccaacgactccgagtacggcctagcgggtgcagtctggacccaagacatcaaccgggcgttgcgtgtggcacgcgcggtggaaaccggacgtatgtgggtaaatacctaccatgagatccctgcccacgccccctttggtggctataagaaatctggcctgggacgggaaactcacaagtcaatgctggaagcctacagccagaagaagaacatctacgtcagcctcaacgaagcaccgctcgggctcttctga

SEQ ID NO: 121166 - protein, 503 aa, Pseudomonas putida KT2440
MRYPMKDSSDTHPNHLPDSCYGLFIDNQWVTAEYGETLDIINPANGKILTNIPNATAADVDRAVQAAQRAFVTWRTTSPAERANALLKIADLLEADADRFAVLETLDVGKPIRESRSVDIPLAIDHFRYFAGVIRSQSDEAVMLDEQTLSIALSEPLGVVGQVIPWNFPLLMAAWKIAPAIAAGNTVVIKPSELTPVTILELAKIFAKVLPAGVVNIVTGLGTTVGQALLDHPDLRKLAFTGSTRVGELVANAAAKKIIPATLELGGKSANIVFPDANWDKAVEGAVLAILWNQGQVCESGARLFVHESIYERFLAELKHKFEAVRVGDPLNPDTMMGAQVSKTQMERILGYVDIAKEEGAEVLIGGGRLTGADYDAGFFIQPTILVGVRNDMRVAYEEIFGPVLCVIPFKDEAEVIAMANDSEYGLAGAVWTQDINRALRVARAVETGRMWVNTYHEIPAHAPFGGYKKSGLGRETHKSMLEAYSQKKNIYVSLNEAPLGLF

SEQ ID NO: 121167 - DNA, 1476 bp, Escherichia coli CFT073
  CDS (1)..(1476): transl_table=11
gtgatgtcccgaatggcagaacagcagctttatatacatggtggttatacctccgccaccagcggtcgcaccttcgagaccattaacccggccaacggtaacgtgctggcgaccgtgcaggccgccgggcgtgaggatgtcgatcgcgccgtgaagagtgcccaacaagggcaaaaaatctgggcggcgatgaccgctatggaacgctcgcgtattctgcgtcgggccgttgatattctgcgtgaacgcaatgacgaactcgcaaaactggaaaccctcgacaccggaaaagcatattcggaaacctcaaccgtcgatatcgttaccggtgcggacgtgctggagtactatgccgggctgatcccggcgctggaaggcagccagatcccgttgcgtgagacgtcatttgtttatacccgccgcgaaccgctgggcgtagtggcggggattggcgcatggaactacccgatccagattgctttgtggaaatccgcccccgcgctggcggcgggtaacgcgatgatcttcaaaccgagcgaagtcaccccgcttaccgcgttaaagctggctgaaatttacagcgaagcgggcctgccggacggtgtatttaacgtgttgccgggcgtgggcgcggagaccgggcaatatctgaccgatcatccgggcattgccaaagtgtcatttaccggcggcgtcgccagcggcaaaaaagtgatggctaactcggcagcttcctccctgaaagaagtgaccatggagctgggcggtaaatcaccgctgatcgttttcgacgatgcggatctcgatctcgccgccgatatcgccatgatggcgaatttcttcagctccggtcaggtgtgtaccaacggcactcgcgtcttcgttccgacgaaatgcaaagccgcatttgaacaaaaggttctggcgcgcgttgagcgcattcgcgcgggcgacgttttcgatccgcaaactaacttcggcccgctggtcagcttcccgcatcgcgataacgtgctgcgctatatcgccaaaggcaaagaggaaggcgcgcgcgtactgtgcggcggcaatgtactgaagggggatagcttcgataacggcgcatgggttgcaccgaccgtgttcaccgattgcagcgacgatatgaccattgtgcgcgaagagattttcgggccggtgatgtccattctgacctacgagtcggaagacgaagtcattcgccgcgctaacgataccgactacggtctggcggcgggtatcgtgacggcggacctgaaccgcgcgcatcgcgtcattcatcagctggaagcgggtatttgctggatcaacacctggggcgaatccccggcagagatacccgttggcggctacaaacactccggcattggtcgcgagaacggcgtgatgacgctccagagttacacccaggtgaagtccatccaggttgagatggctaaattccagtccatattctaa

SEQ ID NO: 121168 - protein, 491 aa, Escherichia coli CFT073
MMSRMAEQQLYIHGGYTSATSGRTFETINPANGNVLATVQAAGREDVDRAVKSAQQGQKIWAAMTAMERSRILRRAVDILRERNDELAKLETLDTGKAYSETSTVDIVTGADVLEYYAGLIPALEGSQIPLRETSFVYTRREPLGVVAGIGAWNYPIQIALWKSAPALAAGNAMIFKPSEVTPLTALKLAEIYSEAGLPDGVFNVLPGVGAETGQYLTDHPGIAKVSFTGGVASGKKVMANSAASSLKEVTMELGGKSPLIVFDDADLDLAADIAMMANFFSSGQVCTNGTRVFVPTKCKAAFEQKVLARVERIRAGDVFDPQTNFGPLVSFPHRDNVLRYIAKGKEEGARVLCGGNVLKGDSFDNGAWVAPTVFTDCSDDMTIVREEIFGPVMSILTYESEDEVIRRANDTDYGLAAGIVTADLNRAHRVIHQLEAGICWINTWGESPAEIPVGGYKHSGIGRENGVMTLQSYTQVKSIQVEMAKFQSIF

SEQ ID NO: 121169 - DNA, 1698 bp, Bradyrhizobium japonicum USDA 110
  CDS (1)..(1698): transl_table=11
atgcgacatggctcattctccggggagcggcgtcaagttcggtcgagctataacatggcgttcgcgcgaccctgcacaagtcggcatgggaggtcttcgttcctcgccgcctttacgcctttccggcaccgctgtatcctttctcgcccaacgatcccgccgagatcgaacccaatcaatcacctgacagggagtgcagccatggctgtgtcgcaggctattccgatcacgcgccacccgttcgccaatgggtcctacaagcagatgctgatcgacgggaaatgggtcgatgccgcctccggcaagcgcttcgagacccacaatcccgcgaccggcgaactgctcgcaaccgttgccgagggtgacaaggaagacatcgaccgcgccgttgccgccgcccgccgcgccttcgaaggaccctggagcaaggtcaagccgttcgagcggcagaacctgctgctgaggcttgccgatctcgtcgagaagaatttcgacgaattgtcgcagctcgacacgctcgacatgggcgcgccgctcagccgcacccgtgcctatcgcctccgcgccgtcggcatgctgcgctattacgccggtcagaccaccgcgatccatggcgagaccatcgagaactcgctgccgggcgaaatcttctcctacacgctgaaggagccgatcggcgtcgtcggcgccatcatcccctggaacggcccgctcaccgcgacgatctggaagatcggcccggcgatcgccaccggctgcaccgtggtgctcaagcccgccgaagaggcgccgctgacctcgttgcgcatcgccgagctggcgatggaggcaggcattccgcccggcgtcgtcaacgtcgtgcccggctatggcgagaccgcgggcgctgcgctcgccgcgcaccctgacgtcgacaaggtcgccttcaccggctcgcacgtcacgggacagtcgatcatccgcgcctcggccggcaacctcaagcgcgtctcgctcgagcttggcggcaagtcgccggacatcgtgttcgcggacgccgatctcgatgccgccgtgcccggcgccgcgatggcggtgtttgccaactctggccagatctgtagcgccggtacgcgcctgttcgtcgagcagtcgatctacgaggagttcgtcggccgcgtcgccgagttcggcaagaagctgcaagtcggcaatggtctcgatcccaacgtgcagatcggcccgctggtctccgagcagcagctcgagcgcgtcaccggctatctcgatatcggccagaaggaaggcgcgcgggcgctcgccggcggcggccgcgtcaccgaaggcgcgctgtcgaagggtttcttcgtctcgccgaccgtgttcgcgggcgtccaggacaatatgcgcatcgcgcaggaggagatttttggccccgtcatctccgccatcgcgttcaaggacatggacgaactggtcaagcgcgccaacaacaccacgttcggcctcggctcgggcctgtggacgcgcgacgtcagcaaggcgcatgcggtcgcgaagagcctgcgtgccggctcggtgtgggtgaactgctaccaggcgatggatccggccgtgcccttcggcggctacaagatgagcggttacggccgcgagtccggcaagcagcacgtcgaggagtatctcaacgtgaaggccgtctggatcaagacggcgtag

SEQ ID NO: 121170 - protein, 565 aa, Bradyrhizobium japonicum USDA 110
MRHGSFSGERRQVRSSYNMAFARPCTSRHGRSSFLAAFTPFRHRCILSRPTIPPRSNPINHLTGSAAMAVSQAIPITRHPFANGSYKQMLIDGKWVDAASGKRFETHNPATGELLATVAEGDKEDIDRAVAAARRAFEGPWSKVKPFERQNLLLRLADLVEKNFDELSQLDTLDMGAPLSRTRAYRLRAVGMLRYYAGQTTAIHGETIENSLPGEIFSYTLKEPIGVVGAIIPWNGPLTATIWKIGPAIATGCTVVLKPAEEAPLTSLRIAELAMEAGIPPGVVNVVPGYGETAGAALAAHPDVDKVAFTGSHVTGQSIIRASAGNLKRVSLELGGKSPDIVFADADLDAAVPGAAMAVFANSGQICSAGTRLFVEQSIYEEFVGRVAEFGKKLQVGNGLDPNVQIGPLVSEQQLERVTGYLDIGQKEGARALAGGGRVTEGALSKGFFVSPTVFAGVQDNMRIAQEEIFGPVISAIAFKDMDELVKRANNTTFGLGSGLWTRDVSKAHAVAKSLRAGSVWVNCYQAMDPAVPFGGYKMSGYGRESGKQHVEEYLNVKAVWIKTA

SEQ ID NO: 121171 - DNA, 1491 bp, Enterococcus faecalis V583
  CDS (1)..(1491): transl_table=11
atgagtaaaaaagaaataaatcaagtagttgccagtagctatcaattgtatattaatggagagtggacaacaggtagtggtaacaaaatgattgctagttacaatcctagtaatggcgaaaaattagcagaatttgtagatgccacaaatgcagatgtggatcgagctgtagaagcagcccaagaagcgtttcagacatggaaagatgttgacgttgtaacaagaagcaatcttttgttgaaaattgctgatttgattgaagaaaatcaagaacatttggctatggtggagactttagataatggaaaaccgcttcgggaaacgcaatcgattgatgtccctgccagtgcagaccattttcggtattttgctagtgtgattcgtggagaagaaggatctgtcaaagaatttgataaggatacgttatccattgttgtgaaagaacccatcggtgttgtgggtcaaattattccgtggaatttccccttattaatgggtgcttggaaattagcaccagcgttggcagcaggtaacacggttgtgattcatccgtcctcgagcacatcattaagtctgttggaattgtttaaaatttttgatcaagtcttgccgaaaggagtagtgaatttaatcaccggtcgtggttctgattcaggaaattatatgttggcacatccagggtttgataagctagcttttacaggctcaacagaggtggggtacactgtcgctaaagcggcggccgaccgcctaattccagccactttagaacttggcggaaaatcagccaacattatttttgaagatgccaattgggaacgtgcattagaaggcgtgcagttagggattttattcaatcaagggcaagtttgttgtgctgggtctcgtgtgttcgttcagtcaggtatttatgatcaatttgtagaagctttaaaggaaaagtttgaacaagtgaacgttggtttcccgtgggaaaaagatgttgaaatgggcgctcagatcaatgagcatcaattggaagaaattttaaaatatgtcgaaattggtgtgaaggaaggagctacgctgattactggtgggcaacgtttaacagaaaatgggctagacaagggggcgtttttagcacctacgttattagcgaatggtacgaatgcaatgtgtgtggcccaagaagaaatctttggtcctgttgcaacagtgattaaatttgaaacggaagaagaagtcattcgtttagctaatgattctgaatatggtctaggtggtgccgtcttttctcaagatatcaatgtggcattacgggttgctcgtggtgtacggacaggtcgaatgtgggtcaacacatacaatcaattgcctgcgggcgcgccatttggcggttataaaaaatcaggaattggtcgagaaacgcataaatcaatgctagatgcttatacgcaaatgaaaaatatttacattgtgacaaaagaagaagcagatggactgtattaa

SEQ ID NO: 121172 - protein, 496 aa, Enterococcus faecalis V583
MSKKEINQVVASSYQLYINGEWTTGSGNKMIASYNPSNGEKLAEFVDATNADVDRAVEAAQEAFQTWKDVDVVTRSNLLLKIADLIEENQEHLAMVETLDNGKPLRETQSIDVPASADHFRYFASVIRGEEGSVKEFDKDTLSIVVKEPIGVVGQIIPWNFPLLMGAWKLAPALAAGNTVVIHPSSSTSLSLLELFKIFDQVLPKGVVNLITGRGSDSGNYMLAHPGFDKLAFTGSTEVGYTVAKAAADRLIPATLELGGKSANIIFEDANWERALEGVQLGILFNQGQVCCAGSRVFVQSGIYDQFVEALKEKFEQVNVGFPWEKDVEMGAQINEHQLEEILKYVEIGVKEGATLITGGQRLTENGLDKGAFLAPTLLANGTNAMCVAQEEIFGPVATVIKFETEEEVIRLANDSEYGLGGAVFSQDINVALRVARGVRTGRMWVNTYNQLPAGAPFGGYKKSGIGRETHKSMLDAYTQMKNIYIVTKEEADGLY

SEQ ID NO: 121173 - DNA, 1485 bp, Bacillus cereus ATCC 14579
  CDS (1)..(1485): transl_table=11
atgagtcaactagctgtaaatcttcatgaaaaggtagagaaatttcttcaaggtacaaaaaagttatatgtgaatggatctttcattgaaagcgcttccggtaaaacatttaaaacacctaacccagcaactggtgaaacacttgccgtcgtttctgaagctggtcgcgaagatattcataaagctgtagtcgcagctcgtatggcttttgacgaaggtccttggtctcgtatgagcaccgctgagcgaagccgtctcatgtacaagttagctgatttaatggaagaacataaagaagagcttgcacagctcgaaacattagataacggaaagccaatccgtgaaacaatggcagcagacataccacttgcaattgagcatatgcgctattacgctggatgggctacgaaaatcgttggtcaaacaattcctgtttccggtgattactttaactatacacgccatgaagctgttggtgtcgttggtcaaattatcccttggaacttcccgcttcttatggcaatgtggaaaatgggagcagcgcttgctacaggatgtacaatcgttttaaaacctgcagaacaaactccactatctgctctatacttagctgaattaattgaagaagctggattcccgaaaggtgttattaatatcgtacctggattcggtgaatcagctggacaagctctcgttaatcatccactcgttgataaaattgcatttaccggttctactcctgtcggtaaacaaattatgcgacaagcatccgaaacattaaaacgcgttacacttgaattaggcggtaaatcaccaaatatcatattgccagatgctgatttatctcgcgcgattcctggtgcactttctggtgttatgtttaaccaaggacaagtatgctctgctggatcacgcttatttgttccgaagaaaatgtatgataatgtcatggctgatctcgtcctctattctaaaaaactaaatcaaggtgtcggtcttaaccctgaaacaacaattggccctctcgtttccgaagaacaacaaaaacgtgtaatgggctacattgaaaaagggattgaagaaggcgctgaagtactttgcggaggaagtaatccattcgatcaaggctacttcgtttctcctacagtattcgctgacgtaaatgatgaaatgacgatcgcaaaagaagaaattttcggtccagttatttctgcaataccgtttaacgatattgacgaagtaattgaacgtgcaaataaatcacaattcggcttagcggctggtgtgtggacagaaaatgttaaaacagcacactatgttgcaagtaaagtacgtgcaggtacagtatgggtaaactgttataacgtctttgatgcagcatctccatttggaggatttaaacaatctggtcttggccgtgaaatgggatcttacgcattaaataactatacagaagtaaagagcgtttggcttaacttaaattaa

SEQ ID NO: 121174 - protein, 494 aa, Bacillus cereus ATCC 14579
MSQLAVNLHEKVEKFLQGTKKLYVNGSFIESASGKTFKTPNPATGETLAVVSEAGREDIHKAVVAARMAFDEGPWSRMSTAERSRLMYKLADLMEEHKEELAQLETLDNGKPIRETMAADIPLAIEHMRYYAGWATKIVGQTIPVSGDYFNYTRHEAVGVVGQIIPWNFPLLMAMWKMGAALATGCTIVLKPAEQTPLSALYLAELIEEAGFPKGVINIVPGFGESAGQALVNHPLVDKIAFTGSTPVGKQIMRQASETLKRVTLELGGKSPNIILPDADLSRAIPGALSGVMFNQGQVCSAGSRLFVPKKMYDNVMADLVLYSKKLNQGVGLNPETTIGPLVSEEQQKRVMGYIEKGIEEGAEVLCGGSNPFDQGYFVSPTVFADVNDEMTIAKEEIFGPVISAIPFNDIDEVIERANKSQFGLAAGVWTENVKTAHYVASKVRAGTVWVNCYNVFDAASPFGGFKQSGLGREMGSYALNNYTEVKSVWLNLN

SEQ ID NO: 121175 - DNA, 1461 bp, Pseudomonas putida
  CDS (1)..(1461): transl_table=11
atgaaagagatcaagcatttcattaacggtgcctttgtcggctcggccagcggccgcaccttcgaggacatcaacccggtcaatggccaggtgatcggccgcgtccacgaggccggccgcgccgaggtcgacgctgcggtcaaagctgcccgtgccgcgctcaaggggccctgggggaagatgacggtggccgagcgcgctgacattctgcatcgcgtggccgatggcatcacggcccgtttcgacgagtttctcgaggccgaatgcctcgacaccggaaagccaaaatccctggccagccatatcgacatcccgcgtggggcggccaatttcaaggtgttcgccgacctgctgaagaatgtcgccaacgaagccttcgagatggccaccccggatggcgccggtgcgctcaactacggcgtgcgccggcccaagggggtgatcggggtcatcagcccgtggaacctgccgctgctgctgatgacctggaaagtcggaccggccctggcctgcggcaactgcgtggtggtcaagccatccgaggaaactccgctgaccgccaccctgctcggcgaggtgatgcaggccgccggcgtaccggcgggcgtgtacaacgtggtgcatggcttcggcggcgattcggccggggccttcctcaccgagcactcggacgtcgacgcctacaccttcaccggtgagaccggcaccggcgaaaccatcatgcgcgctgcggccaagggcgtgcgccaggtgtcgctggaactgggcgggaagaacgccggcatcgtgttcgccgactgcgatatggacaaggccatcgagggcaccctgcgctcggccttcgccaactgcggccaggtctgcctcggtaccgagcgactgtatatcgagcggccgatcttcgacgcgttcgtcgcccgactcaaggccggtgccgaaagcctggtgatcgggccgccggacgacgccagcagcaacttcggcccgctggtcagcctcaagcaccgcgaaaaagtcctcagctattaccagcaggcagtcgatgacggcgccaccgttgtcaccggcggcggcgtgccggagatgccggcgcacctggccggcggcgcctgggtgcagccgactatctggactggcctctccgacaattcggcggtggtcaccgaggaaatcttcggcccctgctgccatatccgcccgttcgatacggaagaggaggccatcgaactggccaacagcctgccctatggcctggcgtcggcgatctggaccgagagcagctcgcgcgcccaccgcgtcgccgggcagatcgaggccggcatcgtctgggtcaacagctggttcctccgcgatctacgcaccgccttcggcggcagcaagcagtcgggcatcggccgcgaagggggtgtgcactcgctggagttctacaccgagctgaaaaacatctgcgtgaaactctga

SEQ ID NO: 121176 - protein, 486 aa, Pseudomonas putida
MKEIKHFINGAFVGSASGRTFEDINPVNGQVIGRVHEAGRAEVDAAVKAARAALKGPWGKMTVAERADILHRVADGITARFDEFLEAECLDTGKPKSLASHIDIPRGAANFKVFADLLKNVANEAFEMATPDGAGALNYGVRRPKGVIGVISPWNLPLLLMTWKVGPALACGNCVVVKPSEETPLTATLLGEVMQAAGVPAGVYNVVHGFGGDSAGAFLTEHSDVDAYTFTGETGTGETIMRAAAKGVRQVSLELGGKNAGIVFADCDMDKAIEGTLRSAFANCGQVCLGTERLYIERPIFDAFVARLKAGAESLVIGPPDDASSNFGPLVSLKHREKVLSYYQQAVDDGATVVTGGGVPEMPAHLAGGAWVQPTIWTGLSDNSAVVTEEIFGPCCHIRPFDTEEEAIELANSLPYGLASAIWTESSSRAHRVAGQIEAGIVWVNSWFLRDLRTAFGGSKQSGIGREGGVHSLEFYTELKNICVKL

SEQ ID NO: 121177 - DNA, 1497 bp, Bordetella bronchiseptica RB50; identical to SEQ ID NO: 37905
  CDS (1)..(1497): transl_table=11

SEQ ID NO: 121178 - protein, 498 aa, Bordetella bronchiseptica RB50; identical to SEQ ID NO: 37906

SEQ ID NO: 121179 - DNA, 1488 bp, Chromobacterium violaceum ATCC 12472; identical to SEQ ID NO: 37907
  CDS (1)..(1488): transl_table=11

SEQ ID NO: 121180 - protein, 495 aa, Chromobacterium violaceum ATCC 12472; identical to SEQ ID NO: 37908

SEQ ID NO: 121181 - DNA, 1539 bp, Gloeobacter violaceus PCC 7421
  CDS (1)..(1539): transl_table=11
gtggaggtaaggcccatggtagttgcagctccagcggcgtccgcaagcgaatcgattttcaaaccccgttacgacaatttcatcggcggtcagtggcgagcaccgctcaaagggcagtacaccgacaacatcacacccgtcaacggccgggtactctgccaggtgccccgctcgacggtcgaggacatcgaactggcccttgacgccgcccacgcggcgcgcgaaagctggggggcgctttcggcggccgagcgctcgaacattttgctcaagatcgccgatcgcatggaagcgaatctgcacaagctggcggtggccgagacctgggacaacggcaaaccgatccgcgagaccaccggcgccgacgtgccgctcgctgtcgatcacttccgctacttcgccgggtgcatccgggcgcaggaaggttcgatcagcgaaatcgacggcaacacaatcgcctaccacttcccggaaccgctgggggtggtggggcagattattccctggaactttccgatcttgatggcggcctggaaactggccccggccttggcggcgggcaactgcgtggtgctcaagcccgccggtcccacccccgcctcgattctggtgtggctggaggtcgtgggcgacttgctcccggccggggtgctcaacgtcgtcatcggccccggtcccgaggtgggcaaggcccttgccgccagcaagcgcgtcgccaaggtggctttcaccggcgagacggagaccggccgccaaatcatgcagtacgcggcccaaaacatcgtgccggtgaccctcgaactgggcggcaaatcgccgaatctgttttttgccgatgtcatgaacgccgacgacgactttctcgataaggccgtcgaaggctttgtgatgttcgccttcaaccagggcgaggtgtgcacctgcccgtcgcgcgccctggtgcacgagtcgatatacgaaaaattcatcgaccgggccgtccggcgtgtggcaagcatcaaacagggcaatcccctcgaccccgagacgatgctgggcgcccaggtctcccaggcccaaatggaaaaaatcgcccgctacgtcgaattgggcaagcaggaaggggccgaggtgctcatcggcggcgagcgcaacagtgaaccgggcgaagggctcgctgggggctactactacaagccgacggtgatgaagggccacaaccagatgcgcatcttccaggaagaaatcttcgggccggtgctcgcggtgacgaccttcaaagatgccgaggaggcggtgcgcatcgccaacgacaccccctacggccttggggcgggcgtctggtcgcgcgacatcaacaccgcctaccgggtcggccgcggcatccaggccggtcgcgtctgggtgaactgctatcacgtctacccggcccacgccgcttttggcggctacaaagcgagcggcgtcggccgcgagacccacaagatgatgctgagccattaccagcagaccaaaaacctgctggtgagctacgacaccaagccccagggcttcttctga

SEQ ID NO: 121182 - protein, 512 aa, Gloeobacter violaceus PCC 7421
MEVRPMVVAAPAASASESIFKPRYDNFIGGQWRAPLKGQYTDNITPVNGRVLCQVPRSTVEDIELALDAAHAARESWGALSAAERSNILLKIADRMEANLHKLAVAETWDNGKPIRETTGADVPLAVDHFRYFAGCIRAQEGSISEIDGNTIAYHFPEPLGVVGQIIPWNFPILMAAWKLAPALAAGNCVVLKPAGPTPASILVWLEVVGDLLPAGVLNVVIGPGPEVGKALAASKRVAKVAFTGETETGRQIMQYAAQNIVPVTLELGGKSPNLFFADVMNADDDFLDKAVEGFVMFAFNQGEVCTCPSRALVHESIYEKFIDRAVRRVASIKQGNPLDPETMLGAQVSQAQMEKIARYVELGKQEGAEVLIGGERNSEPGEGLAGGYYYKPTVMKGHNQMRIFQEEIFGPVLAVTTFKDAEEAVRIANDTPYGLGAGVWSRDINTAYRVGRGIQAGRVWVNCYHVYPAHAAFGGYKASGVGRETHKMMLSHYQQTKNLLVSYDTKPQGFF

SEQ ID NO: 121183 - DNA, 1470 bp, Photorhabdus luminescens subsp. laumondii TTO1; identical to SEQ ID NO: 37909
  CDS (1)..(1470): transl_table=11

SEQ ID NO: 121184 - protein, 489 aa, Photorhabdus luminescens subsp. laumondii TTO1; identical to SEQ ID NO: 37910

SEQ ID NO: 121185 - DNA, 1521 bp, Rhodopseudomonas palustris CGA009
  CDS (1)..(1521): transl_table=11
atgaacctcatcacaacgatgcatcctgacgccagcacggtcttcaaggcccgctatggcaacttcatcggcggccgctgggttgcgccggtcgatggcagatacttcgacaacaccacgccgatcaccggcgcaaaactgacggaaattccgcgttcgcagaaggaagacgtcgaactcgcgcttgatgcagcgcacaccgcgagcgtcacctggagcaagaccacgacgacagaacggtcactcattctcaatcgcatcgccgatcggatggaagccaatctcgatctgctggcgatcgccgagacgctcgacaacggcaagccgatccgcgagacgcgggccgccgacctgccgctggcgatcgatcacttccgctatttcgcaggtgcactgcgcgcgcaggaaggttcgatctcggagatcgatcacgacaccatcgcgtatcacttccacgagccgctcggcgtcgtcggccagatcattccgtggaacttcccgttgctgatggccgcctggaagctggcgccagcactcgccgccggcaactgcgtggtgctgaagcccgccgagcagaccccggcctcgatcctggtatgggccgaactggtcggcgatctgttgcctcccggcgtcgtcaacgtcgtcaacggcttcggcgtcgaagccggcaagccgctggcgtccagcccgcgcatcgccaagatcgccttcaccggcgagacctcgaccgggcggctgatcatgcaatacgccagcgagaatctggtgccggtgtcactggaactcggcggcaaatcgccgaacatcttcttcggcgacgtcacggccgaagacgacccgttcttcgacaaggcgatcgaaggcttcgtgatgttcgcgctcaatcaaggcgaagtgtgcacctgcccgagccgcgcgctggtgcaggaatcgatctacgatcgcttcatggagcgggcgctcgcccgcgtcgccgcgatccggcagggcgatccgcgcgatccggcaacgatgatcggtgcgcaggcgtcgcaagagcagctcgacaagatcctgtcctacatcgacatcggtcggcacgaaggtgccgaactgctggccggcggcgggcgggcgcagctgcccggcggcctcgccggtggctactacgtgcatccgaccgtgttccgcggccacaaccagatgcggatcttccaggaggagatcttcggccccgtggtgtcggtcaccaccttcaaggacgaagccgaggcgatcgccatcgccaacgacacccagtacggactcggcgcaggcgtctggacgcgggacggcactcgcgcctatcggttcggacgcgccatcgctgcgggccgggtgtggaccaattgttaccacgcctatccggcgcacgccgccttcggcggctacaagcagtccggcatcgggcgtgagacccacaagatgatgctcgatcactatcagcacaccaagaacctgctggtgagctacggcaccggcccactcggcttcttctag

SEQ ID NO: 121186 - protein, 506 aa, Rhodopseudomonas palustris CGA009
MNLITTMHPDASTVFKARYGNFIGGRWVAPVDGRYFDNTTPITGAKLTEIPRSQKEDVELALDAAHTASVTWSKTTTTERSLILNRIADRMEANLDLLAIAETLDNGKPIRETRAADLPLAIDHFRYFAGALRAQEGSISEIDHDTIAYHFHEPLGVVGQIIPWNFPLLMAAWKLAPALAAGNCVVLKPAEQTPASILVWAELVGDLLPPGVVNVVNGFGVEAGKPLASSPRIAKIAFTGETSTGRLIMQYASENLVPVSLELGGKSPNIFFGDVTAEDDPFFDKAIEGFVMFALNQGEVCTCPSRALVQESIYDRFMERALARVAAIRQGDPRDPATMIGAQASQEQLDKILSYIDIGRHEGAELLAGGGRAQLPGGLAGGYYVHPTVFRGHNQMRIFQEEIFGPVVSVTTFKDEAEAIAIANDTQYGLGAGVWTRDGTRAYRFGRAIAAGRVWTNCYHAYPAHAAFGGYKQSGIGRETHKMMLDHYQHTKNLLVSYGTGPLGFF

SEQ ID NO: 121187 - DNA, 1464 bp, Strongylocentrotus purpuratus; identical to SEQ ID NO: 37911
  CDS (1)..(1464)

SEQ ID NO: 121188 - protein, 487 aa, Strongylocentrotus purpuratus; identical to SEQ ID NO: 37912

SEQ ID NO: 121189 - DNA, 1449 bp, Nasonia vitripennis; identical to SEQ ID NO: 37915
  CDS (1)..(1449)
  misc_feature (838)..(838): n is a, g, c or t
  misc_feature (839)..(839): n is a, g, c or t
  misc_feature (840)..(840): n is a, g, c or t
  misc_feature (841)..(841): n is a, g, c or t
  misc_feature (842)..(842): n is a, g, c or t
  misc_feature (843)..(843): n is a, g, c or t
  misc_feature (844)..(844): n is a, g, c or t
  misc_feature (845)..(845): n is a, g, c or t
  misc_feature (846)..(846): n is a, g, c or t
  misc_feature (847)..(847): n is a, g, c or t
  misc_feature (848)..(848): n is a, g, c or t
  misc_feature (849)..(849): n is a, g, c or t
  misc_feature (850)..(850): n is a, g, c or t
  misc_feature (851)..(851): n is a, g, c or t
  misc_feature (852)..(852): n is a, g, c or t
  misc_feature (853)..(853): n is a, g, c or t
  misc_feature (854)..(854): n is a, g, c or t
  misc_feature (855)..(855): n is a, g, c or t
  misc_feature (856)..(856): n is a, g, c or t
  misc_feature (857)..(857): n is a, g, c or t
  misc_feature (858)..(858): n is a, g, c or t

SEQ ID NO: 121190 - protein, 482 aa, Nasonia vitripennis; identical to SEQ ID NO: 37916
  misc_feature (280)..(280): The Xaa at location 280 stands for Stop, Ala, Arg, Asn, Asp, Cys, Gln, Glu, Gly, His, Ile, Leu, Lys, Met, Phe, Pro, Ser, Thr, Trp, Tyr, or Val.
  misc_feature (281)..(281): The Xaa at location 281 stands for Stop, Ala, Arg, Asn, Asp, Cys, Gln, Glu, Gly, His, Ile, Leu, Lys, Met, Phe, Pro, Ser, Thr, Trp, Tyr, or Val.
  misc_feature (282)..(282): The Xaa at location 282 stands for Stop, Ala, Arg, Asn, Asp, Cys, Gln, Glu, Gly, His, Ile, Leu, Lys, Met, Phe, Pro, Ser, Thr, Trp, Tyr, or Val.
  misc_feature (283)..(283): The Xaa at location 283 stands for Stop, Ala, Arg, Asn, Asp, Cys, Gln, Glu, Gly, His, Ile, Leu, Lys, Met, Phe, Pro, Ser, Thr, Trp, Tyr, or Val.
  misc_feature (284)..(284): The Xaa at location 284 stands for Stop, Ala, Arg, Asn, Asp, Cys, Gln, Glu, Gly, His, Ile, Leu, Lys, Met, Phe, Pro, Ser, Thr, Trp, Tyr, or Val.
  misc_feature (285)..(285): The Xaa at location 285 stands for Stop, Ala, Arg, Asn, Asp, Cys, Gln, Glu, Gly, His, Ile, Leu, Lys, Met, Phe, Pro, Ser, Thr, Trp, Tyr, or Val.
  misc_feature (286)..(286): The Xaa at location 286 stands for Stop, Ala, Arg, Asn, Asp, Cys, Gln, Glu, Gly, His, Ile, Leu, Lys, Met, Phe, Pro, Ser, Thr, Trp, Tyr, or Val.

SEQ ID NO: 121191 - DNA, 1524 bp, Nasonia vitripennis; identical to SEQ ID NO: 37917
  CDS (1)..(1524)

SEQ ID NO: 121192 - protein, 507 aa, Nasonia vitripennis; identical to SEQ ID NO: 37918

SEQ ID NO: 121193 - DNA, 1485 bp, Nasonia vitripennis; identical to SEQ ID NO: 37921
  CDS (1)..(1485)

SEQ ID NO: 121194 - protein, 494 aa, Nasonia vitripennis; identical to SEQ ID NO: 37922

SEQ ID NO: 121195 - DNA, 1536 bp, Nasonia vitripennis; identical to SEQ ID NO: 37923
  CDS (1)..(1536)

SEQ ID NO: 121196 - protein, 511 aa, Nasonia vitripennis; identical to SEQ ID NO: 37924

SEQ ID NO: 121197 - DNA, 1548 bp, Anopheles gambiae str. PEST; identical to SEQ ID NO: 37927
  CDS (1)..(1548)

SEQ ID NO: 121198 - protein, 515 aa, Anopheles gambiae str. PEST; identical to SEQ ID NO: 37928

SEQ ID NO: 121199 - DNA, 1506 bp, Magnaporthe grisea 70-15; identical to SEQ ID NO: 86934
  CDS (1)..(1506)

SEQ ID NO: 121200 - protein, 501 aa, Magnaporthe grisea 70-15; identical to SEQ ID NO: 86935

SEQ ID NO: 121201 - DNA, 1509 bp, Gibberella zeae PH-1; identical to SEQ ID NO: 86938
  CDS (1)..(1509)

SEQ ID NO: 121202 - protein, 502 aa, Gibberella zeae PH-1; identical to SEQ ID NO: 86939

SEQ ID NO: 121203 - DNA, 1530 bp, Gibberella zeae PH-1
  CDS (1)..(1530)
atgacgttcccatccgatattcacactttccactcgggacgacctcagcccgagtcatcgtcaaaatccaatacttttgtatcggtcgatccaagcaacgcaaaaccccttgcaactatctacaccaccacatcagaacaactcaaccagacagtcgcagctgcccaagctgcgttccctgcctggtcccaaactccagctcctcgacgtgctgccattctcctcaaggcggcctctatcctacgtgagcgcaatgatgagcttgcattgaccgagacgcttgatactggcaagccttggtcagagacttcgaccgttgacgttgtaaccggcgccgacgttctcgagtactacgcacacatggccgcaggcagctttcctggccaaaacactcgtcttcgcccggacgcctttgtccttacaacccatgagccccttggcgtttgtgctggcattggtgcttggaattatcccattcagatcgctctctggaagtcagcgccatgcctggccgctggtaactgtatggtctacaagcccagtgaggtcacaccccttcatgccgaaacactcgcccaaatctacattgaggctggtgtccctccaggagtattcaatgttgtatacggcgacggtatcgccgtaggcgcacccctcgtggctcatagtggcattgccaaggtgagcttcaccggtcaagtaagcacaggcagcaaggttgccagccaagcagtcacagatatgaagggtgttactatggagctgggaggaaagagccctctcgttattctacctgatgccgacgtggaggacgcggccgacaccgccatggtcgccaacttcttctccaccggtcaagtgtgcaccaacggaacccgtgtgtttgtcccagacacgcttctctcccaggtggaggaagccattgtccagcgatgtcgagagggaatccgcatgggtctgccacgaaagaccgagaccaacttcggtcccatggttagcgccgcacaacaggagaaggtcaaaatgtacattcaacacggtcgcacagtggacaaggccaaggttctattcaatggttctcaagaggccagcatgccacagccaacttctgacggcttttgggttcaccccgttgtctttaccaactgcaccgacgacatgcgcgtgacgagagaagagatctttggtccagtcatgtgcattatgccttataagacacagggacgccctcgtcaagagtggctatcagacctcatcgcccgagccaacgataccccaatgggacttgctgctggtgttgtctcttctgacgtcggcttggcgcaagaagtcgttcaaaagctcgacgctggtattacctggattaacacttggggtgaatctcccgcggagatgcctgttggaggttggaagatgagtggcataggcttggagaacggccatgagggcatctcagcctacatgaggacgaagagcacactgatccagctgggtaggggagcctgcaagggtgttttctccaaattgtag

SEQ ID NO: 121204 - protein, 509 aa, Gibberella zeae PH-1
MTFPSDIHTFHSGRPQPESSSKSNTFVSVDPSNAKPLATIYTTTSEQLNQTVAAAQAAFPAWSQTPAPRRAAILLKAASILRERNDELALTETLDTGKPWSETSTVDVVTGADVLEYYAHMAAGSFPGQNTRLRPDAFVLTTHEPLGVCAGIGAWNYPIQIALWKSAPCLAAGNCMVYKPSEVTPLHAETLAQIYIEAGVPPGVFNVVYGDGIAVGAPLVAHSGIAKVSFTGQVSTGSKVASQAVTDMKGVTMELGGKSPLVILPDADVEDAADTAMVANFFSTGQVCTNGTRVFVPDTLLSQVEEAIVQRCREGIRMGLPRKTETNFGPMVSAAQQEKVKMYIQHGRTVDKAKVLFNGSQEASMPQPTSDGFWVHPVVFTNCTDDMRVTREEIFGPVMCIMPYKTQGRPRQEWLSDLIARANDTPMGLAAGVVSSDVGLAQEVVQKLDAGITWINTWGESPAEMPVGGWKMSGIGLENGHEGISAYMRTKSTLIQLGRGACKGVFSKL

SEQ ID NO: 121205 - DNA, 1350 bp, Apis mellifera; identical to SEQ ID NO: 37933
  CDS (1)..(1350)

SEQ ID NO: 121206 - protein, 449 aa, Apis mellifera; identical to SEQ ID NO: 37934

SEQ ID NO: 121207 - DNA, 1563 bp, Apis mellifera; identical to SEQ ID NO: 37935
  CDS (1)..(1563)

SEQ ID NO: 121208 - protein, 520 aa, Apis mellifera; identical to SEQ ID NO: 37936

SEQ ID NO: 121209 - DNA, 1584 bp, Apis mellifera
  CDS (1)..(1584)
atgtttcgtttactgtcaagaaataatgttccacaatggcaaatggttagacacttagtcactgatccgaaatatggatttttgaatcaattaggtcttacaacagaaaatccaggactttatgatggaaattggggaggatctggcaaggtaataaattcaatttcacctgcaaccggcaaagtaatagcaaaaattagaacatcaactcctcaagaagtaagtaatactattacaaaagctcaaaatgcatgggtccaatgggcatcaatacctgcacctgcaagaggcgatatagtacgacaaattggagatgaattgcgaaaaaacttaaaaccattaggacaattagtgtctttagaaatgggcaaaatattgccagaaagtattggagaaattcaagaatttattgacatatgtgattattctgttggcttatctagaatgctgcctggcaatatatttccatcagaaagaaaaaatcatgcacttttagaacaatggaatcctcttggagttattggaattatctctgcatttaattttcctgttgcagtatttggttggaacagtgcaatagcaatggtatgtggaaatacatttgtttggaaaggagcacctactacttcattaacttctattgcaaccacaaagattatttcaaaagtattagaaaaaaatggtgtatcaggtgctgttgcaagtttagtaactggtgaatcagatgttggtgaaagtcttgttaatgatacacgtatacctttaatttcatttactggaagttgtaaaattggaaaagatgtggctattaaagttcaagaacgattcggaaaatgtttgttagaattaggaggcaataatgcattaatagttaatcaagatgcagatctagatttagcagtcagagcagcaatgttctcttgtacagcaacatctggacaaagatgtacagctactagaagattaatccttcacaataaaataaaagatgaatttttaggaaaattgaaaattgcattgaagagtattttgaatcgaataggagatcctttagatgataatgttttatatggaccattgcttaatcaaaatgcggttgatgcatataaggaagcaataaatactgctgtacaaagtggtggcacaattgaattcggtggaaaacaaataaatagacttggtttttatgttgaaccaacacttatctctggtttatcacctagtactggaattgttcaaaaagaaacttttgcaccaattgcatatgttcttgaagcaaattctttagaagatgctattgctattaataatagtgtacagcaaggattaagcagctccttatttaccaaaaatttaggaaatgtatttcagtggatgggtccttatggttcagattgtggaataataaatgttaatattggaactagtggagcagaagtaggtggtgcatttggtggagaaaaagctacaggtggtggtcgcgagagtggaagtgatgcatggaaaaattacatgcgacgtgccactataactattaattatggaaatgaaatgtcgttatcacaaggtttaaaatttgaataa

SEQ ID NO: 121210 - protein, 527 aa, Apis mellifera
MFRLLSRNNVPQWQMVRHLVTDPKYGFLNQLGLTTENPGLYDGNWGGSGKVINSISPATGKVIAKIRTSTPQEVSNTITKAQNAWVQWASIPAPARGDIVRQIGDELRKNLKPLGQLVSLEMGKILPESIGEIQEFIDICDYSVGLSRMLPGNIFPSERKNHALLEQWNPLGVIGIISAFNFPVAVFGWNSAIAMVCGNTFVWKGAPTTSLTSIATTKIISKVLEKNGVSGAVASLVTGESDVGESLVNDTRIPLISFTGSCKIGKDVAIKVQERFGKCLLELGGNNALIVNQDADLDLAVRAAMFSCTATSGQRCTATRRLILHNKIKDEFLGKLKIALKSILNRIGDPLDDNVLYGPLLNQNAVDAYKEAINTAVQSGGTIEFGGKQINRLGFYVEPTLISGLSPSTGIVQKETFAPIAYVLEANSLEDAIAINNSVQQGLSSSLFTKNLGNVFQWMGPYGSDCGIINVNIGTSGAEVGGAFGGEKATGGGRESGSDAWKNYMRRATITINYGNEMSLSQGLKFE

SEQ ID NO: 121211 - DNA, 1458 bp, Apis mellifera; identical to SEQ ID NO: 37937
  CDS (1)..(1458)

SEQ ID NO: 121212 - protein, 485 aa, Apis mellifera; identical to SEQ ID NO: 37938

SEQ ID NO: 121213 - DNA, 1539 bp, Debaryomyces hansenii CBS767; identical to SEQ ID NO: 37943
  CDS (1)..(1539)

SEQ ID NO: 121214 - protein, 512 aa, Debaryomyces hansenii CBS767; identical to SEQ ID NO: 37944

SEQ ID NO: 121215 - DNA, 1491 bp, Yarrowia lipolytica CLIB122; identical to SEQ ID NO: 37945
  CDS (1)..(1491)

SEQ ID NO: 121216 - protein, 496 aa, Yarrowia lipolytica CLIB122; identical to SEQ ID NO: 37946

SEQ ID NO: 121217 - DNA, 1569 bp, Yarrowia lipolytica CLIB122; identical to SEQ ID NO: 86968
  CDS (1)..(1569)

SEQ ID NO: 121218 - protein, 522 aa, Yarrowia lipolytica CLIB122; identical to SEQ ID NO: 86969

SEQ ID NO: 121219 - DNA, 1533 bp, Apis mellifera; identical to SEQ ID NO: 37947
  CDS (1)..(1533)

SEQ ID NO: 121220 - protein, 510 aa, Apis mellifera; identical to SEQ ID NO: 37948

SEQ ID NO: 121221 - DNA, 1494 bp, Aspergillus nidulans FGSC A4
  CDS (1)..(1494)
atgactccttcgctccagcgccagctcttctacgacggcaaaccccagcacgcctcgtccggccggactttccagtccatcaaccccgccgacgccactctgctggctgaaatccccgtcgcttcacagtcagatatcgacgctgccattacagccgccgagcgcgcattcccttcatgggcgcaaacgccgcctattgcccgtgcgcgtattctccagaaggcggcggccttgctgcgcgaacgcaacgatgagatcgcccgcgtcgagactctagattccggcaaagcgtattcagaaacgagcaccgtcgacgtcgtcactggagctgatgtactggaatactatgcaaacctcgtgggcggtggcggactgaatggagagaccacgcagcttcgggaagaggcgtgggtgtattcgaagaaggctccgctaggggtctgcgtgggaattggcgcatggaactaccctattcagatcgcgctgtggaaatccgctccctgcctcgccgccggaaatactatggtctacaagcctagcgaattcacttcccttcacggtcaaaccctcgccgaaatctacaaggaagctggtcttccagacggcgttttcaacgttgtatacggtgccggcgatgtcggttcctatctcacctcgcacccgaccgtcgccaaggtctctttcaccggccaagtctctactggcatgaaggtctccggagccgcagccggaaatatgaaatatgtcacgatggagctcggtggaaagtcgcctctcctcattcttcctgatgcagatctcgagaacgctgttgacggcgccatgatggccaatttctacagcaccggccaggtctgcacaaacggcacgcgggttttcattcccaagtctatgaagaaggactttgagtcccgtctcgttgagaaaatgcaatatatccggccaggtccgctgttcgatgagaacaccaacttcgggccccttagctcggccgtccaccaggagaaagtcaccgcttatattcgccacggcattgagcaggacaaggccacccttctttacggaggccttggcaagccttctctgccgaaagacctcgaagcaggcttctgggtccgtccgacgatcttcaccgattgcacggacgacatgcgtatcgtcaaggaggaaatttttgggcctgttatgtcaattctgacctacgactctgtggaagaagcagtcaagcgcgccaatacgacggagctgggtcttgccgccggtgtcttcacgaaggacctcaacctagcacaccgcattattgaccagctcgaggcaggtatcacctgggtgaacacatggggcgagagtcctgctgagatggccgtcggtggctggaagaagagcggtcttggcgtggaaaatggtcgtcgcggtattgaggcctgggttcggaataagagcacccttgtcgatatgggcaatgctgttgcgacggtctttgcgaagctgtag

SEQ ID NO: 121222 - protein, 497 aa, Aspergillus nidulans FGSC A4
MTPSLQRQLFYDGKPQHASSGRTFQSINPADATLLAEIPVASQSDIDAAITAAERAFPSWAQTPPIARARILQKAAALLRERNDEIARVETLDSGKAYSETSTVDVVTGADVLEYYANLVGGGGLNGETTQLREEAWVYSKKAPLGVCVGIGAWNYPIQIALWKSAPCLAAGNTMVYKPSEFTSLHGQTLAEIYKEAGLPDGVFNVVYGAGDVGSYLTSHPTVAKVSFTGQVSTGMKVSGAAAGNMKYVTMELGGKSPLLILPDADLENAVDGAMMANFYSTGQVCTNGTRVFIPKSMKKDFESRLVEKMQYIRPGPLFDENTNFGPLSSAVHQEKVTAYIRHGIEQDKATLLYGGLGKPSLPKDLEAGFWVRPTIFTDCTDDMRIVKEEIFGPVMSILTYDSVEEAVKRANTTELGLAAGVFTKDLNLAHRIIDQLEAGITWVNTWGESPAEMAVGGWKKSGLGVENGRRGIEAWVRNKSTLVDMGNAVATVFAKL

SEQ ID NO: 121223 - DNA, 1506 bp, Aspergillus nidulans FGSC A4; identical to SEQ ID NO: 37951
  CDS (1)..(1506)

SEQ ID NO: 121224 - protein, 501 aa, Aspergillus nidulans FGSC A4; identical to SEQ ID NO: 37952

SEQ ID NO: 121225 - DNA, 1566 bp, Ustilago maydis 521; identical to SEQ ID NO: 86990
  CDS (1)..(1566)

SEQ ID NO: 121226 - protein, 521 aa, Ustilago maydis 521; identical to SEQ ID NO: 86991

SEQ ID NO: 121227 - DNA, 1578 bp, Strongylocentrotus purpuratus; identical to SEQ ID NO: 37959
  CDS (1)..(1578)

SEQ ID NO: 121228 - protein, 525 aa, Strongylocentrotus purpuratus; identical to SEQ ID NO: 37960

SEQ ID NO: 121229 - DNA, 1560 bp, Strongylocentrotus purpuratus; identical to SEQ ID NO: 37961
  CDS (1)..(1560)

SEQ ID NO: 121230 - protein, 519 aa, Strongylocentrotus purpuratus; identical to SEQ ID NO: 37962

SEQ ID NO: 121231 - DNA, 1470 bp, Strongylocentrotus purpuratus; identical to SEQ ID NO: 37963
  CDS (1)..(1470)

SEQ ID NO: 121232 - protein, 489 aa, Strongylocentrotus purpuratus; identical to SEQ ID NO: 37964

SEQ ID NO: 121233 - DNA, 1608 bp, Tribolium castaneum; identical to SEQ ID NO: 37969
  CDS (1)..(1608)

SEQ ID NO: 121234 - protein, 535 aa, Tribolium castaneum; identical to SEQ ID NO: 37970

SEQ ID NO: 121235 - DNA, 1470 bp, Tribolium castaneum; identical to SEQ ID NO: 37973
  CDS (1)..(1470)

SEQ ID NO: 121236 - protein, 489 aa, Tribolium castaneum; identical to SEQ ID NO: 37974

SEQ ID NO: 121237 - DNA, 1491 bp, Tribolium castaneum; identical to SEQ ID NO: 37975
  CDS (1)..(1491)

SEQ ID NO: 121238 - protein, 496 aa, Tribolium castaneum; identical to SEQ ID NO: 37976

SEQ ID NO: 121239 - DNA, 1557 bp, Tribolium castaneum; identical to SEQ ID NO: 37977
  CDS (1)..(1557)

SEQ ID NO: 121240 - protein, 518 aa, Tribolium castaneum; identical to SEQ ID NO: 37978

SEQ ID NO: 121241 - DNA, 1485 bp, Bacillus thuringiensis serovar konkukian str. 97-27
  CDS (1)..(1485): transl_table=11
atgagtcaactagctgtaaatcttcatgaaaaggtagaaaagtttcttcaaggtacgaaaaagttatatgtgaatggatcattcattgaaagcgcttccggtaagacgtttaatacacctaatccagcaactggcgaaacacttgccgtcgtttctgaagccggtcgcgaagatattcataaagctgtagttgcagctcgcatggcttttgacgaaggtccttggtctcgcatgagcactgcggagcgaagccgtcttatgtacaagttagctgatttaatggaagaacataaagaagagcttgcacagctcgagacgttagataacggaaagccaatccgtgaaacaatggcagcagacataccacttgcaattgagcacatgcgctattatgctggctgggcgacaaaaatcgttggtcaaacaatccctgtttccggtgatttctttaactatacacgccatgaagctgttggtgtcgttggtcaaattatcccttggaacttcccgcttcttatggccatgtggaaaatgggagcagcgcttgctacaggatgtacaatcgttttaaaacctgcagaacaaactccactatctgctctatacttagctgaattaattgaagaagctggattcccgaaaggcgttattaatatcgttcctggattcggtgaatcagctggacaagctctcgttaatcatccactcgttgataaaattgcatttaccggttctactccagtcggtaaacaaattatgcgacaagcatctgaatccttgaaacgtgttactttagagcttggtggtaaatcaccgaacattattttaccagacgctgatttatctcgcgcaattcctggtgcactttctggtgttatgtttaaccaagggcaagtatgctctgctggatcacgcctatttgttccgaagaaaatgtatgataatgtcatggctgatctcgtcctctattctaaaaaactaaatcaaggtgtcggtcttgaccctgaaacgacaattggtcctctcgtttccgaagaacaacaaaaacgtgtaatgggctacattgaaaaagggattgaagaaggcgctgaagtactttgcggaggaaataatccattcgatcaaggctacttcatttctcctacagtattcgctgacgtaaatgacgaaatgacaatcgcaaaagaagaaattttcggtccagttatttctgcaataccttttaacgatattgatgaagtaattgaacgagcaaataaatcacaattcggcttagcggctggtgtgtggacagaaaatgttaaaacagcacactatgttgcaagtaaagtacgtgcaggtacagtatgggttaactgttacaacgtctttgatgcagcatctccatttggaggatttaaacaatctggtctcggccgtgaaatgggatcttacgcattaaataactatacagaagtgaagagcgtttggcttaacttaaattaa

SEQ ID NO: 121242 - protein, 494 aa, Bacillus thuringiensis serovar konkukian str. 97-27
MSQLAVNLHEKVEKFLQGTKKLYVNGSFIESASGKTFNTPNPATGETLAVVSEAGREDIHKAVVAARMAFDEGPWSRMSTAERSRLMYKLADLMEEHKEELAQLETLDNGKPIRETMAADIPLAIEHMRYYAGWATKIVGQTIPVSGDFFNYTRHEAVGVVGQIIPWNFPLLMAMWKMGAALATGCTIVLKPAEQTPLSALYLAELIEEAGFPKGVINIVPGFGESAGQALVNHPLVDKIAFTGSTPVGKQIMRQASESLKRVTLELGGKSPNIILPDADLSRAIPGALSGVMFNQGQVCSAGSRLFVPKKMYDNVMADLVLYSKKLNQGVGLDPETTIGPLVSEEQQKRVMGYIEKGIEEGAEVLCGGNNPFDQGYFISPTVFADVNDEMTIAKEEIFGPVISAIPFNDIDEVIERANKSQFGLAAGVWTENVKTAHYVASKVRAGTVWVNCYNVFDAASPFGGFKQSGLGREMGSYALNNYTEVKSVWLNLN

SEQ ID NO: 121243 - DNA, 1536 bp, Erwinia carotovora subsp. atroseptica SCRI1043
  CDS (1)..(1536): transl_table=11
atggcgcacgataatctcgaaggccgatccgcatttggcgaagtcggttctctcgatctgaaaaaacgctatgacaattttatcggtggaacctgggttccgcctgatgctggtcagtattttgtcaatttaacgccagtgacaggccagccgatgtgtgaagtagccagttcgtcaacgcgagatattgaccacgcgctggatgcagcccacaaggcaaaagcggaatggggtggtctatcggtacaggaacgggcgctggtgcttaaccgtattgccgaccggatggaacaaaatcttgaacggctagcgcaggtggaaacctgggataacggtaagccgatacgtgaaacaagcggggcggatgtgccgctggcgattgaccactttcgttattttgctgcctgtatccgcgcgcaagagggggcaatcagcgaaattgacggcgataccgtggcctatcattttcatgagcctcttggcgttgttgcgcaaatcattccctggaacttcccgctgctgatggcctgttggaagatggctcctgcactggcagccggtaactgtattgtactgaagcctgccaagctgacgccgatgtcggtgctgattttgatggagcttattcaggatctgctgcctgcgggggtcattaatgtcgtcaatggatcgggaagtgagattggcgagtatctggcaacatcgaaacgcgttgcgaaagtcgcattcaccgggtcaaccgaagtgggccagcagatcatgagctatgcggcacagaatgtgacgccggtgacgctggaattgggtggcaaatcgccgaacatcttctttgccgatgtgatggataaggaagatagtttctttgacaaagcgctcgaaggtttcacgctgtttgccttcaatcagggagaggtttgcacctgcccgagccgcgcgctggtgcaggaatctatctatgatcgctttatggaacgggcaatcaagcgcgttgaagctatccgcatcggtaacccgctggacagcaaaaccatgatgggcgcacaggtgtcagcaggccagctcgaaaccatccttaactatattgatatcggtaagaaagagggcgcacgggtactcactggcggccagcgtaaggcgatgccgggcgggctggcggaaggctactatttggagccgacgatattgttcggtaaaaatagtatgcgtgtctttcaggaggaaattttcggtccggtgttggcggtaacaacgttcaagacgatggaagatgcgctggagatagctaacgatacggaatacggtctgggtgctggcgtgtggagccgtaacggtaacgtcgcttaccgaatggggcgcggcattcaggctggtcgagtttggaccaactgttatcacgcctatccggcacatgccgcgtttgggggctataagcagtccggtatcgggcgtgagaatcataaaatgatgctggatcattatcagcaaaccaagtgcctgttggtgagttactctgataagccgatggggctgttctaa

SEQ ID NO: 121244 - protein, 511 aa, Erwinia carotovora subsp. atroseptica SCRI1043
MAHDNLEGRSAFGEVGSLDLKKRYDNFIGGTWVPPDAGQYFVNLTPVTGQPMCEVASSSTRDIDHALDAAHKAKAEWGGLSVQERALVLNRIADRMEQNLERLAQVETWDNGKPIRETSGADVPLAIDHFRYFAACIRAQEGAISEIDGDTVAYHFHEPLGVVAQIIPWNFPLLMACWKMAPALAAGNCIVLKPAKLTPMSVLILMELIQDLLPAGVINVVNGSGSEIGEYLATSKRVAKVAFTGSTEVGQQIMSYAAQNVTPVTLELGGKSPNIFFADVMDKEDSFFDKALEGFTLFAFNQGEVCTCPSRALVQESIYDRFMERAIKRVEAIRIGNPLDSKTMMGAQVSAGQLETILNYIDIGKKEGARVLTGGQRKAMPGGLAEGYYLEPTILFGKNSMRVFQEEIFGPVLAVTTFKTMEDALEIANDTEYGLGAGVWSRNGNVAYRMGRGIQAGRVWTNCYHAYPAHAAFGGYKQSGIGRENHKMMLDHYQQTKCLLVSYSDKPMGLF

SEQ ID NO: 121245 - DNA, 1434 bp, Symbiobacterium thermophilum IAM 14863
  CDS (1)..(1434): transl_table=11
atgtacatcggaggagaatggcgtgaggcggtgagcggcaggcggttcgaggtgaccaaccccgccaccggggaggtgatcgcgaccgtacccgacgcaggcagggaggacgcccgggcggccatcgaggccgcccacgcggccttcggcgaatggtcctcgctgcccgcccacgtgcgcgcccggtacatgcgcaggctgtacgacctgatcgtgcagaacgtcgaccggctcgcccgcgtgctcaccgaggagaacggcaagcccctggcggaggccaagggcgaagtgttcaacggcgccgagtatctgaactggtacgccgaggagacccggcggatctacggagagacgattcccagctcgtcccgcaggacgcggatctgggtgctgcgccaaccggttggcgtcgtcggggcgatcacgccctggaacttcccgtcctcgatggtcacccgcaagatcgcgccggcgctggcggcaggctgcacggtggtgctgaagccggccgagcagacgccgctcagcgcgctgctcatcgcggagctcatccacgaggccggactgccggccggggtggtcaacgtcgtcaccaccctggatccggcggccgtggggcaggagttcctggaaaaccgcctggtgcggaagatctcgttcaccggctccaccgaggtgggcaagcacctgatgcagggcgccgcggcgcagatgaaacgggtcagcatggagctgggcggcaacgcgccgttcatcgtgttcgaggacgccgacctggacgccgccgtgcagggcgtcgtgatcagcaagttccgcaacgccggccagacctgcatctgcgccaaccggatctacgtgcaggagtcgatcgccccggccttcaccgaacggctggtggaggcggtccgcggcctgcgggtgggacacggcctggaggagggcatcaacgtcgggccgctgatcgacgaggccgcgtacgtgaaggtggaagggcacgtgagcgacgcccgcggcaagggagcccgggtgctcaccggcggccatcgcctgacgggtccggggttcgaccgcggcttcttctatgcgccgaccctgctcgaccaggtcagcgatgagatgcggatcgtgcacgaggagacgttcggcccggtcgcgccgatcctgacgttccgcaccgaagaggaggtgatccgccgggccaacgacaccaactacggcctggcggcctacatcttcacccgcaacctgggacgcacggtgcgggtcagcgaggcgctggagtacgggatggtggccgtgaacgattcgctcctggcggttccgcaggcgcccttcggcggcgtcaaggagagcggcctggggcgtgagggcggccatcacggcctggatgactacctggagtacaagtacctctccgtggttctggatggctga

SEQ ID NO: 121246 - protein, 477 aa, Symbiobacterium thermophilum IAM 14863
MYIGGEWREAVSGRRFEVTNPATGEVIATVPDAGREDARAAIEAAHAAFGEWSSLPAHVRARYMRRLYDLIVQNVDRLARVLTEENGKPLAEAKGEVFNGAEYLNWYAEETRRIYGETIPSSSRRTRIWVLRQPVGVVGAITPWNFPSSMVTRKIAPALAAGCTVVLKPAEQTPLSALLIAELIHEAGLPAGVVNVVTTLDPAAVGQEFLENRLVRKISFTGSTEVGKHLMQGAAAQMKRVSMELGGNAPFIVFEDADLDAAVQGVVISKFRNAGQTCICANRIYVQESIAPAFTERLVEAVRGLRVGHGLEEGINVGPLIDEAAYVKVEGHVSDARGKGARVLTGGHRLTGPGFDRGFFYAPTLLDQVSDEMRIVHEETFGPVAPILTFRTEEEVIRRANDTNYGLAAYIFTRNLGRTVRVSEALEYGMVAVNDSLLAVPQAPFGGVKESGLGREGGHHGLDDYLEYKYLSVVLDG

SEQ ID NO: 121247 - DNA, 1497 bp, Bacillus licheniformis ATCC 14580
  CDS (1)..(1497): transl_table=11
ttgacaaacatgagttcattaacgatgcaggtcagtaagaagctggagtcatttttgcagggaacaaagaagctctatattaacggggaatttgtagccagcgcctcaaacaaaacgtttgagaccccaaacccggcgactggtgaaacgctcgccacgttatatgaagcaggtcccgaggatgtggacaaagctgtaaaagctgcgcgggaagcctttgaccgcggtgagtggcggacgatgaaccctgccgaaagaagccggctgatgtacaaactcgccgatctgatggaggaacataaaacggaactggctcagcttgaaacgctggataacggaaagccgatcagcgaaacgaccgcaggcgatattccgctgtcaattgaacatatgcgctattatgcgggctgggcgacgaaaataaccggacagacaattcctgttaacggaccttattttaactatacacggcatgagcctgtcggagttgtcgggcaaattatcccttggaacttcccgcttctgatggctatgtggaaaatgggagccgcccttgcagccggatgtacggttgtcttaaaaccggctgaacaaacgccgctttccgctctgtatttagctgagctgatcgatgaggcaggcttcccgaaaggcgtcatcaacatcatccctggctttggggagacggccggagaagctctgaccgaccatgcccttgtcgacaaactggcattcacagggtcaactgaaatcggcaaaaagataatggagaaagcggccaaatcggtcaaacgtgttacccttgagctcggcggaaagtcgccgaatatcatcctccctgacgccgacctgaagaaagcgattccaggcgcactaaccggcgttatgttcaaccagggccaagtttgctgtgcgggatcgcgcgttttcatccataaagaccaatatgacaaagtcgttgatgaaatggccgcttattcaaaatcgctccgccaaggtgcgggccttcatgaagacacgcaaatgggaccgcttgtcagcaaagaacagcatgaacgcgtcctctcgtatattgaaaaaggacgccaggagggtgcgaaaatcgcggccggcggaacatgcccttatgaacagggatactttgtttctccgactgtattcacaaatgtcgaggatgagatgacaatagcaaaagaagaaatcttcggtcctgttttggcggcgattccttatgaaacggttgatgaagtcatcgaacgggccaatcgcagcgaatacggcctcgctgcgggcgtatggacggaaaatttgaaaaacgcccactatatcgccgaccgtctgcaagccggtaccgtttgggtcaactgctataatgcttttgacgccgcatccccattcggcggctacaaacagtctggactcggacgtgaaatgggctcatacgctctggataactatacagaggttaagagcgtctggattcatacaggcgaataa

SEQ ID NO: 121248 - protein, 498 aa, Bacillus licheniformis ATCC 14580
MTNMSSLTMQVSKKLESFLQGTKKLYINGEFVASASNKTFETPNPATGETLATLYEAGPEDVDKAVKAAREAFDRGEWRTMNPAERSRLMYKLADLMEEHKTELAQLETLDNGKPISETTAGDIPLSIEHMRYYAGWATKITGQTIPVNGPYFNYTRHEPVGVVGQIIPWNFPLLMAMWKMGAALAAGCTVVLKPAEQTPLSALYLAELIDEAGFPKGVINIIPGFGETAGEALTDHALVDKLAFTGSTEIGKKIMEKAAKSVKRVTLELGGKSPNIILPDADLKKAIPGALTGVMFNQGQVCCAGSRVFIHKDQYDKVVDEMAAYSKSLRQGAGLHEDTQMGPLVSKEQHERVLSYIEKGRQEGAKIAAGGTCPYEQGYFVSPTVFTNVEDEMTIAKEEIFGPVLAAIPYETVDEVIERANRSEYGLAAGVWTENLKNAHYIADRLQAGTVWVNCYNAFDAASPFGGYKQSGLGREMGSYALDNYTEVKSVWIHTGE

SEQ ID NO: 121249 - DNA, 1485 bp, Mannheimia succiniciproducens MBEL55E
  CDS (1)..(1485): transl_table=11
atgacaaaagatctcaatgtatttgataaacattacggtttattgattaacggcgaatggactgatggttccgaaggcaaaactttaactgcgcataaccctgcaaacggggcggaactggcgacttttattgacgcaacggatgcggatgtagatgcggcggtaactgctgcgcaggaagcttttaaaacctggaaacacactactgcggcggaacgggcggcaattttaaataaaatagccgatgtgattgatgaaaatacggaattatttgctttgcaggaaaccctggataacggtaaaccgattcgtgaaacccgggctgcggatattccgctggcggcggatcacttccgttattttgcagcggtaattcgttccgaagaaggcagcgccaatcaattggacgacgaagatttgtcgttgattttacgtgaaccgatcggtgtggtagggcagattattccctggaatttcccgttcttgatggcggcatggaaaattgcacccgcattggcggcgggatgcacggtggtgattcacccttcttcttccacctctttgagtttgctttctctggcacagaaaattaaccatttattgccgaagggcgtgtttaacgtgattaccggtaaaggttctaagtccggcgaatatatgctgcaccatactggttttaataaactggcgtttacgggttctactgagatcgggcgtaaaatcggggtggcggcggccgagatgttaattccgtctaccttggaattaggcggtaaatcagccaatattttctttgacgatatgccttttgataaagcgctggaaggggcacaaaaaggtattctgtttaatcaggggcaggtatgctgcgccggatcgcggattttcgtacaggaaaatatttacgataaatttattgctgcgctaaaagaagaattcaagaaagtgaaagtcggcttaccttgggaagacgacactcagatgggcgcacaggtaaattccaaccaaattaaggtgatcagcaaatacgtggatattgccagagaagaaggttgtgagatcattatcggcggcgaaaaagcgacggatcctgccttggcaaaaggcgagtttttccaaccgacattaattctggcgccggataacactaaacgggtggcacaggaagaaattttcggtccggttgccgtggttattaaatttaaagaggaagcggatgtgattcacatggcgaacgatagcgaatacgggcttggcggtgccgtatggacccacaatatcaaccgtgcgttacgtgttgctcgcgcgctggaaaccggccgtgtgtgggtgaactgttacaaccgcctgccggcgggcgcgccgttcggtggttataagacttcaggtatcggtcgtgaaactcataaaatgatgctggatgcctatacccaggtgaaaaatatcttcatcagtactcgggaagagcgtgaaggtatgtattag

SEQ ID NO: 121250 - protein, 494 aa, Mannheimia succiniciproducens MBEL55E
MTKDLNVFDKHYGLLINGEWTDGSEGKTLTAHNPANGAELATFIDATDADVDAAVTAAQEAFKTWKHTTAAERAAILNKIADVIDENTELFALQETLDNGKPIRETRAADIPLAADHFRYFAAVIRSEEGSANQLDDEDLSLILREPIGVVGQIIPWNFPFLMAAWKIAPALAAGCTVVIHPSSSTSLSLLSLAQKINHLLPKGVFNVITGKGSKSGEYMLHHTGFNKLAFTGSTEIGRKIGVAAAEMLIPSTLELGGKSANIFFDDMPFDKALEGAQKGILFNQGQVCCAGSRIFVQENIYDKFIAALKEEFKKVKVGLPWEDDTQMGAQVNSNQIKVISKYVDIAREEGCEIIIGGEKATDPALAKGEFFQPTLILAPDNTKRVAQEEIFGPVAVVIKFKEEADVIHMANDSEYGLGGAVWTHNINRALRVARALETGRVWVNCYNRLPAGAPFGGYKTSGIGRETHKMMLDAYTQVKNIFISTREEREGMY

SEQ ID NO: 121251 - DNA, 1455 bp, Silicibacter pomeroyi DSS-3
  CDS (1)..(1455): transl_table=11
atgaagttccagccagaagcgagccatttcatcaatggcgcctatgtcgaggacacggcaggcgccgtgatcgacgtgatctatcccgccaccggcgaagtgatcgcccggttgcactcggccacacccgcgatcatcgatcaggcgctcgaggccgcgcggcaggcgcaggcgcaatgggccgcgatgaccgggaccgaacgtggccgcatcctgcgccgcgccgccgacatcatgcgcgcccgcaaccacgacctgtcggtgatcgagacccatgacaccggcaaacccattcaggaaaccaccgttgccgatgccacctcgggcgccgatgcgctggagtacttcggcgggctggccgggtcgctgaccggcgagcatatcccgctgggcggcggtgatttcgcctataccgtccgtgaggcgctgggcgtctgcgtcggcatcggcgcctggaactatcccacccagatcgcctgctggaagggcgccccggcgctggcctgcggcaatacgatggtgttcaagccatcggaaaccacccctctttccgccctcaaggtcgccgagatcctgatcgaggccggggcgcccaagggtatctataacgttgtgcagggctatggcgatgtcggcgcgtccctggtcaccgatccgcgcgtcgccaaggtgtcgctcaccggttcggtccccaccgggcgccgggtctatgccgccgccgccgaaagcatcaagcacgtgacgatggaactgggcggcaagtcgcccttggtcgtgtttgacgacgccgatatcgaaaacgcggtctcgggcgccattctgggcaacttctattcctcgggtcaggtctgctcgaacgggacccgcgtgtttgtgcagaagggcatcaaggaggcgttcctgtcccgcctggccgagcgtctggcaacggcggtgatcggcgacccgatggacccggccaccaatttcgggccgatggtcagcgaggcgcagatgaacatcgtcctgggatatgtcgacaagggcaaggccgagggcgcccggctggtctatggcggcacccggctggatcgcgacgggttctacctgctgcccaccgtgtttgccgatgtgaccgatgacatgaccatcgcgcgggaagagattttcggcccggtcatgtcggtactcgacttcgacaccgaggaagaggtgttggagcgcgccaatgccaccgaattcggcctcgccgcgggcgtctttacccgcgacattacccgcgcccatcggatggtggccgggttcgaagcgggcacctgctatatcaacagctataacctggccccggtcgaggcgccctttggcggttcgaaacagtcgggcgtgggccgcgaaaactcgaaactggcgatcaaccacttctccgagatgaaaacagtgtttgtctcgatgaacgatatccaggcgccctactga

SEQ ID NO: 121252 - protein, 484 aa, Silicibacter pomeroyi DSS-3
MKFQPEASHFINGAYVEDTAGAVIDVIYPATGEVIARLHSATPAIIDQALEAARQAQAQWAAMTGTERGRILRRAADIMRARNHDLSVIETHDTGKPIQETTVADATSGADALEYFGGLAGSLTGEHIPLGGGDFAYTVREALGVCVGIGAWNYPTQIACWKGAPALACGNTMVFKPSETTPLSALKVAEILIEAGAPKGIYNVVQGYGDVGASLVTDPRVAKVSLTGSVPTGRRVYAAAAESIKHVTMELGGKSPLVVFDDADIENAVSGAILGNFYSSGQVCSNGTRVFVQKGIKEAFLSRLAERLATAVIGDPMDPATNFGPMVSEAQMNIVLGYVDKGKAEGARLVYGGTRLDRDGFYLLPTVFADVTDDMTIAREEIFGPVMSVLDFDTEEEVLERANATEFGLAAGVFTRDITRAHRMVAGFEAGTCYINSYNLAPVEAPFGGSKQSGVGRENSKLAINHFSEMKTVFVSMNDIQAPY

SEQ ID NO: 121253 - DNA, 1497 bp, Bacillus clausii KSM-K16
  CDS (1)..(1497): transl_table=11
atgtcacaagtgccaacaggcgaaaacagcttaaagactaggttagtgtcgtttttaaacggcggatcaaagaaactattgatcaatggagaatgggttgatgccgtatctggccaaacgtttgagacgatgaatccagcaactggtgacacgttggccattgtggcagaagcaggacaagaggatatcgattctgcggtcaaagctgcacggaaggcgtttgatgaagggccttggtcaaaaatgagcgcggcagaaagaagtcgtcttatctacaaactagctgatttaatagaggagcataaagaagagctcgctcagctagagactttagataatggcaagccgattcgcgagacggccaatgcggatgttccattagcgattgaacattttcgttattttgccggatgggcaacaaaaatagtaggacaaacgatcccagtgcaagggaattatttcaattatacgcgccatgaagcaattggtgtcgttggtcaaatcattccttggaatttcccattattgatggccgcgtggaaacttggtgccgcccttgctacaggttgtacggttgtattaaaaccagccgagcagaccccgctgtctgccttgtatttaggggaattgatcaatgaagcgggatttccaaaaggggttgtcaacattgttcctggatttggacattcggcaggaacagcaattgtcaatcacccagctgtcgataaagtcgcttttacaggctctacaaatgttggaaaattaattatgaaacaagcgagtgaatctttgaagagggtgacactggaactcggtggcaagtctccaaatatcattttacctgatgctgatctttcgaaggccgttcctggatcacttatgggaattatgttcaaccaaggccaggtgtgctgcgcagggagtcgattgtatgtccaaaagaaacaatacgatcatgtcgttgctgacctagtgtcgttaacaaagaaaattaatcaaggggatgggctgttagaacacacgacaatggggcctttgatttcgactcagcaacaaaagcgcgtgaaaaattatatcgatcgtggcgttgaggagggggcagagctattagccggcgggaccattccatatgaccaagggtattttgtctccccaactatttttgctgacgtagatcattccatgacgattgcaaaggaggaaatttttggaccggttgtggccgcgatgccgtttgaaagcgtcgatgacctaattggtaaagccaacgattcggattatgggctagctgctggtgtttggacacaagacattaaaaaagcccactacattgcccaccgaatcaaagcggggaccatttgggtgaattgctataatgtatttgatgcagccagcccgtttggcggttacaaacaatcggggattggccgagaaatgggaagctatgcattagacaattatacggaagtaaaaagtgtctgggtcaatatggattaa

SEQ ID NO: 121254 - protein, 498 aa, Bacillus clausii KSM-K16
MSQVPTGENSLKTRLVSFLNGGSKKLLINGEWVDAVSGQTFETMNPATGDTLAIVAEAGQEDIDSAVKAARKAFDEGPWSKMSAAERSRLIYKLADLIEEHKEELAQLETLDNGKPIRETANADVPLAIEHFRYFAGWATKIVGQTIPVQGNYFNYTRHEAIGVVGQIIPWNFPLLMAAWKLGAALATGCTVVLKPAEQTPLSALYLGELINEAGFPKGVVNIVPGFGHSAGTAIVNHPAVDKVAFTGSTNVGKLIMKQASESLKRVTLELGGKSPNIILPDADLSKAVPGSLMGIMFNQGQVCCAGSRLYVQKKQYDHVVADLVSLTKKINQGDGLLEHTTMGPLISTQQQKRVKNYIDRGVEEGAELLAGGTIPYDQGYFVSPTIFADVDHSMTIAKEEIFGPVVAAMPFESVDDLIGKANDSDYGLAAGVWTQDIKKAHYIAHRIKAGTIWVNCYNVFDAASPFGGYKQSGIGREMGSYALDNYTEVKSVWVNMD

SEQ ID NO: 121255 - DNA, 1503 bp, Psychrobacter arcticus 273-4
  CDS (1)..(1503): transl_table=11
atgactgactcaactgatcttaaacacatggacaatgccgaacaaacacagacggcttatatcaatggcagttatcttgcagtagacaaagcgctctcgaccttcgatagcattaaccctgtaacgggtgaggtgctctcaaccattcagcaaaccactaccgagcaaatcaatgatgctgttattgcagcgcaaaaaggtcaaaaggtttgggcggcaatgactgcgattgagcgtagccgtatcctgttaaatgccgttgctatattacgcgaacgcaatgacgagctggccgttcttgaaactaaggacacgggaaaagcgatctctgaaactaaatatgtcgatatcgtcaccggtgccgatgtcattgagtactatgcagggcttgcgcccatgatcgaggggcgtcaaatcccgctacgtgataccagttttgtgtacacccgccaagagccgttaggcgtaatcgcgggtattggtgcatggaactatcccatccaaatcgccatgtggaaagcagcacctgcgctcgcggcgggtaatgcgatgatctttaagccttctgaagtgacgccattgtctgcgctaaaactggcagaaatcttcactgaagcgggattgccagaaggtgtctttaatgtagtgcagggtaactatgaagttggcgaagcgcttactcagcaccctgacatcgctaaagtgtcattcacgggtggcgtgccaacgggtaaaaaagtcatgtcatcagcggcaacgtcctcactcaaagacgttactttagagctgggcggtaaatcaccgctgattatatttgacgatgccgatattgataccgctgccgacatcgccatgatggcgaacttctatagtacgggacaagtatgtaccaatggtacgcgagtatttatccctaaagcgttacaagccaaatttgagcaagccatccaaacgcgcgttaagcgcatcaagttgggtgatcctatggatgacagtatcaccatggggccattggtaagcttcccgcatatggacagagtgcttggttatatcgagcaaggtaaagcgagcggcgcgcgcttactgtgtggcggtgcacgtgtgacaacaggctcgcttgctgacggtgcttatgtggcggctaccgtatttactgattgcacggatgatatgagtattgtgcgcgaagagatctttggtccagttatgtcaatattgacttacgagacagaagaagaagtcattcgccgtgccaacgataccgagtatggtttggcggcaggcgttgtgactgctgatttgaaccgcgcgcatcgcgtaatcgctcaaattgaagcgggtatctgctggttaaatacgtggggtgagtcggctgcgcaaatgccagtaggcggctacaagcactcaggcattggccgtgaaaacggcattcaaacgcttgagcattacactcaaaccaagtctattcaagtagagctgggcgcatttgaatctgtattttaa

SEQ ID NO: 121256 - protein, 500 aa, Psychrobacter arcticus 273-4
MTDSTDLKHMDNAEQTQTAYINGSYLAVDKALSTFDSINPVTGEVLSTIQQTTTEQINDAVIAAQKGQKVWAAMTAIERSRILLNAVAILRERNDELAVLETKDTGKAISETKYVDIVTGADVIEYYAGLAPMIEGRQIPLRDTSFVYTRQEPLGVIAGIGAWNYPIQIAMWKAAPALAAGNAMIFKPSEVTPLSALKLAEIFTEAGLPEGVFNVVQGNYEVGEALTQHPDIAKVSFTGGVPTGKKVMSSAATSSLKDVTLELGGKSPLIIFDDADIDTAADIAMMANFYSTGQVCTNGTRVFIPKALQAKFEQAIQTRVKRIKLGDPMDDSITMGPLVSFPHMDRVLGYIEQGKASGARLLCGGARVTTGSLADGAYVAATVFTDCTDDMSIVREEIFGPVMSILTYETEEEVIRRANDTEYGLAAGVVTADLNRAHRVIAQIEAGICWLNTWGESAAQMPVGGYKHSGIGRENGIQTLEHYTQTKSIQVELGAFESVF

SEQ ID NO: 121257 - DNA, 1464 bp, Colwellia psychrerythraea 34H
  CDS (1)..(1464): transl_table=11
ttgtcgttagtacgttatagaaattttgtcgatggtgcctacatggcaaacgacagtggtgaaacattcgatgtgattaacccagctacgggaaaagtaatttatcaagttgaagtcgccgatggaaaaattaaacaagaagcaataactagtgctcagagtggttttgctacttggtcagcaatgagcgctatacagcgcagtcgaattctactcaaagcggtagctttgttacgcgagcgtaatgatgaactggcagagattgaagtacttgataccggtaaaccatggcaagaagcttcagttgttgatgttgagtcaggtgctgattctatcgagttttttgcgggcttggctcctggaattgaaggtaatcagcagcaagtcgatggtgatttttattacactcgtcgtgaagcattaggtatttgcgccggtattggtgcgtggaattacccattacagatagcttgttggaaagccgcacctgcattggcgtgtggtaactcgatgatttttaaaccatcagaagaaacaccattaggcgcattaaaactcgctgagattttcactgaagcaggcattccagatggcgtatttaatgttgttcaaggtgctggtgaagtgggttcttggttaagtcatcacccagatatcgctaaagtttcttttactggtgaagttggtactggcaagaaagtcatggcaggtgctgccacgacgcttaaagatgtcactatggaacttggtggaaaatcaccattgattatttttgatgatgcagatatcgacaatgctgtttctgctgccatgttaggtaatttttatacgcaaggtgaagtttgcaccaatggtacgcgcgtattcgtacaagaatcagcatacccgaaatttattgagaaattactgcaacgtactcgccaaaacattatcgttggagatccaatggatcccgagacaaattttggtgctctcatctcgaaaaagcattttgatttggtatcagattatatcaaagtcggtattaaagaaggcgctacgctacttcatggcggcacatcactgcagccagacaatgcacccaatggctattttattgcgccaactatttttaccgattgtactgatggcatgacaatttgccgagaagagatttttgggccagtaatgtcagtattaatatttattgatgaagatgaagtggttgctagagccaatgctactgattatgggctggcagcggcggtattcacacaagatattaattgtgctcaccgtgttatccataaaatggaagctggaatttgctggataaacagctttggtgcatcacctgcgcaaatgcctgtaggtggttataaacagtcaggtataggacgtgaaaatggtctggttacactaaaccattacactcaaattaaatccgtttatgttggtcttcagccacttgatagtcctttttaa

SEQ ID NO: 121258 - protein, 487 aa, Colwellia psychrerythraea 34H
MSLVRYRNFVDGAYMANDSGETFDVINPATGKVIYQVEVADGKIKQEAITSAQSGFATWSAMSAIQRSRILLKAVALLRERNDELAEIEVLDTGKPWQEASVVDVESGADSIEFFAGLAPGIEGNQQQVDGDFYYTRREALGICAGIGAWNYPLQIACWKAAPALACGNSMIFKPSEETPLGALKLAEIFTEAGIPDGVFNVVQGAGEVGSWLSHHPDIAKVSFTGEVGTGKKVMAGAATTLKDVTMELGGKSPLIIFDDADIDNAVSAAMLGNFYTQGEVCTNGTRVFVQESAYPKFIEKLLQRTRQNIIVGDPMDPETNFGALISKKHFDLVSDYIKVGIKEGATLLHGGTSLQPDNAPNGYFIAPTIFTDCTDGMTICREEIFGPVMSVLIFIDEDEVVARANATDYGLAAAVFTQDINCAHRVIHKMEAGICWINSFGASPAQMPVGGYKQSGIGRENGLVTLNHYTQIKSVYVGLQPLDSPF

SEQ ID NO: 121259 - DNA, 1464 bp, Colwellia psychrerythraea 34H
  CDS (1)..(1464): transl_table=11
atgcctctaattaaatataaaaactatgttgatggtgcatatacaagcaatggcacaggggaaacgtttgatgttacgaacccggcaacgggtcaggtcatttatcaggtagaaattgctgatgaactgataaaaagtaaagctatcgaaagcgctaagcgaggatttgcccagtggtctgcgatgagcgcgaccgagcgcagccgagtattattaaaagcggtcgacttactgcgtgaacgaaatgatgaattggcagaaatcgaagttttggatacgggtaaaccatggcaagaggctagcgtggttgatgtgcagtcgggcgccgattctattgaattttttgccggtctggcaccaggcattgaaggtaatcagcaacaagtaggggctgatttttactacacacgccgcgaagctttaggtatttgtgccggtattggcgcatggaattacccattacaaattgcttgttggaaggctgctcctgctcttgcttgtggtaatgcaatgatattcaaaccctctgaagaaacaccgttaggtgctctcaaattggcggaaatctttagtgaagccggtttgcctgatggggtatttaacgtgctgcaaggagcaggggatgtcggttcgtggttaagccatcacccagagattgctaaagtttcttttactggtgaagtgggtacgggtaagaaggtcatggcaggtgctgccaccacgttaaaagatgtcaccatggaactgggtggaaaatcaccgcttatcatctttgatgacgctgatgttgataacgcggtatcggcggcgatgttaggtaatttttatacccaaggcgaaatttgcactaatggcacacgtgtttttgtgcagaaagaaatttatccaacctttattaaaaaactagtagagcgcactaaaaacaacattattgttggcgaccccatggatcctgagactaactttggtgcgctgatctcagccaagcatcaacgcttagtactcgattatatcgacctaggcctaaaagaaggtgcgaccttgttgcaaggtggcgctgcgctaaacccaataggttgtgatgctggctattttgtcgaacccaccatatttactgattgtaatgatgatatgcgtatttgctgtgaagaaatatttggtccagtaatgtcggtgttgaccttcgacgatgaagacgaggttatcaagcgtgctaatgcaactgaatttggccttgctgctggcgtattcacccaagacatcactcgtgctcatcgggttatacatcaaatgcaagcaggcatttgttggattaatagctacggactttcaccagcagaaatgcctgtgggcggatataaactctcgggtattggccgagaaaatggtctagcgacattaaaccactacacccaaattaaagcggtatacgttggtttagaaccactcgaaagtcctttttaa

SEQ ID NO: 121260 - protein, 487 aa, Colwellia psychrerythraea 34H
MPLIKYKNYVDGAYTSNGTGETFDVTNPATGQVIYQVEIADELIKSKAIESAKRGFAQWSAMSATERSRVLLKAVDLLRERNDELAEIEVLDTGKPWQEASVVDVQSGADSIEFFAGLAPGIEGNQQQVGADFYYTRREALGICAGIGAWNYPLQIACWKAAPALACGNAMIFKPSEETPLGALKLAEIFSEAGLPDGVFNVLQGAGDVGSWLSHHPEIAKVSFTGEVGTGKKVMAGAATTLKDVTMELGGKSPLIIFDDADVDNAVSAAMLGNFYTQGEICTNGTRVFVQKEIYPTFIKKLVERTKNNIIVGDPMDPETNFGALISAKHQRLVLDYIDLGLKEGATLLQGGAALNPIGCDAGYFVEPTIFTDCNDDMRICCEEIFGPVMSVLTFDDEDEVIKRANATEFGLAAGVFTQDITRAHRVIHQMQAGICWINSYGLSPAEMPVGGYKLSGIGRENGLATLNHYTQIKAVYVGLEPLESPF

SEQ ID NO: 121261 - DNA, 1455 bp, Dechloromonas aromatica RCB
  CDS (1)..(1455): transl_table=11
atgaaacagatcctgaattttattaacggcgagttcgttgctacagggaagcagttcgagaagcggacgccgctcgacaactcgctgatcggcatggtgcatgaagccggcaaggccgaggttgatgccgcggtcaaggcagcgcacgatgcgctggaagggccgtggggcaagatgaccgtggtcgagcgcaccgatatcctgaacaaggtggccgacgagattacccgtcgcttcgacgaattcctcgaagccgaatgtgccgataccggcaagccgaagagcttggcttctcatatcgacatcccgcgcggcgcagccaatttcaagattttcgccgacgtgatcaagaacgcgccgaccgagttcttcgaaatggcgacaccggatggcaagggcgcgctgaactacgccatccggcgcccggtgggcgtggtcggtgtggtctgcccgtggaacctgccgctgctgctgatgacctggaaggttggtccggcgctggcctgcggcaacacggtcgtcgtcaagccgtcggaagaaaccccgtcgacggccaccctgctcggcgaagtgatgaatgcctgcggcgtgcccaagggcgtctacaacgtcgtgcatggtttcgggccgaattcggccggcgaattcctgaccaccaaccagaacgtgaatgcgatcacctttactggcgagacccgtaccggtgctgcgatcatgaaggccgctgccgacggtgcccgcccggtatcgctggaaatgggcggcaagaacccggccatcgtttttgccgacgccaatctggatgtcgcgatcgaagccacgctgcgctcctgcttctcgaactgtggccaggtctgcctgggcaccgagcgtgtctatgtcgagcgcccgttcttcgagaccttcgtggctgccctgaaggccggtgccgaaaagctcaagctcggcgtgccgagcgacccgagcgccaacatggggccactggtcagccaggaacaccgcaacaaggtcttgtcgtattacaagaaggccgtcgaggagggcgccaccgtggttactggtggtggcatccccgacatgccgggcgagctggccaatggcgcctgggtgcagccgaccatctggaccggtctcgacgacaacgctgccgtggttcgcgaagagatcttcggaccttgcacgaccgtgatgccgttcgacagcgaagatgaagtgatcaagcgcgccaacaacacgacctacggtctggccgcctcggtcttcacccaggacgtcaatcgcgctcaccgcgttgctggtcgtatcgaagccggcctggtctgggtgaacagctggttcctgcgcgacttgcgcacgccgttcggtggcgccaagcagtccggtatcggccgcgagggtggtgtgcattcacttgagttctacaccgaactcaagaacgtctgcatcaagctgtaa

SEQ ID NO: 121262 - protein, 484 aa, Dechloromonas aromatica RCB
MKQILNFINGEFVATGKQFEKRTPLDNSLIGMVHEAGKAEVDAAVKAAHDALEGPWGKMTVVERTDILNKVADEITRRFDEFLEAECADTGKPKSLASHIDIPRGAANFKIFADVIKNAPTEFFEMATPDGKGALNYAIRRPVGVVGVVCPWNLPLLLMTWKVGPALACGNTVVVKPSEETPSTATLLGEVMNACGVPKGVYNVVHGFGPNSAGEFLTTNQNVNAITFTGETRTGAAIMKAAADGARPVSLEMGGKNPAIVFADANLDVAIEATLRSCFSNCGQVCLGTERVYVERPFFETFVAALKAGAEKLKLGVPSDPSANMGPLVSQEHRNKVLSYYKKAVEEGATVVTGGGIPDMPGELANGAWVQPTIWTGLDDNAAVVREEIFGPCTTVMPFDSEDEVIKRANNTTYGLAASVFTQDVNRAHRVAGRIEAGLVWVNSWFLRDLRTPFGGAKQSGIGREGGVHSLEFYTELKNVCIKL

SEQ ID NO: 121263 - DNA, 1473 bp, Pseudomonas fluorescens PfO-1
  CDS (1)..(1473): transl_table=11
atggcccgtttcgaactgcaaaaactctacatcgatggcgcgtactccgacgccggcagcgatgccaccttcgaagccatcaacccggctaacggtgaagtcctcgcacacgtgcaacgtgcgaccaaggaagacgtcgagcgtgctgtggtcagcgccgaaaagggccagaaaatctgggccgcgatgaccgccatggagcgttcgcgcatcctgcgtcgcgccgtcgacatcctgcgcgagcgcaacgatgaactggctgccctggaaaccctggacaccggtaaagccttctccgaaaccaagtacgtcgacatcgtcaccggcgccgacgtgctggaatactacgcaggcctggtacccgccatcgaaggcgagcagatcccgctgcgtgacacttccttcgtttacacccgtcgcgagccgctgggcgttgtcgctggtatcggcgcgtggaactacccgatccagatcgccctgtggaaatccgcgccagccttggcggccggtaacgcgatgatcttcaagccaagcgaagtcacatcgctgaccaccctgaaactggctgagatctacaccgaagccggcgttccgaacggcgtgttcaacgtactgaccggcagcggccgtgaagtcggcacctggctgaccgagcacccgcgcatcgagaagatctctttcaccggcggcaccgacaccggcaagaaggtcatggccagcgcttcggcttcgtcgctcaaagacgtgaccatggaactgggcggcaagtccccgctgatcatctgcgacgacgccgatcttgatcgcgccgccgacaccgccatgatggccaacttctacagctccggtcaggtctgcaccaacggcactcgcgtgttcgtgccgagccacctgaaagccgctttcgaagccaagatcgtcgagcgcgttgcgcgcatccgcgttggcaacccggaagacgaaaacaccaacttcggcccgctggtcagcttcccgcacatggaaagcgtgctgggctacatcgccaagggtaaagaagaaggcgcccgcgttctgtgcggtggcgagcgtctgaccgacggcgaattcgccaaaggcgcgttcgtggctccaaccgtgttcaccgactgcaccgacgacatgactatcgtccgtgaagaaatcttcggcccggtgatggcgatcctgagctacgaaaccgaagaagaagtgatccgtcgcgccaacgacaccgacttcggcctggccgccggcatcgtcacccgcgacctgaaccgcgcgcaccgcgtgattcatcaactggaagccggtatctgctggatcaacgcctggggcgagtccgacgcaaaaatgccggttggcggctacaagcagtcgggcgtcggccgtgagaacggcatcagctcgctgaacaacttcactcgcatcaaatcggtgcaggtcgagctgggcgattacgtctcggtgttctaa

SEQ ID NO: 121264 - protein, 490 aa, Pseudomonas fluorescens PfO-1
MARFELQKLYIDGAYSDAGSDATFEAINPANGEVLAHVQRATKEDVERAVVSAEKGQKIWAAMTAMERSRILRRAVDILRERNDELAALETLDTGKAFSETKYVDIVTGADVLEYYAGLVPAIEGEQIPLRDTSFVYTRREPLGVVAGIGAWNYPIQIALWKSAPALAAGNAMIFKPSEVTSLTTLKLAEIYTEAGVPNGVFNVLTGSGREVGTWLTEHPRIEKISFTGGTDTGKKVMASASASSLKDVTMELGGKSPLIICDDADLDRAADTAMMANFYSSGQVCTNGTRVFVPSHLKAAFEAKIVERVARIRVGNPEDENTNFGPLVSFPHMESVLGYIAKGKEEGARVLCGGERLTDGEFAKGAFVAPTVFTDCTDDMTIVREEIFGPVMAILSYETEEEVIRRANDTDFGLAAGIVTRDLNRAHRVIHQLEAGICWINAWGESDAKMPVGGYKQSGVGRENGISSLNNFTRIKSVQVELGDYVSVF

SEQ ID NO: 121265 - DNA, 1452 bp, Rhodobacter sphaeroides 2.4.1
  CDS (1)..(1452): transl_table=11
gtgagagcccagcccgccgccagccatttcgtcgacggtcgtccgctcgaggatgagaccggcgcgccgatccccgtgatctatcccgccaccggcgaggagatcgcccgccttcacgaggccacgcccgccgtgatcgaggcggctttggcctcgggcgcccgcgcgcaggcggcctgggccgcgatgcggcccgtcgagcgggcgcggatcctgcgccgggcctcggacctgatccgggcgcacaacgaggagctgagccttctcgagacgctcgacaccggcaagccgctgcaggagacgctggtggccgactgggcctcgggggcggatgcgctggaattcttcgccggtctggcgcccgtcgtcaccggcgagaccgtgccgctggggcaggatttcgtctatacgatccgcgagccgctgggcctctgcgtgggcatcggcgcctggaactacccgagccagatcgcctgctggaaggccgcgcccgcgctcgcgctcggcaatgcgatggtgttcaaaccctcggaagtgacgccgctcggcgcgctgaagctggccgagatcctgatcgaggcgggcctgccgcccgggctcttcaacgtggtgcagggccgcggcgcggtgggggcgtcgctcgtcaccgacagccgggtggccaaggtctcgctcacgggctcggtgccgacggggcggcgcgtctatgcggctgcggccgagggcgtgcgccatgtcacgatggagctcggcggcaagtcgcccctgatcgtcttcgacgatgccgatctggagagcgccatcggcgcggcgatgctcggcaacttctattccgcgggccagatctgctcgaacgggacgcgggtcttcgtgcagaaggggatcaaggaagcgttcctcgcccggctggccgagcgggccgatgccatccgcatgggcgatccgctcgaccccgaggtccagatggggccgctcgtctcgcaggcgcagctcgagaaggtgctggcctatatcgagaaggcccgcgccgagggcggccgcctcgtctgcggcggcgaggcctcggtcagccccggctgctatgtccagcccacggtcttcgccgatgtgacggacgccatgaccctcgcccgcgaggaggtgttcggtccggtgatggcggtgctcgatttcgagaccgaggaggaggcgatcgcgcgggcgaatgccaccgacttcggcctcgccgcgggggtcttcaccgcggatctcacgcgggcgcaccgggtggtggcgcagctgcaggccgggacctgctggatcaacgcctacaaccttacgccggtcgaggcgcccttcggcggggtgaagctgtcgggcgtgggccgcgagaacggccgggccgccgtccagcactatacgcaggtgaagtcggtctatgtcggcatggggccggtggacgccccctactga

SEQ ID NO: 121266 - protein, 483 aa, Rhodobacter sphaeroides 2.4.1
MRAQPAASHFVDGRPLEDETGAPIPVIYPATGEEIARLHEATPAVIEAALASGARAQAAWAAMRPVERARILRRASDLIRAHNEELSLLETLDTGKPLQETLVADWASGADALEFFAGLAPVVTGETVPLGQDFVYTIREPLGLCVGIGAWNYPSQIACWKAAPALALGNAMVFKPSEVTPLGALKLAEILIEAGLPPGLFNVVQGRGAVGASLVTDSRVAKVSLTGSVPTGRRVYAAAAEGVRHVTMELGGKSPLIVFDDADLESAIGAAMLGNFYSAGQICSNGTRVFVQKGIKEAFLARLAERADAIRMGDPLDPEVQMGPLVSQAQLEKVLAYIEKARAEGGRLVCGGEASVSPGCYVQPTVFADVTDAMTLAREEVFGPVMAVLDFETEEEAIARANATDFGLAAGVFTADLTRAHRVVAQLQAGTCWINAYNLTPVEAPFGGVKLSGVGRENGRAAVQHYTQVKSVYVGMGPVDAPY

SEQ ID NO: 121267 - DNA, 1470 bp, Burkholderia sp. 383
  CDS (1)..(1470): transl_table=11
atgtccgtattcggtttgcagcgcctctacatcggcggcggttacgtcgacgccacgagcggcaagactttcgacaccttcgatcccgccaccggcgaactgctcgcgcaggtgcagcaggccagcgcagccgacgtcgaccgcgcggtcgcgtccgcccaggaaggccagcgcgaatgggccgcgatgaccgcgatgcagcgctcgcgcatcctgcgccgcgccgtcgacctgctgcgcgagcgcaacgacgagctcgccgcactggaaacgcgcgacacgggcaagccgatcggcgagacgctcgcggtcgacatcgtcaccggcgcggacgtgatcgagtactacgcgggcctcgcgaccgcgatcgaagggctgcaggtgccgctgcgcgccgagtcgttcgtctacacgcgccgcgagccgctcggcgtgtgcgcgggcatcggcgcgtggaactacccgatccagatcgcgtgctggaagacggcccccgcactcgcggccggcaacgcgatggtgttcaagccgagcgaagtcacgccgctcaccgcgctgaagctcgcggaaatctatacggaagccggcgtgccggccggcgtgttcaacgtcgtgcagggcgacggctcggtcggcgcgctgctgacgggccaccctgacatcgcgaaggtgtcgttcaccggcggcgtcgaaaccggcaagaaggtgatgtcgctggccggcgcgtcgtcgctgaaggaagtgacgatggaactcggcggcaagtcgccgctgatcgtgttcgacgacgcggatctcgaccgtgcggccgacatcgcggtgaccgccaacttcttcagctcgggccaggtctgcacgaacggcacgcgcgtgttcgtgcaccgctcgatcaaggacgcattcacgcagcgagtactcgaacgcgtgaagcgcatccgcgtcggcaagccgaccgatgccgataccaacttcggcccgctcgtgtcggccgcgcagctcgacaaggtgctcggcttcatcgaaagcggcaaggcggaaggcgcgaagctgctcgcgggcggcacgcgcctcaccgacggccacttcggtagcggccagtacgtcgcgccgaccgtgttcggcgattgccgcgacgacatgaagatcgtccgcgaggaaatcttcgggccggtgatgagcatcctcgatttcgaatcggaggacgaagtgattgcccgcgcgaacgacacgcactacggcctggcggccggcgtcgtgaccgagaacctgtcgcgcgcgcaccgcacgatccatcgcctcgaagccggcatctgctggatcaacacgtggggcgaatcgccggccgagatgccggttggcggatacaagcaatccggtgtcggacgcgagaacggcatcacgacgctcgagcactacactcgaatcaagtcggtgcaggtcgagctcggccgctacaacccggtgttttga

SEQ ID NO: 121268 - protein, 489 aa, Burkholderia sp. 383
MSVFGLQRLYIGGGYVDATSGKTFDTFDPATGELLAQVQQASAADVDRAVASAQEGQREWAAMTAMQRSRILRRAVDLLRERNDELAALETRDTGKPIGETLAVDIVTGADVIEYYAGLATAIEGLQVPLRAESFVYTRREPLGVCAGIGAWNYPIQIACWKTAPALAAGNAMVFKPSEVTPLTALKLAEIYTEAGVPAGVFNVVQGDGSVGALLTGHPDIAKVSFTGGVETGKKVMSLAGASSLKEVTMELGGKSPLIVFDDADLDRAADIAVTANFFSSGQVCTNGTRVFVHRSIKDAFTQRVLERVKRIRVGKPTDADTNFGPLVSAAQLDKVLGFIESGKAEGAKLLAGGTRLTDGHFGSGQYVAPTVFGDCRDDMKIVREEIFGPVMSILDFESEDEVIARANDTHYGLAAGVVTENLSRAHRTIHRLEAGICWINTWGESPAEMPVGGYKQSGVGRENGITTLEHYTRIKSVQVELGRYNPVF

SEQ ID NO: 121269 - DNA, 1479 bp, Burkholderia thailandensis E264
  CDS (1)..(1479): transl_table=11
atgtccgctatgtccgtatacggtctgcaacgcctttacatcgccggcgcctatgccgacgccacgagcggcaagacgttcgacacgttcgatcccgcgacgggcgagctgctcgcgagcgtccagcaagcgagcgccgacgacgtcgaacgcgcggtcgcatccgcgcgcgaaggccagcgcgaatgggccgcgatgacctcgatgcagcgctcgcgcatcctgcgccgcgcggtcgaattgctgcgcgagcgcaatgacgcgctcgccgagctcgaaatgcgcgacaccggcaagccgatcgcggaaacgcgcgccgtcgacatcgtcacgggcgccgacgtgatcgagtactacgcgggcctcgcgaccgcgatcgagggcctgcaagtgccgctgcgccccgaatcgttcgtctacacgcggcgcgagccgctcggcgtgtgcgcgggcatcggcgcatggaactacccgatccagatcgcctgctggaaaagcgcgcccgcgctcgccgccggcaacgccatgatcttcaagccgagcgaagtcacgccgctgtccgcgctcaagctcgcggagatctacaccgaggcgggcgtgcccgccggcgtgttcaacgtcgtgcagggcgacggctcggtcggcgcgctgctgaccgcgcacccggggatcgcgaaggtatcgttcacgggcggcgtcgaaaccggcaagaaggtgatgtcgctcgccggcgcgtcgtcgctcaaggaagtgacgatggagctgggcggcaagtcgccgctcatcgtgttcgacgacgccgacctcgatcgcgcggccgacatcgccgtcactgcgaacttcttcagcgcgggccaggtgtgcacgaacggcacgcgcgtgttcgtccagcaggcggtaaaggacgctttcgtcgagcgcgtgctcgagcgcgtcgcgcgaatccgcgtcggcaaaccttcggaccccgacacgaatttcggcccgctcgcgagcgccgcgcagctcgacaaggtgctcggctacatcgagagcggcaaggctgagggcgcgaagctgctcgcgggcggcgcgcgcctcgtgaacgatcacttcgcgagcgggcagtacgtcgcgccgaccgtgttcggcgattgccgcgacgacatgaagatcgtccgtgaagagatcttcggcccggtgatgagcatcctgtcgttcgaaacggaagacgaagcgatcgcgcgcgcgaacgcgaccgagtacggcctcgcggcgggcgtcgtcaccgagaacctgtcgcgcgcgcaccgcgcgatccatcgcctcgaagccggcatctgctggatcaacacgtggggcgagtcgcccgccgagatgccggttggcggctacaagcaatccggcgtcggacgcgagaacggcatcacgacgctcgagcactacactcgaatcaaatcggttcaggtcgagctcggccgctatcaaccggtgttctaa

SEQ ID NO: 121270 - protein, 492 aa, Burkholderia thailandensis E264
MSAMSVYGLQRLYIAGAYADATSGKTFDTFDPATGELLASVQQASADDVERAVASAREGQREWAAMTSMQRSRILRRAVELLRERNDALAELEMRDTGKPIAETRAVDIVTGADVIEYYAGLATAIEGLQVPLRPESFVYTRREPLGVCAGIGAWNYPIQIACWKSAPALAAGNAMIFKPSEVTPLSALKLAEIYTEAGVPAGVFNVVQGDGSVGALLTAHPGIAKVSFTGGVETGKKVMSLAGASSLKEVTMELGGKSPLIVFDDADLDRAADIAVTANFFSAGQVCTNGTRVFVQQAVKDAFVERVLERVARIRVGKPSDPDTNFGPLASAAQLDKVLGYIESGKAEGAKLLAGGARLVNDHFASGQYVAPTVFGDCRDDMKIVREEIFGPVMSILSFETEDEAIARANATEYGLAAGVVTENLSRAHRAIHRLEAGICWINTWGESPAEMPVGGYKQSGVGRENGITTLEHYTRIKSVQVELGRYQPVF

SEQ ID NO: 121271 - DNA, 1515 bp, Novosphingobium aromaticivorans DSM 12444
  CDS (1)..(1515): transl_table=11
atgaacgacatgaccaccatctcgcgcacgcagcgcgaatactcggaggccgccaaggccttcctcgcgcgcaagccgcagttgttcatcaacaacgagtgggtcgacagcagccacgacgccgtgatcgaggtggaagacccctcgaacggcaggatcgtcggtcatgtcgtcgatgcctcggacaaggacgtcgaccgggcggttgccgcggcgcgcgccgcgttcgacgatggccgctggtccaacctgccgccaatggtccgcgatcgcaccatgaatcgcctggccgacctgcttgaagccaacgccgatctctttgccgagctcgaagcgatcgacaacggcaagcccaagggcatggccggcgccgtcgacatccccggcgcgatcagccagctccgcttcatggccggctgggccagcaaggtcgcgggcgagacgacgcagccctacacgatgcccaacggcaccgtgttcagctacaccgtcaaggaacccgtcggcgtctgcgcgcagatcgtgccgtggaacttcccgctgctgatggcctcgctcaagatcgccccggcgctggcggctggctgcaccctggtgctgaagcccgccgaacagacctcgcttaccgcgctcaagcttgccgatctcgtggtcgaggccggcttccctgcgggcgtgatcaacatcatcaccggcaacggccacaccgccggtgaccgcatggtcaagcatcccgacgtcgacaaggtcgccttcaccggctcgaccgagatcggcaagctgatcaatcgcaacgccaccaccacgctcaagcgggtcacgctcgaactgggcgggaagagccccgtcgtggtcatgcccgacgtcgacgtggcgcagaccgcgcctggcgttgccggcgcgatcttcttcaacgcgggccaggtctgcgttgccggttcgcgtctctatgcgcaccgttcggtgttcgattccgtgctcgaaggcatgacccagaccgcgccgttctgggcgccgcgcccctcgctggatcccgaagcccacatgggcccgttggtcagcaaggagcagcacgaccgcgtgatgggctacatcgaggcgggcaagcgcgatggcgccagcgtcgtcatgggcggcgattgccccagcgccgatggcgggtactacgtcaacccgacgatccttgcagacgtgaacccgcagatgtcggtcgtgcgcgaggaaatcttcggccccgtcgtcgtcgcccagcgcttcgacgatctcgatgaagtggcgaagatggccaacgacacctgcttcggcctcggcgcgggcgtgtggacgcgcgatgtcgcggtgatgcacaagcttgcctcgaagatcaaatcgggcaccgtgtggggcaactgccacgccctgatcgataccgcgctgccctttggcggctacaaggaatcgggcctgggccgcgaacaggggcgcgccggcatcgacgcctacctcgagaccaagaccgtcatcatccagatgtaa

SEQ ID NO: 121272 - protein, 504 aa, Novosphingobium aromaticivorans DSM 12444
MNDMTTISRTQREYSEAAKAFLARKPQLFINNEWVDSSHDAVIEVEDPSNGRIVGHVVDASDKDVDRAVAAARAAFDDGRWSNLPPMVRDRTMNRLADLLEANADLFAELEAIDNGKPKGMAGAVDIPGAISQLRFMAGWASKVAGETTQPYTMPNGTVFSYTVKEPVGVCAQIVPWNFPLLMASLKIAPALAAGCTLVLKPAEQTSLTALKLADLVVEAGFPAGVINIITGNGHTAGDRMVKHPDVDKVAFTGSTEIGKLINRNATTTLKRVTLELGGKSPVVVMPDVDVAQTAPGVAGAIFFNAGQVCVAGSRLYAHRSVFDSVLEGMTQTAPFWAPRPSLDPEAHMGPLVSKEQHDRVMGYIEAGKRDGASVVMGGDCPSADGGYYVNPTILADVNPQMSVVREEIFGPVVVAQRFDDLDEVAKMANDTCFGLGAGVWTRDVAVMHKLASKIKSGTVWGNCHALIDTALPFGGYKESGLGREQGRAGIDAYLETKTVIIQM

SEQ ID NO: 121273 - DNA, 1470 bp, Burkholderia xenovorans LB400
  CDS (1)..(1470): transl_table=11
atggcggtattcgcaatacaacgcctctacatcggcggcgcgtatgtcgacgcaaccagcggcgaaaccttcgatacgctcgaccccgccaccggcgagacgctcgcgagcgtgcagcaggcttcggcggcggacgtcgagcgcgcggtgcaatccgcgcgggaaggccaacgcgaatgggccgcgctcacggccatgcagcgttcgcgcgttctgcgccgcgccgtcgagattctgcgcgagcgcaacgacgaactcgccgcgctcgaaacgcgcgacaccggcaagccgattgcggaaacgctcgcggtggatatcgccaccggcgcggacgtgatcgagtactacgcgggactcgccactgccattgaagggcaacagattcccttgcggcccacctcgttcgtttatacgcggcgcgagccgcttggcgtttgcgcgggcatcggcgcatggaactatccgatccagatcgcgtgctggaagtcggcgcccgcgctcgcggccggcaacgcgatgatcttcaagccgagtgaaatcacgccgctatcggcgttgaagctcgccgagatctataccgaagccggcgtgcccgcgggcgtgttcaatgtcgtgcaaggcgacggacgcgtcggtgcaatgctggccgcgcatccggacatcgagaaaatctcgtttaccggcggcgtggaaacgggcaagaaggtgatgtcactggcgggcgcatcgtcactgaaagaagtgacgatggaactcggcggcaagtcccccctgctcgtattcgacgacgccgatctcgaacgcgccgccgacattgcgatgagcgccaacttcttcagctccggccaggtgtgcaccaacggcacgcgcgtgttcgtgcaacgcggcgtattggaacgcttcgaggcgttagtgctggaacgcgtcaagcgcattcgcgtgggcgcgccaaccaacgccgccaccaacttcggtccgctcgcgagcgccgcgcaattgcagaaggtgctggggtacatcgaaagcggcaagcaggaaggcgcgcggctcatggcgggcggcaagcgtctcaccgaaggtcacttcggcaacggccagtacgtcgagccgaccgtattcaccggctgccatgacgacatgcgcatcgtgcgcgaggagatcttcggcccggtcatgagcattctcgtgttcgacgacgaagacgaagccatcgcgcgcgcgaaccgcaccgcttatggtctcgccgcgggcgtcgtgaccgggaatctggcgcgcgcgcatcgcgtgattcatcgtctggaagcgggcatctgctggatcaacacgtggggcgagtcgccggcggaaatgccggtgggcggctacaagcaatcgggcgtgggccgcgaaaacggcctcaccacgctcgagcactacacgcgcatcaagtccgtgcaggtcgaactcggcccgtatcaaccggtgttctaa

SEQ ID NO: 121274 - protein, 489 aa, Burkholderia xenovorans LB400
MAVFAIQRLYIGGAYVDATSGETFDTLDPATGETLASVQQASAADVERAVQSAREGQREWAALTAMQRSRVLRRAVEILRERNDELAALETRDTGKPIAETLAVDIATGADVIEYYAGLATAIEGQQIPLRPTSFVYTRREPLGVCAGIGAWNYPIQIACWKSAPALAAGNAMIFKPSEITPLSALKLAEIYTEAGVPAGVFNVVQGDGRVGAMLAAHPDIEKISFTGGVETGKKVMSLAGASSLKEVTMELGGKSPLLVFDDADLERAADIAMSANFFSSGQVCTNGTRVFVQRGVLERFEALVLERVKRIRVGAPTNAATNFGPLASAAQLQKVLGYIESGKQEGARLMAGGKRLTEGHFGNGQYVEPTVFTGCHDDMRIVREEIFGPVMSILVFDDEDEAIARANRTAYGLAAGVVTGNLARAHRVIHRLEAGICWINTWGESPAEMPVGGYKQSGVGRENGLTTLEHYTRIKSVQVELGPYQPVF

SEQ ID NO: 121275 - DNA, 1452 bp, Ralstonia metallidurans CH34
  CDS (1)..(1452): transl_table=11
atgaccgccacacgccccgacttgccgaagcacgatctgctgatcgacggcaagcggctgccccccggcagcggtgagtattccaccgacatcaaccccgccaccgaagaacccatcgcgctggtggcgcaaggcagcgccgccgacgtcgacaccgccgtgctggccgcccgcgcggcactcaagagctgggcgggcatgcgcgccgccgatcgcggccgcatcctcaaccggttcgctgacctgctggaagcccacgccgaggaactgatcacgctggagagcctggatgccggcaagccgctggcggctgtacgtcgacaggatctgccggccgttgtcgacactgtgcggtattacgcgggctggtgcgacaagatccacggcgcggtgattccaacgcggccggacgcgctgacctacacggtgcgcgagcctgtcggcgtcgtcgccgccatcatcccgtggaatttcccgctgatgatcggcatgtggaagatcgcccccgcgctggcctgcggttgcacgctgatcgtgaagcccgccgagattacgccactgacggccctgcgcgtggccgaattggcgctggaggccggcgtgccgccgggcgtcttcaacgtcgtcaccggcaagggcagcgtggtgggcaatgcgctggttgcccacccgggaatcgacaaggtgacgttcacgggatcgcccggggtcggacgcggcatcatgcagggcgcggccagcaacttcaagcgcgtcacactggaactgggcggtaagtccgccaacgtgatctttgccgatgccgacatcgatgcggccacgcgtgccgcggcatccggaatctttttcaactcggggcaggtctgctcggccgggtcacgcatcctcgcgcagcgcaaggtgtacgacgaagtggtggaaaggctgactacccgcgcccgcgcgatacgggtcggcgatccggcctcgccggacacgacgatgggccccgtggtctcggcggcgcagatgaaaaccgtgctcgactatgtggaaatcggcaagcgcgaaggcgccagcgcggtgaccggcggcgcgcgcatcggccagcgcggcttcttcgtcgagccaaccgtgttcgcgaacgtcgagcacgaaatgcggatctcgcaggaagagatctttggcccggtggccagcgtgattccgttcgaagacgaggccgaggccgtgcgcatcgccaatggcaccgcgttcagcctggccgcaggggtatggagcgcggacatcgcgcgcgtgcacaaggtagccggagaattacgggcgggaacagtgtggatcaacacgtacggctataccgacgtgcgtctgccctggggcggcgccggcgattccggactcggccgtgagcacggtgacgccgccatcgagaacttcacggaaccgaaggcgatctggctttcgctgcgataa

SEQ ID NO: 121276 - protein, 483 aa, Ralstonia metallidurans CH34
MTATRPDLPKHDLLIDGKRLPPGSGEYSTDINPATEEPIALVAQGSAADVDTAVLAARAALKSWAGMRAADRGRILNRFADLLEAHAEELITLESLDAGKPLAAVRRQDLPAVVDTVRYYAGWCDKIHGAVIPTRPDALTYTVREPVGVVAAIIPWNFPLMIGMWKIAPALACGCTLIVKPAEITPLTALRVAELALEAGVPPGVFNVVTGKGSVVGNALVAHPGIDKVTFTGSPGVGRGIMQGAASNFKRVTLELGGKSANVIFADADIDAATRAAASGIFFNSGQVCSAGSRILAQRKVYDEVVERLTTRARAIRVGDPASPDTTMGPVVSAAQMKTVLDYVEIGKREGASAVTGGARIGQRGFFVEPTVFANVEHEMRISQEEIFGPVASVIPFEDEAEAVRIANGTAFSLAAGVWSADIARVHKVAGELRAGTVWINTYGYTDVRLPWGGAGDSGLGREHGDAAIENFTEPKAIWLSLR

SEQ ID NO: 121277 - DNA, 1491 bp, Acidobacteria bacterium Ellin345
  CDS (1)..(1491): transl_table=11
atgtcagtcgtgtcggccgtagaactgaacagcaacgtcagccaattcatcacaaagccgcgaaagatgctgatcggcgggaactggatcgatagtgcgtcgggtaaattctttgagaccctgaatccggcgactggcgaagtactggcgcgagttgccgaaggcgatcgtgccgacattgatctcgccgtcgccgcggcgcggaaggcatttgagagcggaccgtggtcgaaaatgtcgccgtcgcaacggggacgtcttttgtggaaactcgcggacctgctcgagcagcacctggaagagttcgccgagttggaatcgctcgacaatgggaagccgctgtcggtggcgcgggtggccgacgttccgctcgcggtagaccttttccgttacatggctggctgggcgacgaaggtggaaggcaacacgattccgctgggcccgcagttccatgcttatacctatcgcgaaccggtgggcgtaatcggccagatcattccctggaactttccgctgctgatggccgcgtggaaactgggtccggcgctggcggttgggtgcacggtggtgttgaagccggcggaacagacacctctctccgcgctgcgcctgggcgaactgatcatggaagcaggcttccccgatggcgtggtgaacgttgtgccgggcttcggcgaaactgccggcgctgcgctggccgcccatccggacgtcgacaagattgcgttcaccggatcgacagaagtcggcaaattgattgtgcaggctgccgcaggcaacctgaaaaaagtctctctcgaactgggcggcaagtcgccgaatatcgtgctcgctgatgcggacctggacattgcgatatcaggcagcgcgaacgcgatctttttcaatcacggccagtgctgctgcgcgggctcacggctgttcgtacacaagagccagttcgacaaagtggtggagggtgtggccgaagccgcaaagaacattcgcttgggatctgggcttgatccggcaaccaacatgggtccgctggtttcgcaggagcaactcgatcgcgtgtgcgggtatctcgaatctggggtgcaacaaggagcaaaacccctggttggcgggaagaaacagacggggccgggctacttcgtggagccaacggtgctggtggatgtgaagccgacgatgaaagtcgtttgcgaagagatcttcggacccgtggtcacggcgatcccgttcaacagcgtggacgaggtgttgaactcagccaatgcgtcgagctacggtctcgcggcagcggtgtggacgcgcgacattaacaaggcgcattcactggcggcaaagctgcgcgccggcacagtgtgggtgaattgttacaacgtgttcgacgccgcgctgccgtttgggggttataagcaatcgggctggggacgcgagatggggcacgacgcactcgagctctacaccgagaccaaagcggtctgtgtgcgcctggaaaactaa

SEQ ID NO: 121278 - protein, 496 aa, Acidobacteria bacterium Ellin345
MSVVSAVELNSNVSQFITKPRKMLIGGNWIDSASGKFFETLNPATGEVLARVAEGDRADIDLAVAAARKAFESGPWSKMSPSQRGRLLWKLADLLEQHLEEFAELESLDNGKPLSVARVADVPLAVDLFRYMAGWATKVEGNTIPLGPQFHAYTYREPVGVIGQIIPWNFPLLMAAWKLGPALAVGCTVVLKPAEQTPLSALRLGELIMEAGFPDGVVNVVPGFGETAGAALAAHPDVDKIAFTGSTEVGKLIVQAAAGNLKKVSLELGGKSPNIVLADADLDIAISGSANAIFFNHGQCCCAGSRLFVHKSQFDKVVEGVAEAAKNIRLGSGLDPATNMGPLVSQEQLDRVCGYLESGVQQGAKPLVGGKKQTGPGYFVEPTVLVDVKPTMKVVCEEIFGPVVTAIPFNSVDEVLNSANASSYGLAAAVWTRDINKAHSLAAKLRAGTVWVNCYNVFDAALPFGGYKQSGWGREMGHDALELYTETKAVCVRLEN

SEQ ID NO: 121279 - DNA, 1458 bp, Silicibacter sp. TM1040
  CDS (1)..(1458): transl_table=11
atgacacatccggcccagcccaaagccagccatttcatcaatggcgaatatgtcgaagacacctccggcaccccgatcccggtgatctatgctgccactggcgagaccatcgccaccgtttacgcggccacacctgcaatcgtcgagcaggcgctgaccgccgctgaggctgcgcagaaagaatgggccaagatgtccggcaccgagcgcggccgggtgctgcgccgcgccgccgacatcatgcgtgaacgcaatcacgaactgtcggtgctggaaacctatgacaccggcaagcccctgcaggaaaccctggtcgcggatgccacctctggtgcggatgcacttgaatatttcgggggcctcgcgggcagcctcaccggcgagcacatccagcttggcgaagactgggtctataccgtgcgcgagccgcttggcctctgtgtggggatcggcgcgtggaactaccccacccagatcgcctgctggaagggcgcaccggcattggcctgtggcaacgccatggtgttcaaaccttccgagaccacgccgctctgcgcgctcaaggtggccgagatcctgatggaggccggcgcgccagccgggctttacaacgtcattcagggcatgggcgaagtgggcggcaaactggtcacggacccgcgcgtcgacaaggtctcgctcaccggctccgttccgaccggcaaaaaggtctatgcggctgcggctgagggcatgaaacatgtaaccatggagctgggtggcaaatccccgatgatcgtctttgaagacgccgacatcgagagcgccatctccggtgccatcaacggcaacttctattcctcgggtcaggtctgctcgaacggcacccgcgtctttgttcacaaggacatcaaggagaagttcctcgcccgtctggccgagcgcactgcgacagccaaactgggcgatccgatggatgagagcgtgaactttggcccgatggtcagcgagcgccagatggagatcgtgctcggttatatcgagaagggcaaatccgagggcgcgcgcctgatttgtggtggcaaccgcgctgatatggatggcttttttgtggagcccacggtctttgccgatgtcaaagacgatatggtgatcgcccgcgaagagatctttggcccggtcatgtgcgttttggatttcgagagcgaagacgaggtgatcgcccgcgccaatgataccgaatttggtctctcggcaggggtcttcaccaaggatttcacccgcgcgcaccgggtgatcggtcagcttgaggccggcagctgctttatcaattcctacaatgacgcacccgtcgaggcgccctttggtggcgtcaaagcctctggcgtggggcgtgaaaattccaaggaagcgatcaagcacttcagccaggtgaagtcggtctacgtgcgcatgggcgactgcgaagcagccttctaa

SEQ ID NO: 121280 - protein, 485 aa, Silicibacter sp. TM1040
MTHPAQPKASHFINGEYVEDTSGTPIPVIYAATGETIATVYAATPAIVEQALTAAEAAQKEWAKMSGTERGRVLRRAADIMRERNHELSVLETYDTGKPLQETLVADATSGADALEYFGGLAGSLTGEHIQLGEDWVYTVREPLGLCVGIGAWNYPTQIACWKGAPALACGNAMVFKPSETTPLCALKVAEILMEAGAPAGLYNVIQGMGEVGGKLVTDPRVDKVSLTGSVPTGKKVYAAAAEGMKHVTMELGGKSPMIVFEDADIESAISGAINGNFYSSGQVCSNGTRVFVHKDIKEKFLARLAERTATAKLGDPMDESVNFGPMVSERQMEIVLGYIEKGKSEGARLICGGNRADMDGFFVEPTVFADVKDDMVIAREEIFGPVMCVLDFESEDEVIARANDTEFGLSAGVFTKDFTRAHRVIGQLEAGSCFINSYNDAPVEAPFGGVKASGVGRENSKEAIKHFSQVKSVYVRMGDCEAAF

SEQ ID NO: 121281 - DNA, 1512 bp, Rubrobacter xylanophilus DSM 9941
  CDS (1)..(1512): transl_table=11
atgagcgcccccgcttcggaggttcaccccaagctcttcatcgccaatgagtggagacccagccataccggccagacattcgagacggtggacccctcgaccgaagaggttatcgcatctatcccgcgcggaggcgccgaggacgtcgatgaagctgtgagcgccgccagggaggccttcaacggcccctggcggcgcctcacccccgaggatcgggccagattcctctaccaggtggcaaggagccttgagtccagattggaagaattcgcccggctggagacgctggataccggcaaacctctgcaacattctcgaaacgagatccgaaattgcgtgcgctattttgattactatgccggcgccgccgacaagatccacggcgagaccatcccgctgggtcccaattacctggactacacggtccgcgagccgctcggcgtgaccgcacacatcgtgccatggaacgtgcctttaggcatggtctgccgcagcctggctccagcactggccgccggcaatgcagccgttgtgaagccagcagagcagacgccgcttaccgctcttaagctcgcggagctcttcctggagctagacgccccgccgggcgtctacaacgtggtgaccggctttggggaagaggcgggtcgggcgttgagcgagcatcctggcatagattcgatcaccttcaccggttctgtggagacgggccgtgccgttctcagagccgcggcggagcacgtaaggccggtcgttttagagctcggcggcaagtctccgcaggttgtattcgcagactgcgacctcgattttgctgcggacgaagtagcgaagggaatctactccaattcggggcagtattgcgacgcgggctcccggctgctgatcgatggctcgatcaaagagccttttttggagaaggtgatcgaacgcgcacgagcaataaaactcggcgcagggatggacgaacctgacatgggaccgctggtctccgaggagcatttcaagcgcgttctgggctatatagaagtgggaaataaggagggcgcgcgcatgctcaccggcgggcgtgccgaggggtttgagagagggtactttgttgcccccaccatcttcgacgaggtagaaagcaacatgcgcatcgcccaggaagagatcttcggtccggtgttggccacgttgtcttttggcagcgaagttgaagccatcgagatcgcaaacgactccagctatggattggcggctggcatctttacccgcgatatagatcgagcactgcgcttcgcaagcgagattcaagccggttatgtaatgatcaatgaatatttctcgggcggcatgggctcgccgtttggcggctataagcagagtggcatcggcagggagagaggcttgatagcgctggacaactacacgcagatcaagaacgtcgtggtgaaggtcgggcagagacttccacgccgctctgcgggcatacaagacgcgcttgcaccaattaccaagccaggatga

SEQ ID NO: 121282 - protein, 503 aa, Rubrobacter xylanophilus DSM 9941
MSAPASEVHPKLFIANEWRPSHTGQTFETVDPSTEEVIASIPRGGAEDVDEAVSAAREAFNGPWRRLTPEDRARFLYQVARSLESRLEEFARLETLDTGKPLQHSRNEIRNCVRYFDYYAGAADKIHGETIPLGPNYLDYTVREPLGVTAHIVPWNVPLGMVCRSLAPALAAGNAAVVKPAEQTPLTALKLAELFLELDAPPGVYNVVTGFGEEAGRALSEHPGIDSITFTGSVETGRAVLRAAAEHVRPVVLELGGKSPQVVFADCDLDFAADEVAKGIYSNSGQYCDAGSRLLIDGSIKEPFLEKVIERARAIKLGAGMDEPDMGPLVSEEHFKRVLGYIEVGNKEGARMLTGGRAEGFERGYFVAPTIFDEVESNMRIAQEEIFGPVLATLSFGSEVEAIEIANDSSYGLAAGIFTRDIDRALRFASEIQAGYVMINEYFSGGMGSPFGGYKQSGIGRERGLIALDNYTQIKNVVVKVGQRLPRRSAGIQDALAPITKPG

SEQ ID NO: 121283 - DNA, 1473 bp, Trichodesmium erythraeum IMS101
  CDS (1)..(1473): transl_table=11
atggtaactgctacaaaaccagaacaaaaagtgaaaattggtcccactaaactcttaattaataacgagtgggtagaaagtgcctctggcaaaaggtttgaaactattaaccctgcaacaggagaagttatttgtaacgttgcagaagcagatgcacctgatgtagataaagctgtaatagcagcccgcaaagcatttaccagtggcgaatggccaaaaatctctgctgccaaacgaggggaacttctatacaaattggcagatttgatagaaaaaaatatagaagagttggcgagactggaaaccttggataatggtaagccattcaaagactctctcaatacagatctacctttagcgatcgcttgttatcgctattatgcaggatgggctgacaaagttcaaggtaaaactatccctattagtggcccctacttttgctatacccgccacgaaccagtgggggttgtcggtcaaatcattccttggaattttcctctattaatgcaagcatggaaactcgctccagcattagcaatgggtaatacattagttatgaaaactgctgaacaaacaccattgtcagctttgcgggtgggtgagctggtaatagaagctggttttcctcctggtgtggtcaatattttgtctggttatggcccaactgctggtgctgccatttcccaccataaggatattgataaagttgcttttactggttcgacagaagtaggtcgtttaattatggaagctgctgccaaaagtaacttaaagcgggtgactttagaactaggtggcaagagtccaaatatagtgtttgcggatgcggatatggatgctgctattgagggctcccattttgctttattctttaatcaaggtcagtgttgctgtgcgggttctcgtctgtttgtggaagagaaatgttatgatgaatttgttaacaagagtgtagaacgagcaaaacttcggatggtaggcgacccatttactgaacgtgtggaacaaggacctcaagttgatgaagaacagtttaataaagtaatgagttatattgagtctggtcagcaggatggtgcccagatgttatgtggtggttcaagggttggcgatcgcggttattttattgcaccaactgtatttgctgatgtgcaagataatatgaaaattgctcaagaagaaatttttggtccggtgatgagcattattaagtttaaggatattgatgaattggtagaacgagctaacaacagtatgtatggcttggctgcaggagtatggacacaagatgtgactaaagctcatactttggctcataggctgcgggcaggtactgtttgggtaaattgttatgatgtgtttgatgctgctgcgccctttggtggttttaaacagtctggtcttggtcgggagctaggtgagtatggtttacagcagtatacggagattaagactgtgactatgaagatgtag

SEQ ID NO: 121284 - protein, 490 aa, Trichodesmium erythraeum IMS101
MVTATKPEQKVKIGPTKLLINNEWVESASGKRFETINPATGEVICNVAEADAPDVDKAVIAARKAFTSGEWPKISAAKRGELLYKLADLIEKNIEELARLETLDNGKPFKDSLNTDLPLAIACYRYYAGWADKVQGKTIPISGPYFCYTRHEPVGVVGQIIPWNFPLLMQAWKLAPALAMGNTLVMKTAEQTPLSALRVGELVIEAGFPPGVVNILSGYGPTAGAAISHHKDIDKVAFTGSTEVGRLIMEAAAKSNLKRVTLELGGKSPNIVFADADMDAAIEGSHFALFFNQGQCCCAGSRLFVEEKCYDEFVNKSVERAKLRMVGDPFTERVEQGPQVDEEQFNKVMSYIESGQQDGAQMLCGGSRVGDRGYFIAPTVFADVQDNMKIAQEEIFGPVMSIIKFKDIDELVERANNSMYGLAAGVWTQDVTKAHTLAHRLRAGTVWVNCYDVFDAAAPFGGFKQSGLGRELGEYGLQQYTEIKTVTMKM

SEQ ID NO: 121285 - DNA, 1521 bp, Shewanella sp. MR-4
  CDS (1)..(1521): transl_table=11
atgatctatgctcaacccggaaccgctggtgccatcgttaactttaaagaaaaatacgccaactttatcggtggaaaatgggtcgccccagtcaacggcgaatacttcgataatcgctcccccgtcaatggtcaaaacttctgtaaaattccccgctccgactaccgcgatattgaactggcgctcgatgctgcccacgccgctaaggacgcttggggaaaaacctcggtcaccgagcgtgcgaatttactgctgcgtatcgccgatcgcgttgagcaaaatctcgaatacttagccgttgccgaaacctgggaaaacggtaaagcggtgcgcgaaaccctcaacgccgacttgcctctgtttgtcgaccacttccgttactttgccggctgcattcgagcacaggaaggcagcgccgcggacatcgatggcaataccgtcagctatcacttcccagagccattgggtgtcgtcggacaaatcattccgtggaacttcccgctgttgatggctgcatggaaaatcgcccctgcactcgccgcaggcaactgcgtggtactcaaacccgccgagcaaacgccagtatctatccttgtactactcgaactgattgaagatctgctgccgcccggcatcctcaacgtcgtcaacggttttggcgccgaagcgggccaagccctcgccaccagcaaacgtatcgctaaactggcctttactggctccaccgaagtcggttatcacatcttaaaatgtgccgccgaatcactgatcccatcgacagtcgaactcggcggtaaatcgcctaacctgtatttcgccgatgtgatggaccacgaagacgagtatttagataaggccgtcgaaggcatgttgctggccttcttcaaccaaggtgaagtctgtacttgcccatcaagggtgttaatccaagaatcgatttacgatcgcttcatcgaaaaagtgctcgcccgtgcgcaaaccatcaagcaaggcaacccgctggataccgccacccaagtgggcgcacaagcctcccaagaacagttcgataagatcttaagctatctcgcgattggtaaagatgaaggcgcgcaggtgcttttaggcggctcgctttgccaacttgaaggcgagcaaagcaaaggctattacatcagcccaacgatcatgaaaggccataataagatgcggattttccaagaggaaatcttcggtccggttatttcggtcaccaccttcaaggatgaggccgaagccttggcaattgccaacgataccgaatacggccttggtgcgggtgtatggacgcgggatatgaaccgtgcccagcgtctaggacgaggcattcaagcgggtcgcgtttggattaactgctaccacgcctatcctgcccacgctgcctttggcggttataagaagtcgggtatcggccgtgaaacccacaagatgatgctcaatcactatcaaaacaccaaaaacctattggtgagttacgatatcaatccgctcgggttcttctaa

SEQ ID NO: 121286 - protein, 506 aa, Shewanella sp. MR-4
MIYAQPGTAGAIVNFKEKYANFIGGKWVAPVNGEYFDNRSPVNGQNFCKIPRSDYRDIELALDAAHAAKDAWGKTSVTERANLLLRIADRVEQNLEYLAVAETWENGKAVRETLNADLPLFVDHFRYFAGCIRAQEGSAADIDGNTVSYHFPEPLGVVGQIIPWNFPLLMAAWKIAPALAAGNCVVLKPAEQTPVSILVLLELIEDLLPPGILNVVNGFGAEAGQALATSKRIAKLAFTGSTEVGYHILKCAAESLIPSTVELGGKSPNLYFADVMDHEDEYLDKAVEGMLLAFFNQGEVCTCPSRVLIQESIYDRFIEKVLARAQTIKQGNPLDTATQVGAQASQEQFDKILSYLAIGKDEGAQVLLGGSLCQLEGEQSKGYYISPTIMKGHNKMRIFQEEIFGPVISVTTFKDEAEALAIANDTEYGLGAGVWTRDMNRAQRLGRGIQAGRVWINCYHAYPAHAAFGGYKKSGIGRETHKMMLNHYQNTKNLLVSYDINPLGFF

SEQ ID NO: 121287 - DNA, 1464 bp, Rhizobium leguminosarum bv. viciae 3841
  CDS (1)..(1464): transl_table=11
atgaaagcccagccgaaagcctcgcacttcatcgacggcgaatatgtcgaggataccgatggcaccgtcatcgagagcctctatccggcgactggcgaggtgatcgcccggctgcatgccgcaacgcccgcgatcgtcgaacgggcgatcgcagccgccaagcgcgcccagccggaatgggcggcgatgagcccgatggcgcgcggccgcatcctgaagcgggcagccgacatcatgcgcgagagaaaccgggtgctttccgaactcgagacgctcgacaccggcaagccaatccaggagactgttgtcgccgacccgacctcgggtgcggatgccttcgaattcttcggcggcatcgcgccggccggcctcaacggttcgcatatcccgctcggccaggatttcgcctataccaagcgggtgccgctcggcgtctgcgtcggtatcggcgcctggaactatccgcagcagatcgcctgctggaaagctgcgccggcgcttgtctgcggcaatgccatggtgttcaagccgtcggagaacacgccgctcggcgcattgaagatcgccgagatcctgcacgaggcgggactgccgaaggggctcttcaacgtgatccagggcgaccgcgacaccgggccgctgctggtcaaccatcccgacgtcgccaaggtgtcgctgaccggctcggtgccgaccggccgcagggtggcggccgctgccgccggcaacctcaagcacgtgacgatggagctcggcggcaagtcgccgcttgttgtcttcgacgatgccgatctcgattcggcggtcggcggcgcgatgctcggcaatttctattcgaccggccaggtctgctcgaacggcacgcgcgtcttcgtgcagaagacgatcaaggacgaattcctcaagcggctgaaggtccgcaccgaggcgatgctgatcggcgatccgatggacgaggcgacgcaggtggggccgatggtctcctgggcgcagcgcgaaaaggtgatctcctacatcgagaagggcaaggccgagggcgcgacgctgatcgccggtggcggcattccgaacaatgtctccggcgaaggctattacgtgcagccgacagtctttgccgatgtcaccgacgacatgaccatcgcccgcgaggagatcttcggccccgtgatgtgcgtgctcgatttcgacgccgaggacgaggtgatcgcgcgcgccaatgccagcgaattcggcctttccggcggcgtctttaccgccgacctcacccgcgcccaccgcgtcgtcgaccggctggaagcgggcacgctgtggatcaacacctacaatctctgcccggtggaaatccccttcggcggctcgaaacaatccggcttcggccgcgagaattcgctggccgcgctggagcattattccgagctgaagaccgtctatgtgggcatggggccggtggtggcgccttattga

SEQ ID NO: 121288 - protein, 487 aa, Rhizobium leguminosarum bv. viciae 3841
MKAQPKASHFIDGEYVEDTDGTVIESLYPATGEVIARLHAATPAIVERAIAAAKRAQPEWAAMSPMARGRILKRAADIMRERNRVLSELETLDTGKPIQETVVADPTSGADAFEFFGGIAPAGLNGSHIPLGQDFAYTKRVPLGVCVGIGAWNYPQQIACWKAAPALVCGNAMVFKPSENTPLGALKIAEILHEAGLPKGLFNVIQGDRDTGPLLVNHPDVAKVSLTGSVPTGRRVAAAAAGNLKHVTMELGGKSPLVVFDDADLDSAVGGAMLGNFYSTGQVCSNGTRVFVQKTIKDEFLKRLKVRTEAMLIGDPMDEATQVGPMVSWAQREKVISYIEKGKAEGATLIAGGGIPNNVSGEGYYVQPTVFADVTDDMTIAREEIFGPVMCVLDFDAEDEVIARANASEFGLSGGVFTADLTRAHRVVDRLEAGTLWINTYNLCPVEIPFGGSKQSGFGRENSLAALEHYSELKTVYVGMGPVVAPY

SEQ ID NO: 121289 - DNA, 1473 bp, Pseudomonas aeruginosa UCBPP-PA14
  CDS (1)..(1473): transl_table=11
atggcccgattcgaagaacagaagctctacattggcggtcgctacgtggaggccagcagtggcgccaccttcgagaccatcaacccggccaacggcgaagtgctcgccaaggtccagcgggcttccagggaagacgtcgagcgggccgtgcagagcgccgtcgaggggcagaaggtgtgggcggcgatgaccgccatgcagcgctcgcgcatcctccgtcgcgccgtcgacatcctccgcgagcgcaacgacgaactggccgccctggaaaccctggataccggcaagccgctggcggaaacccgctcggtggacatcgtcaccggcgccgacgtgctcgagtactacgccggcctggtcccggccatcgaaggcgagcagattcccctgcgcgaaaccagtttcgtctacacccgccgcgagccgctgggcgtggtcgccggcattggcgcctggaactacccggtgcagatcgccctgtggaaatccgccccggccctcgctgccggcaacgcgatgatcttcaagcccagcgaagtcaccccgctgaccaccctcaagctggccgagatctacaccgaggccggcgtgccggacggcgtgttcaacgtgctcaccggcagcggacgcgaagtcggccagtggctgaccgagcacccgctgatcgagaagatctccttcaccggcggcacctccaccggcaagaaagtcatggccagcgcttccagctcgtcgctgaaggaagtgaccatggagctgggcggcaagtccccgctgatcatcttccccgacgcagacctcgaccgcgccgccgacatcgccgtcatggccaacttcttcagctccggccaggtctgcaccaatggcacccgggtgttcatccaccgttcccagcaggcccgcttcgaagccaaggtactggagcgcgtgcagcgcatccgtctcggcgacccgcaggacgagaacaccaacttcggcccgctggtcagcttcccgcacatggaaagcgtgctcggctacatcgagtccggcaaggcgcagaaggctcgcctgctgtgcggcggcgagcgtgtgaccgatggagcgttcggcaatggcgcctacgtcgcgccgaccgtgttcaccgattgcagcgacgacatgaccatcgtccgcgaggaaatcttcggcccggtgatgagcatcctggtctatgacgacgaagacgaggcgatccgccgcgccaacgataccgagtacggcctcgccgccggcgtcgtgacccaggacctggcccgcgcccaccgcgccatccatcgcctggaagccggcatctgctggatcaatacctggggcgagtcgccggcggaaatgccggtcggcggttacaagcaatccggtgtcggtcgcgagaacggtctcaccaccctggctcattacactcgcatcaagtccgtgcaagtggagctgggcgactacgcctcggtgttctga

SEQ ID NO: 121290 - protein, 490 aa, Pseudomonas aeruginosa UCBPP-PA14
MARFEEQKLYIGGRYVEASSGATFETINPANGEVLAKVQRASREDVERAVQSAVEGQKVWAAMTAMQRSRILRRAVDILRERNDELAALETLDTGKPLAETRSVDIVTGADVLEYYAGLVPAIEGEQIPLRETSFVYTRREPLGVVAGIGAWNYPVQIALWKSAPALAAGNAMIFKPSEVTPLTTLKLAEIYTEAGVPDGVFNVLTGSGREVGQWLTEHPLIEKISFTGGTSTGKKVMASASSSSLKEVTMELGGKSPLIIFPDADLDRAADIAVMANFFSSGQVCTNGTRVFIHRSQQARFEAKVLERVQRIRLGDPQDENTNFGPLVSFPHMESVLGYIESGKAQKARLLCGGERVTDGAFGNGAYVAPTVFTDCSDDMTIVREEIFGPVMSILVYDDEDEAIRRANDTEYGLAAGVVTQDLARAHRAIHRLEAGICWINTWGESPAEMPVGGYKQSGVGRENGLTTLAHYTRIKSVQVELGDYASVF

SEQ ID NO: 121291 - DNA, 1491 bp, Mycobacterium avium 104
  CDS (1)..(1491): transl_table=11
atgaccgacaccgcgaccgagacgttggtccagttcgacctcctgattgggggcgaatcatcctccgctgcgtcgggattgacctacgacagcgttgatcccttcactggcaggccctgggcgcgcgtgcccaatgccgcggcggccgatgtggatcgcgccgtcggcgccgcccgtgccgcgctgaatggaccgtggggtgcgctcactgcgaccgcccgcggcaagctactgcaccgactcggtgagatcatcgcacgcgaagccgaccagctcgccgaactcgaggtgcgtgacggcggcaagctggttcgcgaaatggtcggccagatgcggtcgctgccggattactacttttactatggcgggctggcagacaagctgcagggcgacgtcataccggtggacaagcccaactacttcgtctacacccgccatgagcccgtcggcgtggtcggcgcgatcacgccctggaactcaccgctactgctgttgacctggaagttggccgccgggctggccgcgggttgcacgttcgtcgtcaagccaagcgatcacaccccgacgtcgacattggcgttcgcaaagctgttcgccgaggccggttttccgccgggcgtgatcaacgtcgtcaccggctggggaccggagacgggtgccgcgctggcgtcgcacccgggcgtcgacaaggtcgcgttcaccgggtcgacggccaccggcattcacgtcggcaaggccgcgatcgagaacatgacccggttctcactcgaactcggcggcaagtcggcgcaagtggtgttcgccgatgctgacctcgacgccgcggccaacggggtgatcgccggcgtcttcgccgccaccggccagacgtgtctggcgggctcgcgcctgctggtagaccgcagcgtcgcggacgcgttggtggagaagatcgtcgcgcgggcggcgaccatcaaactgggcgacccgaaggacccgacgaccgagatgggtccggtgtccaacttgccgcagtacgaaaaggtgctgtcgcacttcgcttccgcacgtgagcagggggcgacggtcgcctacggcggcgagcccgccagcgacctcggcgggttcttcgtcaagccaacggtgctgaccggcgtcgacccgtcgatgcgggccgtcgccgaggagatcttcggacccgtgctggcggtgatgaccttcgaagacgaagacgaagccgtcgccgcggccaacggcaccgagttcggactggccgcggctgtgtggaccaaggacgtccaccgcgcgcaccgggtggccgccaagctgcgggccggcacggtgtgggtcaacgcttatcgagtcgtcgcgcctcatgttccgttcggtggcatcggctacagcggcatcggacgggagaacggcatcgacgccgtgaaggacttcaccgagaccaaagcggtctgggtggagctgtccggagagactcgcgacccgttcacgctcggctga

SEQ ID NO: 121292 - protein, 496 aa, Mycobacterium avium 104
MTDTATETLVQFDLLIGGESSSAASGLTYDSVDPFTGRPWARVPNAAAADVDRAVGAARAALNGPWGALTATARGKLLHRLGEIIAREADQLAELEVRDGGKLVREMVGQMRSLPDYYFYYGGLADKLQGDVIPVDKPNYFVYTRHEPVGVVGAITPWNSPLLLLTWKLAAGLAAGCTFVVKPSDHTPTSTLAFAKLFAEAGFPPGVINVVTGWGPETGAALASHPGVDKVAFTGSTATGIHVGKAAIENMTRFSLELGGKSAQVVFADADLDAAANGVIAGVFAATGQTCLAGSRLLVDRSVADALVEKIVARAATIKLGDPKDPTTEMGPVSNLPQYEKVLSHFASAREQGATVAYGGEPASDLGGFFVKPTVLTGVDPSMRAVAEEIFGPVLAVMTFEDEDEAVAAANGTEFGLAAAVWTKDVHRAHRVAAKLRAGTVWVNAYRVVAPHVPFGGIGYSGIGRENGIDAVKDFTETKAVWVELSGETRDPFTLG

SEQ ID NO: 121293 - DNA, 1482 bp, Nocardioides sp. JS614
  CDS (1)..(1482): transl_table=11
atgacgaccacgacggacgcttcggacctggcggtctacgacctcttcgtggacggccgctggcagccctcgcggaccgggcgcacctcggaacggaccagtccgggcgacggccggctcgtcggccgctacgcccgcggggacggggcggacgtggacctcgccgtcgccgccgcccggcgcgccttcgacgagggcccctggccgaccatcgacgcgaccaagcgcgctgccatcatgcggcgcgccgcggacctgctgcgcgagcgcgccgacaccatcggccggcggatcgcgctcgagctgggcaagccgatctcgatggcccgcaacgaggtcgtgctgaccgccgaggtcttcgactactacgccgccctggccctcgaccagcgcggtgagctgatctcccagcacacggcctccgccctcggcatgatcgtgaaggagccggtcggcgtggtcggcatgatcacgccctggaacttcccgctgctgctgctctcctggaaggtggccccggccctcgccgccgggtgcacgatggtcgcgaagccggccagcctgaccccggggagcacgctggatctcgcctcggtgctggcggacgcgggtgtgcccgacggcgtctacaacgtcgtcaccggcggcggcgccgaggtcggcgacgcgctcgcccagcacccgggcatcgacaagatcgcgttcaccgggtccaccgaggtgggccagaccgtgatgcgcgcggcggtcggcacggtcaagaaggtgagcatggagctgggcggcaagtcgcccaacatcgtgttcgccgacgccgatctcaagcaggccgtgcgtggtgcctactggggcatcttcctcaacagcggccaggcctgccaggccggcagccgattgctcgtccagcgcgaggtccacgaggagttcgtctcctcgctggtggagatggcacggtccagcaaggtcggggatcccctcgacgagggcacccagatcgggcccatggtcgaccaggcgcagctcgacacggtgctcgactacatcgggaagggtcgggaggcgggggcggcgctggtcgccggcgggaaccggctcggcggagagctggccgacggcctctacgtcgagccgaccatcttcgacaacgccgcgcccgaccacgcgatctcccgcgaggagatcttcggaccggtcctggcagtcacgcccttcgacaccctcgacgaggcggtccgcctggccaacgactcgccgtacggcctcgcgtccgcggtgtggagcacgaacatcgacaccgcgatcaagacgtccaagcgcctgcgcgccggcacggtgtggatcaacgcctaccacgatgcgggactgccgttctgcatgccgatgggcggctacaagtcgagcgggatcgggcgtgagctcggccgcgaaggcctggcgcagtacttcgagaccaaggcgatccacctgcgactcgggcgctga

SEQ ID NO: 121294 - protein, 493 aa, Nocardioides sp. JS614
MTTTTDASDLAVYDLFVDGRWQPSRTGRTSERTSPGDGRLVGRYARGDGADVDLAVAAARRAFDEGPWPTIDATKRAAIMRRAADLLRERADTIGRRIALELGKPISMARNEVVLTAEVFDYYAALALDQRGELISQHTASALGMIVKEPVGVVGMITPWNFPLLLLSWKVAPALAAGCTMVAKPASLTPGSTLDLASVLADAGVPDGVYNVVTGGGAEVGDALAQHPGIDKIAFTGSTEVGQTVMRAAVGTVKKVSMELGGKSPNIVFADADLKQAVRGAYWGIFLNSGQACQAGSRLLVQREVHEEFVSSLVEMARSSKVGDPLDEGTQIGPMVDQAQLDTVLDYIGKGREAGAALVAGGNRLGGELADGLYVEPTIFDNAAPDHAISREEIFGPVLAVTPFDTLDEAVRLANDSPYGLASAVWSTNIDTAIKTSKRLRAGTVWINAYHDAGLPFCMPMGGYKSSGIGRELGREGLAQYFETKAIHLRLGR

SEQ ID NO: 121295 - DNA, 1503 bp, Azoarcus sp. BH72
  CDS (1)..(1503): transl_table=11
gtgaccctgtaccccgaccaactcatcagccccgccacccgcgccttcctcgcccgccccaaacgtatgctgatcggcgccgaatggtccgccgccgtcagcggtgaaaccctggcggtgctcgatccggcgaccgggcaggctttcgccacggtgccggctggcggtgccgccgacatcgaccgcgcggtggccgctgcccgccgtgccttcgaatccggcgagtggccgaagatgcggccggtggaccgcgagcgcctgctgctcaagttcgccgacctgatcgaagccaacgcccaggaactcgccgagatcgaggcgctggacaacggcaagccggtgatgatggcgcgccatgtggatgtggcgctggtggtcgatttcctgcgctacatggcgggctgggcgaccaagatcgaaggctcgacgatggacgtgtcggtgccgctgatgcgcgaccgcgaactcttcggctttacccgccgcgagccggtgggcgtggtcggcgccatcatcccgtggaatttcccgctgctgatggcggcgtggaaggttggcccggcgctgacctccggctgcaccatggtgttgaagccggccgaagaaacgccgctcaccgcgttgcgcttcgccgaactcgcgctggaagccggctacccggccggcgtgctcaacgtcgtcactggccacggcgacaccgccggcgcggcgctcgccagccacaagggcatcgagaaggtggccttcaccggctccaccgagatcggcaagctggtcggcaaggcggcgatcgacaacatgacgcgggtgtcgctggaactgggcggcaagagcccggtgatcgtgctcgacgatgccgatcccgcgatggccgcggccggcgcggcgcaggcgatcttcttcaatcagggccaggtgtgcaccgccggctcgcggctattcatccacaagagccgcttcgagaaggtggtggaggggctgtccggcattgcggcgtcgatgaagctcgggccgggcatcgatccctccacccagatcggtccgctggtgtcggcggtgcagcagcagcgcgtgctcggctacatcgagagcgggcttgcggaaggcgccagggcggccaccggcggcggagcgggcggcgaggccggctacttcgtcaagccgacggtactggtgaacgcccacgacgcgatgaaggtggtgcgcgaggagatcttcggcccggtggtggtggcgatgccctacgaggacctcgatgaagttgcccaccgcgccaacgacacgccctacggcctggcggcgagcatctggtccaacgacctgacccgggtgcaccggctgatccccaagatcaaggccggcaccgtgtgggtgaactgccacaacatcctcgacaacgcgatgcccttcggcggttacaagcagtccggtatcggccgcgagatgggccgggcggtgctcgacatgtacaccgaatccaagtcggtgatcatggcgctctaa

SEQ ID NO: 121296 - protein, 500 aa, Azoarcus sp. BH72
MTLYPDQLISPATRAFLARPKRMLIGAEWSAAVSGETLAVLDPATGQAFATVPAGGAADIDRAVAAARRAFESGEWPKMRPVDRERLLLKFADLIEANAQELAEIEALDNGKPVMMARHVDVALVVDFLRYMAGWATKIEGSTMDVSVPLMRDRELFGFTRREPVGVVGAIIPWNFPLLMAAWKVGPALTSGCTMVLKPAEETPLTALRFAELALEAGYPAGVLNVVTGHGDTAGAALASHKGIEKVAFTGSTEIGKLVGKAAIDNMTRVSLELGGKSPVIVLDDADPAMAAAGAAQAIFFNQGQVCTAGSRLFIHKSRFEKVVEGLSGIAASMKLGPGIDPSTQIGPLVSAVQQQRVLGYIESGLAEGARAATGGGAGGEAGYFVKPTVLVNAHDAMKVVREEIFGPVVVAMPYEDLDEVAHRANDTPYGLAASIWSNDLTRVHRLIPKIKAGTVWVNCHNILDNAMPFGGYKQSGIGREMGRAVLDMYTESKSVIMAL

SEQ ID NO: 121297 - DNA, 1482 bp, Actinobacillus pleuropneumoniae serovar 1 str. 4074
  CDS (1)..(1482): transl_table=11
atgaaagatcttaacgttttcgataaaaattacggcttattaatcaatggcaaatggactcaaggcagcggtaacgatttacttccttcttacaatccggcgaacggtgaagtattagcgcattttgtcgatgcaaccgatgcggatgtggatgcggcggtgaaagcggcacaagaagcattcaaatcttggcgtaaaacgacagtggcggaacgtgcggcgattttaaataaaattgccgatgtgattgatgaaaatagtgaattatttgcattgcaggaaaccttggacaacggtaaaccgattcgtgaaaccagagcggcggatattccgttggcttccgatcacttccgttatttcgccagtgcgattcgtgccggcgaaggcagcttaaatcaaatcaatcaagaagaactctcgctcgtattacgtgagccgatcggtgtagtcggacaaattattccgtggaacttcccgttcttaatggcggcgtggaaaatcgcaccggcattggcggcaggttgtaccgtggtcattcacccttccagcaccacttcgttaagtctgttatcttttgcgcaaaaaattaaccatttactcccgaaaggcgtattaaacgtaattaccggtaaaggttctaaatccggcgaatatatgttacatcacaaaggcttcaataaattagccttcaccggttcaactgaaatcggtcgtcatattgcgatttctgcggcggaattactcattccggcaaccttagaattagccgccaaatcggctaatattttctttgacgatatgccgtttgataaagcgttggaaggtgcgcaaaaaggtattttattcaaccaaggacaagtatgttgcgccggttctcgtatcttcgtacaagaagggatttacgacaaatttgtggcggcactcgccgaagaatttaagaaagtcaaagtcggtttaccatgggaagacgatacgcaaatgggtgcgcaggtcaatgcgggacaacttaacactatcttaaaatatgtgaaaatcggtgaagaagaaggctgtcgtattattaccggcggtagaaaagtgttatccgacaaccttgcttgcggcgaattcgtcgagccgaccttaatcgaatcgaaagataataacagccgtatcgctcaagaagaaatcttcggaccggtggcaaccgtgattaaattcaaaaccgaagaagacgttatccgtatggcaaacgattcggaatacggcttaggcggcggtgtttggaccaaagacatcaaccgcgcgttacgtgtttcacaagcaatcgaaaccggtcgtgtttgggtaaactgctataatattctaccggcgggcgcaccgttcggcggttataaatcttccggtatcggacgtgaaacccaccaaatgatgttggatgcttacacccaagtgaaaaatatctacatcagtacccgtgaagaacgtgaaggaatgtattaa

SEQ ID NO: 121298 - protein, 493 aa, Actinobacillus pleuropneumoniae serovar 1 str. 4074
MKDLNVFDKNYGLLINGKWTQGSGNDLLPSYNPANGEVLAHFVDATDADVDAAVKAAQEAFKSWRKTTVAERAAILNKIADVIDENSELFALQETLDNGKPIRETRAADIPLASDHFRYFASAIRAGEGSLNQINQEELSLVLREPIGVVGQIIPWNFPFLMAAWKIAPALAAGCTVVIHPSSTTSLSLLSFAQKINHLLPKGVLNVITGKGSKSGEYMLHHKGFNKLAFTGSTEIGRHIAISAAELLIPATLELAAKSANIFFDDMPFDKALEGAQKGILFNQGQVCCAGSRIFVQEGIYDKFVAALAEEFKKVKVGLPWEDDTQMGAQVNAGQLNTILKYVKIGEEEGCRIITGGRKVLSDNLACGEFVEPTLIESKDNNSRIAQEEIFGPVATVIKFKTEEDVIRMANDSEYGLGGGVWTKDINRALRVSQAIETGRVWVNCYNILPAGAPFGGYKSSGIGRETHQMMLDAYTQVKNIYISTREEREGMY

SEQ ID NO: 121299 - DNA, 1455 bp, Rubrivivax gelatinosus PM1
  CDS (1)..(1455): transl_table=11
atgaaacagttcctgaacttcatcgatggcgaattcgtcgccacggacaagaccttcgccaaccgtgcgccggtcgacaaccgggtgctgggcttggtgcacgaagccggccgcgccgaggtcgacgcggcggtggccgcggcgcgcggtgcactgaagggcgagtggggccgcatgcccgtcgccaagcgcgtcgagctgctgtatgcggtggccgacgagatcaaccgccgcttcgacgacttcctggcggccgagatcgccgacaccggcaagccgctgagcctggcctcgcacatcgacatcccgcgcggcgcggccaacttcaaggtgttcgccgacatcatcaagaacgtgccggccgagaccttcgagatggccacgcccgacggcggccaggcgctgaactacgcggtgcgcacgccggtaggtgtggtcggcgtggtttgcccgtggaacctgccgctgctgctgatgacctggaaggtcggcccggcgctggcctgcggcaacaccgtggtggtcaagccctccgaggagacgccggccactgccacgctgctcggcgaggtgatgcagaaggtgggcatgcccaagggcgtctacaacgtcgtgcacggcttcggcccggactcggccggagccttcctcacgcagcacccggacgtcgacgcgatcaccttcaccggcgagacgcgcaccggcgaggccatcatggccgcggcggccaagggcgtgcggccggtcagcttcgagctcggcggcaagaacgccggcatcgtgttcgccgatgccgacttcgacaaggcggtggcgggcatcacccgcagtgccttcgagaactgcggccaggtctgcctgggcaccgagcgtgtctacgtgcagcggccgatcttcgagaagttcgtgcaggcgctcaaggccaaggccgaggcgctgaagatcggcccgtcggaggagcccggcgtgggcctgggtccgctgatctcggccgagcaccgcgacaaggtgctgagctactaccgcaaggcggtggagcagggcgccaccgtcgtcaccggcggcggcgtgccgaagatgagtggcgcgctggccgaaggccattgggtgcagccgacgatctggaccggcctgcccgagtcggccgcagtgatccgcgaggagatcttcggcccgtgctgccacatcgcgccgttcgacaccgaagaggaggcgatcgcgctggccaatgccaccgactacggactcgccaccacggtgtggacccagaacctcggcaccgcgcaccgcgtggcccggcaagtcgaggtcggcatctgctggatcaacagctggttcctgcgcgaccttcgcaccgccttcggcggcgccaaggcctcgggcatcggccgcgaaggcggcgtgcactcgctcgagttctacaccgagctgcgcaatgtgtgcgtgaagctgtga

SEQ ID NO: 121300 - protein, 484 aa, Rubrivivax gelatinosus PM1
MKQFLNFIDGEFVATDKTFANRAPVDNRVLGLVHEAGRAEVDAAVAAARGALKGEWGRMPVAKRVELLYAVADEINRRFDDFLAAEIADTGKPLSLASHIDIPRGAANFKVFADIIKNVPAETFEMATPDGGQALNYAVRTPVGVVGVVCPWNLPLLLMTWKVGPALACGNTVVVKPSEETPATATLLGEVMQKVGMPKGVYNVVHGFGPDSAGAFLTQHPDVDAITFTGETRTGEAIMAAAAKGVRPVSFELGGKNAGIVFADADFDKAVAGITRSAFENCGQVCLGTERVYVQRPIFEKFVQALKAKAEALKIGPSEEPGVGLGPLISAEHRDKVLSYYRKAVEQGATVVTGGGVPKMSGALAEGHWVQPTIWTGLPESAAVIREEIFGPCCHIAPFDTEEEAIALANATDYGLATTVWTQNLGTAHRVARQVEVGICWINSWFLRDLRTAFGGAKASGIGREGGVHSLEFYTELRNVCVKL

SEQ ID NO: 121301 - DNA, 1485 bp, Bacillus anthracis str. A2012
  CDS (1)..(1485): transl_table=11
  misc_feature (919)..(919): k is g or t
atgttaacgacaaatattgagttgaaaccaaaagtgaaagcgtttttagatgaagagattaaaatgtttattaatggtgaatttgttccttctattagtggaaagacgtttgaaacatataatccagcaacagaagatgttcttgcagttgtttatgaagcacaagaagaggatattgatgtggcagtaaaagcggcgagatctgcatttgaatcaggaccttgggtggaaatgactactgctgaaagagcacatcttatttataaattagcagacttaattgaagagcatggagaagaattagcacagctagaagctttagataatggaaaaccatatcaagtagcacttgatgatgatattgcagcgactgtagaaaattatcgctattatgcaggatgggctacaaaaattatcgggcaaaccattccgatttcaaaagattacttaaattacacacgccatgaacctgttggcgttgtagggcaaattattccttggaattttccgctcgttatgtcttcttggaaaatgggagctgcgctagcaacaggttgtacgatcgtattaaaaccagcagaacaaactcctttatctttattatatacagcgaagctctttaaagaggctggttttccaaacggtgttgtaaactttgttccagggtttggtcctgaagcaggagctgcaattgtaaaccatcatgatattgataaagtagcctttacgggttcaacagttactggaaaatatattatgcgtcaatctgcagaaacaattaaacatgtaacgttagaactgggtggtaaatcaccaaatatcattttagaagacgctgatttagaagaagcgattaacggtgcattccaaggtattatgtataatcacggtcaaaattgtagtgctggatctcgcgtgktcgttcaccgaaaacattacgaaacagtcgtaaatgaacttgtgaaaatggcgaataacgtgaaacttggagcaggtatggagaaggacacggaaatgggtccactcgtatctaaaaagcaacaagagcgtgtgctacattacattgaacaaggaaaagctgaaggcgctactgttgctgctggtggtgaacgtgcatttgaaaaaggttattttgtacagccaacagtattcacagatgttacggacgatatgacgatagttaaggaagaaatcttcggtcctgttgtcgttgtacttccatttgattcgacggaagaagtaattgaaagagcaaatcgttcgtcatatggacttgcagcgggcgtatggacacaaaatattaaaacaggacatcaagttgccaataagttaaaggcaggaacagtatggattaatgattataacttagaaaatgcagcggcaccatttggtgggtttaaacaatctggtatcggccgtgagttaggttcatatgcacttgataattacacagaagtgaaaagtgtttgggtaaatataaagtaa

SEQ ID NO: 121302 - protein, 494 aa, Bacillus anthracis str. A2012
  misc_feature (307)..(307): The Xaa at location 307 stands for Phe, or Val.
MLTTNIELKPKVKAFLDEEIKMFINGEFVPSISGKTFETYNPATEDVLAVVYEAQEEDIDVAVKAARSAFESGPWVEMTTAERAHLIYKLADLIEEHGEELAQLEALDNGKPYQVALDDDIAATVENYRYYAGWATKIIGQTIPISKDYLNYTRHEPVGVVGQIIPWNFPLVMSSWKMGAALATGCTIVLKPAEQTPLSLLYTAKLFKEAGFPNGVVNFVPGFGPEAGAAIVNHHDIDKVAFTGSTVTGKYIMRQSAETIKHVTLELGGKSPNIILEDADLEEAINGAFQGIMYNHGQNCSAGSRVXVHRKHYETVVNELVKMANNVKLGAGMEKDTEMGPLVSKKQQERVLHYIEQGKAEGATVAAGGERAFEKGYFVQPTVFTDVTDDMTIVKEEIFGPVVVVLPFDSTEEVIERANRSSYGLAAGVWTQNIKTGHQVANKLKAGTVWINDYNLENAAAPFGGFKQSGIGRELGSYALDNYTEVKSVWVNIK

SEQ ID NO: 121303 - DNA, 1473 bp, Crocosphaera watsonii WH 8501; identical to SEQ ID NO: 37999
  CDS (1)..(1473): transl_table=11

SEQ ID NO: 121304 - protein, 490 aa, Crocosphaera watsonii WH 8501; identical to SEQ ID NO: 38000

SEQ ID NO: 121305 - DNA, 1452 bp, Sulfitobacter sp. EE-36
  CDS (1)..(1452): transl_table=11
atgcaaacgcaacccatcgccagccatttcatcaacggcgaatatgtcgaagataccaacggcaccccgatcgaggtgatctatccggccacgggcgaggtcatcgcgaccgtctatgccgccacgccggaaatcgtcgagaaagccatcaccgccgcgcgggacgcgcaggctgcttgggccgcgatgaccggcaccgaacggggccgtatcctgcgccgcgccgctgacatcatgcgcgaacgcaaccacgatctgtcgatcctcgagacgtatgacaccggcaaaccctatcaggaaacctctgtcgcagacgccaccagtggtgccgatgcgctggaatatttcggcggtctggcggcctcgttgacgggggagcatatccagctgggcgaagattgggtctatacccgccgcgaaccgctgggggtctgtgttggcatcggcgcatggaactatccgacgcagatcgcctgctggaaaggcgcaccggcgctggcctgtgggaactcgatcatcttcaaaccgtccgagacgacgccgctttgcgcgctgaaagtcgcggaaattctggtagaggcagggctgcccgccggtctttataacgttgtgcaaggcatgggcgaagtgggggcctcccttgtgaccgacccgcgcgtcgataaagtctcgctcaccggttctgtgcccacgggccgcaaggtctatgccgcggccgccgaaggcatcaagcacgtcacgatggaactgggcggcaagtcccccatgatcgtgttcgaggacgccgatatcgagaacgccatcagcggcgcgatcttgggcaatttctacagctcgggtcagatctgttcaaacggcactcgcgtcttcgtgcaccgcgacatcaaagaggcgttcctgaaacgcttggccgaacgtctggacaccgccgtgatcggcgacccgatggaccctgacaccagctttggcccgatggtatcgaaacgtcagatggagatcgcgcttggctatgtcgaaaagggcaaggccgaaggcgcgcgtctggtctatggcggggcagcaatcgaccgcgatggcttctatatgcagcccaccgtctttgccgatgtgaccgacgacatgtccatcgcccgcgaagagattttcgggcccgtcatgtcggtgctggattttgagaccgaggcagaggtgatggcccgcgccaatgcgaccgaattcggtctcgccgccggtgtgttcaccaaagacctgtcccgcgcgcaccgcgtcgcggcggggttcgaggcgggcacctgctatatcaacacctataacgacgcaccggtcgaagctccctttggcggcatgaaaaattcgggcgtggggcgcgagaactccaaggcggcgattgatcactatagccagttgaaaaccgtctatgtgcgcatgggcgatatggaggcgcctttctag

SEQ ID NO: 121306 - protein, 483 aa, Sulfitobacter sp. EE-36
MQTQPIASHFINGEYVEDTNGTPIEVIYPATGEVIATVYAATPEIVEKAITAARDAQAAWAAMTGTERGRILRRAADIMRERNHDLSILETYDTGKPYQETSVADATSGADALEYFGGLAASLTGEHIQLGEDWVYTRREPLGVCVGIGAWNYPTQIACWKGAPALACGNSIIFKPSETTPLCALKVAEILVEAGLPAGLYNVVQGMGEVGASLVTDPRVDKVSLTGSVPTGRKVYAAAAEGIKHVTMELGGKSPMIVFEDADIENAISGAILGNFYSSGQICSNGTRVFVHRDIKEAFLKRLAERLDTAVIGDPMDPDTSFGPMVSKRQMEIALGYVEKGKAEGARLVYGGAAIDRDGFYMQPTVFADVTDDMSIAREEIFGPVMSVLDFETEAEVMARANATEFGLAAGVFTKDLSRAHRVAAGFEAGTCYINTYNDAPVEAPFGGMKNSGVGRENSKAAIDHYSQLKTVYVRMGDMEAPF

SEQ ID NO: 121307 - DNA, 1488 bp, Roseovarius nubinhibens ISM
  CDS (1)..(1488): transl_table=11
atgacggattggcaggcgcgcgtggcaaagctctatgacgggggttttcgccccatggtgattggtggcaagtggtgtgcggcgcaatcgggtgaggtgatggaggcgcgcaacccggccgatggcgggcttttggccacggtgccgaagggcggggccgaggacattgacgcggccgtcgcggcggcgcgggcggcgttcgaggggccctgggccaagttcacgccgttcgagcggcaggcgctgttgctgcgcattgccgagcggttcgaggcggaatgggagacgctctgcctgtcggatacgctcgatatggggatgccgattcagcgcacgctggccaacagccgtcgggttctcggcatgctgcgctattacgcggggcaggcggtggccatccatggcgagaccattcccaattctttccctggcgagatctattcctcgaccgtgcgcgagccggtgggcgtggtgggggcgatcattccgtggaacgcgccgattgcggggtcgatctggaagattgggccggcgctggccaccgggtgcaccgtggttctcaaaccctcggaagaggcgtcgctgacggtgctgttgatcgccaagctgatgcaggaggcggggcttcctgatggggtgctcaacatcgtgacgggtcatgggtccgatgccggggcggcgcttgcggcgcatcccggggtcgacaagatcgtctttaccggctcgaccgcgacggggcaggccatcgcgcgggcggcgaccggcaatctcaagcgggtggcgcttgagctcggcgggaaatccccggtgatcgtctgccgcgatgcggatatcgacaaggcggtgccggtggcggccatgtccgttttcgccaattcggggcagatctgtattgcggggtcgcggctctttgtggcgcgggaaattcatgacgagttcgtgcgccgggtggcggagtatgccgccgggctgcgtctcggccatggtatccacgaagagaccgagatcggcccgatcatttcggcgcggcaggccgagcggattggcggctatctcgaggccgggcggcgcgagggcgcggaggtgatgaccggcggcgcggcgcccgagggggcggcgttcgagaacgggcatttctacaagccgacggtgtttgccggtgtcaccgacgagatgaccatcgcgcgcgaagagattttcgggccggtgatttcggcgctgccgtttgacacgctggacgaggtggtcgagcgcgccaatgcgacgccctatgggctcgccgctggggtgttttcgacccatcttggcacggcgcatcaactggcgcatcggatcaaggcggggtcggtctgggtcaatatgtaccatgcgattgacccggcggtgccttttggcggggtcaagatgtcgggctatggccgcgaaggcgggcgcgaacatgtcgaggaatatctcgacaccaaggcgatctggatcaatgccgagtga

SEQ ID NO: 121308 - protein, 495 aa, Roseovarius nubinhibens ISM
MTDWQARVAKLYDGGFRPMVIGGKWCAAQSGEVMEARNPADGGLLATVPKGGAEDIDAAVAAARAAFEGPWAKFTPFERQALLLRIAERFEAEWETLCLSDTLDMGMPIQRTLANSRRVLGMLRYYAGQAVAIHGETIPNSFPGEIYSSTVREPVGVVGAIIPWNAPIAGSIWKIGPALATGCTVVLKPSEEASLTVLLIAKLMQEAGLPDGVLNIVTGHGSDAGAALAAHPGVDKIVFTGSTATGQAIARAATGNLKRVALELGGKSPVIVCRDADIDKAVPVAAMSVFANSGQICIAGSRLFVAREIHDEFVRRVAEYAAGLRLGHGIHEETEIGPIISARQAERIGGYLEAGRREGAEVMTGGAAPEGAAFENGHFYKPTVFAGVTDEMTIAREEIFGPVISALPFDTLDEVVERANATPYGLAAGVFSTHLGTAHQLAHRIKAGSVWVNMYHAIDPAVPFGGVKMSGYGREGGREHVEEYLDTKAIWINAE

SEQ ID NO: 121309 - DNA, 1458 bp, Oceanicola batsensis HTCC2597
  CDS (1)..(1458): transl_table=11
atgacctacgacacgcagcccgaggccagccaccatatcggcggccgctacgtggaggacacggccggcgccgcgattccggtgatctacccggccaccggggaccggatcgcgaccgtccatgccgcaacggcgtctgtcgtggaccaggcgctggccgcggccgaggcggcgcagccggactgggccgccctcagcccgcgcgagcgcggtcgcatcctcacccgcgccgcacagatcatgcgcgcgcggaaccacgagctttcggtgctggagacgcgcgacaccggcaagcccctgcaggaaacgctcgtggccgacgccaccagcggggccgacgcgctggaatatttcggcggactggccggaaccctgaccggagagcacatccccctcggtcgggactgggtctacacgatccgcgaggcgcttggcgtctgcgtcgggatcggggcctggaattatcccacgcagatcgcctgctggaaggccgcgcccgcgctggcctgcggcaacaccatggtcttcaaaccgtccgagaccacgccgctctgcgcgctgaaggtggccgagatcctgaccgaggccggcgcgcctccgggtgtgttcaacgtggtgcagggcctgggcgagaccggggcgcggctggtcaccgatccgcgcgtcgccaaggtgtcgctgaccggctcggcccccacggggcgcaaggtctatgccgccgcggccgcggacatgaagcacgtgacgatggaactgggcggcaagtccccgatgatcgtcttcgacgacgccgatatcgagaacgcggtcggcggggcgatcctggggaacttctactcctcgggccagatctgttcgaacggcacgcgggtcttcgtgcacggcgccatcatggagcggttcctcgaccggctgactgcccggctgacgacggcggtgatcggcgaccccctggacgaggcgacctccttcggcccgatggtgagcgaggcgcagatgaacatcgtgctgggctatatcgacaagggccggaccgaaggcgcgcggctggtcaccggcggcaggcgcgtggaccgcgaggggttctacctcgaacccacggtcttcgccgacgtgaccgacgcgatgaccatcgcgcgcgaggagatcttcggccccgtcatgtcggtgctggacttcgacgacgaggacgaggtgatcgcccgcgccaatgccacggaatacggcctctcggccggggtcttcacccgcgacctcgcacgcgcacaccgggtgaccgggaagctgcgggccgggacctgtttcatcaactcctacaacgacgcgccggtcgaggcgcccttcggcggggtcaaggcgtcgggcgtggggcgcgagaacgcgcaggcggcggtcgaacactacagccagctcaaatccgtctacgtgcgcatgggcgacgtggaggcgcccttctga

SEQ ID NO: 121310 - protein, 485 aa, Oceanicola batsensis HTCC2597
MTYDTQPEASHHIGGRYVEDTAGAAIPVIYPATGDRIATVHAATASVVDQALAAAEAAQPDWAALSPRERGRILTRAAQIMRARNHELSVLETRDTGKPLQETLVADATSGADALEYFGGLAGTLTGEHIPLGRDWVYTIREALGVCVGIGAWNYPTQIACWKAAPALACGNTMVFKPSETTPLCALKVAEILTEAGAPPGVFNVVQGLGETGARLVTDPRVAKVSLTGSAPTGRKVYAAAAADMKHVTMELGGKSPMIVFDDADIENAVGGAILGNFYSSGQICSNGTRVFVHGAIMERFLDRLTARLTTAVIGDPLDEATSFGPMVSEAQMNIVLGYIDKGRTEGARLVTGGRRVDREGFYLEPTVFADVTDAMTIAREEIFGPVMSVLDFDDEDEVIARANATEYGLSAGVFTRDLARAHRVTGKLRAGTCFINSYNDAPVEAPFGGVKASGVGRENAQAAVEHYSQLKSVYVRMGDVEAPF

SEQ ID NO: 121311 - DNA, 1461 bp, Photobacterium sp. SKA34
  CDS (1)..(1461): transl_table=11
atggatatgaaatcactatatatagatggtaactatgttgctgcttcttctgatattcaatttacaacgtttaatccagctaatggtcagccgatagcaactattgggcaagcctctcaagctgatcttgagttagccattagtgcagctaaaaaaggctttgctatatggtcggctatgacggcaactgagcgtagccgtattttattacgtgctgttacgttactgcgagaacgcaacgatgaattagcggtattggaagtcacagataccggtaaaccgttacaagaagcgatagcggttgatatagaaaccggtgctgatgttattgagtactttgcagggttagcacctgggcttcaaggtgaacagcaacctttaagtgaaaatcagttcttttatacgcgtcgagaaccattgggcatttgtgctggtattggtgcgtggaattatccgatccaaattgcgatgtggaaatcagcgcctgcacttgctgcgggtaacgccatgattttcaaaccatcggaagaaacaccgttaacagttctaaagcttgctgagatttttactgaagcaggtctgcctgatggcgtttttaacgttgtacaaggtgattaccgagtggggcagatgctaacggcacaccctgagatcgctaaagtttcatttacaggtgaaactggtacaggtaaagcggtaatggctgatagtgctgataccttaaagtcggtcacgatggaattaggcggtaaatcgccaatgatcatttttgatgatgctaatgtcgatcatgctgtttcagcggcaatggtggctaacttctatacccaaggtgaagtatgtacacatggcacacgtgtttatgttcatgagactatttacgacacgtttatagagcaacttaagcgtcgaactgagttattaatcgttggtgatccgatgaatatggagacccaaattggcgcattgatttcaacatcacacctatcaaaagtgttatcagccatcgatgcagctaaacaaagtggcgcaatcttgctgactggtggataccaatatactgataatggtttagcacaaggtaatttcgttcaacctactgtttttattgattgcgatgaatctatgtctcacgttaaaaatgaaatttttgggccagtgatgtcggtaattaagtttagcgatgaaaccgatgttatcgctcgcgctaataatactcactatggtttagctgcgggtgtgtttacccaaaacttagcgagagcccaccgcgttatccatcaattacaagcagggatctgttgggttaatacatggggagattctcccgcgcaaatgcctgttggtggttataagcaatcagggattggacgcgaaaacggaatagaaaccttacaacattatacccaaaccaaaagtatacttattgagttgggcgattaccaaagtccttatgcgtaa

SEQ ID NO: 121312 - protein, 486 aa, Photobacterium sp. SKA34
MDMKSLYIDGNYVAASSDIQFTTFNPANGQPIATIGQASQADLELAISAAKKGFAIWSAMTATERSRILLRAVTLLRERNDELAVLEVTDTGKPLQEAIAVDIETGADVIEYFAGLAPGLQGEQQPLSENQFFYTRREPLGICAGIGAWNYPIQIAMWKSAPALAAGNAMIFKPSEETPLTVLKLAEIFTEAGLPDGVFNVVQGDYRVGQMLTAHPEIAKVSFTGETGTGKAVMADSADTLKSVTMELGGKSPMIIFDDANVDHAVSAAMVANFYTQGEVCTHGTRVYVHETIYDTFIEQLKRRTELLIVGDPMNMETQIGALISTSHLSKVLSAIDAAKQSGAILLTGGYQYTDNGLAQGNFVQPTVFIDCDESMSHVKNEIFGPVMSVIKFSDETDVIARANNTHYGLAAGVFTQNLARAHRVIHQLQAGICWVNTWGDSPAQMPVGGYKQSGIGRENGIETLQHYTQTKSILIELGDYQSPYA

SEQ ID NO: 121313 - DNA, 1479 bp, Flavobacteria bacterium BBFL7
  CDS (1)..(1479): transl_table=11
atgacgaatccgcccaaaccaaaccaaaagaacatggacataaaaaactttatcaataacaatgagcacatcccacttagtggattgtggctcgataattatgaaccagcaagcggtctcgtttatggacagattcctaattctaacgaagatgatgtcgagaaagcttatcaagcggcaaacgctgcttttaaagattggtccactaccagtattgatgaacgttccagaatcatgttgcgcatcgcagaccttattgaagaaaatctagaagaacttgccgcagcagaatctcgtgataatggaaaaccattatggcttgctaccgctgtagatataccgcgcgcgtcctctaacttccgtttttatggaaacgcgattactcaatattctagtgatgctcatgaaacaacaggtaaaaacacgatgaattttactatgcgcaaacctataggcgtagtaggatgtatctcgccttggaatttgcctctgtatttgttcagctggaaaattgctccagcgattgcagcaggaaattgtgtcgtggcaaaacctagcgaagtcactccagcaaccgcatttttactcggagaaatcgttaaaaaagcaggattaccggctggtgtcctaaatatagtgcacggtttaggtggcagttgtggtcaggcgattgtagctcatccaggcattaaagctattagttttacgggtggtacgaccactggcgagcacatcgctagaacggcagcgcctatgtttaaaaaattatcgctggaactaggtggcaagaatcctaacatcatttttgccgactgtaattatgataaaatgctcaccactaccttacgatcttcctttgcaaatcaagggcagatctgtttgtgtggtagtagaatccttgtagagcaatcactttatgagaaatttaaaacagactttgtcgctcgcgtgcaacaactcaaggtaggtcatcctaatcagtcagatactaaagtaggtgctgtggtaagtgctgctcatagagataaaatattagattatatcgctttcgcgaaagcgaatcccaaagaatacaccatactttctggtggaaattcggttcttattgaaggtcacgaaggcggctattatctagaacctacagtcatagaagtccaatccaatgattgtaaattgaaccaagaagaaatcttcgggccagtagtaaccatcataccgtttaaagatgaagcacaagcgctagaactcgcaaatggaacacgctacggattaagcgctacgttatggaccagcgatttgagccgtaccatgagaatgagcaacgagctagaagcaggaatagtttgggtaaacacctggttaaatcgtgatttgcgcacaccttttggtggtgtaaaagacagcggtgtaggacgtgaaggcggatttgaagccttgaatttctttacagagcctaagaatgtttgtattgagtattag

SEQ ID NO: 121314 - protein, 492 aa, Flavobacteria bacterium BBFL7
MTNPPKPNQKNMDIKNFINNNEHIPLSGLWLDNYEPASGLVYGQIPNSNEDDVEKAYQAANAAFKDWSTTSIDERSRIMLRIADLIEENLEELAAAESRDNGKPLWLATAVDIPRASSNFRFYGNAITQYSSDAHETTGKNTMNFTMRKPIGVVGCISPWNLPLYLFSWKIAPAIAAGNCVVAKPSEVTPATAFLLGEIVKKAGLPAGVLNIVHGLGGSCGQAIVAHPGIKAISFTGGTTTGEHIARTAAPMFKKLSLELGGKNPNIIFADCNYDKMLTTTLRSSFANQGQICLCGSRILVEQSLYEKFKTDFVARVQQLKVGHPNQSDTKVGAVVSAAHRDKILDYIAFAKANPKEYTILSGGNSVLIEGHEGGYYLEPTVIEVQSNDCKLNQEEIFGPVVTIIPFKDEAQALELANGTRYGLSATLWTSDLSRTMRMSNELEAGIVWVNTWLNRDLRTPFGGVKDSGVGREGGFEALNFFTEPKNVCIEY

SEQ ID NO: 121315 - DNA, 1458 bp, marine gamma proteobacterium HTCC2207
  CDS (1)..(1458): transl_table=11
atggaattcaagcattttatcaatggtcaattcgtggcatcgagtaacggcgctgcgttcgaaaaccgtgcacccgttaacaaccgtttgatcggcatggtctgtgaggcctcttccgaggatgtcgacgctgcagtgatcgccgctaaagccgctctaaaaggaccatgggggaaaatgactcaagcccaacgtaccgggctactgaacaaagtggcggcacgcatcaatgagcgtttcgaagagttcctcgccgctgagtgccttgataccggcaagccacgttccatggcatcacatatcgatattccccgtggcgcagccaatttcactgcgttctctgaaaccctagttaaccaccctacagagtgcttcaaactcgacacccccgacggcgctggagcacttaactacggtcatcgcactcccaagggtgtcgtcgctgtgattagcccttggaatctaccgctgttgctgatgactttcaaagtgggccctgcacttgcctgcggtaatacggtggtggtgaaaccgtcagaagagacacctgccactgccactctattgggcgaagtaatgaacgagtgcggtgtaccctccggagtttacaatgtggtgcacggctttgggcccaattctgcaggtgagttcttaaccactcatccgcttgtcaatgccatcacgtttaccggtgagactcgtaccggtgaagtgatcatgcgcgccgcgtcagtgggcttacgcaacatttccatggagtgcggtggcaaaaatcccgcattagttttcgccgactgcgatctcgacaaggccattgagggaaccatgcgctccgcctttgtcaactgcggccaagtctgtctcggcacagagcgcgtttacgtcgaacgccccatttatgacgaatttgtcgcacgtttaaaagccggtgtagaacagcttaaactcggccggccagaagatcaggaggccaacttcggcccgctggtgagcttagaacatcgcgacaaagtactctcgtactacaaactcgccgaagatgaaggcgccaccgtgatcattggcggtggagtcccagatatgggcccagaattaaatgccggcgcctggattgaaccgacaatctggactggtttagacgataacgcccgcgtaatccgcgaagagatatttggtccatgctgccatattcggccctttgatagtgaggaagaggtgatcgagttggccaatgatacggtttacggtctctgcgcctcggtgtggactgaaaatagcgcccgcgccagtcgcgttcccgaggcgctggaggtcggactagtttgggtcaatagctggttcctgcgagatctgcgcaccgcatttggtggtgcaaagcaatcgggtatcggccgcgaaggcggcgtgcatggtttggagttctactccgagctgaaaaacgtcagtatcaaactctaa

SEQ ID NO: 121316 - protein, 485 aa, marine gamma proteobacterium HTCC2207
MEFKHFINGQFVASSNGAAFENRAPVNNRLIGMVCEASSEDVDAAVIAAKAALKGPWGKMTQAQRTGLLNKVAARINERFEEFLAAECLDTGKPRSMASHIDIPRGAANFTAFSETLVNHPTECFKLDTPDGAGALNYGHRTPKGVVAVISPWNLPLLLMTFKVGPALACGNTVVVKPSEETPATATLLGEVMNECGVPSGVYNVVHGFGPNSAGEFLTTHPLVNAITFTGETRTGEVIMRAASVGLRNISMECGGKNPALVFADCDLDKAIEGTMRSAFVNCGQVCLGTERVYVERPIYDEFVARLKAGVEQLKLGRPEDQEANFGPLVSLEHRDKVLSYYKLAEDEGATVIIGGGVPDMGPELNAGAWIEPTIWTGLDDNARVIREEIFGPCCHIRPFDSEEEVIELANDTVYGLCASVWTENSARASRVPEALEVGLVWVNSWFLRDLRTAFGGAKQSGIGREGGVHGLEFYSELKNVSIKL

SEQ ID NO: 121317 - DNA, 1464 bp, Oceanobacter sp. RED65
  CDS (1)..(1464): transl_table=11
atgagtcaacctgtctaccagtcttttgtgaatggcgagtttcttggcaatgccaatggcgaaacttttgatgtgatttacccggcaacgggtgaagtgatctataaagtagagcaagcggatgacaatgtgatggcgaaggccgttgagtccgccatcgcaggtcaaaaacaatgggctgccatgacaggtatcgaacgcagtcgaattttattgaaagcggtgcagttgttgcgtgagcgcaatgacgagctagctgaatttgaagttaaagatactggtaagccttggcaggaagcggtcgaggtggatgtcgttacaggcgcagatgctattgagttttttgccggtctagccccaagcattgaaggcaatcaacaagatttaggcggagacttttattacacccgtcgcgaaccattgggtgtatgcgcaggtattggtgcatggaactacccaatacaaatcgcttgctggaaatcggcaccggcactcgcggctggcaatagcatgatctttaaaccatccgaagaaacaccaatgggggcgattcagctcgctaaaatttttatagaagctggtgtgcctaaaggtgtgtttaatgtcattcaaggggattatcgagttggtcagatgctcacctcccatcctgatatcgccaaggtgagcttcacaggtgaagtgggaacgggcaaaaaagtcatggcggattctgcttcgagcttgaaagaagtcactatggaattaggtggcaagtcgccgctgattgtttttgatgatgctgatattgagcaagcggtaagcgcagccatgctgggtaacttttatacccaaggtgaaatatgtacgaacggaacacgtgtttttgttcaccgcagtattctgaatgagtttctagagcaactagccgaacgcacgaaaaacaatattgttgctggcgatccaatgaatccagaaacaaactttggcgcactgatttcagaaaaacatcacaagttggtattggattacattgaaaaaggcaaggccgaaaatgcaacgttactagccggtggtgaggccatgaagatcgaaggtttcgaaaatggttattttgttgcgccaaccatcttcaccgactgtaccgacgacatgaccatcgtaaaagaagaaatctttggtccagtcatgtcggtattggtatttgatgatgaggaggaagtaatcaaacgtgctaacgatactcatctcgggttggctgcaggtgtctttactcagaatattcaacgagcacaccgtgtgattcaccaaattgaagccggtatttgctggatcaatgcttatggtgcgtcacctgctgagatgcctgttggtggttataagcaatccggtatcggccgagaaaacggcaccattacgctgaatcattatacccaagtgaaatcggtttatatgggtatgaataaaattgaaagcccgttctag

SEQ ID NO: 121318 - protein, 487 aa, Oceanobacter sp. RED65
MSQPVYQSFVNGEFLGNANGETFDVIYPATGEVIYKVEQADDNVMAKAVESAIAGQKQWAAMTGIERSRILLKAVQLLRERNDELAEFEVKDTGKPWQEAVEVDVVTGADAIEFFAGLAPSIEGNQQDLGGDFYYTRREPLGVCAGIGAWNYPIQIACWKSAPALAAGNSMIFKPSEETPMGAIQLAKIFIEAGVPKGVFNVIQGDYRVGQMLTSHPDIAKVSFTGEVGTGKKVMADSASSLKEVTMELGGKSPLIVFDDADIEQAVSAAMLGNFYTQGEICTNGTRVFVHRSILNEFLEQLAERTKNNIVAGDPMNPETNFGALISEKHHKLVLDYIEKGKAENATLLAGGEAMKIEGFENGYFVAPTIFTDCTDDMTIVKEEIFGPVMSVLVFDDEEEVIKRANDTHLGLAAGVFTQNIQRAHRVIHQIEAGICWINAYGASPAEMPVGGYKQSGIGRENGTITLNHYTQVKSVYMGMNKIESPF

SEQ ID NO: 121319 - DNA, 1476 bp, Alteromonadales bacterium TW-7
  CDS (1)..(1476): transl_table=11
atggagcctagcgtgagcacaccagtctatcaaaattttattaatggccattttcttgctaatcaaagcggtgaaacttttgatgtaactaatcctgcaacaggtgaagttatttacagtgttgaagttgccgatgaatttgttcaaagcgcagccattgaaagtgcaaagcaaggttttgcacagtggtctaaaatgacacctattgaacgcagccgtattttattaaacgctgtggcaatacttcgcgaacgtaacgatgagcttgccctaatagaagtgcttgataccggtaagccaatgcaagaagcaaactgtgttgatatagaaaccggcgccgatgtaattgaatactttgcaggcctagcacctgcgcaagttggccaacaacaaatggtaggcgaagacttttactatacacgtaaagagccattaggaatttgtgccggtattggtgcatggaactacccgctacaaatagcatgttggaaatcaggcccagcccttgctgctggcaacgcatttatatttaaaccatctgaagaaacaccactaggtgctattaaacttgccgaaatttttgtagaagcgggcgtacctgctggcgtatttaacgttgtacaaggtgcgggtgatgtagggcaatggttaactgcacatagtgagattgacaaagtgtcgttcactggcgaagtaggcacaggtaaaaaagtagtcgcaagtgcttcaggcacattaaaagacgtaaccatggagcttggcggaaagtccccgcttgttgtgtttgatgatgcaaatatagagcaagcagtaagcgcagccatgttaggtaacttttatacccaaggcgaaatttgcactaactgtacacgtatttacgttcataaaaatatataccagcaatttattgatgagcttaaaacgcgaacagagaaaaatattattgcgggcgacccgcaagatttaaacactaactttggtgcgcttatctctaaaaagcatcaagacttagtaatgagttatgtcaataaagggattgaagaaggcgcaacactgcttaccggtgggtcaacgctttcacctgaatcagcgcctaatggttactttgttgcacctaccgtgttcattgattgcaacgatgaaatgacgattgttaaagaagaaatattcggcccagtaatgagcgtactcgtttttgaagacgaagacgatgtaattgcacgggctaatggtactcatctaggcctagctgcaggcgtgtttactagcgatattaaacgcgcacaccgtgttattcatcaattagaagcgggtatttgttggattaatgcctatggtaactcacctgctgaaatgcctgttggtggttataagcaatctggtattggccgtgaaaatggcatagaaacacttgatcattacacgcaaaccaagtctatttatgttggtatggccgacatagaaagcccattttaa

SEQ ID NO: 121320 - protein, 491 aa, Alteromonadales bacterium TW-7
MEPSVSTPVYQNFINGHFLANQSGETFDVTNPATGEVIYSVEVADEFVQSAAIESAKQGFAQWSKMTPIERSRILLNAVAILRERNDELALIEVLDTGKPMQEANCVDIETGADVIEYFAGLAPAQVGQQQMVGEDFYYTRKEPLGICAGIGAWNYPLQIACWKSGPALAAGNAFIFKPSEETPLGAIKLAEIFVEAGVPAGVFNVVQGAGDVGQWLTAHSEIDKVSFTGEVGTGKKVVASASGTLKDVTMELGGKSPLVVFDDANIEQAVSAAMLGNFYTQGEICTNCTRIYVHKNIYQQFIDELKTRTEKNIIAGDPQDLNTNFGALISKKHQDLVMSYVNKGIEEGATLLTGGSTLSPESAPNGYFVAPTVFIDCNDEMTIVKEEIFGPVMSVLVFEDEDDVIARANGTHLGLAAGVFTSDIKRAHRVIHQLEAGICWINAYGNSPAEMPVGGYKQSGIGRENGIETLDHYTQTKSIYVGMADIESPF

SEQ ID NO: 121321 - DNA, 1473 bp, Pseudomonas putida GB-1
  CDS (1)..(1473): transl_table=11
atggcccgtttcggaacgcaaaaactctacattgatggcgcttacgtcgacgctggcagcgatgccactttcgaagccatcaacccggccactggcgaagtcctcgcccacgtacagcgtgccaccgaggccgacgtcgagaaggccgtggaaagcgccgagcgtggccagaaggtctgggctgcgatgaccgccatgcagcgctcgcgcatcctgcgccgcgctgtcgacatcctgcgcgagcgcaacgatgaactggctcagctggaaaccctggacaccggcaagtcgtactccgaaacccgctacgtcgacatcgttaccggcgccgatgtgctggaatactacgcaggcctggtaccggccatcgaaggcgagcagatcccgctgcgcgaatcgtcctttgtctacacccgccgcgagccgctgggcgtgaccgtgggtatcggcgcctggaactacccgatccagatcgccctgtggaaatccgccccggccctggccgctggcaacgcgatgatcttcaagccgtcggaagtcacctcgctgaccaccctgaaactggccgagatctacaccgaagccggcctgccgaatggcgtgttcaacgtgctgaccggcagtggccgcgaagtcggtacctggctgaccgagcacccacgcatcgaaaaagtgtccttcaccggcggcaccaccaccggcaagaaagtcatggccagcgcctccagctcctcgctgaaggaagtcaccatggaactgggcggcaaatcgccactgatcatctgcgccgacgccgacctggacaaggccgccgacatcgccatgatggccaacttctacagctcgggccaggtgtgcaccaacggcacccgcgtgttcatcccagctgaaatgaaggctgccttcgaagccaagatcgccgagcgcgttgcccgcattcgcgttggcaacccggaagacgaaaacaccaacttcggcccgctggtcagcttcgcgcacatggaaaacgtgctgagctacatcgccaagggcaaagaagaaggtgcccgcgtcctgtgcggcggcgagcgtctgaccgaaggcgaattcgccaagggcgccttcgtggccccgaccgtgttcaccgattgcagcgacgacatgaccatcgtcaaggaagagatcttcggcccggtcatgagcattctgtcctacgagaccgaagaagaagtgatccgtcgcgccaacgacaccgagtacggcctggctgccggtgtgtgcaccaacgacatcacccgcgcccaccgcatcatccacaagctcgaagccggtatctgctggatcaacgcctggggtgaatcgccggccgaaatgccggtcggtggctacaagcagtcgggcgttggccgtgagaacggcgtcagctcgctggctcaatacactcgcatcaagtcggtccaggttgagctgggcggctacaactcggttttctaa

SEQ ID NO: 121322 - protein, 490 aa, Pseudomonas putida GB-1
MARFGTQKLYIDGAYVDAGSDATFEAINPATGEVLAHVQRATEADVEKAVESAERGQKVWAAMTAMQRSRILRRAVDILRERNDELAQLETLDTGKSYSETRYVDIVTGADVLEYYAGLVPAIEGEQIPLRESSFVYTRREPLGVTVGIGAWNYPIQIALWKSAPALAAGNAMIFKPSEVTSLTTLKLAEIYTEAGLPNGVFNVLTGSGREVGTWLTEHPRIEKVSFTGGTTTGKKVMASASSSSLKEVTMELGGKSPLIICADADLDKAADIAMMANFYSSGQVCTNGTRVFIPAEMKAAFEAKIAERVARIRVGNPEDENTNFGPLVSFAHMENVLSYIAKGKEEGARVLCGGERLTEGEFAKGAFVAPTVFTDCSDDMTIVKEEIFGPVMSILSYETEEEVIRRANDTEYGLAAGVCTNDITRAHRIIHKLEAGICWINAWGESPAEMPVGGYKQSGVGRENGVSSLAQYTRIKSVQVELGGYNSVF

SEQ ID NO: 121323 - DNA, 1491 bp, Pseudomonas putida GB-1; identical to SEQ ID NO: 38015
  CDS (1)..(1491): transl_table=11

SEQ ID NO: 121324 - protein, 496 aa, Pseudomonas putida GB-1; identical to SEQ ID NO: 38016

SEQ ID NO: 121325 - DNA, 1473 bp, Dermatophagoides farinae; identical to SEQ ID NO: 38017
  CDS (1)..(1473)

SEQ ID NO: 121326 - protein, 490 aa, Dermatophagoides farinae; identical to SEQ ID NO: 38018

SEQ ID NO: 121327 - DNA, 1509 bp, Aspergillus niger; identical to SEQ ID NO: 38019
  CDS (1)..(1509)

SEQ ID NO: 121328 - protein, 502 aa, Aspergillus niger; identical to SEQ ID NO: 38020

SEQ ID NO: 121329 - DNA, 1497 bp, Aspergillus niger
  CDS (1)..(1497)
atgtccctcccatttcctacgcgccaactctactatgatggcaaggtccagcctgccacttccggcaagacttttcaaaccatcaacccttccaacgataccccgttggctgatatccaagtcgccgctcacgccgatgtagactcggccatcgccgctgccgaccgggccttcccttcctggtctcagactcctgctatcgctcgtgcccgcatcctccagaaagctgcctcccttctgcgtgagcgcaatgatgaaattgcccgtgttgaaactctcgattccggaaaggcctacacggagacgagcaccgtggatgtggtcactggtgccgatgtcctggagtactatgcgaacctggtgggtggtggtggtctgaatggcgagactactcaattgagggaagatgcttgggtatacacgaagaaggccccgctaggtgtctgcgcgggtatcggcgcatggaactaccctatccaaattgcgctgtggaaatctgctccctgcctggctgccggaaacaccatggtctacaaaccgagtgaattcactccgctccacgctcagacgttggctcagatctacacggaagctggtcttcccgcaggtgttttcaacgtggtgtatggtgcaggcgacgtgggtgcctacctgactgctcaccccacgattgccaaggtttccttcacaggccaggtgtccaccggaatgaaggttgctggttctgccgccggcaacatgaaatacgtgaccatggagcttggaggcaagagtcccctcatcgttcttcctgacgccgatttggataatgccgtggatggtgcgatgatggccaacttctacagcactggccaggtctgtaccaacggtacccgtgtttttgttccctcgagcatgaaggctgctttcgaaaagcgcctcttggagaagatgcagtacatccgccccggacctttgttcgacgaagccacaaacatggggcccctgagctcagccgtccacatggagaaggtggcctcctacatccgccacggaatcgagacggacaaggccacccttctatatggtgggctgggcaagccgcaagtccccaaggacttggaaagcggatactgggtccgtcctactgtcttcactgactgcacggatgacatgcgcatcgtcaaggaggagattttcggtcctgtgatgtctatcctctcttacgagacggtcgaggaggcggtgaagcgggcaaacaccactgagctgggcctggctgcgggtgtcttcaccaaggacctcaacctggcccaccgtgtcatcgatcaattgcaggccggtatcacctggatcaacagctggggcgagagtccggccgagatggctgtcggtggctggaagaacagcggtgtgggcgtggagaacggtcgtcgcggcattgaggcctgggtgagaaacaagagcaccctggtggatatgaacggctccgtcgccactgtctttgccaagctgtaa

SEQ ID NO: 121330 - protein, 498 aa, Aspergillus niger
MSLPFPTRQLYYDGKVQPATSGKTFQTINPSNDTPLADIQVAAHADVDSAIAAADRAFPSWSQTPAIARARILQKAASLLRERNDEIARVETLDSGKAYTETSTVDVVTGADVLEYYANLVGGGGLNGETTQLREDAWVYTKKAPLGVCAGIGAWNYPIQIALWKSAPCLAAGNTMVYKPSEFTPLHAQTLAQIYTEAGLPAGVFNVVYGAGDVGAYLTAHPTIAKVSFTGQVSTGMKVAGSAAGNMKYVTMELGGKSPLIVLPDADLDNAVDGAMMANFYSTGQVCTNGTRVFVPSSMKAAFEKRLLEKMQYIRPGPLFDEATNMGPLSSAVHMEKVASYIRHGIETDKATLLYGGLGKPQVPKDLESGYWVRPTVFTDCTDDMRIVKEEIFGPVMSILSYETVEEAVKRANTTELGLAAGVFTKDLNLAHRVIDQLQAGITWINSWGESPAEMAVGGWKNSGVGVENGRRGIEAWVRNKSTLVDMNGSVATVFAKL

SEQ ID NO: 121331 - DNA, 1560 bp, Bacillus amyloliquefaciens; identical to SEQ ID NO: 38021
  CDS (1)..(1560): transl_table=11

SEQ ID NO: 121332 - protein, 519 aa, Bacillus amyloliquefaciens; identical to SEQ ID NO: 38022

SEQ ID NO: 121333 - DNA, 1503 bp, Amaranthus hypochondriacus; identical to SEQ ID NO: 87110
  CDS (1)..(1503)

SEQ ID NO: 121334 - protein, 500 aa, Amaranthus hypochondriacus; identical to SEQ ID NO: 87111

SEQ ID NO: 121335 - DNA, 1521 bp, Xanthobacter autotrophicus
  CDS (1)..(1521): transl_table=11
atgaacagcccagcctttctctcgagcgcccacacctcgcccttcaagccgcgttacggcaacttcatcggcggcaccttcgtcgagccggtgagcggccgttatttcgagaacacctcccccatcaccggcaaggtgatctgcgaggttccccgctccgacgagcacgacatcgagcgcgcgctcgacgccgcccatgccgccaagaaggcctggggccgcacctccgccgccgaccgcgcgctggtgctgctgaagatcgccgaccggctcgaggccaatctcgaactcctcgccggcgccgagacctgggacaacggcaagccgatccgcgagacgaccctggcggacatccccctcgccatcgaccatttccgctatttcgccgcctgcgtccgtgcccaggaaggcacgctgggcgagatcgatcacgacaccatcgcctatcactaccatgtgcccctcggcgtggtcggccagatcatcccctggaacttccccatcctgatggcggcgtggaagctcgcccctgcgctcggggccggcaattgcgtggtgctgaagccggccgagcagacccccgcctcgatcctcgtactcgctgaactcatcgccgacctgctgccccccggcgtgctcaacatcgtcaacggcttcggcctcgaggccggcaagccgctcgcctcctcgccgcgcatctccaagatcgccttcaccggcgagactggcaccggccggctcatcatgggctatgccgcgcagaacctcattccggtgacgctggaactcggcggcaagtcgcccaacatcttcttcgccgacgtggcggccgaggatgacgacttcctcgacaaggccgtggaaggcttcgtcatgttcgccctcaaccagggcgaggtctgcacgtgccccagccgcgcgctggttcaggagagcatcttcgacaagttcatggagaaggcgctcgcccgcgtcgccgccatcaagcagggctcgccgctcgatccttcgaccatgatcggcgcgcaggcttcttccgagcagatgcacaagatcctctcctacatcgacatcggtcgtgcggaaggcgcgcaggttctggccggcggcgagcgcaacgtgctcaccggcgagctggcggacggcttctacgtgaagcccaccgtgttccttggcaagaacaacatgcgcatcttccaggaagagatcttcggcccggtggtctccgtcaccaccttcaaggacgaggaagaggcgctgcacatcgccaacgacaccctcttcggcctcggcgccggcctgtggacccgcgacggctcgcgcgcctaccgcgtcggccgcgagatcgaggcgggccgcgtgtggactaactgctaccacgcctacccggcccacgcggccttcggcggctacaagcagtccggcatcggccgcgagacccacaagatgatgctcgatcactaccagcagaccaagaacctgctggtcagctattcgcccaagaagctcggcttcttctga

SEQ ID NO: 121336 - protein, 506 aa, Xanthobacter autotrophicus
MNSPAFLSSAHTSPFKPRYGNFIGGTFVEPVSGRYFENTSPITGKVICEVPRSDEHDIERALDAAHAAKKAWGRTSAADRALVLLKIADRLEANLELLAGAETWDNGKPIRETTLADIPLAIDHFRYFAACVRAQEGTLGEIDHDTIAYHYHVPLGVVGQIIPWNFPILMAAWKLAPALGAGNCVVLKPAEQTPASILVLAELIADLLPPGVLNIVNGFGLEAGKPLASSPRISKIAFTGETGTGRLIMGYAAQNLIPVTLELGGKSPNIFFADVAAEDDDFLDKAVEGFVMFALNQGEVCTCPSRALVQESIFDKFMEKALARVAAIKQGSPLDPSTMIGAQASSEQMHKILSYIDIGRAEGAQVLAGGERNVLTGELADGFYVKPTVFLGKNNMRIFQEEIFGPVVSVTTFKDEEEALHIANDTLFGLGAGLWTRDGSRAYRVGREIEAGRVWTNCYHAYPAHAAFGGYKQSGIGRETHKMMLDHYQQTKNLLVSYSPKKLGFF

SEQ ID NO: 121337 - DNA, 1629 bp, Nicotiana tabacum
  CDS (1)..(1629)
atggcggctcgtgtgtttacctctcgtctctctcgctctttgacatcctcttctcatctgctctcaagaggtttgatcattgtggataagcaaaaatcccatctgggcagaatagctgcttatcaatacagcacggcggctgctattgaggaaccgatcaaaccagctgtcaatgtggaacatactaaactttttatcaatggccaatttgttgatgctgcatcaggaaaaacattccctacccttgaccccaggacaggggaggtaattgcacatgttgctgaaggtgatgcagaagatattaatcgggcagtagctgctgctcgtaaggcttttgacgaaggaccatggcctaaaatgaatgcttatgaaaggtcaaagatattcgtacgccttgctgatctgattgaaaaacataacgatcaaattgcaacgctcgagacttgggatactgggaagccgtatgaacaggctgctaagattgaagtaccaatggttgtacgtctactccgttattatgctggctgggcagataaaattcatggtatgactattcctgcagatggaccatatcatgttcagacattgcacgaaccaattggggttgctggtcagattatcccatggaactttcctcttctcatgttttcttggaagattggacctgctttagcttgtgggaacactgtcgtgctaaagacagctgagcagacaccattatctgcattctacgtagcacatctgttacaggaggctgggctgcctgaaggtgttttgaacatcatttctggttttggtccaacagctggtgctcctctttgtagtcatatggatgtcgataagcttgcttttactggatcgacagatacaggaaaagctatactttcactggctgctaagagcaatcttaagccggtgactttggaacttggagggaaatccccttttattgtttgtgaggatgctgatattgatacggccgttgaacaagctcactttgctctcttctttaatcaggggcaatgttgctgtgctggatctcggacttttgttcacgagaaagtttatgatgaatttcttgagaaggcaaaggcacgtgccttgaaacgaacagttggtgatccgtttaaatcaggcactgagcagggtcctcagattgattcaaaacagtttgataagatcatgaattacattagatctggtatcgatagtggagcaactcttgaaactggaggtgagcgacttggtgaacggggatactatattaagcccacagttttctctaacgttaaggacgatatgctgattgcacaagatgaaatatttggtccagtgcagtccatcttaaaatttaaggatgttgatgatgtgatacggagagctaataacagtcggtatggtctagctgctggagtatttacacagaacattgacactgcaaacacattgacacgagccttgagagttggaacggtatgggttaattgctttgataccttcgatgctacaattccttttggtgggtataaaatgagtggacacggaagagaaaagggagaatacagtctcaagaattacttgcaagtaaaggcagttgtgaccccattgaagaatcctgcatggttataa

SEQ ID NO: 121338 - protein, 542 aa, Nicotiana tabacum; identical to SEQ ID NO: 38024

SEQ ID NO: 121339 - DNA, 1503 bp, Kalidium foliatum; identical to SEQ ID NO: 87114
  CDS (1)..(1503)

SEQ ID NO: 121340 - protein, 500 aa, Kalidium foliatum; identical to SEQ ID NO: 87115

SEQ ID NO: 121341 - DNA, 1578 bp, Glossina morsitans morsitans; identical to SEQ ID NO: 38027
  CDS (1)..(1578)

SEQ ID NO: 121342 - protein, 525 aa, Glossina morsitans morsitans; identical to SEQ ID NO: 38028

SEQ ID NO: 121343 - DNA, 1479 bp, Glossina morsitans morsitans; identical to SEQ ID NO: 38029
  CDS (1)..(1479)

SEQ ID NO: 121344 - protein, 492 aa, Glossina morsitans morsitans; identical to SEQ ID NO: 38030

SEQ ID NO: 121345 - DNA, 1503 bp, Atriplex hortensis
  CDS (1)..(1503)
atggcgttcccaattcctgctcgtcaactcttcatcgatggagagtggagagaaccccttttaaaaaatcgcatacccatcatcaacccttctactgaagaaatcatcggtgatattcctgcagcaactgcagaggatgtggaggttgcagtggtggcagctagaaaagcctttaagaggaacaaaggcagagattgggctgcaacttctggtgctcatcgtgctaaatatttgcgtgctattgctgctaagataacagagaaaaaagatcattttgttaaactggaaacccttgattctggaaaaccacgggatgaagcagtgttagatattgatgatgttgctacatgctttgaatactttgccggtcaagcagaagctctggatgctaaacaaaaggctccagtcaccctgcctatggaaagatttaaaagtcatgttctcaggcagcccattggtgttgttggattaatatccccatggaattacccacttctaatggctacatggaaaattgctcccgcacttgctgctggatgcacagctgtacttaaaccatcagaattggcatctgtgacttgtctagaattcggtgaagtgtgtaatgaagtgggacttcctccaggtgtgttaaatattttgacaggattaggtcctgatgctggtgccccaatagtatctcatcctgatattgacaaggtagcatttactgggagtagtgccactggaagcaagattatggcttctgctgcccaactagttaagcctgttactttggagcttggaggtaaaagtcctgttatcatgttcgaagatattgatattgaaacagctgttgaatggactctttttggcgttttctggacaaatggtcaaatctgtagtgcaacatctagactgcttgtgcatgaaagcattgcagctgaatttgttgataggatggtgaagtggacaaaaaacataaaaatttctgatccatttgaagaaggatgccggcttggccccgttattagtaaaggacagtacgacaagattatgaagttcatatcaacagcgaagagtgaaggggcaacaattttgtgtggaggctcccgtcctgagcatttgaagaaagggtattatattgaacccaccattataactgatattaccacatccatgcaaatatggaaagaggaagtgtttggccctgtcatatgtgttaaaacatttaaaactgaagatgaagccattgaattggcaaatgatacagagtatggtttagctggtgccgtgttttctaaagatcttgaaagatgtgagagggtaactaaggctctagaagttggagctgtttgggttaattgctcacaaccatgctttgttcatgctccatggggaggagtcaagcgtagtggatttggacgtgaacttggggaatggggtatcgagaattacttgaatatcaagcaggtgacgagtgatatctctgatgaaccatggggatggtacaagtctccttga

SEQ ID NO: 121346 - protein, 500 aa, Atriplex hortensis; identical to SEQ ID NO: 87125

SEQ ID NO: 121347 - DNA, 1614 bp, Vitis pseudoreticulata
  CDS (1)..(1614)
atggcggctaggaggatctcctcgttgctctctcgttctctctctgtctcttctgctttttctctttctctaggcaaaaatttcaacagagggaaaagcatccatcgctttagcactgcagcagcagcagttgaagaactcatcactccaactgttcagataaattacactcaacttctaattaatgggcaatttgtagatgcagcatctggaaaaacattccccacctttgaccctcgcacgggagaagtgattgctaatgttgcagaaggtgatgcagaagatatcaatcgggcagtgtctgctgctcgaaaggcgtttgatgaaggaccatggccaaggatgagcccctatgaaaggtcgcggatattgttgcggtttgctgatttagccgagaaacacaatgatgagcttgcagctctagagacatggaataatgggaagccatatgaacaggctgccaaagctgaattgccactgtttgttcgtctatttcgctattatgcaggttgggcagataaaatccatggtttaacagttcaggctgatggcccacaccatgttcagatattgcacgagccaattggtgttgcgggacagattattccctggaattttcctcttatgatgtttgcttggaaagttggacctgcactagcatgtggtaataccattgtcctaaagacagcagagcaaacacctttgactgctctctttgcggcaaagctatttcatgaggctggtcttcctcccggtgttttaaatatcgtgtccggctatggtccgactgctggtgctgctcttgctagtcatatggatgtggacaagattgctttcacggggtcgactgatactggtaagattgtacaagaattggctgcaaaaagcaatcttaaaccagtaacgctagagcttggaggtaaatcacctttcattgtatgtgaggatgctgacattgatcaagctgtagagctagcacactttgctctgttctttaatcagggacaatgctgctgtgctgggtctcggacatttgttcatgagagtgtatacgatgagtttattgagaaagcaaaggcacgtgctctgagtcgcacggtcggtgatcctttcaagaagggcatcgagcaaggtcctcagatcgacccagagcaatttgcaaaggttctcagatacataaaatctggtgttgaaagcaatgccacccttgaatgtggaggtggaagaattggctcaaaaggctactttgtccaacccactgttttctcaaatgttcaggatgatatgctgattgcaaaggatgagatctttggccctgtacaatccatcttgaaatacaaggaccttgatgaagtgattaggagggcaaattcaacgcgatacggtctagcagcaggggtgttcacaaagaacatcaacactgccaacaccttgacaagagcattgagagtggggactgtatgggtgaattgcttcgatgtgtttgatgctgcaatcccatttggtgggtacaagatgagtggagtaggaagggaaaagggaatctacaacctcaataactacttgcaggtgaaggctgtgattactccactgaggaatccagcttggctgtga

SEQ ID NO: 121348 - protein, 537 aa, Vitis pseudoreticulata; identical to SEQ ID NO: 38034

SEQ ID NO: 121349 - DNA, 1512 bp, Medicago truncatula; identical to SEQ ID NO: 87134
  CDS (1)..(1512)

SEQ ID NO: 121350 - protein, 503 aa, Medicago truncatula; identical to SEQ ID NO: 87135

SEQ ID NO: 121351 - DNA, 1500 bp, Aspergillus oryzae
  CDS (1)..(1500)
atgtcctaccttcctctccccccacgccaactcttctatgacggcaaagttcagtctgcctcgtccggcaagacttttcaatccgtcaatccctccgacgccaccccgcttgccgaaattcaagttgcctctcattctgatattgatgcagctatagctgctgctgaccgggtatttccctcctggtcacaaacccctcctattgctcgcgcacgtatcctccagaaggcgtctctgatactccgtgaacgaaatgacgaaatcgctcgggtcgaatctttagattccgggaaggctttcacagagaccagtacagtggatgttgtcacaggtgccgatgttctagagtactatgcgaaccttgttggggggggtggtctgaacggggagaccactcagctgagagaagacgcttgggtattcactaagaaggctcctttgggagtctgcgcaggaatcggtgcatggaattatcctatccaaattgcgctctggaaatctgccccttgtattgctgctggaaacaccatggtctacaagcccagtgagttcacaccgcttcatgcgcagactctggcagagatttacaaggaagctggacttcctgatggtgtgttcaacattgtttatggcgccggtgatgttggtgcttacttgacctcccaccctacaattgccaaggtttccttcactggccaggtggccactggaatgaaggtcgccggttccgccgctggcaacatgaaatacgttaccatggaacttggagggaaaagccctctggttatcctccctgatgcagagcttgaaaacgccgtcgatggagctatgatggccaacttctatagtaccggtcaggtctgtaccaatggcacccgcgtgtttgtgccttctagcatgaaggcagcttttgagaaccgcctgctcgaaaagatgcagtacattcgccccggccccttgtttgatgaagctaccaacttcggtcccttgagctccgccatccatcttgagaaggtgatttcctatattcgtcatggtattgagacggacaaggccaccctcctttatggcgggcttggcaagcctcaagtttcaaaggagttagagaacggattctgggtccggcccacaattttcactgattgcaaggatgacatgcttattgtcaaggaagagatatttggcccagtaatgtcgattttgtactacgagaccattgaagaagctgtccgacgggccaacactaccgagcttggtctagcagcaggtgtcttcaccaaagacgtcaacttggcccatcgcattatcgaccaactccaggcgggtatcacatgggtgaatacctggggagaaagcccggccgaaatggctgtgggtggatggaagaagagtggtcttggcgttgagaacggccgtaggggtattgaagcttgggtgaagaacaagagcacccttgtcgacatgaacggtgctgtcgcaactgtatttgctaagctctag

SEQ ID NO: 121352 - protein, 499 aa, Aspergillus oryzae
MSYLPLPPRQLFYDGKVQSASSGKTFQSVNPSDATPLAEIQVASHSDIDAAIAAADRVFPSWSQTPPIARARILQKASLILRERNDEIARVESLDSGKAFTETSTVDVVTGADVLEYYANLVGGGGLNGETTQLREDAWVFTKKAPLGVCAGIGAWNYPIQIALWKSAPCIAAGNTMVYKPSEFTPLHAQTLAEIYKEAGLPDGVFNIVYGAGDVGAYLTSHPTIAKVSFTGQVATGMKVAGSAAGNMKYVTMELGGKSPLVILPDAELENAVDGAMMANFYSTGQVCTNGTRVFVPSSMKAAFENRLLEKMQYIRPGPLFDEATNFGPLSSAIHLEKVISYIRHGIETDKATLLYGGLGKPQVSKELENGFWVRPTIFTDCKDDMLIVKEEIFGPVMSILYYETIEEAVRRANTTELGLAAGVFTKDVNLAHRIIDQLQAGITWVNTWGESPAEMAVGGWKKSGLGVENGRRGIEAWVKNKSTLVDMNGAVATVFAKL

SEQ ID NO: 121353 - DNA, 1518 bp, Aspergillus oryzae
  CDS (1)..(1518)
atgccagagctcgatcttttccttgatatcacagcgccgaatggtcgccagtataaacaacccaccggtttgttcatcgataatgaatttgtgaagtctacatctggtcagactattgcttctattgatcctgcaacaacccgtgaaatcgcctctgtctacgcagccggtgccgaggatgtcgataaagcagtcaatgccgccaaagctgccttgaaggatgattcatggaagctcctcccagccacagaccgtggaatgttaatgggtcggttggccgacttaatagagcagaataaggagcttttcgctacgattgacgcgtgggataacggaaaaccataccatgttgcgctgagcgaggacctggtggaagccatcaccaccttccggtactacagtggctgggccgacaagacattcggccaaacgatcaacacaaccccccagaagttcgcctacacaattagacagcccatcggtgtggtgggtcagatcatcccctggaactaccctctgtccatggcagcctggaagctgggacctgctctggcttgtggtaatactgttgtgattaaggctgctgagcagacgcccttgagtatcttggttctgggaaccttgatcaaggaggccggcttcccgaagggtgttgttaatattatcaatggatacggtagggaggccggtgcggctttggtgcagcaccccttggtcgataaggtggcgttcacgggctccactgctaccgcgagagagattatgaagatggctgctggcagcctgaagaatattactcttgagacgggaggaaagtcacccctgattgtattcaacgataccgatatggagcaggccgtgaaatggtcccatttcggtattatatccaaccagggccagatttgcactgctacgtcgcggatcttggtccagaaggatatttacgatacctttgttgagcagttcaagggcgctatccagaccacatcgaagatcggagatcagtgggatgagagcaccttccaaggtccccaggtgactcgcgctcaatatgatagagtgctcgagtacattcaagtgggcatttcggagggcgcgacggtggcttccggaggaggtcctcacccagccaacagcaacggggagtcgggatactatgttcagccaactgttttcacgaacgtgaaggattcgatgcgcatctatcgggaggagatctttggccccgtcgttgtcatcgtgccttttgagacggaggaagaggccattaggcgtgcaaatgataccacctatggccttggtgcggctgtcttcacaaaggatctggagcgtgctcaccgggttgcagctgagattgagtctggtatggtctggatcaacagcagccaggattgcgatcctcgcgtaccgttcggaggtgtgaagcagagcggaatcgggcgagaactaggtgaagctggacttgaagcgtacagccaagtgaaggctgtccatgttaatatgggaaacaaactgtag

SEQ ID NO: 121354 - protein, 505 aa, Aspergillus oryzae
MPELDLFLDITAPNGRQYKQPTGLFIDNEFVKSTSGQTIASIDPATTREIASVYAAGAEDVDKAVNAAKAALKDDSWKLLPATDRGMLMGRLADLIEQNKELFATIDAWDNGKPYHVALSEDLVEAITTFRYYSGWADKTFGQTINTTPQKFAYTIRQPIGVVGQIIPWNYPLSMAAWKLGPALACGNTVVIKAAEQTPLSILVLGTLIKEAGFPKGVVNIINGYGREAGAALVQHPLVDKVAFTGSTATAREIMKMAAGSLKNITLETGGKSPLIVFNDTDMEQAVKWSHFGIISNQGQICTATSRILVQKDIYDTFVEQFKGAIQTTSKIGDQWDESTFQGPQVTRAQYDRVLEYIQVGISEGATVASGGGPHPANSNGESGYYVQPTVFTNVKDSMRIYREEIFGPVVVIVPFETEEEAIRRANDTTYGLGAAVFTKDLERAHRVAAEIESGMVWINSSQDCDPRVPFGGVKQSGIGRELGEAGLEAYSQVKAVHVNMGNKL

SEQ ID NO: 121355 - DNA, 1509 bp, Aspergillus oryzae; identical to SEQ ID NO: 38035
  CDS (1)..(1509)

SEQ ID NO: 121356 - protein, 502 aa, Aspergillus oryzae; identical to SEQ ID NO: 38036

SEQ ID NO: 121357 - DNA, 1650 bp, Zea mays
  CDS (1)..(1650)
atggctcggagggccgcgtcctcgctcgtctcccgctgcctcctggcgagggcccctgccggcgcgccgcccgctgccccctctgcgccgcgcaggacagtgcctgcagatgggatgcacaggctgttgccaggtgtccttcagaggttcagcactgcagcagcagtagaggagcccatcacgccgtcagtccatgtgaactacacaaagctcctcattaatgggaactttgttgattccgcatccggcaagaccttcccaactctggaccctcgtacaggggaggtgattgctcatgtggctgagggtgacgcagaggacattaaccgtgcagtagctgcggctcgcaaggcttttgatgaagggccatggccgaagatgactgcctatgagaggtcccgtatcctactgcggtttgctgatttgatagagaagcacaatgacgagcttgctgctttggagacatgggacaacgggaagccatatgagcaagcagcccagattgaagtacccatggtggcccgtcttatgcgttactatgctggttgggctgataagatccatgggctcattgtgccggctgatggcccacaccatgtacagatcttgcatgagccaattggtgttgcaggtcagatcatcccatggaactttcctcttctgatgtatgcctggaaagttggccctgctttggcatgtggaaatactctcgtgctcaagactgctgaacaaacccctctatcggctttgtatatctccaaattgttgcatgaggctggactacctgagggtgttgtgaatgtcgtttctggttttggccctactgctggtgctgctcttgctagtcacatggatgttgataagatcgcatttactggatctaccgatactggaaaaattattctcgagttggctgcaaagagcaaccttaagacagtgacactggagttaggaggcaagtcccctttcatcataatggacgatgctgatgttgaccatgctgttgagcttgcgcactttgccctgttctttaaccagggacaatgctgctgcgctggatctcgcacgtttgtacatgagcgtgtttatgatgagtttgtggagaaggccaaggctcgtgcattgaagcgcgtcgttggtgatccgttcaggaaaggtgttgaacagggcccgcagattgacgacgagcaattcaacaagatcttgcgctacattaggtatggtgttgacggtggagctacccttgtgacgggtggtgataggttgggtgacaagggtttctacatccagccaacgattttctcagatgtccaggacggcatgaagattgctcaggaggagatatttgggcctgtgcagtcgatcctcaagttcaaagacctcaatgaggttatcaagagggcaaacgcgagccagtatggattggccgccggcgtgttcaccaacagcctggacacggccaacaccctgacgcgcgcgctcagggccgggaccgtctgggtgaactgcttcgacgtcttcgatgctgcgattccgtttggtgggtacaagatgagcggcatcgggagggagaagggcgttgacagcctgaagaactacctgcaggtgaaggcggtcgtcaccccaatcaagaacgccgcgtggttgtag

SEQ ID NO: 121358 - protein, 549 aa, Zea mays; identical to SEQ ID NO: 37842

SEQ ID NO: 121359 - DNA, 1461 bp, Cycloclasticus oligotrophus
  CDS (1)..(1461): transl_table=11
atgcaacatattaatcatttcataaatggcgagtttgtatccgctgttgacggtaaatcatttgaaaaacgctcccctgttgaccggcgccttattgctcaggtatctgaagggggtaaggttgatgttgatcgtgcagtccacgcagcgcgtgccgctttaaatggagaatggggagcttttaccatggagcaacgcgttgagattttatatggtgttgccgatgagattacccgacgttttgatgattttgtagaagcggaaatggcagatacggggcaacctaaaagtattatgacgcatgcgtttattcctagaggcgcggcaaactttaaaatttttgctgatgtcattaagaatgttccgaatgagtcatttcaaaccacaacacccgatggtttaggtgcgctgaactatgctattcgtgtaccaaaaggtgttgttggtgtggtgtcgccttggaatgcgccctttttgttaatgacgtggaaagtagggcctgcgctggcttgtggtaatacagtggtggttaagccttctgaagagacgccattaaccactactttattgggtgaagtcatgaataaagtaggcgtaccaaaaggcgtgtttaatgttgttcacggttttgggcctgactctgccggtgagtatttaacacatcatccaaaggtagacgctattacctttaccggtgaaacgactacaggagcggccattatgaaagccgcatcggaggggatgcgagatgtttcctttgagctgggtggtaaaaatgcgggtattgtctttgcagatagtgattttgataaagcggttgatgggatatacaagtcctcattcttgaattctggacaggtctgcttaggcacggagcgtgtttatgttgagcggcccatttttgataaatttgtggaagcactgaagaaaaaagtcgaaaaagtgcgccacggtaggccggatgatgaaaactgtaattttggcccaatgattagccatgagcatcaagcaaaggtactgtcttattatgcaaaagcagttgaggaaggcgcaacagttgtcacgggaggtggcgttcccagcataccagaagaattaaaagagggtgcttgggtggagccaaccatttggacagggcttgcagaagatgcaacggtcatgaaggaagaaatttttggtccttgctgccacattgcgccatttgacgatgagcaacaagtgattaactgggccaatgatacagaatatggtttatcaacaaccgtatggacacgggatttgtcacgcgctcaccgcgtggctgccaaaattaatgtgggtattacctggattaatagctggttcttacgtgatttaagaaccgcttttggtggctctaagcaatcaggtattggacgagagggtggtgttcattccttagagttttatactgaaacacggaatgtttgcgttaaattgtaa

SEQ ID NO: 121360 - protein, 486 aa, Cycloclasticus oligotrophus
MQHINHFINGEFVSAVDGKSFEKRSPVDRRLIAQVSEGGKVDVDRAVHAARAALNGEWGAFTMEQRVEILYGVADEITRRFDDFVEAEMADTGQPKSIMTHAFIPRGAANFKIFADVIKNVPNESFQTTTPDGLGALNYAIRVPKGVVGVVSPWNAPFLLMTWKVGPALACGNTVVVKPSEETPLTTTLLGEVMNKVGVPKGVFNVVHGFGPDSAGEYLTHHPKVDAITFTGETTTGAAIMKAASEGMRDVSFELGGKNAGIVFADSDFDKAVDGIYKSSFLNSGQVCLGTERVYVERPIFDKFVEALKKKVEKVRHGRPDDENCNFGPMISHEHQAKVLSYYAKAVEEGATVVTGGGVPSIPEELKEGAWVEPTIWTGLAEDATVMKEEIFGPCCHIAPFDDEQQVINWANDTEYGLSTTVWTRDLSRAHRVAAKINVGITWINSWFLRDLRTAFGGSKQSGIGREGGVHSLEFYTETRNVCVKL

SEQ ID NO: 121361 - DNA, 1512 bp, Chrysanthemum lavandulifolium
  CDS (1)..(1512)
atgacaacgataccatcacgacagttatttatcgacggtgaatggagagagcctgttaaaaagaatcgtattcctgttattaatccttctactgaacagatcgtcggggatataccagcagctactgctgaggatgttgatgttgctgtaaaagcagctcgtaaagctcttaaacgcaatggagggaaagattgggcttctgctactggagcacatcgtgcaaagtatcttcgtgccattgctgcaaagataactgggaagaaagaattattctctaaacttgaagcgattgattgtggaaagccatatgatgaagcagcatgggatatagatgatgttgctggatgtttcgaatataatgctgatcttgctgaagctttagataaaaagcaaaatgcgcctattgagcttccaatggatacatttaaatgtcatgtaattaaggaacctattggtgttgttgggctaattactccatggaactacccattgttaatggctacatggaaagttgcgcctgctttggccgctggttgtgctgcgatacttaaaccatcagaactggcatctctcacgtgcctggaattaggtgaagtatgcaaggaggtggggcttcccgctggtgttctcaatattctgactggtttaggtccagatgcaggtgctcctttggctgctcaccctgatgttgataagattgcatttactggaagcagtgccactggtagcaagattatgactgctgcagctccaaatgtcaagcctgttacccttgagcttggtggaaagagtccaattgttgtgtttgatgatgttgacattgataaagctgttgagtggacactatttggttgcttctggactaatgggcaaatctgcagtgcaacttctcgtctcatactacatgaaagtattgctaaggagtttttagacaagcttgtgaagtgggctaaaaatatcaagatttcagacccgttggaggaaggttgtaggcttggacctgtggttagtagtggacagtacgagagggttttgaagtttgttgaaacagccagaagtgaaggtgctaccatattgtcaggagggcaacgtccccaacatttgaaaaagggattttttatcgagccagccatcattactgacatcactacatccatgcaaatatggagagacgaagtttttggacctgttctctgtgtaaaaacattttcatctgaagaagaagcaattgagttagcaaacgacactcattatggcttgggttctgctgtaatatccaacgatttggaccggtgtgatcgtgtaacaagggcttttgacgcaggtattgtatgggtgaattgttcacagccatgcttctgtcaagctccatggggtggcaaaaagcgtagtgggtttggtcgcgaacttggagaatgggggctcgataactacttgagcgtaaagcaggtgactcgttacatctccaacgatgcttggggttggtatacacctccatctcctaagctttaa

SEQ ID NO: 121362 - protein, 503 aa, Chrysanthemum lavandulifolium
MTTIPSRQLFIDGEWREPVKKNRIPVINPSTEQIVGDIPAATAEDVDVAVKAARKALKRNGGKDWASATGAHRAKYLRAIAAKITGKKELFSKLEAIDCGKPYDEAAWDIDDVAGCFEYNADLAEALDKKQNAPIELPMDTFKCHVIKEPIGVVGLITPWNYPLLMATWKVAPALAAGCAAILKPSELASLTCLELGEVCKEVGLPAGVLNILTGLGPDAGAPLAAHPDVDKIAFTGSSATGSKIMTAAAPNVKPVTLELGGKSPIVVFDDVDIDKAVEWTLFGCFWTNGQICSATSRLILHESIAKEFLDKLVKWAKNIKISDPLEEGCRLGPVVSSGQYERVLKFVETARSEGATILSGGQRPQHLKKGFFIEPAIITDITTSMQIWRDEVFGPVLCVKTFSSEEEAIELANDTHYGLGSAVISNDLDRCDRVTRAFDAGIVWVNCSQPCFCQAPWGGKKRSGFGRELGEWGLDNYLSVKQVTRYISNDAWGWYTPPSPKL

SEQ ID NO: 121363 - DNA, 1485 bp, Klebsiella aerogenes
  CDS (1)..(1485): transl_table=11
atgagcgagataaccttactggcggaagtgaccgccttcttacgccagccgcacgggcagtttattgccggtcaacgtgaggcgggccgcggcgcgccgttcgcggtgatcaacccggcgaccgggcgggcgattgccgaggtcaccgcggcggatagtgaccaggcggatcgcgctatggagagcgcccgccaggcgttaagtcagtggcgcgagatgccgacgctggcgcgcggcgcgctgctgctgaagctggcggacacgctggcagagcatcgcgaagcgctggcgcagctggaaagtctctgttccggcaaaactatcacgctggtgcggatgctcgaactggaccagtcggtggcgctcctgcgctacttcgccggctgggcggggaaagtcaccggtgaaacgctggatgtctcgctgccatcgatggccggggagaaatataccgcctttacccgccgccagccgctgggggtggtggttggcatcgtgccgtggaacttctccatcatgattgccatctggaagctggcggcggccctggtctgcggctgcaccatcgtcctcaagccgagcgaatatacgccgctgacgctgctgcgcgtggcggagctggcaaaagcggtgggtatcccggatggggtgattaacgtggtcaacggcgccggcggcgagattgcccagcggctgattacgcatccggcctgcgccaaggtgagcttcaccggctcggtggccaccggtgaaaaagtccagcagtcggccagtgcgtcaggtaaacgggtgacccttgagctgggggggaaatacgccgcgctgttcctcgatgacctgacgccggaggcgatggtcaacggcattattgaagctggctacctgaaccaggggcagatttgcgccgctgcggaacgtttttatctaccgcagggaaaactggatgcggtactggcgctgctgaaagacaagctcagcgcttttgcgccggggtcgccgctggatgaacggacgctgatggggccgctggccaaccgccagcagtatgacaaagttttgcggctcattcagaccgcccgcgacgagggcgataccatcgtctgcggcggcgaagcgctgccgggggagggctatttcctgcagccgaccgcggtcaaagtgcgcagcgaagagagcaccctgatgcgcgaggagaccttcggtccggtgtgcagttttatcggctatcgcagtgaagaagaggcgctggcacgaattaatgcttcgccgtatggcctggcggccagcgtctggtcggataatattcgtcaggcgctacgctactcggaggcgattgaggccggcatcgtatgggtcaatatgcataccttcctcgacccggcggtaccgttcggcggtatgaagggctcgggcatcgggcgcgaattcggcagcgcgtttatcgatgattatacggagctgaagtcggtgatggtgcgctattaa

SEQ ID NO: 121364 - protein, 494 aa, Klebsiella aerogenes
MSEITLLAEVTAFLRQPHGQFIAGQREAGRGAPFAVINPATGRAIAEVTAADSDQADRAMESARQALSQWREMPTLARGALLLKLADTLAEHREALAQLESLCSGKTITLVRMLELDQSVALLRYFAGWAGKVTGETLDVSLPSMAGEKYTAFTRRQPLGVVVGIVPWNFSIMIAIWKLAAALVCGCTIVLKPSEYTPLTLLRVAELAKAVGIPDGVINVVNGAGGEIAQRLITHPACAKVSFTGSVATGEKVQQSASASGKRVTLELGGKYAALFLDDLTPEAMVNGIIEAGYLNQGQICAAAERFYLPQGKLDAVLALLKDKLSAFAPGSPLDERTLMGPLANRQQYDKVLRLIQTARDEGDTIVCGGEALPGEGYFLQPTAVKVRSEESTLMREETFGPVCSFIGYRSEEEALARINASPYGLAASVWSDNIRQALRYSEAIEAGIVWVNMHTFLDPAVPFGGMKGSGIGREFGSAFIDDYTELKSVMVRY

SEQ ID NO: 121365 - DNA, 1509 bp, Chorispora bungeana
  CDS (1)..(1509)
atggcgattccgatgcctactcgtcagctattcatcgacggtgaatggagagagcccatcttgaagaagcgaatcccgatcgtcaatccggctaccgaagaggtcattggtgatatccccgctgctacaacggaggatgtcgaagttgcagtcaacgctgctcgaagagctttttcaaggaataaagggaaagattgggccaaagcaccaggagctcttcgtgcaaagcatctacgagctattgctgctaaggtaactgaaagaaagtcggatctggcaaagcttgaggcgcttgattgtggtaaaccattggatgaagcagtctgggatatggaagatgtcgctggatgttttgaattttatgctgaccttgctgaaggattagatgccaagcagaaagcaccggtctcgcttcccatggagaattttaagagttatgttctgaagcaacctattggagttgtgggactgattacaccatggaattacccacttttgatggctgtttggaaggtggctccttcacttgctgcaggatgcactgcgattctcaagccatcagagctggcatcagtcacttgtttggagcttgctgatatttgtcgagaagtcggtcttcctcctggggtcctcaatgttctgactggatatggtgcggaagctggtggtcctttggcatcacatcccggtgtggacaagattgcatttactggaagttttgccacgggaagcaaggtcatgacagctgctgctcagttggtgaagcctgtttcaatggaactcggtgggaagagccctctcattgtgtttgatgacgttgatcttgataaagctgctgaatgggctctcttcggttgcttctggacaaatggtcagatctgcagtgcaacttcccgccttcttgtccatgaaaacattgcacctcaatttatagaaaagcttgtaaaatggagcaagaacattaaaatatcagaccccatggaagagggatgcaggcttggtcctgtcgttagtcaaggacagtacgagaaaatattgaaatttatctcaacggctaaaagtgaaggtgcaacgatcttgcatggtggttcccgacctgagcatcaggaaaagggcttctttattgaaccaaccatcataactgatgtaaccacttcaatgcaaatctggagagaagaagttttcgggcctgttctttgcgtgaaaacatttggcagtgaggatgaggcaattgagctagcaaatgactcccattacggattaggagctgcagtgatatctaatgatacggaaagatgtgaccgtgtcagccaggcctttgaagctgggattgtatggattaactgctcacagccttgctttactcaagctccatggggtggagtcaaacgcagtggatttggacgcgaactaggagaatggggacttgataactacttgagtgtgaagcaagtgactctctacacttcaaacgaaccgtggggatggtacaaatccccctctgcttaa

SEQ ID NO: 121366 - protein, 502 aa, Chorispora bungeana; identical to SEQ ID NO: 87155

SEQ ID NO: 121367 - DNA, 1581 bp, Oryza sativa; identical to SEQ ID NO: 87156
  CDS (1)..(1581)

SEQ ID NO: 121368 - protein, 526 aa, Oryza sativa; identical to SEQ ID NO: 37826

SEQ ID NO: 121369 - DNA, 1858 bp, Panax ginseng; identical to SEQ ID NO: 87164
  CDS (44)..(1555)

SEQ ID NO: 121370 - protein, 503 aa, Panax ginseng; identical to SEQ ID NO: 87165

SEQ ID NO: 121371 - DNA, 1512 bp, Gossypium hirsutum
  CDS (1)..(1512)
atggcggtccaagttccgagtcgacaattattcatcgatggcgagtggagagagcccattctcaaggagcgactcccaaccatcaatcctgctactgaagagatcatcggtaacattccagcggctacagctgaagacgtggagcttgcggtggcggctgctcggagagctctttctagaaacaaaggtaaggattgggctaccgctcctggcgctgtccgtgccaagtatttacgtgccatcgctgctaaggtaacagagagaaaaactgagttggctaagcttgaagcaattgattgtgggaaacctcttgatgaagcagtttgggacattgaagatgttgctggatgttttgagtactatgcagaccttgctgaaggcttagatgcaaggcaaaaggctcctgtctctcttcctatggagacatttaagagttatgtgcttaaggaaccaattggggttgttggattgattactccatggaattacccattattaatggctacatggaaagtagctccttccttggctgctggttgtgctgcaatactgaaaccttcggagttggcatctatcacctgcttggagctggcgaaagtggtgaagggaagtcgtcttcctcctggtgtcctgaacattctggctgggctgggccctgaagctggcgctcctttggcatctcatccagatgttgacaagattgcctttactggaagcagtgcaacagggagcaagataatggcagcagctgctcaaatggtgaagcctgtttctttagagcttggtgggaaaagcccaattattgtgtttgaggatgttgacctcgacaaagctgctgaatggactgcatttggttgcttctggacaaatggacagatttgcagtgcaacatcccgtcttattgtacacgaaaacattgcgagagaatttctggacaggcttgtgaaatggactaaaaacattaagatttctgatccctttgaagaaggatgcaggcttggccccgttgttagtggaggacagtatgagaaagtattgaaattcatctcaactgctaagagtgaaggtgctaccattttgagtggtggagttcgtcctgagcatttaaagaagggattttttgttgaaccaactataataactgatgtgacaacttccatgcaaatctggagagaagaagtttttggacctgttctttgtgtcaagacatttaggacagaagaggaagcccttgaactggcaaatgacacccattatggtttgggtgctgccgtgatatcaaatgacctggaaagatgtgatcgtgtaagcaagaatctccaagctggaattgtgtgggtcaattgttcacagccatgcttctgtcaagctccatggggaggcaataaacgcagtggctttgggcgtgaacttggggaatggggtctcgacaattacttgagtgtgaagcaggtcacgcagtatgtctccgatgaaccatgggggtggtatcgctcaccatcaaagctgtga

SEQ ID NO: 121372 - protein, 503 aa, Gossypium hirsutum; identical to SEQ ID NO: 87167

SEQ ID NO: 121373 - DNA, 1743 bp, Brassica napus
  CDS (35)..(1546)
gatgacttaccaacgcaaaagaaacaagcagagtatggcgattacggtgccgcgacggcagctcttcatcggcggtcaatggacagagccccttcgccgtcaaacactccctgttgtcaatcccgccacggaggacatcatcggttacatcccagctgcaacttctgaggatgtggaactcgcggtggaagctgctaggaaagcacttacaagaaacaaaggaaatgattggtctaaagcatccggggctgttcgtgccagatacttacgtgctattgcagctaaggtaacggagaggaaatctgaactagctaatcttgaggctattgactgcggtaaacctctagatgaagcagcatgggatatggatgatgttgctggatgttttgaatattatgctgacctagctcaaggcttagattcaaagcagaaggctcctctttctcttcccttagatacttttaagggctacgttctcaaggaacccattggtgtagttggcctgattactccatggaattatccgttactgatggctgtttggaaagtcgctcctgcacttgccgctgggtgcacggcaatactgaaaccttctgagttggcctccgtgacatgtttggagctcgctgatatctgccgcgaggtgggtctgccacctggtgttcttaatattctgactggtttaggaactgaagcaggtgctccattggcatcgcatccacacgttgacaagattgttttcactggaagcacggcaactggaagcaacattatgacttctgctgccaaattggttaaacctgtttccttggagcttggtgggaaaagccctatcattgtctttgatgatgtcaaaattgacaaagctgtggaatggactatgtttggttgtttctggacaaacggtcagatttgcagtgcgacatctcgacttctcgtgcatgaaaagattgctgacgaatttttggacaagttggtaaagtggacaaagaacattaagatttcagatccttttgaagaaggctgtaggcttggtcctgttgtcagcaaaggacagtacgagagagtagtgaagtttgtctcaaacgctaggaaggaaggtgcaactgtcctctgcggaggagctcgtcctgggcatttaaaaaagggttattttgttgaacctgctataatttcaaatgtgactacttcaatggaaatctggagagatgaagtatttggtcctgttctctgtgtcaaaacattctccactgaggatgaggcaatacagctggcaaatgactcccaatatggattagcaggcgctgtattatcaaatgatctggagaggtgtgatcgcgttagtaaggcattcgaggcgggtattgtgtgggtcaactgttctcagccatgtttctgtcaagctccatggggtggaaccaaacgcagtggttttggccgtgaactaggagaatggggacttgagaactacttgagtgtgaagcaggtgacgcaatatatatctaatgaaccatggggatggtacaagtctccttccaagctttaagtcaaaacactatacttcttgatgtttcctttaaagatgtaatataccaacctgggttttaaattgcgtgtggcgagccaatgcgattaggggctcgactctcgccaagcgccatggcgaggcaagtcgatcgccatgtgcaacacatttaaaacagtgtgtttttatttatttataactacatgttatgacatggc

SEQ ID NO: 121374 - protein, 503 aa, Brassica napus
MAITVPRRQLFIGGQWTEPLRRQTLPVVNPATEDIIGYIPAATSEDVELAVEAARKALTRNKGNDWSKASGAVRARYLRAIAAKVTERKSELANLEAIDCGKPLDEAAWDMDDVAGCFEYYADLAQGLDSKQKAPLSLPLDTFKGYVLKEPIGVVGLITPWNYPLLMAVWKVAPALAAGCTAILKPSELASVTCLELADICREVGLPPGVLNILTGLGTEAGAPLASHPHVDKIVFTGSTATGSNIMTSAAKLVKPVSLELGGKSPIIVFDDVKIDKAVEWTMFGCFWTNGQICSATSRLLVHEKIADEFLDKLVKWTKNIKISDPFEEGCRLGPVVSKGQYERVVKFVSNARKEGATVLCGGARPGHLKKGYFVEPAIISNVTTSMEIWRDEVFGPVLCVKTFSTEDEAIQLANDSQYGLAGAVLSNDLERCDRVSKAFEAGIVWVNCSQPCFCQAPWGGTKRSGFGRELGEWGLENYLSVKQVTQYISNEPWGWYKSPSKL

SEQ ID NO: 121375 - DNA, 1494 bp, symbiont bacterium of Paederus fuscipes
  CDS (1)..(1494): transl_table=11
atgaccactccgacccgcgccgactgggaaattcgtgccaaagacctgaacatcgaaggtcgtgctttcgttaatggtgaataccgcaatgctgcttccggcgagaccttcgattgcctcagtccggtggatggccgttttctggccaaggttgctagttgcgaccaagctgacgccgagcaggcggtgaaggcggcgcgcgctgctttcgattcgggtgtgtggtcacgcttggcgccggctaagcgtaagcggacgatgatccgcttcgctgatttgctgctgaagaatgccgaagaactggctctgctagaaaccctagatatgggcaagccgattagcgattcgttgcatatcgacgtcagcagcgctgccaacagtatttattggaatgccgaggcgatcgataagatttacgatgaagtcgccgccaccccgcacgaagagttgggcttggtgactcgtgagccggtcggcgtagtcaccgccattgtaccgtggaactttccgctgctaatggcctgctggaagctcggtccggcgttggccaccggtaattcggtgatcctcaaaccgtccgagaaatcgccactgaccgctatccgcatcgcctgtctggctaccgatgctggcatcccgacgggtgtgttcaacgtgttgccgggctacggccacaccgtgggcaaagctttggccctgcacatggatgtggacaccctggtatttaccggttcgaccaggatcgccaagcagctgatgatctacgccggcgaatcgaacatgaagcgtatctggttggaagccggtgggaagagcccgaacattgtcttcgccgacgctccggacctgaaggctgccgccgaggctgctgctagcgccattgcctttaatcagggtgaagtctgtaccgctggttcgcgcctgctagtggaacgctccattaaggatcggttcctaccgttggtagtagaagctctcaagggttggaagccgagcaacccgctggatccagatactaatgttggagctttggtagacacccagcagttgcacacagtgctgtcctatatcgaggctgggcacaaagatggcgccaggctgatggtcggtggtaagcgtattttggaggaaactggtggtgtctatgtcgagccgacccttttcgatggtgtggataacgcgatgaagatcgcccgagaggaaatcttcgggccggtgttgtcggtaatcactttcgaaaatgccgaggaagccgtgcgtattgctaataacacccagtatgggctagcggcggcggtatggaccagtgatctgtctaaagctcacttgactgctaaggcgttgcgtgctggcagtgtttggatcaaccagtatgatggtggtgatatgaccgctccattcggtggtttcaagcagtccggcaacggtcgtgacaagtcgctgcatgcgttcgataagtacactgaactaaaggcgacctggattaaactctaa

SEQ ID NO: 121376 - protein, 497 aa, symbiont bacterium of Paederus fuscipes
MTTPTRADWEIRAKDLNIEGRAFVNGEYRNAASGETFDCLSPVDGRFLAKVASCDQADAEQAVKAARAAFDSGVWSRLAPAKRKRTMIRFADLLLKNAEELALLETLDMGKPISDSLHIDVSSAANSIYWNAEAIDKIYDEVAATPHEELGLVTREPVGVVTAIVPWNFPLLMACWKLGPALATGNSVILKPSEKSPLTAIRIACLATDAGIPTGVFNVLPGYGHTVGKALALHMDVDTLVFTGSTRIAKQLMIYAGESNMKRIWLEAGGKSPNIVFADAPDLKAAAEAAASAIAFNQGEVCTAGSRLLVERSIKDRFLPLVVEALKGWKPSNPLDPDTNVGALVDTQQLHTVLSYIEAGHKDGARLMVGGKRILEETGGVYVEPTLFDGVDNAMKIAREEIFGPVLSVITFENAEEAVRIANNTQYGLAAAVWTSDLSKAHLTAKALRAGSVWINQYDGGDMTAPFGGFKQSGNGRDKSLHAFDKYTELKATWIKL

SEQ ID NO: 121377 - DNA, 1461 bp, Pseudomonas putida
  CDS (1)..(1461): transl_table=11
atgaaagagatcaagcatttcattaacggtgccttcgtcgattcggccagcggccgcaccttcgaggacatcaacccggtcaatggccaggtgatcggccgcgtgcacgaggccggccgcgccgaggtcgacgccgcggtcagggcggcacgcgctgcgctgaagggaccatgggggaagatgacggtggccgagcgcgctgagattctgcatcgcgtggccgatggcgtcacggcgcgcttcgatgagtttctcgaggccgaatgcctggacaccggcaagcccaaatccctggccagccacatcgacattccgcgcggcgcggccaatttcaaggtgttcgccgacctgatcaagaacgtgccgaccgaagccttcgagatggccaccccggacggcgccggtgcactcaactacggcgtgcgccggcccaagggggtgatcggcgtgatcagcccgtggaacctgccgctgctgctgatgacctggaaagtcggcccggccctggcctgcggcaactgcgtggtggtcaaaccatccgaggaaaccccgctgaccgccaccctgctcggcgaggtgatgcaggccgccggtgtgccggccggcgtgtacaacgtggtgcacggtttcggcggcgattcggccggggccttcctcaccgagcacccggacgtcgacgcctacaccttcaccggcgagaccggcaccggcgaaaccatcatgcgcgccgcggccaagggcgtgcgccaggggtcgctggagctgggcggcaagaacgccggcatcgtcttcgccgactgtgacctggacaaggccatcgagggcaccctgcgctcggccttcgccaactgcggccaagtctgcctgggcaccgagcgggtgtatgtcgagcggccgatcttcgacgcgttcgtcgcccgcctgaaggccggcgccgaagcgttgaagatcggcgaaccgaacgatccagaggccaatttcggcccgctgatcagccacaagcaccgtgaaaaagtcctcagttactaccagcaggcagtcgacgacggcgccaccgttgtcaccggcggcggcgtgccggagatgccggcgcacctggccggcggcgcctgggtgcagccgaccatctggaccggcctgaccgacgattcggcggtggtcaccgaggaaatcttcggcccctgctgccatatccgcccgttcgacagcgaggaggaagccattgaactggccaacagcctcccttacggcctggcctcggcgatctggaccgagaacgcttcgcgcgcccaccgcgtcgccgggcagatcgaggccggcatcgtctgggtcaacagctggttcctgcgcgacctgcgcaccgccttcggcggcagcaagcagtcgggcatcgggcgcgaagggggtgtgcactcgctggaattctacaccgagctgaaaaacatctgtgtgaaactctga

SEQ ID NO: 121378 - protein, 486 aa, Pseudomonas putida
MKEIKHFINGAFVDSASGRTFEDINPVNGQVIGRVHEAGRAEVDAAVRAARAALKGPWGKMTVAERAEILHRVADGVTARFDEFLEAECLDTGKPKSLASHIDIPRGAANFKVFADLIKNVPTEAFEMATPDGAGALNYGVRRPKGVIGVISPWNLPLLLMTWKVGPALACGNCVVVKPSEETPLTATLLGEVMQAAGVPAGVYNVVHGFGGDSAGAFLTEHPDVDAYTFTGETGTGETIMRAAAKGVRQGSLELGGKNAGIVFADCDLDKAIEGTLRSAFANCGQVCLGTERVYVERPIFDAFVARLKAGAEALKIGEPNDPEANFGPLISHKHREKVLSYYQQAVDDGATVVTGGGVPEMPAHLAGGAWVQPTIWTGLTDDSAVVTEEIFGPCCHIRPFDSEEEAIELANSLPYGLASAIWTENASRAHRVAGQIEAGIVWVNSWFLRDLRTAFGGSKQSGIGREGGVHSLEFYTELKNICVKL

SEQ ID NO: 121379 - DNA, 1521 bp, Crocus sativus; identical to SEQ ID NO: 38043
  CDS (1)..(1521)

SEQ ID NO: 121380 - protein, 506 aa, Crocus sativus; identical to SEQ ID NO: 38044

SEQ ID NO: 121381 - DNA, 1548 bp, Bixa orellana; identical to SEQ ID NO: 38045
  CDS (1)..(1515)

SEQ ID NO: 121382 - protein, 504 aa, Bixa orellana; identical to SEQ ID NO: 38046

SEQ ID NO: 121383 - DNA, 1524 bp, Gordonia sp
  CDS (1)..(1524): transl_table=11
atgactgtttacgcgaagccgggtaccgagggttcggtgatgagctttgagtcgcgttacgacaactggatcggtggtcagtggaccccgccggtgaagggtcagtacttcgagaatccgtcgccggtcgacggcaagaccttctgtgaggtcgcccggtcgaccgccgaggacattgatctcgcactcgatgccgcgcacaaggccgcaccgcagtggggcaagacctcggtcgccgaacgttcgctggtgctgctgcgcatcgccgatcgtctcgaggaaaacctcgagaagatcgccgttgccgagacctgggacaacggcaaggcggtccgcgagaccctcgccgccgacatcccgctcgccgtcgatcacttccgctacttcgccggcgccctgcgcgcccaggagggatcgatctcggaggtcgacgaggacaccgtcgcctaccacttccacgagccgctcggtgtggtcggccagatcatcccgtggaacttcccgatcctcatggccgtgtggaagctcgcgcccgcgctcgccgcaggcaacgccgtcgtcctcaagccggccgagcagacccccgcgtcgatcctctacgtcatgagcctgatcgccgacctgctgcccgcgggcgtgatcaacatcgtcaacggcttcggtgtggaggcgggcaagccgctcgcatcgagcaaccgcatccgcaagatcgccttcaccggtgagaccaccaccggccggctgatcatgcagtatgcgtcggagaacctgatcccggtcaccctcgagctcggcggcaaaagccccaacatcttcttcaacgatgtgatgagcgccgacgacggcttcctcgatcgtgcgctcgagggcttctcgatgttcgcgctcaaccagggtgaggtctgcacctgcccgagccgcgcgctcatccaggaggacatctacgacgacttcatcggcaaggccgtcgatcgtgtctcgaagatcaagcagggcaacccgctcgacaccgacaccatgatgggtgcccaggcctccaacgatcagttcgagaagatcagttcctacctggccatcggcaaggaagagggcgcgaaggtcctcatcggtggcgagccggccgacctcggcggcgacctctcgggcggctactacatcaagccgacggtgttcgacggccacaacaagatgcgcatcttccaggaggagatcttcggcccggtgctggccgtgaccacattcaaggactacgccgacgccatccacatcgccaacgacaccctctacggactcggtgccggtgtgtggagccgtgacggtgccaccgcctaccgtgcgggccgcgagatccaggccggccgtgtgtggaccaacacctaccacgactacccggcccacgccgcgttcggtggctacaagcagtccggcatcggacgcgagacccacctgatgatgctcgagcactaccagcagaccaagaacctcctggtcggatacgctcagagtgcgaagggattcttctaa

SEQ ID NO: 121384 - protein, 507 aa, Gordonia sp
MTVYAKPGTEGSVMSFESRYDNWIGGQWTPPVKGQYFENPSPVDGKTFCEVARSTAEDIDLALDAAHKAAPQWGKTSVAERSLVLLRIADRLEENLEKIAVAETWDNGKAVRETLAADIPLAVDHFRYFAGALRAQEGSISEVDEDTVAYHFHEPLGVVGQIIPWNFPILMAVWKLAPALAAGNAVVLKPAEQTPASILYVMSLIADLLPAGVINIVNGFGVEAGKPLASSNRIRKIAFTGETTTGRLIMQYASENLIPVTLELGGKSPNIFFNDVMSADDGFLDRALEGFSMFALNQGEVCTCPSRALIQEDIYDDFIGKAVDRVSKIKQGNPLDTDTMMGAQASNDQFEKISSYLAIGKEEGAKVLIGGEPADLGGDLSGGYYIKPTVFDGHNKMRIFQEEIFGPVLAVTTFKDYADAIHIANDTLYGLGAGVWSRDGATAYRAGREIQAGRVWTNTYHDYPAHAAFGGYKQSGIGRETHLMMLEHYQQTKNLLVGYAQSAKGFF

SEQ ID NO: 121385 - DNA, 1653 bp, Zea mays; identical to SEQ ID NO: 38047
  CDS (1)..(1653)

SEQ ID NO: 121386 - protein, 550 aa, Zea mays; identical to SEQ ID NO: 38048

SEQ ID NO: 121387 - DNA, 1458 bp, Burkholderia cepacia
  CDS (1)..(1458): transl_table=11
atgctaaagaaatccacaacttcatcaacggcgaatatgtgccgggtcagcgttggttcgagaagcagctcgccgttgaataacgcggtcattgccaaggtgcacgaagccggccgtgccgaagtcgacgcggcggtggctgcggcgcaggccgcgcttaagggagcgtgggggcgcatgagcttggcccagcgcgtggaagtgctgtacgcggtggccgacggcatcaaccgtcgttttgacgacttccttgccgctgaggtagaggacacgggcaagcctatgagcctagcgcggcatgtggacattccgcgtggggcggccaatttcaagatctttgccgacgtggtgaagaacgtacccactgagttttttgaaatgcctacaccggatggtgtcggggcgatcaactacgccgtgcgtcgaccggtgggggtggtcggggtgatctgtccatggaacctgccgctgctgctgatgacctggaaagtcggcccagcgctggcctgtggcaacaccgttgtggtcaagccctccgaagagacgccgcagaccgctgcattgctgggcgaagtgatgaacacggcgggcgtgccgccaggggtctacaacgtcgtgcacggcttcggccccaactccacgggcgaattcctcacctcccacccggatgtcaacgccatcaccttcaccggtgaaaccggcacgggtgaggccatcatgaaggccgcggctgacggtgctcgccccgtgagtctggagttgggcggcaagaacgctgccatcgtgtttgccgactgcgacctcgacaaggccattgaaggcacgctgcgctcgtgcttcgccaactgtggccaggtctgcctgggtaccgagcgggtatatgtcgagcgccccatctttgatcgttttgtctcccgcctcaaaaaaggcgctgaaggcatgcagctcggccgcccggaagatttggccaccggtatgggcccgctgatttcgcaagagcatcgtgagaaggtgctgtcgtattacaagaaggcagttgaagcgggcgcgacggtggtgacgggcggcggtgtacccgaaatgccggaggcgctcaaaggcggcgcgtgggtgcagcccaccatctggacgggcttgggcgacgactcggtggttgcccgcgaggagatcttcggcccttgcgcgctggtcatgccattcgacagcgaagaagaggtgatccgccgtgccaacgataacgactacggcctggcacggcggatctggaccaccaatctgtcgcgtgcccaccgcgtggcgggggccatcgaggtcggcattgcgtgggtgaactcttggttcctgcgcgatttgcgcaccgcgttcggcgggagcaagcagtcgggtatcgggcgcgagggcggagtccactccctggagttctacacggaactcaaaaacgtttgcatcaaactgtga

SEQ ID NO: 121388 - protein, 485 aa, Burkholderia cepacia
MLKKSTTSSTANMCRVSVGSRSSSPLNNAVIAKVHEAGRAEVDAAVAAAQAALKGAWGRMSLAQRVEVLYAVADGINRRFDDFLAAEVEDTGKPMSLARHVDIPRGAANFKIFADVVKNVPTEFFEMPTPDGVGAINYAVRRPVGVVGVICPWNLPLLLMTWKVGPALACGNTVVVKPSEETPQTAALLGEVMNTAGVPPGVYNVVHGFGPNSTGEFLTSHPDVNAITFTGETGTGEAIMKAAADGARPVSLELGGKNAAIVFADCDLDKAIEGTLRSCFANCGQVCLGTERVYVERPIFDRFVSRLKKGAEGMQLGRPEDLATGMGPLISQEHREKVLSYYKKAVEAGATVVTGGGVPEMPEALKGGAWVQPTIWTGLGDDSVVAREEIFGPCALVMPFDSEEEVIRRANDNDYGLARRIWTTNLSRAHRVAGAIEVGIAWVNSWFLRDLRTAFGGSKQSGIGREGGVHSLEFYTELKNVCIKL

SEQ ID NO: 121389 - DNA, 1461 bp, Pseudomonas sp
  CDS (1)..(1461): transl_table=11
atgaaagaaatcaagcatttcattagcggtgccttcgtcggttcggccagcggcaagctgttcgacaatgtcagcccggccaacggccaggtgatcggccgcgtccacgaggccggccgcgccgaggtcgacgccgcggtcagggcggcacgcgctgcgctgaagggaccctgggggaagatgacggtggccgagcgcgctgagattctgcatcgcgtggccgatggcatcacggcgcgcttcggcgagtttctcgaggcccgaatgcctggacaccggcaagccgaagtcgctggccagccacatcgacattccgcgcggcgcgccaatttcaaggtgttcgccgacctgctcaagaatgttgccaatgaagccttcgagatggccaccccggacggcgccggtgcactcaactacggcgtgcgccggcccaagggggtgatcggggtgatcagcccgtggaacctgccgctgctgctgatgacctggaaagtcggcccggccctggcctgcggcaactgcgtggtggtcaaaccatccgaggaaaccccgctgaccgccaccctgctcggcgaggtgatgcaggccgccggtgtgccggccggcgtgtacaacgtggtgcacggtttcggcggcgattcggccggggccttcctcaccgagcacccggacgtcgacgcctacaccttcaccggcgagaccggcaccggcgaaaccatcatgcgcgccgcggccaagggcgtgcgccaggtgtcgctggagctgggcggcaagaacgccggcatcgtcttcgccgactgcgatatggacaaggccatcgagggcaccctgcgctcggccttcgccaactgcggccaggtctgcctgggcaccgagcgggtgtatgtcgagcggccgatcttcgacgcgttcgtcgcccgcctgaaggccggcgccgaagcgttgaagatcggcgaaccgaacgatccagaggccaatttcggcccgctgatcagccataagccccgtgaaaaagtccccagttactaccagcaggcagtcgacgacggcgccaccgttgtcaccggcggcggcgtgccggagatgccggcgcacctggccggcggcgcctgggtgcagccgactatctggaccggcctggccgacgattcggcggtggtcaccgaggaaatcttcggcccctgctgccatatccgcccgttcgacagcgaggaggaagccattgaactggccaacagcctgccttacggcctggcctcggcgatctggaccgagaacgcttcgcgcgcccaccgcgtcgccgggcagattgaggccggcatcgtctgggtcaacagctggttcctgcgcgacctgcgcaccgccttcggcggcagcaagcagtcgggcatcgggcgcgaagggggtgtgcactcgctggagttctacaccgagctgaaaaacatctgtgtgaaactttga

SEQ ID NO: 121390 - protein, 486 aa, Pseudomonas sp
MKEIKHFISGAFVGSASGKLFDNVSPANGQVIGRVHEAGRAEVDAAVRAARAALKGPWGKMTVAERAEILHRVADGITARFGEFLEARMPGHRQAEVAGQPHRHSARRANFKVFADLLKNVANEAFEMATPDGAGALNYGVRRPKGVIGVISPWNLPLLLMTWKVGPALACGNCVVVKPSEETPLTATLLGEVMQAAGVPAGVYNVVHGFGGDSAGAFLTEHPDVDAYTFTGETGTGETIMRAAAKGVRQVSLELGGKNAGIVFADCDMDKAIEGTLRSAFANCGQVCLGTERVYVERPIFDAFVARLKAGAEALKIGEPNDPEANFGPLISHKPREKVPSYYQQAVDDGATVVTGGGVPEMPAHLAGGAWVQPTIWTGLADDSAVVTEEIFGPCCHIRPFDSEEEAIELANSLPYGLASAIWTENASRAHRVAGQIEAGIVWVNSWFLRDLRTAFGGSKQSGIGREGGVHSLEFYTELKNICVKL

SEQ ID NO: 121391 - DNA, 1629 bp, Lotus corniculatus
  CDS (1)..(1629)
  misc_feature (1392)..(1392): s is g or c
  misc_feature (1560)..(1560): y is t or c
atggctgctcgcactctttcttatctgctttctcgctctcgctctctttcttcttcttctggagctgcttctctgcttccctcacttggaggaaaatctggagggtggagaaacagtaacaacagatatagtactgcagcagtagtagaggaattgatcactccacaagtttcaatcaattacacacagcatctcataaatgggaaattcgtggatgctgcatcagggaaaacttttccagcctatgacccgcgcacaggggatgtgattgctcatgttgctgaaggcgatgctgaagatgtcaaccgtgcggtggcagcagctcgcaaggcctttgatgaaggcccttggccaagaatgactgcttatgaaagaagtcggatattgctgcgcttcgctgatttggttgagaagcacaacgatgagattgcagctctggagacatggaacaatggaaagccttatgaacaggcagccaaggctgaagtgccaacgttcgtgcgtttatttcgctattatgctggctgggcagataaaattcatgggttgactgtccctgctgatggaaattatcatgtccagacattgcatgaaccaattggtgtagcaggacaaattataccttggaactttcctctacttatgtttgcttggaaagttggaccagctctagcatgtggtaacaccattgtccttaagactgctgagcaaacaccgctaacggctcttgttgtggcaaaattacttcatgaggctggtcttcccccaggtgttctgaacatagtttccgggtatggtccaactgctggtgcacctcttgcaagtcacatggatgtggacaagctagcattcactggatcaactgatactggaaaagttgtacttggattggctgcaaaaagtaatcttaagccagtgacattggagcttggagggaaatcacctttcatagtatgtgaggatgctgatgttgacaaggctgttgagcttgcacacttcgctctgttctttaatcaggggcaatgttgctgtgctgggtctcgaacctttgtacatgagcgtgtctatgatgagttcttggagaaatcaaagaaacgggctttgaggcgtgttgttggtgatccgttcaaaaagggtgttgaacaaggtcctcagattgatacagaacaattcgagaaaattcttaggtacatcaaatctggaattgaaagcaatgccacccttgagtgtggcggtgatcgattggggtcaaaaggcttctatgtccagccaaccgtcttctcaaatgttcaggatgatatgctgatagcacaagatgaaatctttggtcctgttcagaccatcttcaaattcaaggaaattgatgaagtaattcgacgggcaaattcaacscgatatggtctagcggctggtgtgttcacccagaacttggccactgccaacactttgatgagggcactgagagctggaactgtgtggatcaattgctttgatgtgtttgatgctgcaattccttttggtggttacaagatgagtgggattggaagggagaaagggatytacagtcttcacaactaccttcaggtgaaagctgttgtcacaccattgaagaatcctgcgtggctgtaa

SEQ ID NO: 121392 - protein, 542 aa, Lotus corniculatus; identical to SEQ ID NO: 38050

SEQ ID NO: 121393 - DNA, 1556 bp, Spinacia oleracea; identical to SEQ ID NO: 87176
  CDS (22)..(1515)

SEQ ID NO: 121394 - protein, 497 aa, Spinacia oleracea; identical to SEQ ID NO: 87177

SEQ ID NO: 121395 - DNA, 1506 bp, Cytophaga sp
  CDS (1)..(1506): transl_table=11
atgagcaataccatccaaagacctgaatttaaggcaaagtacgataattacattaacggaaaatttactgcaccggtaaaaggagaatactttgatgttctttctccaattgatggaaaagtatttacaaaagcagcacattcaggcaaagaagatttagaattagccgtagacgctgcttacgaggcatttaaaacctggggtaaaacatctgttacagaacgtagcattttactcaataagattgcacaaaagatagaagataatctggagtatattgctactgtagaaactattgataacggaaaaccaattcgcgaaacgctggcagcagatattccgctggcaattgatcactttagatattttgcaggcgtaattcgtgctgaagaaagttcaatcgcagaactggattctcaaacggtttctatagctttaagtgaacctttaggagttgtcgctcagattattccatggaatttcccgattttaatggctgtctggaaaatcgctccggcattggcagcgggaaacacaatcgttttgaaacctgcggaaagtacaccaatttctattttagtattaatggaattaataggagatattctgcctccgggagttttgaatattgtgaacggttttggtgctgaattgggccgtccgttagtaacgaataaaaaagtggctaaagctgcctttacaggctctactacaacgggacgtctggtaatgcaatacgcaacagaaaatattattccggtgacactggaacttggtggtaaatctccaaatatcttctttccgtcagtggcagatcatgacgatgatttctttgataaagccatcgaaggcgctgttttatttgccttaaatcagggtgaaatatgtacgtgtccgtcaagattgttaattcatgaggatatctacgagaagtttattgcgagagttatcgaaagaaccgaagctattattgccgggaatccgctggataaatcgactatgattggtgcgcagacttcattagtgcaaaaagaaaaaatcatgtcgtatatcaaacttggtaaagaagaaggcgcagaattgctaaccggaggtgatgaaaatcatttaggaggagatcttgaaggtggttattatatcaaacctactttgtttaaaggacataacaaaatgcgaatttttcaggaagagatctttgggcccgttctggcagtaactacttttaaaactaccgaggaagctattgaaatagccaatgataccatgtacggtttgggagcgggagtatggacacgtgatgcgcatgaaatttatcaggttccaagagcgattcagtcaggtcgtgtctggatcaatcaatatcattcttaccctgcaggagcgccttttggaggttacaaacaatccggaattggtcgtgaaaaccacaaaatgatgttagggcaataccgccagactaaaaatatgctaatttcttatgataaaaagaaattaggtttcttctaa

SEQ ID NO: 121396 - protein, 501 aa, Cytophaga sp
MSNTIQRPEFKAKYDNYINGKFTAPVKGEYFDVLSPIDGKVFTKAAHSGKEDLELAVDAAYEAFKTWGKTSVTERSILLNKIAQKIEDNLEYIATVETIDNGKPIRETLAADIPLAIDHFRYFAGVIRAEESSIAELDSQTVSIALSEPLGVVAQIIPWNFPILMAVWKIAPALAAGNTIVLKPAESTPISILVLMELIGDILPPGVLNIVNGFGAELGRPLVTNKKVAKAAFTGSTTTGRLVMQYATENIIPVTLELGGKSPNIFFPSVADHDDDFFDKAIEGAVLFALNQGEICTCPSRLLIHEDIYEKFIARVIERTEAIIAGNPLDKSTMIGAQTSLVQKEKIMSYIKLGKEEGAELLTGGDENHLGGDLEGGYYIKPTLFKGHNKMRIFQEEIFGPVLAVTTFKTTEEAIEIANDTMYGLGAGVWTRDAHEIYQVPRAIQSGRVWINQYHSYPAGAPFGGYKQSGIGRENHKMMLGQYRQTKNMLISYDKKKLGFF

SEQ ID NO: 121397 - DNA, 1644 bp, Sorghum bicolor
  CDS (1)..(1644)
atggctcggagggccgcgtcctcgctcgtctcccgctgcctcttggccagggcctctgcccccgccgcgccacccgctgtcccctctgcgctgcgcaggccagatgggatgcgcggactgttgccaggcgtccttcagaggttcagcactgcagcagcagtagaggagcccatcacgccctcagtccaagtgaactatacaaagctcctcattaatggcaactttgttgatgctgcatccggcaagaccttcccaactctggaccctcgtacaggggaggtgattgctcatgtggctgagggtgatgcagaggacattaaccgtgcagtagctgctgcccgcaaggcttttgatgaagggccatggccgaagatgactgcctatgagaggtcccgtatcctactgcggtttgctgatttgattgagaagcacaatgatgagcttgctgctttggagacgtgggacaacggaaagccatatgagcaagcagcccatattgaagtaccaatggtggcccgtcttatgcgttactatgctggttgggctgataagatccatgggctcgttgtgccagctgatggcccacaccatgtacagatcttgcatgagccaatcggtgttgcaggtcagatcatcccatggaacttccctcttctgatgtttgcctggaaagttggccctgctttggcatgtggaaacactctcgtgctcaagactgctgagcaaactcctctatcggctttgtatatctccaagctgttgcatgaggctggactacctgagggtgttgtgaatgtcgtttctggttttggccctactgctggtgctgctcttgctagtcacatggatgttgataagcttgcatttacgggatctaccgataccggcaaagttgttcttgagttggctgcaaggagcaaccttaagacagtgacactggagttaggaggcaagtctccttttatcatcatggatgatgctgacattgaccatgctgttgagcttgcgcactttgccctgttctttaaccaggggcaatgctgttgtgctggatctcgcacatttgtacatgagcgtgtttatgatgagtttgtggagaaagccaaggctcgtgcattgaagcgcgtcgttggtgatccattcaggaaaggtgttgaacagggcccgcagattgacgacgagcaattcaacaagatcttgcgctacattaggtctggtgttgacagtggagctaaccttgtgacgggtggtgataggttgggtgagaaaggttactacatccagccaacgattttctcagatgtccaggatggcatgaagattgctcaggaggagatatttgggcctgttcagtcaatcctcaagttcaaggatctcaatgaggttattaagagggcaaatgcgagcccatatggattggccgctggtgtgttcaccaatagcttggacacagccaacaccctgacgcgtgcgctcagggctgggaccgtctggattaactgcttcgacatcttcgatgctgcaattccctttggtgggtacaagatgagcggcattgggagggagaagggcattgacagcctgaagaactacctgcaagtgaaggcagtcgtcacccctatcaagaacgccgcgtggttgtag

SEQ ID NO: 121398 - protein, 547 aa, Sorghum bicolor; identical to SEQ ID NO: 38052

SEQ ID NO: 121399 - DNA, 1656 bp, Sorghum bicolor
  CDS (1)..(1656)
atggctgcaaggagggctgcttcctccgtcctctctcgcttcctcctcacaaggccttcgccttcgccttcgcctgcttctgctgcttctcccgccggcaaatccgccctcctaggagcagggggccctcttcacaggttcagcactgcaccggcagccgctgctgccaccgcagaggagccaatccagcccgccgtggaggtgaagcacacccagctcctcatcaatggcaacttcgttgacgccgcttctgggaagacgttcccgacgctggacccccgcaccggcgaggtcatcgcgcgcgtcgccgagggcgacagcgaggacatcgaccgcgccgtcgccgccgcccgcagggccttcgacgagggcccgtggccgaggatgaccgcctacgagcggtgccgggtgctgctgcgcttcgcggacctgatcgagcggcacgcggaggagatcgcggcgctggagacgtgggacaacgggaagacgctggcgcaggcggcgggcgccgaggtgcccatggtggcgcggtgcatccggtactacgccgggtgggcggacaagatccacggcctggtggtgccgggcgacggcgcgcaccacgtgcaggtgctgcacgagcccgtcggcgtggccgggcagatcatcccctggaacttcccgctgctcatgttcgcctggaaggtcggcccggcgctggcctgcggcaacaccgtcgtcctcaagaccgccgagcagacgccgctctccgcgctctacgtcgccaacctcctccacgaggctgggctccccgagggcgttctgaacgtcgtgtccggcttcggtccgacggccggcgccgcgctctgtagccacatgggtgttgacaagcttgcgttcacgggatcgacgggcacggggcagatcgtgctcgaactggcggcgaggagcaacctgaagccggtgacgctggagctcggtggcaagtcccctttcgtcgtcatggacgacgccgacgtcgaccaggccgtcgagctcgcgcaccaagcggtcttcttcaaccagggccaatgctgctgcgccgggtcgcggacgttcgtgcacgagcgcgtgtacgacgagttcgtggagaagtccaaggcccgcgccctgaagcgcgtggtcggcgaccccttcaggaacggggtcgaacaggggcctcagatcgacggcgatcagttcaacaagatcttgcggtacgtccagtccggtgtcgacagcggcgccaccctcgtcaccggcggcgacagggtaggcagcaggggcttctacatacagccgacggtgtttgccgacgccaaggacgacatgaagatcgctcgggaggagatattcgggccggtgcagaccatcctcaagttcagcggcatggaggaggtgatccggcgcgcgaacgcgacgcactacgggctggcggcgggggtgttcacgcggagcctggacgcggccaacacgctgtcccgggcgctgcgggcgggcacggtgtgggtgaactgctacgacgtgttcgacgccaccatcccgttcggcggctacaagatgagcggcgtcgggcgagagaagggcgtctacgccctccgcaactacctccagaccaaggccgtcgtcacgcccatcaaggaccccgcctggctgtaa

SEQ ID NO: 121400 - protein, 551 aa, Sorghum bicolor; identical to SEQ ID NO: 38054

SEQ ID NO: 121401 - DNA, 1650 bp, Secale cereale
  CDS (1)..(1650)
atggctgctgccgccacgaggagggccgcctcctcgctcgcctcccgctgcctgctctccaggcccgcagcgtcgcccgccgctgtcccctctgcgctccgcagggcagatggggcacgtggattgctgccgggactccttcagaggttcggcactgcggcagcagcagaggagcccatttcgccttctgtccaagtgagcgagacacagctcctcatcaacggcaaattcgttgatgctgcatctggcaagactttcccgactctggaccctcgcactggggaggtgattgcccgtgtgtctgaaggagatgccgaagacgttgaccgtgcggttatcgcagcccgcaaggcattcgatcatgggccatggccaaagatgactgcctatgagagatcccgcattcttctgcggtttgctgatttgatagagaaacacaatgacgatattgctgcactggagacgtgggacaacgggaagccttatgagcaagctgctcaaatcgaagtgccaatgcttgctcggcttatgcggtactatgcaggctggactgacaagatccatggcctcatcgtaccggctgatggcccgcaccatgtacaggtgctgcacgagccgattggtgtcgtgggtcagatcatcccgtggaacttcccacttttgatgtatggctggaaagttggccctgctttggcctgtgggaacactattgttctcaagacggctgaacaaactcctctatctgccctctatgtttctaagctgttgcatgaggctggactacccgaaggtgtcctgaacatcgtatctggtttcggtcctaccgctggggctgctcttgctagccacatggatgttgacaagattgcattcactggatcaactgatactgggaaagttattcttgagttatctgcacggagcaatcttaagccagtgacactggagctaggaggcaagtctccttttatcgtcatggatgacgcagatattgaccaagccgttgagcttgcgcattttgcgctgtttttcaaccagggacaatgctgctgcgctgggtctcgcacgttcgtacatgagcgtgtttatgatgagtttgttgagaagtccaaagctcgtgctttgaagcgtgtagttggtgatccattcaggaaaggtgttgagcagggtcctcagattgatgatgagcaattcaagaagatcttgcgctacattaagtcgggtgtcgacagtggagccacccttgtgacgggtggtgacaagttaggtgacaaaggttactacatccagccaacaattttctcagatgtgcaggatggcatgaagattgcccaagaggagatatttgggcctgttcagtcaatcttcaagttcaatgacctcaatgaggtgatcaagagagcgaacgcaagccagtacgggttggctgccggcgttttcaccaacaacctggacacggccaacaccttgacgcgtgccctcagggccgggacaatctgggtgaactgcttcgacatcttcgacgcggcgatccccttcggcgggtacaagatgagcggcatcggtagggagaagggcatcgacagcctgaagaactacctgcaagtcaaggcggtcgtcaccgcgctcaagaaccccgcatggttgtga

SEQ ID NO: 121402 - protein, 549 aa, Secale cereale; identical to SEQ ID NO: 38056

SEQ ID NO: 121403 - DNA, 1653 bp, Zea mays
  CDS (1)..(1653)
atggctgcaaccgtgaggagggctgcttcctccgtcctctctcgcttcctcctcacaaagccttcgccttcgcctgcttctgccgccggcaataattccgctctcctcggatcaggggctgctgctcttcacaggttcagcaccgcaccggcatccgcggccgcggccgcagaggagccgatccagcccgcggtggaggtgaagcacacccagctcctcatcaatggcaacttcgtcgacgctgcttctgggaagacgttcccgacgctggacccgcgcaccggcgaggtcatcgcgcgcgtcgccgagggcgacagcgaggacatcgaccgcgccgtggccgccgcccgcagggccttcgacgagggcccgtggccgaggatgaccgcctacgatcggtgccgcgtgctgctgcgcttcgcggacctgatcgagcggcacgcggaggaggtcgcggcgctggagacgtgggacaacggcaagacgctggcgcaggcggcgggggccgaggtgcccatggtggcgcggtgcgtccggtactacgccggctgggcggacaagatccacggcctggtggcgccggccgacggcgcgcaccacgtgcaggtgctgcacgagccggtcggcgtggccggccagatcatcccctggaacttcccgctgctcatgttcgcctggaaggtcggcccggcgctcgcctgcggcaacaccgtcgtcctcaagaccgccgagcagacgccgctctccgcgctctacgtggccaacctcctccacgaggctgggctccccgagggtgttctgaacgtggtgtccggcttcggcccgacggccggcgcagcgctctccagccacatgggtgtcgacaagcttgcgttcacgggatcgacgggcacggggcagatcgtgctcgagctggcggcgaggagcaaccttaagccggtgacgctggagctcggtggcaagtcccctttcatcgtcatggacgacgccgacgtcgaccaggccgtcgagctcgcgcaccaggcggtcttcttcaaccagggccaatgctgctgcgccgggtcgcggacgttcgtgcacgagcgcgtgtacgacgagttcgtggagaagtccaaggcccgcgccctgaagcgcgtcgtcggcgaccccttcagggacggggtcgaacaggggcctcagatcgacggcgagcaattcaacaagatcttgcggtacgtccagtccggcgtcgacagcggtgccaccctcgtcgccggcggcgacagggtaggcgacaggggcttctacatacagccgacggtgtttgccgacgccaaggacgaaatgaagatcgctcgggaggagatattcgggccggtgcaaaccattctcaagttcagcggcgtggaggaggtgatccggcgcgcgaacgcgacgccctacgggctggcggcgggggtgttcacgcggagcctggacgcggccaacaccctgtcgcgggcgctgcgggcgggcaccgtgtgggtgaactgctacgacgtgttcgacgccaccatcccgttcggcggctacaagatgagcggcgtcgggcgggagaagggcatctacgccctccgcaactacctccagacaaaggccgtcgtcacacccatcaagaaccccgcatggctgtaa

SEQ ID NO: 121404 - protein, 550 aa, Zea mays; identical to SEQ ID NO: 38058

SEQ ID NO: 121405 - DNA, 1536 bp, Zea mays
  CDS (1)..(1536)
atggcgagcaacggctgcaacggcaacggcaacggcaacggcaacggcaaggcggctccggcgggtgtggtggtaccggagatcaagttcaccaagctcttcatcaacggcgagttcgtcgacgccgcctccggcaagacattcgataccagggacccacggaccggcgacgtgctggcccacgtagcagaggcagacaaagctgatgtggacctggcggtgaagtccgcccgggacgccttcgagcacggcaagtggccccgcatgtcaggctacgagcgcgggcggatcatgagcaagctggcggacctggtggagcagcacacggaggagctggcggcgctggacggtgccgacgccgggaagctgctgctgctgggcaagatcatcgacatccccgcggccacgcagatgctgcgctactacgccggcgccgccgacaagatccacggcgacgtcctgcgcgtctccggcaggtaccagggctacacgctcaaggagcctatcggcgtcgtgggcgtcatcatcccctggaacttccccaccatgatgttcttcctcaaggtcagcccggcgctcgccgcgggctgcaccgtcgtcgtcaagcccgccgagcagacgccgctttccgcgctctactacgcgcacctcgcaaagatggccggcgtccccgacggagtgatcaacgtcgtccccgggttcggccccaccgccggcgccgcgctcgcctcccacatggacgtcgacagcgtggccttcaccggctccacagaggtgggtcgcctcatcatggagtcggccgcgcggagcaacctcaagacggtctcgctggagctcggcggcaagtcgccgctcatcatcttcgacgacgccgacgtcgacatggccgttaacctgtcgaggcttgccgtcttcttcaacaagggagaggtttgcgtggcgggatcgcgcgtgtacgtgcaggaagggatctatgacgagttcgtcaagaaggccgtggaggccgcgcggagctggaaggttggagacccgttcgatgtcaccagcaacatgggccctcaggttgacaaggaccagtttgagagggtcctaaagtacattgagcatggcaagagcgagggagcgactctgctcaccggcggcaagcctgccgccgacaaagggtactacattgagcccaccatctttgtcgatgtcactgaggacatgaagatcgcgcaggaagagatcttcggccccgtcatgtccctcatgaagttcaagacggttgatgaggtgatcgagaaggccaactgcaccaggtacgggctcgccgccgggatcgtgaccaagagcctggacgtcgccaaccgggtgtcccggtcggtgcgcgccggcaccgtgtgggtgaactgctacttcgccttcgacccggacgcgcccttcggcgggtacaagatgagcggcttcggccgggaccaggggctggcagccatggacaagtacctgcaggtcaagagcgtcatcaccgcgctcccggactcgccatggtactga

SEQ ID NO: 121406 - protein, 511 aa, Zea mays; identical to SEQ ID NO: 38060

SEQ ID NO: 121407 - DNA, 1512 bp, Zea mays
  CDS (1)..(1512)
atggcgactgcgaacgggagcagcaaggggtcgttcgaggtgcccaaggtggaggtcaggttcaccaagctcttcatcgacggcaagttcgtcgacgccgtctccggcaagacgttcgagacccgggaccctcgcaccggcgaggtgatcgccagcatcgcggagggaggcaaggccgacgtcgacctcgccgtcaaggccgcccgggaggccttcgacaacgggccctggcccaggatgacgggatacgagcgtggtcggatcctccacaggttcgcggacctgatcgacgagcacgtggaggagctggcggcgctggacacggtggacgccggcaagctgttcgccgtgggcaaggcgcgggacatcccgggcgccgcgcacctgctgcgctactacgccggcgccgccgacaaggtgcacggcgcgacgctcaagatggcgcagcggatgcacgggtacacgctcaaggagcccgtgggcgtggtgggccacatcgtgccctggaactaccccaccaccatgttcttcttcaaggtagggcccgcgctcgccgccggctgcgccgtcgtcgtcaagcccgccgagcagacgccgctgtccgcgctcttctacgcgcacctcgccagggaggccggcgtcccagccggcgtgctcaacgtcgtgccgggattcgggcccacggccggggccgccgtcgccgcccacatggacgtcgacaaggtcagcttcaccgggtccacggaggtcggccgcctcgtcatgagggccgcggccgagagcaacctcaagcccgtgtcgctcgagctgggcggcaagtctcccgtcatcgtcttcgacgacgccgacctcgacatggccgttaacctcgtcaacttcgccacctacaccaacaagggcgagatctgtgtggccggcacacgcatctacgtgcaggaagggatctacgacgagttcgtgaagaaggccgccgagctcgccagcaagtccgtggtcggagacccgttcaacccgagtgtcagccagggcccccaggttgacaaggaccagtacgagaaggtcctcaggtacattgacatcggaaagcgcgaaggcgccacgctggtcaccggagggaagccctgcggcgacaataagggctactacatcgagcccaccatcttcacggacgtcaaggacgacatgacgatcgcacaggatgaaatctttgggccggtgatggctctcatgaaattcaagaccgtggaggaggtgatccagaaagcgaacaacacccggtacggcctggccgccggcatcgtgaccaagaacatcgacgtcgccaacaccgtgtcgcggtccatccgcgccggcgccatctggatcaactgctacttcgcgttcgacccggacgcgccgttcggcgggtacaagatgagcgggttcggcaaggacatgggcatggacgcgctcgacaagtacctgcagaccaagaccgtcgtcactccgctgtacaacactccatggctctga

SEQ ID NO: 121408 - protein, 503 aa, Zea mays; identical to SEQ ID NO: 37834

SEQ ID NO: 121409 - DNA, 1509 bp, Zea mays
  CDS (1)..(1509)
atggcgactgcgaacgggagcagcaaggggccgttcgaggtgcccaaggtggaggtcaggttcaccaagctcttcatcgacggcaagttcgtcgacgccgtctccggcaagacgttcgagacccgggaccctcgcaccggcgaggtgatcgccagcatcgcggagggaggcaaggccgacgtcgacctcgccgtcaaggccgcccgggaggccttcgacaacgggccctggcccaggatgacgggatacgagcgtggtcggatcctccacaggttcgcggacctgatcgacgagcacgtggaggagctggcggcgctggacacggtggacgccggcaagctgttcgccgtgggcaaggcgcgggacatcccgggcgccgcgcacctgctgcgctactacgccggcgccgccgacaaggtgcacggcgcgacgctcaagatggcgcagcggatgcacgggtacacgctcaaggagcccgtgggcgtggtgggccacatcgtgccctggaactaccccaccaccatgttcttcttcaaggtagggcccgcgctcgccgcaggctgcgccgtcgtcgtcaagcccgccgagcagacgccgctgtccgcgctcttctacgcgcacctcgccagggaggccggcgtccccgccggcgtgctcaacgtcgtgccgggattcgggcccacggccggggccgccgtcgccgcccacatggacgtcgacaaggtcagcttcaccgggtccacggaggtcggccgcctcgtcatgagggccgcggccgagagcaacctcaagcccgtgtcgctcgagctgggcggcaagtctcccgtcatcgtcttcgacgacgccgacctcgacatggccgttaacctcgtcaacttcgccacctacaccaacaagggcgagatctgtgtggccggcacgcgcatctacgtgcaggaagggatctacgacgagttcgtgaagaaggccgccgagctcgccagcaagtccgtggtcggagacccgttcaacccgagtgtcagccaaggcccccaggttgacaaggaccagtacgagaaggtcctcaggtacattgacatcgggaagcgcgaaggcgccacgctggtcaccggagggaagccctgcggcgacaagggctactacatcgagcccaccatcttcacggacgtcaaggacgacatgacgatcgcacaggatgaaatctttgggccggtgatggctctcatgaaattcaagaccgtggaggaggtgatccagaaagcgaacaacacccggtacggcctggccgccggcatcgtgaccaagaacatcgacgtcgccaacaccgtgtcgcggtccatccgcgccggcgccatctggatcaactgctacttcgcgttcgacccggacgcgccgttcggcgggtacaagatgagcgggttcggcaaggacatgggcatggacgcgctcgacaagtacctgcagaccaagaccgtcgtcactccgctgtacaacactccatggctctga

SEQ ID NO: 121410 - protein, 502 aa, Zea mays; identical to SEQ ID NO: 38216

SEQ ID NO: 121411 - DNA, 1506 bp, Suaeda liaotungensis
  CDS (1)..(1506)
atgtcgatccctataccttctcgtcagctattcattgatggagagtggagagaacccatcaaacgaaatcgtctcccaattattaatccttccactgaagaaaccattggggaaattccagcagcaacagctgaggatgttgaagcagcagtaagtgctgctagaagagcacttaagaggaacaaagggagagattgggctgctacttctggagctcaccgtgctagatacttgcgtgctattgctgctaaggtatcagaaaaaaaagaccattttgttaaacttgaaaccatggattctgggaaaccactggatgaagcagtgttggacatagatgacgtttcgacatgttttgaatattttgctgatcaagcagaagctctggacaacaagcaaaagtatccagtcaaacttcctatggacagatttaaaagtcatgttctcaggcagcctattggtgttgtgggattaatttcgccatggaattacccacttttgatggcgacatggaaaatcgctccagctcttgctgcaggctgtacagctgtacttaagccatccgagttggcatctgtgacttgtctagaattcggtgaagtttgcaacgaagtgggacttcctcctggtgtgttaaatattttgacgggattaggtccagatgcgggtgcaccattagtgtctcatcctgatgttgacaaggttgcattcactgggagtagtgctactggaagcaaggttatgggttctgctgcccaattggttaagcctgtcaccttggaacttggaggtaaaagtcctataatcgtgttcgaagatgttgttgatcttgatgtagctgctgaatggactatctttggtgttttctggacaaatggtcaaatatgtagcgcaacttctagactgcttgtgcatgagagtattgcagctgaatttgttgaaaagcttgtaaaatggtccaagaaaataaagatttctgatccatttgaagaaggatgccggcttggccctgttattagcaagggacagtatgacaaaattatgaagtacatatcgacagcaaagagtgagggggcaactattttgtgtggaggatctcgtcctgagcatctgaagaagggatacttcattgagccaaccattgtaactgatatcaccacatccatgcaaatttggaaggaggaagtttttggccctgtcttatgtgttaaaacatttagtaccgaagaggaagcccttgaattagcaaatgacacagaatatggtttagctgctgctgtgttttctaaagaccttgaaaggtgtgagagggtaacaaaggctctagaagttggggctgtctgggtgaattgctcacagccatgcttttgccatgctccatggggaggcgtcaagcgtagcggttttggacgtgagcttggagaatggggtattgaaaattacttgaacattaagcaagtgactagcgatatttccgatgaaccatgggggtggtacaagtctccttaa

SEQ ID NO: 121412 - protein, 501 aa, Suaeda liaotungensis; identical to SEQ ID NO: 87197

SEQ ID NO: 121413 - DNA, 1650 bp, Hordeum vulgare
  CDS (1)..(1650)
atggctgctgccgccacgaggagggccgcctcctcgctcgtctcccgctgcctgctctccaggcccgcagcttcccccgccgctgtcccctctgcgctccgcagggcagatggggcacgtggattgttgcctggactccttcagaggttcggcactgcagcagcagcagaggaacccatctcgccttctgtccaagtgggcgagacacagctcctcatcaacggcaaattcgttgatgctgcatctggcaagactttcccgactctggaccctcgcaccggggaggtgattgcccgtgtgtctgaaggagatgccgaagatgtggaccgtgcagttgttgcggcccgcaaggcattcgatgaagggccatggccaaagatgactgcctatgagaggtcccggattcttttgcgatttgctgatttgatagagaaacacaatgatgaaattgctgcactggagacgtgggacaacgggaagccctatgagcaagctgcccacatcgaagtgccaatgcttgctcggcttatgcggtactatgcaggctggactgacaagatccatggcctcatcgtaccggctgatggcccgcaccatgtacaggtgctgcatgagccgattggtgtcgtgggtcagatcatcccgtggaacttcccacttttgatgtatggctggaaagttggccctgctttggcctgtgggaacactattgttctcaagaccgctgaacaaactcctctatctgccctctatgtttctaagctgttgcatgaggctggactacccgaaggtgtcctgaacatcatatctggttttggtcctaccgctggggctgctcttgctggccacatggacgttgacaagattgcattcactggatcaaccgatactgggaaagttattcttgagttatctgcacggagcaatcttaaggcagtgacactggagctaggaggcaagtctccttttatcgtcatggatgatgcagatattgaccaagctgttgagcttgcgcattttgcgctgtttttcaaccaggggcaatgctgctgcgctgggtctcgcacgttcgtacatgagcgtgtttatgatgagtttgttgagaagtcaaaggctcgtgctttgaagcgtgtagttggtgatccattcaggaaaggtgttgagcagggtcctcagattgatgatgagcaattcaagaagatcttgcgctacattaagtcgggtgtcgacagtggagccacccttgtgacgggtggtgacaagttgggtgacaaaggttactacatccagccaacaattttctcagatgtgcaggatgacatgaagatagcccaggaggagatattcgggcctgttcagtcaatcttcaagttcaatgacctcaacgaggtgatcaagagggcgaacgcaagccagtacggattggccgccggcgtttttaccaacaacctggacacggccaacaccttgacgcgtgccctcagggccggcacgatctgggtgaactgctttgacatcttcgatgccgcgatccccttcggcgggtacaagatgagcggcatcggtagggagaagggcatcgacagcctgaagaactacctgcaagtcaaggcggtcgtcaccgcgcttaagaaccctgcgtggttgtga

SEQ ID NO: 121414 - protein, 549 aa, Hordeum vulgare; identical to SEQ ID NO: 38062

SEQ ID NO: 121415 - DNA, 1650 bp, Zea mays
  CDS (1)..(1650)
atggctcggagggccgcgtcctcgctcgtctcccgctgcctcctggcgagggcccctgccggcgcgccgcccgctgccccctctgcgccgcgcaggacagtgcctgcagatgggatgcacaggctgttgccaggtgtccttcagaggttcagcactgcagcagcagtagaggagcccatcacgccgtcagtccatgtgaactacacaaagctcctcattaatgggaactttgttgattccgcatccggcaagaccttcccaactctggaccctcgtacaggggaggtgattgctcatgtggctgagggtgacgcagaggacattaaccgtgcagtagctgcggctcgcaaggcttttgatgaagggccatggccgaagatgactgcctatgagaggtcccgtatcctactgcggtttgctgatttgatagagaagcacaatgacgagcttgctgctttggagacatgggacaacgggaagccatatgagcaagcagcccagattgaagtacccatggtggcccgtcttatgcgttactatgctggttgggctgataagatccatgggctcattgtgccggctgatggcccacaccatgtacagatcttgcatgagccaattggtgttgcaggtcagatcatcccatggaactttcctcttctgatgtatgcctggaaagttggccctgctttggcatgtggaaatactctcgtgctcaagactgctgaacaaacccctctatcggctttgtatatctccaaattgttgcatgaggctggactacctgagggtgttgtgaatgtcgtttctggttttggccctactgctggtgctgctcttgctagtcacatggatgttgataagatcgcatttactggatctaccgatactggaaaaattattctcgagttggctgcaaagagcaaccttaagacagtgacactggagttaggaggcaagtcctctttcatcataatggacgatgctgatgttgaccatgctgttgagcttgcgcactttgccctgttctttaaccagggacaatgctgctgcgctggatctcgcacgtttgtacatgagcgtgtttatgatgagtttgtggagaaggccaaggctcgtgcattgaagcgcgtcgttggtgatccgttcaggaaaggtgttgaacagggcccgcagattgacgacgagcaattcaaaaagatcttgcgctacattaggtatggtgttgacggtggagctacccttgtgacgggtggtgataggttgggtgacaagggtttctacatccagccaacgattttctcagatgtccaggacggcatgaagattgctcaggaggagatatttgggcctgtgcagtcgatcctcaagttcaaagacctcaatgaggttatcaagagggcaaacgcgagccagtatggattggccgccggcgtgttcaccaacagcctggacacggccaacaccctgacgcgcgcgctcagggccgggaccgtctgggtgaactgcttcgacgtcttcgatgctgcgattccgtttggcgggtacaagatgagcggcatggggagggagaagggcgttgacagcctgaagaactacctgcaggtgaaggcggtcgtcaccccaatcaagaacgccgcgtggttgtag

SEQ ID NO: 121416 - protein, 549 aa, Zea mays; identical to SEQ ID NO: 87203

SEQ ID NO: 121417 - DNA, 1476 bp, Pseudomonas putida
  CDS (1)..(1476): transl_table=11
atgaaacattatcgtaattatgtaaatggaaaatggactgagagttcgcgtaccttcgacgacgtaagcccggttgatggctcgctggtggcgatcgttcatgaagcaagccgcgaactcgtggatgaagcggtaaagtccggccaccaggcactatctggtgagtggggccgtaccactgcaacccagcgagtcgcgctgttgcgacgcattgcagatgaaatggagcgccgccaaggtgatttcttagcagcggaaatggccgacaccggtaagccacactccatggcctcaagcattgatgtgccacgaggaattgcaaatttccgaacctttgctgacatcctcgccactgcgcccgtagacagccatcgtttggatttggcagatggcgcttacgcgctcaactactccgcccgaaaacccttgggggttgtcggggtgatttcgccatggaaccttccgctgttgctcatgacctggaaggtcgctccagcactggcctgcggcaataccgtagtggttaaaccgtcagaggacactcctggtaccgcaacgctgctggctgaagtgatggaggccgcgggcgtgccgccgggtgtgttcaacctcgttcatggatttggaccgaactccgccggtgagttcatctcgagccatccggatatcagtgccatcaccttcaccggtgaatcgcgaaccggtacgaccatcatgcgagcggccgcggaaggtgtgaagccggtttcatttgagcttggcggaaagaacgcggcaattatctttgccgattgtgatttcgacaaaatgctcgacacgatgatgcgtgccttgtttctcaacagcgggcaggtttgcttgtgttcggagcgcgtctacgtcgaacgccctttgtacgaccggttttgtgcagctctggtagagcgcatcaaaggcatgaaaatcgattggcctcaggatccggcaacgcaaatgggtccactgatctctgccaaacaccgcgacaaggtgctcggctatttcgaattggcgcgcaccgaaggcgcgacgttcttggctggaggtggggtaccgcattttggcgattcaagggacgacggagcatgggtacaacccaccgtgattaccggtcttggagatgacgcacgctcggttcgtgaagaaatctttggacctatttgtcatgtctcggtcttcgataacgagcaggaagtcatcgctcgcgctaacgacactcgttatggcctagcggccacgatctggacgtccaaccttgggcgtgcacaccgcgtcagtgaagcgatgcgggtaggcatcagttgggtcaatacatggttcctacgtgacttgcgcacaccgtttggtggggccgggttgtcgggtattggtcgcgaaggcgggatgcactcactgaatttttattctgaactgaccaacgtgtgcattcgtatcgacgaggaggtcgctgatgtttga

SEQ ID NO: 121418 - protein, 491 aa, Pseudomonas putida
MKHYRNYVNGKWTESSRTFDDVSPVDGSLVAIVHEASRELVDEAVKSGHQALSGEWGRTTATQRVALLRRIADEMERRQGDFLAAEMADTGKPHSMASSIDVPRGIANFRTFADILATAPVDSHRLDLADGAYALNYSARKPLGVVGVISPWNLPLLLMTWKVAPALACGNTVVVKPSEDTPGTATLLAEVMEAAGVPPGVFNLVHGFGPNSAGEFISSHPDISAITFTGESRTGTTIMRAAAEGVKPVSFELGGKNAAIIFADCDFDKMLDTMMRALFLNSGQVCLCSERVYVERPLYDRFCAALVERIKGMKIDWPQDPATQMGPLISAKHRDKVLGYFELARTEGATFLAGGGVPHFGDSRDDGAWVQPTVITGLGDDARSVREEIFGPICHVSVFDNEQEVIARANDTRYGLAATIWTSNLGRAHRVSEAMRVGISWVNTWFLRDLRTPFGGAGLSGIGREGGMHSLNFYSELTNVCIRIDEEVADV

SEQ ID NO: 121419 - DNA, 1503 bp, Pseudonocardia sp
  CDS (1)..(1503): transl_table=11
atgaccgtgatcgccaagcctgatcatctattgcgtgacgatgtgcagaagttcattgatcgcccgaagaaacttttcattaatggtcagtggcacgactcgatcaagggtgagactctcgaggtttatgaccctgcggttgggacgaagatctgtaccgttgctgcgggcgatgcggaggatgtcgaccgagctgtggcggccgcgcgccacgcgttcgacgaggggccgtggtccaagctaaatccttcggagcgcggcaggctggtttggcggctcgcggaccttctcgaggagcacgcggacgagttcgcacagatcgatgcgcttgacaatggcaaaccggtcacggacgcgcgtgcggtagacgtggcgttctcgatcgaattgctgcgctacatggctggttggtcgaacaaaatctatggtgagacgattccgctcactaacccggctgacttccatgcatacacgcttcgcgagccggtcggcgtggtcgggcagatcgttccttggaacttcccccttatgatggcggtctggaaggtcgctcctgccctggctgcaggctgcaccgtgatcctcaagcccgccgagcagacaccgctgagcgcacttcgcctggccgagctcaccgaggaggccggcttcccgccaggtgtcttcaacgtcatcactggctttggcgagactgcaggtgcggcgatcgccgcccacgacaacatcgacaaggtcgcgttcaccggctcgaccgaggtggggcggttgatcgcccaggcggcgagcggaaacctgaagaaggtctctctcgagcttggcggaaagtctcccgtgatcgtgttcggtgattctgacatcgagcaggctgtcgctggtgcttccagcgccattttctacaacaacgggcagacctgcacggcgggctctcgtctttatgtgcaccggaaggtctacgacaaggtcgtggagggtatcgccagtgaggcgtcggctctcccgattggtcacggtctcgacccggcgacccgcatcgggccgctgatctcggcggagcagcgcgaccgtgtcactggctacatcgcacagggccgtgaggccggtgcagaggtgatcgtgggcggggacactgtcggtgatgggggctacttcattcagccgaccatccttaccaagactgatccgagcatgagcgtggtgcgcgaggagatcttcggcccagtgctgtgcgccatggcctttgacgaagacaccattgatagcgtcgtgcgtgaggcgaacaactcagtgtatgggttggccgcgagtatctacacccgcgacatcagcgtcgcccatcgagtcgcgaagcggctcaaggctgggacgatcggtatcaatacccaccatgtggtcgatgtcgcgctcccattcggcggattcaagcagtccggatatggccgggacatgggccgcgacgcgatcgaccagtacaccgaggtcaagtcgatcggtatcgcactctga

SEQ ID NO: 121420 - protein, 500 aa, Pseudonocardia sp
MTVIAKPDHLLRDDVQKFIDRPKKLFINGQWHDSIKGETLEVYDPAVGTKICTVAAGDAEDVDRAVAAARHAFDEGPWSKLNPSERGRLVWRLADLLEEHADEFAQIDALDNGKPVTDARAVDVAFSIELLRYMAGWSNKIYGETIPLTNPADFHAYTLREPVGVVGQIVPWNFPLMMAVWKVAPALAAGCTVILKPAEQTPLSALRLAELTEEAGFPPGVFNVITGFGETAGAAIAAHDNIDKVAFTGSTEVGRLIAQAASGNLKKVSLELGGKSPVIVFGDSDIEQAVAGASSAIFYNNGQTCTAGSRLYVHRKVYDKVVEGIASEASALPIGHGLDPATRIGPLISAEQRDRVTGYIAQGREAGAEVIVGGDTVGDGGYFIQPTILTKTDPSMSVVREEIFGPVLCAMAFDEDTIDSVVREANNSVYGLAASIYTRDISVAHRVAKRLKAGTIGINTHHVVDVALPFGGFKQSGYGRDMGRDAIDQYTEVKSIGIAL

SEQ ID NO: 121421 - DNA, 1494 bp, Geobacillus thermoleovorans
  CDS (1)..(1494): transl_table=11
atgacaatgatttcggcgcaaacgacggaagccgatttatggattgatggagaatggcggccggctgccagcggcgaacggtttgacgtcatcgacccggcgacgggcgaagtgacggcccgcgtcgccaacgctggcgaggacgatgttgacgcggcggtcgccatcgccgaagaggcgttttcggttcggcgctggctggccatttccccgcttgagcgcggacgcatcttgcgccgcatcgctgaactgatccgccagcatcattgcgagctggcgcagctcatgacgcgggaaaacggcatgccgatcaatctagcgttgtttattgaaattccgctcgccgactgcttcgactttttcgcctcgcttgtcgtcaagccgcaaggggaggtgctgccgttttccgtcgccggctcggcgccggattatatggcgtggacgatgaaggagccgatcggggtggctgggctcatcaccccgtggaactttccgcttttgatgccgacgtggaaaattgccccagcgctggcggcgggctgtacgatggtggtaaaaccggcgccggaaacgccgctgacggcgttgaagcttgctgagatttgccatgaggccggcgtgccggaaggcgtcatcaacgtcctgcctggactcgatgaggccggaaaagcgctcgtccgccatccgcgcgtgccgaaaatcgcctttaccggcgaaacggaaaccgggcgccacatcttgcaggcggccgctccccacattaagcgggtgacgctcgagcttggcggcaagtcgccgaacatcatctttgccgatgccgatctcgaacaggcggcgaaaagcgcgctgtttggcgtgttctacaactccgggcaagtatgccaagcgggaagccgcattttagtggagcggacggtgtacgaaccgtttgtcgagcggttggctgagcgggcgaaaaagctgaaagtcggccccgggacgaacccgcgcagcgaccttggccccgtcatcagccgggagcaatacgagaaagtgttgcgctacattgagatcggcaagcaggaaggagcgcggcttgcggccgggggaagggctttggacgggggtggcggcggctatttcatcgaaccgacggtgtttgccgatgtatcgccatcgatgcgtatcgcctgtgaagaaattttcggcccggtggcggcagtcattccgtttgccgatgaggaagaagccgtccgcatcgccaacgggacgatgtacggcttggcggccgccgtgtggacgaacgacatcaagcgggcgctccgtcttgcccggcgggtgaaaagcggaacggtgtggctcaacacgtaccaagtgctgtcaccgaccgtgccgtttggcgggtacaagcaaagcggactcgggagagagcttggtatgcaggcgcttgatgcttatctcgagacgaaaacggttatttgcgacttgaatgaccggccgatgacgttgttttaa

SEQ ID NO: 121422 - protein, 497 aa, Geobacillus thermoleovorans
MTMISAQTTEADLWIDGEWRPAASGERFDVIDPATGEVTARVANAGEDDVDAAVAIAEEAFSVRRWLAISPLERGRILRRIAELIRQHHCELAQLMTRENGMPINLALFIEIPLADCFDFFASLVVKPQGEVLPFSVAGSAPDYMAWTMKEPIGVAGLITPWNFPLLMPTWKIAPALAAGCTMVVKPAPETPLTALKLAEICHEAGVPEGVINVLPGLDEAGKALVRHPRVPKIAFTGETETGRHILQAAAPHIKRVTLELGGKSPNIIFADADLEQAAKSALFGVFYNSGQVCQAGSRILVERTVYEPFVERLAERAKKLKVGPGTNPRSDLGPVISREQYEKVLRYIEIGKQEGARLAAGGRALDGGGGGYFIEPTVFADVSPSMRIACEEIFGPVAAVIPFADEEEAVRIANGTMYGLAAAVWTNDIKRALRLARRVKSGTVWLNTYQVLSPTVPFGGYKQSGLGRELGMQALDAYLETKTVICDLNDRPMTLF

SEQ ID NO: 121423 - DNA, 1512 bp, Avicennia marina
  CDS (1)..(1512)
atgtcaacgatggcaatccggatgccgacgcggcagctgttcatcgacggcgagtggcgagaacccgtccaaagaaaacgcattctgatcattaaccccgccaacgaacaaactattggggatattccggcagctactgctgaagatgtggatattgctgtggaagctgctcggaaagcatttttccgtaacagtggcaaagattggtcctcgacgactggggcacatcgagccaagtatttacgagccattgctgcaaagattaaagacaggaaagcagaactagtgaaacttgaagcaattgatagtgggaaaccattggtagaagcatctttggatatggatgatgtcattggatgttttgagtattttgctggcattgctgaaagattggattcagagcaaaggacacctgtttctttaccaatggaaacgttcaagtgtcatcttctaaaagaacccattggcgttgttggtttgatctcgccatggaattaccctctgttaatggcaatatggaaagttgcccctgccctagcatctggatgcactgctatacttaaaccatctgaactagcatcagtaacgtgtttggaattggctgaagtgtgtatggaggtgggtcttccacctggtgtactcaacattttgactggtttggggccagaagctggtgctccattggttactcatcctcatgttgccaagatttcatttacggggagtgatactacgggagtcaaaattatgactgctgctgcccaacttgtgaaaccagttacgttggagcttggtggaaaaagcccaatcgttgtgtttgaagatgttgaccttgatacagctgctgagtggaccctcttcggttgcttttggacaaatggtcagatatgcagtgctacttctcgactcttggtgcatgaaagcatagcggcaacattcttggagaagcttgtgaaatggtgcgagaaaattaaaatatcagaccccttagaggaaggttgcaggcttggccctattgttagtcgacggcagtatgagaaagtgatgaagtacatctcaacagctaaggaggaaggtgccacgatcttatgtggaggtgcacgacctgagcatttagagaaaggttactttgttcaaccaactataataacagacgtgaagacttccatgcaaatctggatagaggaagtttttggaccagttctttgcgttaaaacatttgcaactgaagatgaagccattgacctggcaaatgatacccattatggtcttgctgctgcagtaatatcgaaggatcttgataggtgtgagcgaatggctaaggcatttcaagtcggagccgtctgggtcaactgctcacagccttgcttctaccaagccccatggggaggcaaaaagcggagtggttttgggcgtgaacttggggaacggggactggacatctacttgaacgtaaagcaggtcacacagtatgtttctagtgagccatgggattggtacaagtctccttga

SEQ ID NO: 121424 - protein, 503 aa, Avicennia marina
MSTMAIRMPTRQLFIDGEWREPVQRKRILIINPANEQTIGDIPAATAEDVDIAVEAARKAFFRNSGKDWSSTTGAHRAKYLRAIAAKIKDRKAELVKLEAIDSGKPLVEASLDMDDVIGCFEYFAGIAERLDSEQRTPVSLPMETFKCHLLKEPIGVVGLISPWNYPLLMAIWKVAPALASGCTAILKPSELASVTCLELAEVCMEVGLPPGVLNILTGLGPEAGAPLVTHPHVAKISFTGSDTTGVKIMTAAAQLVKPVTLELGGKSPIVVFEDVDLDTAAEWTLFGCFWTNGQICSATSRLLVHESIAATFLEKLVKWCEKIKISDPLEEGCRLGPIVSRRQYEKVMKYISTAKEEGATILCGGARPEHLEKGYFVQPTIITDVKTSMQIWIEEVFGPVLCVKTFATEDEAIDLANDTHYGLAAAVISKDLDRCERMAKAFQVGAVWVNCSQPCFYQAPWGGKKRSGFGRELGERGLDIYLNVKQVTQYVSSEPWDWYKSP

SEQ ID NO: 121425 - DNA, 1650 bp, Oryza sativa
  CDS (1)..(1650)
atggctgccgctgctgcaaggaggggctcatcgctgctctctcgctgcctgctgtccaggcccgccgccgccgcctcgcctgctgtcccctctgcgctccgcagggcagatgggacacaaggattgttgccgggaatccttcagaggttcagcactgcagcagtagcagaggagcccatatcacccccagtccaagtgaactacactcagctcctcattgatggaaaattcgttgattcagcatctggcaaaactttcccaactctggaccctcgtaccggggagctgattgcccatgtggctgaaggcgatgcggaggatattaaccgtgcggttcatgcggcccgcaaggctttcgatgaagggccatggccaaagatgactgcctatgagagatcccggattctgttgcggtttgctgacttgattgagaagcacaacgatgaaattgctgcattggagacatgggacaacggcaagccgtatgcgcaagctgcccagattgaagtaccaatggtggcacggctgatgcggtactatgctggttgggctgacaagatccatgggcttgtcgtgccggctgacggcccacaccatgtacaggtgctgcacgagcccattggtgtcgcaggtcagatcatcccatggaactttccgcttctgatgtttgcgtggaaagttggccctgctttggcttgtggaaacactgttgtgctcaagacggctgagcaaactcctctgtctgctctatttgcttctaagctgttgcatgaggctggactcccagacggtgttgttaacgtggtatctggttttggacctactgctggtgctgctcttgctagtcacatggatgtcgataagattgcattcactggatcgaccgatactggaaaagtcgtccttgagttggctgcaaggagcaaccttaagtcagtgacactggagctaggaggcaagtctcctttcatcatcatggatgatgctgatgttgaccatgctgttgagcttgcgcattttgcactgttctttaaccagggacaatgttgctgtgctgggtctcgtacatttgtgcatgagcgtatctatgatgagttcgtggagaaggccaaggctcgtgctctcaagcgtgtggttggtgatccattcaagaatggtgttgaacagggccctcagattgatgacgagcaattcaacaagatcttgcgctacatcaagtatggtgttgacagtggagccaaccttgtgactggtggcgacagattaggtgacaaaggttactacatccagccaacaattttctcggatgtacaggataacatgaggattgctcaagaagagatatttggccctgtgcagtccattctgaagttcaatgatctgaacgaggtcatcaagagggcaaatgcaagccagtacgggctggctgctggggtcttcaccaacaacctgaacacggccaacaccctgacccgcgcgctcagggtcgggaccgtgtgggtgaactgcttcgacgtcttcgacgccgcgatcccgttcggcggatacaagcagagcggcatcgggagggagaagggcatcgacagcctgaagaactacctgcaggtcaaggccgtcgtcacgccgatcaagaacgccgcgtggttgtaa

SEQ ID NO: 121426 - protein, 549 aa, Oryza sativa; identical to SEQ ID NO: 38064

SEQ ID NO: 121427 - DNA, 1479 bp, Placopecten magellanicus; identical to SEQ ID NO: 38065
  CDS (1)..(1479)

SEQ ID NO: 121428 - protein, 492 aa, Placopecten magellanicus; identical to SEQ ID NO: 38066

SEQ ID NO: 121429 - DNA, 1536 bp, Alcaligenes faecalis
  CDS (1)..(1536): transl_table=11
atgggtgaagaaatgaagactgaatcgaaaaaaccggattctgctcgcagtgagcttgctatgaagtacttccaggcggagtatggccatttcatcaatggtgaatgggtcggtggatccagcagcgaaaaaatcgcgatgattaaccctgccaatctggaggtgctgtcctatatccagtcaggcaacgctgaggatgtaaaccgtgccgtggaggccgccacacaggctttcccgaaatggtctcgcagcacacccagtgagcgtcaggctgcgctctatgaaatggcgcgtcgcctgcgcgcacgggccaatgattacgccgcgatgttgtcgctcgacaatggcaagcctatcatggaggcgctgcatatcgatatcccagccacgattgggcagtttgagttgtttgctggtgctgcatttggtttgcatgggcagaccatagacgcgacacaaggtgtggcgattattcaccgcgagccgcttggtgtcgtggcacagatcattccctggaacgtgccccttgtcatgatggcgacaaagattgcgcctgctctcgctgcgggcaataccattgtgctgaagccggccgagtcggtctgtttggcggtcatggagttcatccgtgagatggctgacctgctgccgccaggcgtgctgaacgtcattaccggctacgggccaaatgtcggtgaagcgcttgtgacccacccgaatgtccgcaaggtagcgttcaccggctcacgcccgaccgcgcaaaaactgatgcaatatgcctccgtcaatgtgattcctcaaacgctggagttgggtggaaaatcggccaacattatttgcgcggacgctgacatggatgcagcggcagagtccgcagccatgagcatcgtggtgaacaagggcgaaatttgctttgccgcgacacgccacttcgtccatgagtcagtgatggatgcatttgtggagaaggttcaaaacattcttcgcaagattcgtgttggcgaccctatgatcccttcgacgcaaatggggcctcaggcctccaggatgcagttcgacaaggttcttggttacctcgatatcgggcgcaatgagggtgcgacaacggcgatggggggtaagcgcgcaacggtgagcggatttgagcaaggctactttattgagccgaccttgtttactgatgtgcgcaacaaaatgcgcatcgctcaagaggagatttttgggccggtcggtgtggtcattccatggaaagacgaggctcaagtcatacgcgaggctaacgacactgaatttggtttggcggctggtctctggaccaaaaacatcacgcaagcccatcgcatggcgcgcgagatcgaagcggggaccgtgtgggtcaaccgctacttcaacatgatccccaatgtaccgttcggtggctacaagcaaagtggtttcggtcgcgaattttcactcgacgttctgagccactacacccaactcaagagtgtgatcgtttccctgcaagaaggacccattgggctgtttgaccattaa

SEQ ID NO: 121430 - protein, 511 aa, Alcaligenes faecalis
MGEEMKTESKKPDSARSELAMKYFQAEYGHFINGEWVGGSSSEKIAMINPANLEVLSYIQSGNAEDVNRAVEAATQAFPKWSRSTPSERQAALYEMARRLRARANDYAAMLSLDNGKPIMEALHIDIPATIGQFELFAGAAFGLHGQTIDATQGVAIIHREPLGVVAQIIPWNVPLVMMATKIAPALAAGNTIVLKPAESVCLAVMEFIREMADLLPPGVLNVITGYGPNVGEALVTHPNVRKVAFTGSRPTAQKLMQYASVNVIPQTLELGGKSANIICADADMDAAAESAAMSIVVNKGEICFAATRHFVHESVMDAFVEKVQNILRKIRVGDPMIPSTQMGPQASRMQFDKVLGYLDIGRNEGATTAMGGKRATVSGFEQGYFIEPTLFTDVRNKMRIAQEEIFGPVGVVIPWKDEAQVIREANDTEFGLAAGLWTKNITQAHRMAREIEAGTVWVNRYFNMIPNVPFGGYKQSGFGREFSLDVLSHYTQLKSVIVSLQEGPIGLFDH

SEQ ID NO: 121431 - DNA, 1467 bp, Bacillus halodurans
  CDS (1)..(1467): transl_table=11
ttggcacatacagtaagcgaacaacgaattcatgaggtaggctcgatgaaacgggaccactatcggatggtcattaacggagaacgggtcgatagcgacgaaacctttgagacgtttaaccctgccaaaggtgagattttagcaacggttgcaaaagcaagtcgtgagcatgcagaaaaggcagttcaggcggctcgccatgctttcgatcacggcaaatggcgaaagtaccctgttggaaaacgtgctcgtgtgcttaatcaaattgccgccattatgagggagcggtttcaagagcttgtagaaatcgaagtgcttaatagtggcaaagcgatcagtgctgctcaaccacaaatcaatcaagcaatcgaagactttgagttttatgctggggcgattgtaggccatcgtggaaccgtaaacaacgtccctaatggatttctgaactacacacagaaggagccggtcggtgtttgtgcacagatcattccgtggaactacccgttgatgatggcagcatggaaagtcgctccggcactagctgcgggttgttctgttgttgttaagccggcaagcttaaccccgattacagcgattcttttaaatgaaatttgccatgaagctggtgtgccagaaggtgtggtcaatacggttgcaggggctggaagcgttgttggtgattatctagttgggcatgaagacgtaaataaagtcgcatttacaggctctactccaatcggaaaagacatcatggaaaaggcctcacacacattgaagcgtgtcacgttagagctcggcggtaaatcacctaatctagtttttgcagatgccgatatggaagcagccgttgcaggttctttatttgggatttactttaatactggtcagtcttgtgaagcgagatcgcgcctgtttgttcatgaagaaatttacgatgagtttatagaggagtttatcactcgcgcaaaaaagttacagctaggagatccatttgataaaggtacacatgtcggttcgatcattagtagagaccagcttgaaatcattgatagctatgttcgttcagcagaggaagaaggggcaacgattgccttaggtggaaaagagaggcgggtggaaggctttgaaaacggccattggtatgagccaacagtcattaccaatgtaacaccagatatgaaggcggtacaggaagaaatctttggacctgttgtggttgtcgaaacgtttcaggatgagagagaggtcattaagcgggccaatgatacgaaattcggcttaggttcagctatttggacgaaagatcaaggtcgtgctacgcgcgtggctcatcagctggaagcagggattgtcatggtgaactgtccattttcggcttttcctggtaccccttttggcggctacaaagaatcaggatttggtcgtgagctttgcgtagagactctcgatctctatatagggagataa

SEQ ID NO: 121432 - protein, 488 aa, Bacillus halodurans
MAHTVSEQRIHEVGSMKRDHYRMVINGERVDSDETFETFNPAKGEILATVAKASREHAEKAVQAARHAFDHGKWRKYPVGKRARVLNQIAAIMRERFQELVEIEVLNSGKAISAAQPQINQAIEDFEFYAGAIVGHRGTVNNVPNGFLNYTQKEPVGVCAQIIPWNYPLMMAAWKVAPALAAGCSVVVKPASLTPITAILLNEICHEAGVPEGVVNTVAGAGSVVGDYLVGHEDVNKVAFTGSTPIGKDIMEKASHTLKRVTLELGGKSPNLVFADADMEAAVAGSLFGIYFNTGQSCEARSRLFVHEEIYDEFIEEFITRAKKLQLGDPFDKGTHVGSIISRDQLEIIDSYVRSAEEEGATIALGGKERRVEGFENGHWYEPTVITNVTPDMKAVQEEIFGPVVVVETFQDEREVIKRANDTKFGLGSAIWTKDQGRATRVAHQLEAGIVMVNCPFSAFPGTPFGGYKESGFGRELCVETLDLYIGR

SEQ ID NO: 121433 - DNA, 1425 bp, Shigella flexneri
  CDS (1)..(1425): transl_table=11
atgcaacataagttactgattaacggagaacgggttagcggcgaaggggaaaaacagcctgtctataatccggcaacgggggacgttttactggagattgccgaggtatccgcagagcaggtcgatgctgctgtgcgtgcggcagatgcagcatttgctgaatgggggcaaaccacaccgaaagcgcgtgcggaatgcctgctgaaactggcggatgttatcgaagaaaatggtcaggtttttgccgaactggaatcccgtaattgtggcaaaccgctgcatagtgcgttcaatgatgaaatcccggcgattgtcgatgtttttcgctttttcgcgggtgcggcgcgctgtctgaatggtctggcggcaggtgaatatcttgaaggtcatacttcgatgatccgtcgcgatccgttgggggtcgtggcttctatcgcaccgtggaattatccgctgatgatggccgcgtggaaacttgctccggcgctggcggcagggaactgcgtagtgcttaaaccatcagaaattaccccgctgaccgcgttgaagttggcagagctggcgaaagatatcttcccggcaggcgtgattaacatactgtttggcagaggcaaaacggtgggtgatccgctgaccggtcatcccaaagtgcggatggtgtcgctgacgggctctatcgccaccggcgagcacatcatcagccataccgcgtcgtccattaagcgtactcatatggaacttggtggcaaagcgccagtgattgtttttgatgatgcggatattgaagcagtggtcgaaggtgtacgtacatttggctattacaatgctggacaggattgtactgcggcttgtcggatctacgcgcaaaaaggcatttacgatacgctggtggaaaaactgggtgctgcggtggcaacgttaaaatctggtgcgccggatgacgagtctacggagcttggacctttaagctcgctggcgcatctcgaacgcgtcagcaaggcagtagaagaggcgaaagcgacagggcacatcaaagtgatcactggcggtgaaaagcgcaagggtaatggctattactatgcgccgacgctgctggctggcgcattacaggacgatgccatcgtgcaaaaagaggtatttggtccagtagtgagtgttacgcccttcgacaacgaagaacaggtggtgaactgggcgaatgacagccagtacggacttgcatcttcggtatggacgaaagatgtgggcagggcgcatcgcgtcagcgcacggctgcaatatggttgtacctgggtcaatacccatttcatgctggtaagtgaaatgccgcacggtgggcagaaactttctggttacggcaaggatatgtcactttatgggctggaggattacaccgtcgtccgccacgtcatggttaaacattaa

SEQ ID NO: 121434 - protein, 474 aa, Shigella flexneri
MQHKLLINGERVSGEGEKQPVYNPATGDVLLEIAEVSAEQVDAAVRAADAAFAEWGQTTPKARAECLLKLADVIEENGQVFAELESRNCGKPLHSAFNDEIPAIVDVFRFFAGAARCLNGLAAGEYLEGHTSMIRRDPLGVVASIAPWNYPLMMAAWKLAPALAAGNCVVLKPSEITPLTALKLAELAKDIFPAGVINILFGRGKTVGDPLTGHPKVRMVSLTGSIATGEHIISHTASSIKRTHMELGGKAPVIVFDDADIEAVVEGVRTFGYYNAGQDCTAACRIYAQKGIYDTLVEKLGAAVATLKSGAPDDESTELGPLSSLAHLERVSKAVEEAKATGHIKVITGGEKRKGNGYYYAPTLLAGALQDDAIVQKEVFGPVVSVTPFDNEEQVVNWANDSQYGLASSVWTKDVGRAHRVSARLQYGCTWVNTHFMLVSEMPHGGQKLSGYGKDMSLYGLEDYTVVRHVMVKH

SEQ ID NO: 121435 - DNA, 1617 bp, Arabidopsis thaliana; identical to SEQ ID NO: 38067
  CDS (1)..(1617)

SEQ ID NO: 121436 - protein, 538 aa, Arabidopsis thaliana; identical to SEQ ID NO: 38068

SEQ ID NO: 121437 - DNA, 1660 bp, Cladosporium herbarum; identical to SEQ ID NO: 38073
  CDS (70)..(1560)

SEQ ID NO: 121438 - protein, 496 aa, Cladosporium herbarum; identical to SEQ ID NO: 38074

SEQ ID NO: 121439 - DNA, 1494 bp, Enchytraeus buchholzi; identical to SEQ ID NO: 38075
  CDS (1)..(1494)

SEQ ID NO: 121440 - protein, 497 aa, Enchytraeus buchholzi; identical to SEQ ID NO: 38076

SEQ ID NO: 121441 - DNA, 1506 bp, Arabidopsis thaliana; identical to SEQ ID NO: 87226
  CDS (1)..(1506)

SEQ ID NO: 121442 - protein, 501 aa, Arabidopsis thaliana; identical to SEQ ID NO: 87227

SEQ ID NO: 121443 - DNA, 1789 bp, Beta vulgaris; identical to SEQ ID NO: 87230
  CDS (36)..(1538)

SEQ ID NO: 121444 - protein, 500 aa, Beta vulgaris; identical to SEQ ID NO: 87231

SEQ ID NO: 121445 - DNA, 1464 bp, Rhizobium meliloti
  CDS (1)..(1464): transl_table=11
atgagagcccaaccgaaagcctcgcacttcatcgacggcgaatatgtcgaggacgccgccggcacggtgatcgagagcatctatccggcgaccggcgaaatcatcgcccggctccatgccgcaacgcctgggatcgtcgagaaggcgatcgccgcggccaagcgcgcgcagccggaatgggcggcgatgagcccgacggcgcgcggccgcatcctgaagcgggccgccgagctcatgcgccagcgcaaccgcgagctttccgaactcgaaacgctcgacaccggcaagccgatccaggaaaccatcgtcgccgacccgacgtccggcgccgacagtttcgaattcttcggcggcgtcgcgcccgccgcactcaacggcgattatatcccgctcggcggcgacttcgcctatacgaagcgggtgccgctcggcgtctgcgtcggcatcggcgcctggaactatccgcagcagatcgcctgctggaagggtgcgcctgcgctcgtcgccggcaatgcgatggtgttcaagccttcggaaaacaccccgctcggcgcgcttaagatcgccgaaatccttatcgaagcgggtctgccgaagggcctgttcaacgtcatccagggcgaccgcgcgacgggcccgctcctcgtcaaccatccggacgtcgccaaggtgtcgctcaccggctccgtgccgacgggcaaaaaagtcgcgggcgccgcggcggccgaactcaagcacgtcaccatggagctcggcggcaagtcgccgctgatcgtcttcgacgatgccgatctcgaaagcgcgatcggcggcgccatgctcggcaatttctattcgaccggccaggtctgctccaacggcacgcgcgtcttcgtgcaaaggaagatcaaggagcctttcctcgcccgcctcaaggaacgcaccgaagcgatcgtcatcggcgaccccctggacgaggcgacgcagctcggtccgatggtctcggcggcgcaacgcgacaaggtcttctcctatatcgggaagggcaaggcggaaggcgcccgcctcgtcaccggcggcggcattcccaataatgtgagcggcgaaggcacctatatccagccgaccgtcttcgccgacgtcaccgacgggatgacgatcgcgcgcgaagaaatcttcggaccggtcatgtgcgtgctcgacttcgacgacgaggtggaagtcatcgcacgcgccaacgccaccgaattcggcctttcggccggcgtcttcaccgcggacctcacccgcgcccaccgggtcgccgaccggctcgaagccggcacgctctggatcaacacctacaatctctgcccggtcgagatcccctttggcgggtccaagcaatcgggtttcgggcgggagaattcggtcgcggcgctcaaccactataccgagctcaagaccgtctatgtcggcatggggccggtcgaggcgccgtattga

SEQ ID NO: 121446 - protein, 487 aa, Rhizobium meliloti
MRAQPKASHFIDGEYVEDAAGTVIESIYPATGEIIARLHAATPGIVEKAIAAAKRAQPEWAAMSPTARGRILKRAAELMRQRNRELSELETLDTGKPIQETIVADPTSGADSFEFFGGVAPAALNGDYIPLGGDFAYTKRVPLGVCVGIGAWNYPQQIACWKGAPALVAGNAMVFKPSENTPLGALKIAEILIEAGLPKGLFNVIQGDRATGPLLVNHPDVAKVSLTGSVPTGKKVAGAAAAELKHVTMELGGKSPLIVFDDADLESAIGGAMLGNFYSTGQVCSNGTRVFVQRKIKEPFLARLKERTEAIVIGDPLDEATQLGPMVSAAQRDKVFSYIGKGKAEGARLVTGGGIPNNVSGEGTYIQPTVFADVTDGMTIAREEIFGPVMCVLDFDDEVEVIARANATEFGLSAGVFTADLTRAHRVADRLEAGTLWINTYNLCPVEIPFGGSKQSGFGRENSVAALNHYTELKTVYVGMGPVEAPY

SEQ ID NO: 121447 - DNA, 1446 bp, Rhizobium meliloti
  CDS (1)..(1446): transl_table=11
atggcgacgccgctctgtcagccggccgcttcacattttatcgacggcacctttattgaggatcgcaccggtcctgagatcctctccgtcaatccggtggatggtgagatcatcgccaaattgcatggggcgacttcctgcatcatcgagaaggcaattgcctcggcgaaacgggcgcagaaagaatgggctcggaaagagccggcggagcggggtcgcgtcctcagtcgcgccgctgacatcatgcgggcgcgaaacagggaactgtcggttctcgaaacgcgcgatacaggcaagccaatttctgaaacactggtggcggacgccgctagcggtgccgattgcctcgagtattttggcgcaatcgcggcgacactttcgggagacagcatccagttcggagaagattgggtctacacacggcgggagccgcttggggtctgtctcggaataggggcctggaactaccccatccagattgcggcctggaaggcagcccccgcgcttgcttgcgggaatgccatgatattcaagccgtcggaagtgaccccattgtcagcgctcaagctcgcggaaattctgactgaagcggggcttcctcctggcgttttcaatattgtgcaaggtgccggtgatgttggggctgagctcgccacccatccggcgatcgccaaagtctccctcaccggctcggtcaagactggcgcgagggtcgcctcggccgccatggccggcatccggccagtaacgatggagcttggtggaaagtctgcgctgatcgtcttcgacgatgcagatgttgaggcagccgtcagcggcgcaattctcgggaatttttattcggccggccagatctgctcaaacggtacgcgcgttttcctgcagcgcggaataagggaagcgttccttgcgcgcttgctggcccgggtcgcggctttgaagattggtgatccgatggacgaggagaccgacatcgggccgctagtcagcgccgcccatcgcaaccgggttgccacatacgtcgcccgcgccgaggttgagggagcataccagatggcgcctccgcgcaagcttccaccaggggatgcctggcacgagcccgtagtcttcacgaatgttacggattggatgacgcttgctcgggaagaagtgttcggtccggtcatggccgtcctggacttcgatgacgagcaagatgtcgtcgcaagagccaatgcaacggacttcggattggcagcaggcatattcacgagagacctcgttcgtgcccataggttggcggctgagctcgaagccggaaccgtgtggatcaacgcttacaacttgacgccagctggcatggcgttcggcggaatcaagagatcaggcatcgggcgcgaaaacgggcgtgtcgcgatcgaccactatacccagctcaagtctgtgttcgtcagcatgcagacataa

SEQ ID NO: 121448 - protein, 481 aa, Rhizobium meliloti
MATPLCQPAASHFIDGTFIEDRTGPEILSVNPVDGEIIAKLHGATSCIIEKAIASAKRAQKEWARKEPAERGRVLSRAADIMRARNRELSVLETRDTGKPISETLVADAASGADCLEYFGAIAATLSGDSIQFGEDWVYTRREPLGVCLGIGAWNYPIQIAAWKAAPALACGNAMIFKPSEVTPLSALKLAEILTEAGLPPGVFNIVQGAGDVGAELATHPAIAKVSLTGSVKTGARVASAAMAGIRPVTMELGGKSALIVFDDADVEAAVSGAILGNFYSAGQICSNGTRVFLQRGIREAFLARLLARVAALKIGDPMDEETDIGPLVSAAHRNRVATYVARAEVEGAYQMAPPRKLPPGDAWHEPVVFTNVTDWMTLAREEVFGPVMAVLDFDDEQDVVARANATDFGLAAGIFTRDLVRAHRLAAELEAGTVWINAYNLTPAGMAFGGIKRSGIGRENGRVAIDHYTQLKSVFVSMQT

SEQ ID NO: 121449 - DNA, 1473 bp, Acinetobacter sp
  CDS (1)..(1473): transl_table=11
atgagtgatgtaaaacttcatcgtttatatatccatggacaatatacagatgcaaccagtggcaaaacatttgacagcatcaaccctgcaacaggtgaagtcattgccaccattcaacaagcctctcaaaccgacattgaagctgctgtaaaaagtgcagccgaaggccaaaaagtctgggcagccaaaacagccgttgaacgttcacgcatcctgcgccgtgcagtagatattttacgtgaacgtaacgatgaacttgctcagttagaaacactggatactggcaaggcttttagcgaaacctctaccgttgacattgtgacgggtgcagatgtactcgaatactatgcagggctggcaaccgcgattcagggcgaacaagttcctttacgtgaaagcagttttttttatacccgccgtgaacctttaggtgttgttgcaggcattggtgcctggaactatccaatccagattgcgctttggaaatctgctcctgcacttgcggcaggaaatgccatgatttttaaacccagtgaagtgacaccactgactgcatttaaacttgccgaaatttattctgaagcaggcctacctgcgggtgtatttaatgtggtgcaaggtgcgggtcgtgaaattggacaatggctgaccgagcatgctgtgattgaaaaaatttcctttacgggtggtgtggaaactggcaaaaaagtcatggccagtgctgctggatcaacccttaaagaagtcaccatggagcttggtggtaaatcgccactgatcatctgtgaagatgccaatcttgatcgcgccgcagatattgctgtcatggcaaacttttttagctcaggtcaggtatgtaccaatggcacacgtgtttttattccacagcgcttaaaggctgcatttgaacaggcagttgttgaacgtgtgaaacgtattcgtatgggtgatccacaacatacagacaccaattttgggccattggtcagctttccacatatggaaaaagtgttgtcttatatcgaatctggtaagcagcaaggtgccaaagttttaattggtggcgaacgcgcaacaacgggtttactggctcaaggggcttatgtacaaccaacggtctttaccgactgccacgatgacatgaaaatcgtacaagaagaaatttttggtccagtcatgagtattttgacttatgacacgattgaagaagcgattgaacgtgccaataataccaactttggtttggctgctggtgtggtcacacagaatatttcccaggcgcatcaaattattcatcagcttgaagcaggaatctgctggatcaatacttggggtgaatcccctgccgaaatgcctgtcggtggttacaaggaatcaggcgtagggcgtgaaaacgggatttcaacgctcaatcattatacccgtaccaaatccattcaggtcgaactgggcgattatcaaagcgtgttttaa

SEQ ID NO: 121450 - protein, 490 aa, Acinetobacter sp
MSDVKLHRLYIHGQYTDATSGKTFDSINPATGEVIATIQQASQTDIEAAVKSAAEGQKVWAAKTAVERSRILRRAVDILRERNDELAQLETLDTGKAFSETSTVDIVTGADVLEYYAGLATAIQGEQVPLRESSFFYTRREPLGVVAGIGAWNYPIQIALWKSAPALAAGNAMIFKPSEVTPLTAFKLAEIYSEAGLPAGVFNVVQGAGREIGQWLTEHAVIEKISFTGGVETGKKVMASAAGSTLKEVTMELGGKSPLIICEDANLDRAADIAVMANFFSSGQVCTNGTRVFIPQRLKAAFEQAVVERVKRIRMGDPQHTDTNFGPLVSFPHMEKVLSYIESGKQQGAKVLIGGERATTGLLAQGAYVQPTVFTDCHDDMKIVQEEIFGPVMSILTYDTIEEAIERANNTNFGLAAGVVTQNISQAHQIIHQLEAGICWINTWGESPAEMPVGGYKESGVGRENGISTLNHYTRTKSIQVELGDYQSVF

SEQ ID NO: 121451 - DNA, 1482 bp, Agrobacterium tumefaciens
  CDS (1)..(1482): transl_table=11
atgaccattgcgacgccgctcaaggcgcagccgaaagcctcgcatttcatcgacggggattatgtcgaggacaataccggcacgccgttcgagagcatcttccctgcaacgggcgaaatgattgcaaaactgcatgcggcaacgcccgccatcgtcgagcgcgccatcgcctcggccaagcgcgcccagaaggaatgggcggcgatgagccccatggcccgcggtcgcatcctcaagcgcgccgccgatatcatgcgcgaacgcaacgatgcgctttccacgctcgagacgctggataccggcaagccaatccaggaaaccatcgtcgccgatcccacctccggcgccgatgccttcgagtttttcggcggcatcgcaccttccgcgctgaatggcgattatatccccctcggcggcgatttcgcctataccaagcgcgtgccgctcggtgtctgcgttggtatcggcgcctggaactatccgcagcagattgcctgctggaaggctgcaccggccctcgtcgccggcaatgccatggtcttcaagccctcggaaaacaccccgctcggtgccctgaagatcgccgaaatcctgatcgaggcgggcctgccaaaaggcctcttcaacgtcattcagggtgatcgcgataccggcccacttctagtcaatcatcccgatgtcgccaaggtctctctcaccggctcggtgccgaccggtcgcaaggtggcggccgccgctgccgggcatctgaaacatgtgacgatggaactcggtggcaagtcgccgatgatcgtcttcgacgacgccgatattgaaagtgccgtcggtggggccatgctcggcaacttctattcttccggccaggtctgctcgaacggcacgcgtgtcttcgtgcagaaaaaggcgaaggcgcgtttcctcgaaaacctgaaacgccgcaccgaggcgatgatcctcggcgaccccttggattacgccacccatctcggcccgctggtctccaaggcccagcaggaaaaggttctgtcctatatcgaaaagggcaaggcagagggtgcaacgctgatcaccggcggcggcattcccaataatgtcgcgggtgagggcgcctatgttcagccgactgtctttgccgatgtcaccgacgacatgaccatcgcccgcgaggaaatcttcgggcctgtcatgtgcgttctggatttcgacgatgaggacgaggttctcgcccgcgccaacgccaccgaattcggccttgccggcggcgtctttaccgccgacctcgcccgcgcccaccgtgtggtggatgggctggaggcgggcacgctctggatcaacacctacaatctctgcccggtggaaattccctttggcggctccaagcaatccggtttcggacgggagaattccgccgcggcgctggagcattatagcgaattgaagaccgtttatgtcagcacggggaaggtggacgcgccttattaa

SEQ ID NO: 121452 - protein, 493 aa, Agrobacterium tumefaciens
MTIATPLKAQPKASHFIDGDYVEDNTGTPFESIFPATGEMIAKLHAATPAIVERAIASAKRAQKEWAAMSPMARGRILKRAADIMRERNDALSTLETLDTGKPIQETIVADPTSGADAFEFFGGIAPSALNGDYIPLGGDFAYTKRVPLGVCVGIGAWNYPQQIACWKAAPALVAGNAMVFKPSENTPLGALKIAEILIEAGLPKGLFNVIQGDRDTGPLLVNHPDVAKVSLTGSVPTGRKVAAAAAGHLKHVTMELGGKSPMIVFDDADIESAVGGAMLGNFYSSGQVCSNGTRVFVQKKAKARFLENLKRRTEAMILGDPLDYATHLGPLVSKAQQEKVLSYIEKGKAEGATLITGGGIPNNVAGEGAYVQPTVFADVTDDMTIAREEIFGPVMCVLDFDDEDEVLARANATEFGLAGGVFTADLARAHRVVDGLEAGTLWINTYNLCPVEIPFGGSKQSGFGRENSAAALEHYSELKTVYVSTGKVDAPY

SEQ ID NO: 121453 - DNA, 1473 bp, Bacillus subtilis
  CDS (1)..(1473): transl_table=11
atgagtcaaacattattcattgacggagaatggatcagtgccgaaaaagaacagatccgcagtattatcaacccatttaatcaagaagaaattgcaactgtaagcgagggagggcgagaggacgccatcaaagcaatcgcagccgcacgtagagcatttgacaaaggagaatggtcatcgctatccgggcttgaacgcggaaaaattgttctgaaaattgcggaattaatcagacgcgatcttgaggagctggctgagcttgaatctcttgatacaggaaaaacactcgaagaaagcaaggccgatatggacgatatcgccaatgtttttcaatattacgccggcttggcagacaaagatggcggagagatcatttcatctccgattcctgattcagaaagcaaaattattagggagccaatcggggtttgcggccagatcactccatggaattatccgctccttcaagcgagctggaaaatcgcccctgcactggccgcaggaaacacaatcgtcatgaagccgagtgagattacgccgctgacgacaatcaaagtctttaagctgatggaagaagccggtgttccaaaaggtgtcgcaaatcttgttcttggaccgggagccacagtgggcgacgagcttgccgtaaacaaagacgtcgatttgatttcatttacgggcggaattgaaacaggcaaaaaaatcatgcgggcggcaagcggaaacgtcaaaaaaatcgcccttgaacttggcgggaaaaacccaaatattgttttcaaggacgcggatttagaagttgcggttgatcaggccttaaacgctgtatttttccacgccggccaagtatgctctgcaggttcccgcttgcttgttgaggatgccattcatgatcaatttttggcggagctggtcaaacgggcaaaacgcataaaactcggaaacggttttcatgctgagacagaaagcggtccgcttatttcggcggagcacagggcaaaggtagaaaaatatgtagagatcggaatagaggaaggcgcgaagctggagacaggaggcaaacgcccggaagatcctgagcttcaaaacggctttttctatgaacctactattttctcaaactgtaattctgacatgagaatcgttcaggaagaggttttcggtcctgtattgacagtcgaaaccttcagctctgaagaagaggtaatcgagcttgcgaatgataccatctatggcttggctggagcggtatggtcaaaagacattgaaaagtgcgaacgggtagcagcccgcttgagaatgggaaccgtttggatcaacgattttcatccgtactttgcacaagcgccatggggcggatataagcaatccgggttcggacgcgagcttggaaaaataggccttgaagaatacacagaagtcaaacatgtataccgcaatacaaaaccggcagcggttaactggtttaattcataa

SEQ ID NO: 121454 - protein, 490 aa, Bacillus subtilis
MSQTLFIDGEWISAEKEQIRSIINPFNQEEIATVSEGGREDAIKAIAAARRAFDKGEWSSLSGLERGKIVLKIAELIRRDLEELAELESLDTGKTLEESKADMDDIANVFQYYAGLADKDGGEIISSPIPDSESKIIREPIGVCGQITPWNYPLLQASWKIAPALAAGNTIVMKPSEITPLTTIKVFKLMEEAGVPKGVANLVLGPGATVGDELAVNKDVDLISFTGGIETGKKIMRAASGNVKKIALELGGKNPNIVFKDADLEVAVDQALNAVFFHAGQVCSAGSRLLVEDAIHDQFLAELVKRAKRIKLGNGFHAETESGPLISAEHRAKVEKYVEIGIEEGAKLETGGKRPEDPELQNGFFYEPTIFSNCNSDMRIVQEEVFGPVLTVETFSSEEEVIELANDTIYGLAGAVWSKDIEKCERVAARLRMGTVWINDFHPYFAQAPWGGYKQSGFGRELGKIGLEEYTEVKHVYRNTKPAAVNWFNS

SEQ ID NO: 121455 - DNA, 1464 bp, Brucella abortus
  CDS (1)..(1464): transl_table=11
atgaaagcacaacccaaagcctcgcacttcattggcggcgcattcgtggaagacaaggcgggcaagccgctgcccgtgatctatccggcaaccggcgaggaaatcgccagtctttattccgcgacgccaggcattatcgaagcggcttacgcagcagcactgaaagcgcaaggcgaatgggcagcattgaaacccgtcgagcgcgggcgcatcctgcgccgcacggcggaaatcctgcgcgagaagaaccggaaattgtcgaagctcgaaacgctggataccggcaaggcgcttcaggaaacgctcgttgcagatgccgcttcggctgccgatgcgctggagtttttcggcggcattatttccggcttcaatggcgagttcgtggagcttggcggctcgtttgcctatacacgccgcgaggcactcggcatctgcgtcggtatcggcgcatggaactatccgatccagatcgcagcgtggaaatcggcaccggcgcttgccatgggcaatgccttcatcttcaaaccatccgaaaacacgccgctttcagcactggcactggcggaagcctataaggaagcggggcttcctgacgggctgttcaatgtcgtgcagggttatggcgatgtgggtgctgcgctcgtcaatcatcgcctgacggcaaaggtttcgctgacgggttccgtgccgaccggcagacgcatcatggcgcaggctggcgaacagctgaaacatgtcaccatggagcttggcggcaagtcgccgctcatcgtcttcgatgacgccgaccttgaaagcgccatcggcggcgcaatgctcggcaatttctattcgaccggtcaggtctgctcgaacggcacccgcgtcttcgttcacaagaatatccgcgaacgtttcatcgagcgccttgtcgagcgcacgcgaaaaatccgtatcggcgatcccttcgatgaagccacgcagatgggtccgctcatcagcgccgcccagcgcgacaaggttctatcctatatcaaaaaaggcaaggcggaaggcgcaacacttgcctgtggcggcggcgtgccgaaattgcagggcttcgataagggcttcttcatcgagccgacggtctttgcagatgttaccgacactatgaccatcgcacgcgaggaaatcttcgggccggtgatgagcgtgctggaattttccgatgaggacgaagtgattgcgcgcgccaatgatagcgaattcggccttgcggcaggcgtcttcactgccgatctttcccgcgggcatcacgtgatcggccagatcaaggccggcacatgctggatcaatgcctataatctgacgcccgtggaagtgcctttcggcggctacaagcaatcgggcatcggccgtgaaaacgggatcgccgcgcttgcccattacagccagatcaagaccgtctatgtggagatgggcaaggtagacagcccctactga

SEQ ID NO: 121456 - protein, 487 aa, Brucella abortus
MKAQPKASHFIGGAFVEDKAGKPLPVIYPATGEEIASLYSATPGIIEAAYAAALKAQGEWAALKPVERGRILRRTAEILREKNRKLSKLETLDTGKALQETLVADAASAADALEFFGGIISGFNGEFVELGGSFAYTRREALGICVGIGAWNYPIQIAAWKSAPALAMGNAFIFKPSENTPLSALALAEAYKEAGLPDGLFNVVQGYGDVGAALVNHRLTAKVSLTGSVPTGRRIMAQAGEQLKHVTMELGGKSPLIVFDDADLESAIGGAMLGNFYSTGQVCSNGTRVFVHKNIRERFIERLVERTRKIRIGDPFDEATQMGPLISAAQRDKVLSYIKKGKAEGATLACGGGVPKLQGFDKGFFIEPTVFADVTDTMTIAREEIFGPVMSVLEFSDEDEVIARANDSEFGLAAGVFTADLSRGHHVIGQIKAGTCWINAYNLTPVEVPFGGYKQSGIGRENGIAALAHYSQIKTVYVEMGKVDSPY

SEQ ID NO: 121457 - DNA, 1464 bp, Brucella suis
  CDS (1)..(1464): transl_table=11
atgaaagcacaacccaaagcctcgcacttcattggcggcgcattcgtggaagacaaggcgggcaagccgctgcccgtgatctatccggcaaccgacgaggaaatcgccagtctttattccgcgacgccaggcattatcgaagcggcttacgcagcagcactgaaagcgcaaggcgaatgggcagcattgaaacccgtcgagcgcgggcgcatcctgcgccgcacggcggaaatcctgcgcgagaagaaccggaaattgtcgaagctcgaaacgctggataccggcaaggcgcttcaggaaacgctcgttgcagatgccgcttcggctgccgatgcgctggagtttttcggcggcattatttccggcttcaatggcgagttcgtggagcttggcggctcgtttgcctatacacgccgcgaggcactcggcatctgcgtcggtatcggcgcatggaactatccgatccagatcgcagcgtggaaatcggcaccggcgcttgccatgggcaatgccttcatcttcaaaccatccgaaaacacgccgctttcagcactggcactggcggaagcctataaggaagcggggcttcctgacgggctgttcaatgtcgtgcagggttatggcgatgtgggtgctgcgctcgtcaatcatcgcctgacggcaaaggtttcgctgacgggttccgtgccgaccggcagacgcatcatggcgcaggctggcgaacagctgaaacatgtcaccatggagcttggcggcaagtcgccgctcatcgtcttcgatgacgccgaccttgaaagcgccatcggcggcgcaatgctcggcaatttctattcgaccggtcaggtctgctcgaacggcacccgcgtcttcgttcacaagaatatccgcgaacgtttcatcgagcgccttgtcgagcgcacgcgaaaaatccgtatcggcgatcccttcgatgaagccacgcagatgggtccgctcatcagcgccgcccagcgcgacaaggttctatcctatatcaaaaaaggcaaggcggaaggcgcaacacttgcctgtggcggcggcgtgccgaaattgcagggcttcgataagggcttcttcatcgagccgacggtctttgcagatgttaccgacactatgaccatcgcacgcgaggaaatcttcgggccggtgatgagcgtgctggaattttccgatgaggacgaagtgattgcgcgcgccaatgatagcgaattcggccttgcggcaggcgtcttcactgccgatctttcccgcgggcatcacgtgatcggccagatcaaggccggcacatgctggatcaatgcctataatctgacgcccgtggaagtgcctttcggcggctacaagcaatcgggcatcggccgtgaaaacgggatcgccgcgcttgcccattacagccagatcaagaccgtctatgtggagatgggcaaggtagacagcccctactga

SEQ ID NO: 121458 - protein, 487 aa, Brucella suis
MKAQPKASHFIGGAFVEDKAGKPLPVIYPATDEEIASLYSATPGIIEAAYAAALKAQGEWAALKPVERGRILRRTAEILREKNRKLSKLETLDTGKALQETLVADAASAADALEFFGGIISGFNGEFVELGGSFAYTRREALGICVGIGAWNYPIQIAAWKSAPALAMGNAFIFKPSENTPLSALALAEAYKEAGLPDGLFNVVQGYGDVGAALVNHRLTAKVSLTGSVPTGRRIMAQAGEQLKHVTMELGGKSPLIVFDDADLESAIGGAMLGNFYSTGQVCSNGTRVFVHKNIRERFIERLVERTRKIRIGDPFDEATQMGPLISAAQRDKVLSYIKKGKAEGATLACGGGVPKLQGFDKGFFIEPTVFADVTDTMTIAREEIFGPVMSVLEFSDEDEVIARANDSEFGLAAGVFTADLSRGHHVIGQIKAGTCWINAYNLTPVEVPFGGYKQSGIGRENGIAALAHYSQIKTVYVEMGKVDSPY

SEQ ID NO: 121459 - DNA, 1470 bp, Burkholderia mallei
  CDS (1)..(1470): transl_table=11
atgtccgtatacggtctgcagcgcctttacatcgccggcgcccacgccgacgccacgagcggcaagacgttcgatacgttcgatcccgcgacgggcgaattgctcgcgcgcgttcagcaggcgagcgccgacgatgtcgaccgcgcggtcgcatccgcgcgcgaaggccagcgcgaatgggccgcgatgaccgcgatgcagcgctcgcgcatcctgcgtcgcgcggtcgaattgctgcgcgagcgcaacgacgcgctcgccgagctcgagatgcgcgacacgggcaagccgatcgcggaaacgcgcgccgtcgatatcgtcacgggcgccgacgtgatcgagtactacgcgggcctcgcgaccgcgatcgaaggtctgcaggtgccgctgcgcccggaatcgttcgtctacacgcggcgcgagccgctcggcgtgtgcgcgggcatcggcgcatggaactacccgatccagatcgcctgctggaagagcgcgcccgcgctcgccgccggcaacgcgatgatcttcaagccgagcgaagtcacgccgctgtccgcgctcaagctcgcggagatctacaccgaggcgggagtgcccgccggcgtgttcaacgtcgtgcagggcgacggctcggtcggcgcgctgctcagcgcgcacccgggcatcgcgaaggtgtcgtttacgggcggcgtcgaaaccggcaagaaggtgatgtcgctcgcgggcgcatcgtcgctgaaggaagtgacgatggaactgggcggcaaatcgccgctcatcgtgttcgacgacgccgatctcgaccgcgcggccgacatcgccgtcaccgcgaacttcttcagcgcgggccaggtgtgcacgaacggcacgcgcgtgttcgtccagcaagcggtgaaggacgcgttcgtcgagcgcgtgctcgcgcgcgtcgcacggattcgggccggcaaaccttcggatcccgacacgaatttcggaccgctcgcgagcgccgcccagctcgacaaggtgctcggctacatcgacagcggcaaggccgaaggcgcgaagctgctcgcgggcggcgcgcgcctcgtgaacgatcacttcgcgagcggccagtacgttgcgccgaccgtgttcggcgattgccgcgacgacatgaggatcgtccgcgaagagattttcgggccggtgatgagcatcctgtcgttcgaaacggaagacgaagcgatcgcgcgcgcgaacgcgaccgactacggcctcgcggcgggcgtcgtcaccgagaacctgtcgcgcgcgcaccgcgcgatccatcgcctcgaagccggcatctgctggatcaacacgtggggcgaatcgcccgccgagatgccggttggcgggtataagcaatccggcgtcggacgcgagaacggcatcacgacgctcgagcactacactcgaatcaaatcggtgcaggtcgagctcggccgctatcaaccggtgttctaa

SEQ ID NO: 121460 - protein, 489 aa, Burkholderia mallei
MSVYGLQRLYIAGAHADATSGKTFDTFDPATGELLARVQQASADDVDRAVASAREGQREWAAMTAMQRSRILRRAVELLRERNDALAELEMRDTGKPIAETRAVDIVTGADVIEYYAGLATAIEGLQVPLRPESFVYTRREPLGVCAGIGAWNYPIQIACWKSAPALAAGNAMIFKPSEVTPLSALKLAEIYTEAGVPAGVFNVVQGDGSVGALLSAHPGIAKVSFTGGVETGKKVMSLAGASSLKEVTMELGGKSPLIVFDDADLDRAADIAVTANFFSAGQVCTNGTRVFVQQAVKDAFVERVLARVARIRAGKPSDPDTNFGPLASAAQLDKVLGYIDSGKAEGAKLLAGGARLVNDHFASGQYVAPTVFGDCRDDMRIVREEIFGPVMSILSFETEDEAIARANATDYGLAAGVVTENLSRAHRAIHRLEAGICWINTWGESPAEMPVGGYKQSGVGRENGITTLEHYTRIKSVQVELGRYQPVF

SEQ ID NO: 121461 - DNA, 1470 bp, Burkholderia pseudomallei
  CDS (1)..(1470): transl_table=11
atgtccgtatacggtctgcagcgcctttacatcgccggcgcccacgccgacgccacgagcggcaagacgttcgatacgttcgatcccgcgacgggcgaattgctcgcgcgcgttcagcaggcgagcgccgacgatgtcgaccgcgcggtcgcatccgcgcgcgaaggccagcgcgaatgggccgcgatgaccgcgatgcagcgctcgcgcatcctgcgtcgcgcggtcgaattgctgcgcgagcgcaacgacgcgctcgccgagctcgagatgcgcgacacgggcaagccgatcgcggaaacgcgcgccgtcgacatcgtcacgggcgccgacgtgatcgagtactacgcgggcctcgcgaccgcgatcgaaggtctgcaggtgccgctgcgcccggaatcgttcgtctacacgcggcgcgagccgctcggcgtgtgcgcgggcatcggcgcatggaactacccgatccagatcgcctgctggaagagcgcgcccgcgctcgccgccggcaacgcgatgatcttcaagccgagcgaagtcacgccgctgtccgcgctcaagctcgcggagatctacaccgaggcgggagtgcccgccggcgtgttcaacgtcgtgcagggcgacggctcggtcggcgcgctgctcagcgcgcacccgggcatcgcgaaggtgtcgtttacgggcggcgtcgaaaccggcaagaaggtgatgtcgctcgcgggcgcatcgtcgctgaaggaagtgacgatggaactgggcggcaaatcgccgctcatcgtgttcgacgacgccgatctcgaccgcgcggccgacatcgccgtcacagcgaacttcttcagcgcgggtcaggtgtgcacgaacggcacgcgcgtgttcgtccagcaagcggtgaaggacgcgttcgtcgagcgcgtgctcgcgcgcgtcgcacggattcgggtcggcaaaccttcggatcccgacacgaatttcggaccgctcgcgagcgccgcccagctcgacaaggtgctcggctacatcgacagcggcaaagccgaaggcgcgaaactgctcgcgggcggcgcgcgcctcgtgaacgatcacttcgcgagcggccagtacgttgcgccgaccgtgttcggcgattgccgcgacgacatgaggatcgtccgcgaagagattttcgggccggtgatgagcatcctgccgttcgaaacggaagacgaagcgatcgcgcgcgcgaacgcgaccgactacggcctcgcggcgggcgtcgtcaccgagaacctgtcgcgcgcgcaccgcgcgatccatcgcctcgaagccggcatctgctggatcaacacgtggggcgaatcgcccgccgagatgccggttggcgggtataagcaatccggcgtcggacgcgagaacggcatcacgacgctcgagcactacactcgaatcaaatcggtgcaggtcgagctcggccgctatcaaccggtgttctaa

SEQ ID NO: 121462 - protein, 489 aa, Burkholderia pseudomallei
MSVYGLQRLYIAGAHADATSGKTFDTFDPATGELLARVQQASADDVDRAVASAREGQREWAAMTAMQRSRILRRAVELLRERNDALAELEMRDTGKPIAETRAVDIVTGADVIEYYAGLATAIEGLQVPLRPESFVYTRREPLGVCAGIGAWNYPIQIACWKSAPALAAGNAMIFKPSEVTPLSALKLAEIYTEAGVPAGVFNVVQGDGSVGALLSAHPGIAKVSFTGGVETGKKVMSLAGASSLKEVTMELGGKSPLIVFDDADLDRAADIAVTANFFSAGQVCTNGTRVFVQQAVKDAFVERVLARVARIRVGKPSDPDTNFGPLASAAQLDKVLGYIDSGKAEGAKLLAGGARLVNDHFASGQYVAPTVFGDCRDDMRIVREEIFGPVMSILPFETEDEAIARANATDYGLAAGVVTENLSRAHRAIHRLEAGICWINTWGESPAEMPVGGYKQSGVGRENGITTLEHYTRIKSVQVELGRYQPVF

SEQ ID NO: 121463 - DNA, 1473 bp, Escherichia coli O157
  CDS (1)..(1473): transl_table=11
atgtcccgaatggcagaacagcagctttatatacatggtggttatacctccgccaccagcggtcgcaccttcgagaccattaacccggccaacggtaacgtgctggcgaccgtgcaggccgccgggcgcgaggatgtcgatcgcgccgtgaagagtgcccaacaggggcaaaaaatctgggcggcgatgaccgctatggaacgctcgcgtattctgcgtcgggccgtcgatattctgcgcgagcgcaatgatgaactcgccaaactggaaaccctcgacaccggaaaagcgtattcggaaacctcaaccgtcgatatcgttaccggtgcggacgtgctggagtactacgccgggctgatcccgtcgctggaaggcagccagatcccgttgcgtgagacatcatttgtctacactcgccgcgaaccgctgggcgtggtggcagggattggcgcatggaactacccgatccagattgccctgtggaaatccgccccggcgctggcggcgggtaatgcgatgattttcaaaccgagcgaagtcactccgcttaccgcgttaaagctggctgaaatttacagcgaagcgggcctgccggacggtgtatttaacgtgttgccgggcgtgggcgcggagaccgggcaatatctgaccgagcatccgggcattgccaaagtgtcgtttaccggcggcgtcgccagcggcaaaaaagtgatggctaactcggcagcctcttccctgaaagaagtgaccatggaactgggcggtaaatcaccgctgatcgttttcgacgatgcggatctcgatctcgccgccgatatcgccatgatggcaaacttcttcagctccggtcaggtgtgtaccaatggcacccgcgtcttcgttccggcgaaatgcaacgccgcatttgagcagaaaattctggcgcgcgttgagcgcattcgcgcgggcgacgttttcgatccgcaaactaacttcggcccgctggtcagcttcccgcatcgcgataacgtgctgcgctatatcgccaaaggcaaagaggaaggcgcgcgcgtactgtgcggcggcgatgtactgaaaggcgatggcctcgataacggcgcatgggttgcaccgaccgtgttcaccgattgcagcgacgagatgaccatcgtgcgtgaagagatcttcgggccggtgatgtccattctgacctacgagtcggaagacgaagtcattcgccgcgccaatgataccgactacggcctggcggcgggtatcgtgacggcggacctgaaccgcgcgcatcgcgtcattcatcagctggaagcgggtatttgctggatcaacacctggggcgaatccccggcagagatgcccgttggcggctacaaacactccggtattggccgcgagaacggcgtgatgacgctccagagttacacccaggtgaagtccatccaggttgagatggctaaattccagtccatattctaa

SEQ ID NO: 121464 - protein, 490 aa, Escherichia coli O157
MSRMAEQQLYIHGGYTSATSGRTFETINPANGNVLATVQAAGREDVDRAVKSAQQGQKIWAAMTAMERSRILRRAVDILRERNDELAKLETLDTGKAYSETSTVDIVTGADVLEYYAGLIPSLEGSQIPLRETSFVYTRREPLGVVAGIGAWNYPIQIALWKSAPALAAGNAMIFKPSEVTPLTALKLAEIYSEAGLPDGVFNVLPGVGAETGQYLTEHPGIAKVSFTGGVASGKKVMANSAASSLKEVTMELGGKSPLIVFDDADLDLAADIAMMANFFSSGQVCTNGTRVFVPAKCNAAFEQKILARVERIRAGDVFDPQTNFGPLVSFPHRDNVLRYIAKGKEEGARVLCGGDVLKGDGLDNGAWVAPTVFTDCSDEMTIVREEIFGPVMSILTYESEDEVIRRANDTDYGLAAGIVTADLNRAHRVIHQLEAGICWINTWGESPAEMPVGGYKHSGIGRENGVMTLQSYTQVKSIQVEMAKFQSIF

SEQ ID NO: 121465 - DNA, 1473 bp, Escherichia coli O6
  CDS (1)..(1473): transl_table=11
atgtcccgaatggcagaacagcagctttatatacatggtggttatacctccgccaccagcggtcgcaccttcgagaccattaacccggccaacggtaacgtgctggcgaccgtgcaggccgccgggcgtgaggatgtcgatcgcgccgtgaagagtgcccaacaagggcaaaaaatctgggcggcgatgaccgctatggaacgctcgcgtattctgcgtcgggccgttgatattctgcgtgaacgcaatgacgaactcgcaaaactggaaaccctcgacaccggaaaagcatattcggaaacctcaaccgtcgatatcgttaccggtgcggacgtgctggagtactatgccgggctgatcccggcgctggaaggcagccagatcccgttgcgtgagacgtcatttgtttatacccgccgcgaaccgctgggcgtagtggcggggattggcgcatggaactacccgatccagattgctttgtggaaatccgcccccgcgctggcggcgggtaacgcgatgatcttcaaaccgagcgaagtcaccccgcttaccgcgttaaagctggctgaaatttacagcgaagcgggcctgccggacggtgtatttaacgtgttgccgggcgtgggcgcggagaccgggcaatatctgaccgatcatccgggcattgccaaagtgtcatttaccggcggcgtcgccagcggcaaaaaagtgatggctaactcggcagcttcctccctgaaagaagtgaccatggagctgggcggtaaatcaccgctgatcgttttcgacgatgcggatctcgatctcgccgccgatatcgccatgatggcgaatttcttcagctccggtcaggtgtgtaccaacggcactcgcgtcttcgttccgacgaaatgcaaagccgcatttgaacaaaaggttctggcgcgcgttgagcgcattcgcgcgggcgacgttttcgatccgcaaactaacttcggcccgctggtcagcttcccgcatcgcgataacgtgctgcgctatatcgccaaaggcaaagaggaaggcgcgcgcgtactgtgcggcggcaatgtactgaagggggatagcttcgataacggcgcatgggttgcaccgaccgtgttcaccgattgcagcgacgatatgaccattgtgcgcgaagagattttcgggccggtgatgtccattctgacctacgagtcggaagacgaagtcattcgccgcgctaacgataccgactacggtctggcggcgggtatcgtgacggcggacctgaaccgcgcgcatcgcgtcattcatcagctggaagcgggtatttgctggatcaacacctggggcgaatccccggcagagatacccgttggcggctacaaacactccggcattggtcgcgagaacggcgtgatgacgctccagagttacacccaggtgaagtccatccaggttgagatggctaaattccagtccatattctaa

SEQ ID NO: 121466 - protein, 490 aa, Escherichia coli O6
MSRMAEQQLYIHGGYTSATSGRTFETINPANGNVLATVQAAGREDVDRAVKSAQQGQKIWAAMTAMERSRILRRAVDILRERNDELAKLETLDTGKAYSETSTVDIVTGADVLEYYAGLIPALEGSQIPLRETSFVYTRREPLGVVAGIGAWNYPIQIALWKSAPALAAGNAMIFKPSEVTPLTALKLAEIYSEAGLPDGVFNVLPGVGAETGQYLTDHPGIAKVSFTGGVASGKKVMANSAASSLKEVTMELGGKSPLIVFDDADLDLAADIAMMANFFSSGQVCTNGTRVFVPTKCKAAFEQKVLARVERIRAGDVFDPQTNFGPLVSFPHRDNVLRYIAKGKEEGARVLCGGNVLKGDSFDNGAWVAPTVFTDCSDDMTIVREEIFGPVMSILTYESEDEVIRRANDTDYGLAAGIVTADLNRAHRVIHQLEAGICWINTWGESPAEIPVGGYKHSGIGRENGVMTLQSYTQVKSIQVEMAKFQSIF

SEQ ID NO: 121467 - DNA, 1473 bp, Erwinia carotovora subsp
  CDS (1)..(1473): transl_table=11
atgtctcgctacggtttacaacagctttacatcaacggtgcctatgtcgatagcacaggtaatgatacgtttgatgccgtgaatcctgctaatggcgacattattgcctgtattcagtctgccaccgccgctgacgttgaccgggcggtcagcgcagccaccgcagggcagaaggtatgggcggcgatgacggcgatggagcgttcgcgcattttacgccgtgctgttgatatcttacgtgagcgcaatgatgaactcgcgttgcttgagacgcacgataccggcaagccactttcggaaacgcgtaccgtcgatatcgtgaccggcgccgatgttctggaatattacgcgggcttgattcccatgctggaaggccaacagatccccctgcgcgatacctcgtttgtttatacacgtcgtgaaccgcttggtgttgtcgccggtatcggtgcctggaactatcccattcagatcgctttgtggaaatcggcgcccgcgctggcggcaggcaacgcaatgatcttcaaacccagtgaagtcacgtcgctcaccgcgctgaagctggcggaaatttacaccgaagctgggttgccggcaggtgtatttaacgtgctgacgggaacagggaaatccgttggtcaggcgctgacgacacacccaggcattgccaaggtctctttcaccggcggtatcgccagcgggaaaacggtcatggccaatgccgcaggctcgacgctgaaagacgtcacgatggagctgggggggaaatcgccgctaattatttttgatgatgccgatctggataaggcggcggacattgccatgatggcgaattttttcagttcagggcaggtgtgcactaacggcacgcgcgtttttgtaccgaaggcattgcaagcgcagtttgaggaaaaaatcctggcatgtgttcagcgaattcgcgctggcgatcctaccgatgaatcggtgaattttggaccactggtcagtttcccgcatagggagtccgttctgcgttacatcgaaagcggaaaacgagagggcgctcgcgtgctggtgggcggtgaacctatgacagatggtgactatgcacaaggcgcatacgttgcccctacggtgttcactgactgccgggatgacatgaagattgtccgaaaggaaatttttggtccggtcatgagtattctgacgtatcaggacgaggatgaggttatccgccgcgccaatgatagtgagtatgggctagcggctggcattgtaacccgcgatctaaatcgagcgcatcgggttattcatcagcttgaggcggggatttgttggatcaacacctggggagaatctccggccgaaatgcctgtgggcggctacaaacattcgggtgtcggacgtgaaaacggcgtaacaacgttggaacactacacgcaaattaaatctatacaggttgaactgggtgaattccgctcggtattttaa

SEQ ID NO: 121468 - protein, 490 aa, Erwinia carotovora subsp
MSRYGLQQLYINGAYVDSTGNDTFDAVNPANGDIIACIQSATAADVDRAVSAATAGQKVWAAMTAMERSRILRRAVDILRERNDELALLETHDTGKPLSETRTVDIVTGADVLEYYAGLIPMLEGQQIPLRDTSFVYTRREPLGVVAGIGAWNYPIQIALWKSAPALAAGNAMIFKPSEVTSLTALKLAEIYTEAGLPAGVFNVLTGTGKSVGQALTTHPGIAKVSFTGGIASGKTVMANAAGSTLKDVTMELGGKSPLIIFDDADLDKAADIAMMANFFSSGQVCTNGTRVFVPKALQAQFEEKILACVQRIRAGDPTDESVNFGPLVSFPHRESVLRYIESGKREGARVLVGGEPMTDGDYAQGAYVAPTVFTDCRDDMKIVRKEIFGPVMSILTYQDEDEVIRRANDSEYGLAAGIVTRDLNRAHRVIHQLEAGICWINTWGESPAEMPVGGYKHSGVGRENGVTTLEHYTQIKSIQVELGEFRSVF

SEQ ID NO: 121469 - DNA, 1470 bp, Halomonas elongata
  CDS (1)..(1470): transl_table=11
atgaccgctcaaagcgcacaacccctctatattggtggtcgcccggttgatgccacctccggcgaaacatttaccgttaccaatccttatgatggcagtctgctggccacgattggtcaggcaagccaagccgatgtcgatagcgccgttcaggcagcacagcgtggccagcgtgaatgggccgccatgaccggcatggagcgctcacgcatcctgctacgtgccgtagcacttcttcgcgagcgtaatgacgagcttgccgagctggaaacccgcaataccggcaagccgatcagcgaaaccgccagcgtcgatatcgtgaccggtgccgatgctctggagtactacgcaggccttgccccggccattgagggcagccaaattcccctgcgcgatactcggcttgtttacacccgccgcgagccgctaggtgtgatcggcgccattggtgcctggaactacccgattcaaatcgcctgctggaaagcggctccggcactcgccgctggcaacgccatcgtgttcaagcccagtgaagtcacaccgctaacggcgcttaagcttgccgaaatcttcactgaagcaggcttgcccgacggtgtatttaacgtggtacagggcgatggtcgcgtcggcgccatgctgaccgagcacgaaggcattgccaaagtctcgtttaccggtgaagtgggcacaggcaaaaaagtcatggccgctgccggtggttccacgctgaaagacgtaacaatggaactcggcggcaaatctccgctaattgtcttcgcggatgccgacctcgaccgcgcagccgatgccgccatgatggcgaacttctactccagcggccaaatctgcaccaacggcactcgcgtgttcgttgagcgcagcgctaaagaggcgttcgaagccaagctagtagagcgcgtggcacgcatcaaagcaggcgacccgatggatccgagcgtcaatttcggtccgcttgtcagcttcgagcatcaggaaaaagtgctctcctacatcgcgctcggcaaagagcaaggcgcacgcgtgctggccggtggcgacgcgtggaacagcggcgaatgggccaaaggcgcctgggcggcccccacggtattcactgactgcaccgacgagatgcgtgtcgtcaaagaggagatctttggcccggtaatgtcagtactcgccttcgacgacgaagaggaagtcatccgccgcgccaacaacaccaagtacggcctagccgccggcgtcttcagcgaaagcctgaaccgcgcgcaccgtgtgattcaccagctggaagccggcatctgctggatcaacacctggggagagtcgccgtcggagatgccggtaggcggttacaaggagtcgggcattggtcgcgagaacggcgtcgagacgctcaatcactacacccagaccaagtccgtacagatcgagatggggccgttcgagtcggtgttttaa

SEQ ID NO: 121470 - protein, 489 aa, Halomonas elongata
MTAQSAQPLYIGGRPVDATSGETFTVTNPYDGSLLATIGQASQADVDSAVQAAQRGQREWAAMTGMERSRILLRAVALLRERNDELAELETRNTGKPISETASVDIVTGADALEYYAGLAPAIEGSQIPLRDTRLVYTRREPLGVIGAIGAWNYPIQIACWKAAPALAAGNAIVFKPSEVTPLTALKLAEIFTEAGLPDGVFNVVQGDGRVGAMLTEHEGIAKVSFTGEVGTGKKVMAAAGGSTLKDVTMELGGKSPLIVFADADLDRAADAAMMANFYSSGQICTNGTRVFVERSAKEAFEAKLVERVARIKAGDPMDPSVNFGPLVSFEHQEKVLSYIALGKEQGARVLAGGDAWNSGEWAKGAWAAPTVFTDCTDEMRVVKEEIFGPVMSVLAFDDEEEVIRRANNTKYGLAAGVFSESLNRAHRVIHQLEAGICWINTWGESPSEMPVGGYKESGIGRENGVETLNHYTQTKSVQIEMGPFESVF

SEQ ID NO: 121471 - DNA, 1473 bp, Pseudomonas syringae pv
  CDS (1)..(1473): transl_table=11
atggcccgttttgaactgcagaaactttacatcgatggcggttacgtcgatgccagcaacactgaaaccttcgatgccatcaacccggcgaacggcgaagtactggcgcagatccagcgcgccggcaaggaagacgtcgagcgcgcagtcgttgctgctgaaaaaggccagaagatctgggcggccatgaccgccgtcgagcgttcgcgcatcctgcgccgtgctgtcgacatcctgcgtgagcgcaacgatgagctggccgcgctggaaacgctggacaccggtaaagccatttccgaaacccgctacgtggatatcgtgaccggcgctgacgtactggaatactacgcaggcctggtgcctgccatcgaaggcgaacagatcccgctgcgtgattcctctttcgtttacacccgccgagagccgctgggtgtggttgcaggcatcggtgcgtggaactacccgatccagatcgccctgtggaaatccgcaccggcgctggctgcgggcaacgcgatgatcttcaaaccaagtgaagtcacctcgctgaccactctgaaactggcagaaatctacaccgaagctggcgtgccaaatggcgtgttcaatgtgctgaccggtagcggtcgcgaagtcggcacctggatcaccgagcacccgcgcatcgagaaagtctcgttcaccggcggcaccgacactggcaagaaagtcatggccagcgcttcgagctcgtcgctcaaggaagtgaccatggagctgggcggcaagtcgccgctgatcgtgtttgacgacgctgatctggaccgtgctgccgacatcgcaatgatggccaacttctatagctccggccaggtctgcaccaacggtacgcgtgtgtttgtaccgaacgcgttgaaagccgagttcgaagcgaaaatccttgagcgtgtgaagcgtattcgcgccggtaacccggaagacgaaaacatcaacttcggcccgctggtcagcttcgagcatatggaaagcgtgctgggctacatcgccaagggcaaagagcagggcgcacgcctgttgtgcggcggtgatcgtctgaccggtggtgtgttcgacaagggcgcttttgttgcgccaaccgtgttcaccgactgcaccgacgagatgaccatcgtgcgtgaagaaatcttcggcccggtaatgagcatcctcggctacgacaccgaagaagaagtggtgcgccgcgccaacgacaccgacttcggtctggccgcaggcatcgtgactcgcgacctgaaccgcgcacaccgcgtgattcatctgttggaagccggtatctgctggatcaacgcctggggcgagtcggcggcacaaatgccggtcggcggttacaagcaatcgggtgttggtcgtgagaacggcatcagctcgctggcgcagtacacgcggatcaagtcggtacagatcgagctgggcgactacgcctcggttttctaa

SEQ ID NO: 121472 - protein, 490 aa, Pseudomonas syringae pv
MARFELQKLYIDGGYVDASNTETFDAINPANGEVLAQIQRAGKEDVERAVVAAEKGQKIWAAMTAVERSRILRRAVDILRERNDELAALETLDTGKAISETRYVDIVTGADVLEYYAGLVPAIEGEQIPLRDSSFVYTRREPLGVVAGIGAWNYPIQIALWKSAPALAAGNAMIFKPSEVTSLTTLKLAEIYTEAGVPNGVFNVLTGSGREVGTWITEHPRIEKVSFTGGTDTGKKVMASASSSSLKEVTMELGGKSPLIVFDDADLDRAADIAMMANFYSSGQVCTNGTRVFVPNALKAEFEAKILERVKRIRAGNPEDENINFGPLVSFEHMESVLGYIAKGKEQGARLLCGGDRLTGGVFDKGAFVAPTVFTDCTDEMTIVREEIFGPVMSILGYDTEEEVVRRANDTDFGLAAGIVTRDLNRAHRVIHLLEAGICWINAWGESAAQMPVGGYKQSGVGRENGISSLAQYTRIKSVQIELGDYASVF

SEQ ID NO: 121473 - DNA, 1473 bp, Pseudomonas aeruginosa
  CDS (1)..(1473): transl_table=11
atggcccgattcgaagaacagaagctctacattggcggtcgctacgtggaggccagcagtggcgccaccttcgagaccatcaacccggccaacggcgaagtgctcgccaaggtccagcgggcttccagggaagacgtcgagcgggccgtgcagagcgccgtcgaggggcagaaggtgtgggcggcgatgaccgccatgcagcgctcgcgcattctccgtcgcgccgtcgacatcctccgcgagcgcaacgacgaactggctgccctggaaaccctggataccggcaagccgctggcggaaacccgctcggtggacatcgtcaccggcgccgacgtgctcgagtactacgccggcctggtcccggccatcgaaggcgagcagattcccctgcgcgaaaccagtttcgtctacacccgccgcgagccgctgggcgtggtcgccggcattggcgcctggaactacccggtgcagatcgccctgtggaaatccgccccggccctcgctgccggcaacgcgatgatcttcaagcccagcgaagtcaccccgctgacggccctcaagctggccgagatctacaccgaggccggcgtgccggacggcgtgttcaacgtgctcaccggcagcggacgcgaagtcggccagtggctgaccgagcacccgctgatcgagaagatctccttcaccggtggcacctccaccggcaagaaagtcatggccagcgcttccagctcgtcgctgaaggaagtgaccatggagctgggcggcaagtccccgctgatcatcttccccgacgcagacctcgaccgcgccgccgacatcgccgtcatggccaacttcttcagctccggccaggtctgcaccaacggcacccgggtgttcatccaccgttcccagcaggctcgcttcgaagccaaggtactggagcgcgtgcagcgcatccgtctcggcgacccgcaggacgagaacaccaacttcggcccgctggtcagcttcccgcacatggaaagcgtgctcggctacatcgagtccggcaaggcgcagaaggctcgcctgctgtgcggcggcgagcgtgtgaccgatggagcgttcggcaaaggtgcctacgtcgcgccgaccgtgttcaccgattgccgcgacgacatgaccatcgtccgcgaggaaatcttcggcccggtgatgagcatcctggtctatgacgacgaagacgaggcgatccgccgcgccaacgataccgagtacggcctcgccgccggcgtcgtgacccaggacctggcccgcgcccaccgcgccatccatcgcctggaagccggcatctgctggatcaatacctggggcgagtcgccggcggaaatgccggtcggcggttacaagcaatccggtgtcggtcgcgagaacggtctcaccaccctggctcattacactcgcatcaagtccgtgcaagtggagctgggcgactacgcctcggtgttctga

SEQ ID NO: 121474 - protein, 490 aa, Pseudomonas aeruginosa
MARFEEQKLYIGGRYVEASSGATFETINPANGEVLAKVQRASREDVERAVQSAVEGQKVWAAMTAMQRSRILRRAVDILRERNDELAALETLDTGKPLAETRSVDIVTGADVLEYYAGLVPAIEGEQIPLRETSFVYTRREPLGVVAGIGAWNYPVQIALWKSAPALAAGNAMIFKPSEVTPLTALKLAEIYTEAGVPDGVFNVLTGSGREVGQWLTEHPLIEKISFTGGTSTGKKVMASASSSSLKEVTMELGGKSPLIIFPDADLDRAADIAVMANFFSSGQVCTNGTRVFIHRSQQARFEAKVLERVQRIRLGDPQDENTNFGPLVSFPHMESVLGYIESGKAQKARLLCGGERVTDGAFGKGAYVAPTVFTDCRDDMTIVREEIFGPVMSILVYDDEDEAIRRANDTEYGLAAGVVTQDLARAHRAIHRLEAGICWINTWGESPAEMPVGGYKQSGVGRENGLTTLAHYTRIKSVQVELGDYASVF

SEQ ID NO: 121475 - DNA, 1473 bp, Pseudomonas fluorescens
  CDS (1)..(1473): transl_table=11
atggcccgtttcgaactgcaaaaactctacatcgacggcggctacaccgatgccggcagcgacgccactttcgatgccatcaacccggccaacggtgaagttctcgcacaagtgcagcgtgcgaccaaggaagacgttgaacgcgccgtggtcagcgccgagaaaggccagaagatctgggccgccatgaccgccatggagcgttcgcgcatcctgcgtcgcgccgtggaaatcctccgcgagcgcaacgacgaactggccgccctggaaaccctggacaccggcaaggccttctccgaaaccaagtacgtggacatcgtcaccggcgccgacgtgctggaatactacgcaggcctggtaccggccatcgaaggcgagcagatcccgctgcgcaccacttccttcgtctacacccgtcgcgagcccctgggcgtagtggccggtatcggcgcgtggaactacccgatccagatcgccctgtggaaatccgctccagccctggcggccggtaacgcgatgatcttcaaaccgagcgaagtgacctcgctgaccaccctgaaactggccgagatctacaccgaagccggcctgccggatggcgtgttcaacgtcctgaccggcagcggccgcgaagtcggcacctggctgaccgagcacccgcgcatcgagaaggtctccttcaccggcggcaccgacactggcaagaaagtcatggccagcgcttccagctcctcgctgaaagacgtgaccatggaactgggcggcaagtcgccactgatcatcttcgacgacgccgacctggatcgcgccgccgacaccgccatgatggccaacttctacagctccggtcaggtctgcaccaacggcactcgggtattcgtaccgagccacctgaaagccgctttcgaagccaagatcgccgagcgcgttgcgcgcatccgcatcggcaacccggaagacgaaaacaccaacttcggcccgctggtcagtttcccgcacatggaaagcgtgctgggctacatcgccaagggtaaagaagaaggtgcccgcgtactgtgcggcggcgagcgcctgaccgacggcgaattcgccaagggcgccttcgttgcaccgaccgtgttcaccgactgcaccgacgacatgaccatcgtccgtgaagaaatcttcggcccggtcatggcgatcctgacctacgaaaccgaagaagaagtgatccgccgcgccaacgacaccgacttcggcctggctgccggcctggtcaccaaggatctgaaccgcgctcaccgcgtgattcatcagctcgaagccggtatctgctggatcaacgcctggggcgagtccgacgccaagatgccggttggcggctacaagcagtcgggcgtgggccgtgagaacggcatcagctcgctgaacaacttcacccgcatcaagtcggtgcaggtcgagctgggcgactacgcctcggtgttctaa

SEQ ID NO: 121476 - protein, 490 aa, Pseudomonas fluorescens
MARFELQKLYIDGGYTDAGSDATFDAINPANGEVLAQVQRATKEDVERAVVSAEKGQKIWAAMTAMERSRILRRAVEILRERNDELAALETLDTGKAFSETKYVDIVTGADVLEYYAGLVPAIEGEQIPLRTTSFVYTRREPLGVVAGIGAWNYPIQIALWKSAPALAAGNAMIFKPSEVTSLTTLKLAEIYTEAGLPDGVFNVLTGSGREVGTWLTEHPRIEKVSFTGGTDTGKKVMASASSSSLKDVTMELGGKSPLIIFDDADLDRAADTAMMANFYSSGQVCTNGTRVFVPSHLKAAFEAKIAERVARIRIGNPEDENTNFGPLVSFPHMESVLGYIAKGKEEGARVLCGGERLTDGEFAKGAFVAPTVFTDCTDDMTIVREEIFGPVMAILTYETEEEVIRRANDTDFGLAAGLVTKDLNRAHRVIHQLEAGICWINAWGESDAKMPVGGYKQSGVGRENGISSLNNFTRIKSVQVELGDYASVF

SEQ ID NO: 121477 - DNA, 1473 bp, Pseudomonas putida
  CDS (1)..(1473): transl_table=11
atggcccgtttcggaacgcaaaaactctacattgatggcgcttacgtcgacgctggcagcgatgccactttcgaagccatcaacccggccaccggcgaagtcctcgcccacgtacagcgtgctaccgaggctgacgtcgagaaggccgtggaaagcgccgagcgtggccagaaagtctgggctgcgatgactgccatgcagcgttcgcgcatcctgcgccgcgccgtcgacatcctgcgcgagcgcaacgatgagctggccatgctggaaaccctggacaccggcaagtcgtactccgaaacccgctacgtcgacatcgttaccggcgccgacgtgctggaatactacgcaggcctggtaccggccatcgaaggcgagcagatcccgctgcgcgaatcgtccttcgtctacacccgccgcgagccgctgggcgtgaccgtgggtatcggtgcctggaactacccgatccagatcgccctgtggaaatctgccccggccctggccgctggcaacgcgatgatcttcaaaccgtcggaagtcacctcgctgaccaccctgaaactggccgagatctacaccgaagccggcctgccgaacggcgtgttcaacgttctgaccggcagcggccgcgaagtcggcacctggctgaccgagcacccgcgcatcgaaaaagtgtccttcaccggcggcaccaccaccggcaagaaagtcatggccagcgcctccagctcttcgctgaaggaagtgaccatggagctgggcggcaagtcgccactgatcatctgtgccgacgccgacctggacaaggccgctgacatcgccatgatggccaacttctacagctcgggccaggtgtgcaccaacggcacccgcgtgttcatcccggctgaaatgaaggcggccttcgaagccaagatcgccgagcgcgttgcccgcatccgcgttggcaacccggaagacgaaaacaccaacttcggcccgctggtcagcttccagcacatggaaagcgtgctgggctacatcgccaaaggcaaggaagaaggtgcccgcgtgctgtgcggcggcgagcgtctgactgccggtgacttcgccaaaggtgccttcgttgcgccgacggtgttcaccgactgcaccgacgacatgaccatcgtcaaagaagagatcttcggcccggtgatgagcatcctcacctacgaaaccgaagaagaagtgatccgccgtgccaacgacaccgactacggcctggccgccggcgtctgcaccaacgacatcacccgcgcccaccgcatcatccacaagctcgaagccggtatctgctggatcaacgcctggggtgaatcgccggccgaaatgccggtaggtggctacaagcagtcgggcgtcggccgtgaaaacggcgtcagctcgctggctcaatacactcgcatcaagtcggtccaggtcgagctgggcggctacaactcggttttctga

SEQ ID NO: 121478 - protein, 490 aa, Pseudomonas putida
MARFGTQKLYIDGAYVDAGSDATFEAINPATGEVLAHVQRATEADVEKAVESAERGQKVWAAMTAMQRSRILRRAVDILRERNDELAMLETLDTGKSYSETRYVDIVTGADVLEYYAGLVPAIEGEQIPLRESSFVYTRREPLGVTVGIGAWNYPIQIALWKSAPALAAGNAMIFKPSEVTSLTTLKLAEIYTEAGLPNGVFNVLTGSGREVGTWLTEHPRIEKVSFTGGTTTGKKVMASASSSSLKEVTMELGGKSPLIICADADLDKAADIAMMANFYSSGQVCTNGTRVFIPAEMKAAFEAKIAERVARIRVGNPEDENTNFGPLVSFQHMESVLGYIAKGKEEGARVLCGGERLTAGDFAKGAFVAPTVFTDCTDDMTIVKEEIFGPVMSILTYETEEEVIRRANDTDYGLAAGVCTNDITRAHRIIHKLEAGICWINAWGESPAEMPVGGYKQSGVGRENGVSSLAQYTRIKSVQVELGGYNSVF

SEQ ID NO: 121479 - DNA, 1473 bp, Pseudomonas syringae pv
  CDS (1)..(1473): transl_table=11
atggcccgttttgaattgcaaaaactctacatcgacggcggttatgtcgatgccagcaacactgaaaccttcgactcgatcaaccctgcgaacggcgaagttctggctaagatccagcgcgccagcaaggaagacgtcgagcgtgcggtggtcgccgccgagaagggccagaagatctgggccgcaatgactgcagtcgagcgttcgcgcatcctgcgtcgtgccgtcgatatcctgcgtgagcgcaacgatgagctggccgcgctcgaaacgctggacaccggtaaagccatttccgaaacccgttacgttgacatcgtgaccggcgccgacgtgctggaatactacgcaggcctggtgcctgccatcgaaggcgagcagattccgctgcgtgattcgtccttcgtctacacccgccgcgagccgctgggtgtggtcgccggtatcggtgcttggaactacccgatccagatcgccttgtggaagtccgccccggcattggctgcgggcaacgcgatgatcttcaagccgagcgaagtcacctcgctgaccaccctgaagctggcagaaatctacaccgaagccggcgtgccgaacggcgtgttcaacgtgttgactggcagcggccgtgaagtcggcacctggatcaccgagcacccgcgcatcgagaaagtctccttcaccggcggcaccgacaccggcaagaaagtcatggccagtgcgtcgagttcgtcgctcaaggaagtgacgatggagctgggcggcaagtcgccgctgatcgttttcgacgacgccgacctggatcgcgccgccgacatcgccatgatggccaacttctacagctccggtcaggtctgcaccaacggtacgcgcgtgttcgtaccgaatgccctgaaaggcgagttcgaagcgaaaatcctggagcgtgtgaagcgtattcgtcccggcaacccggaagacgaaaacatcaatttcggtccgctggtcagctttgaacacatggaaagcgtgctgggctacatcgccaagggcaaagagcagggcgcacgcctgttgtgcggcggcgaccgtttgaccggtggcgttttcgacaagggcgcgttcgtggctgcaaccgtgttcaccgactgcaccgacgagatgaccatcgtgcgcgaagagatcttcggcccggtgatgagcattcttggttacgacaccgaggacgaagtggtgcgccgcgccaacgacaccgacttcggcctggctgcgggcatcgtgacccgtgacctgaaccgcgcgcaccgcgtgattcacttgctggaagccggtatctgctggatcaacgcgtggggcgagtcggcggcgcaaatgccggtcggcggttacaagcagtcgggcgtcggtcgtgaaaacggcatcagctcgctggcccagtacacgcgcatcaagtcggttcagatcgagttgggcgactacgcctcggtgttctaa

SEQ ID NO: 121480 - protein, 490 aa, Pseudomonas syringae pv
MARFELQKLYIDGGYVDASNTETFDSINPANGEVLAKIQRASKEDVERAVVAAEKGQKIWAAMTAVERSRILRRAVDILRERNDELAALETLDTGKAISETRYVDIVTGADVLEYYAGLVPAIEGEQIPLRDSSFVYTRREPLGVVAGIGAWNYPIQIALWKSAPALAAGNAMIFKPSEVTSLTTLKLAEIYTEAGVPNGVFNVLTGSGREVGTWITEHPRIEKVSFTGGTDTGKKVMASASSSSLKEVTMELGGKSPLIVFDDADLDRAADIAMMANFYSSGQVCTNGTRVFVPNALKGEFEAKILERVKRIRPGNPEDENINFGPLVSFEHMESVLGYIAKGKEQGARLLCGGDRLTGGVFDKGAFVAATVFTDCTDEMTIVREEIFGPVMSILGYDTEDEVVRRANDTDFGLAAGIVTRDLNRAHRVIHLLEAGICWINAWGESAAQMPVGGYKQSGVGRENGISSLAQYTRIKSVQIELGDYASVF

SEQ ID NO: 121481 - DNA, 1473 bp, Pseudomonas syringae pv
  CDS (1)..(1473): transl_table=11
atggcccgttttgaactgcagaaactttacatcgatggcggttatgtcgatgccagcaaccctgaaaccttcgacgccatcaacccggcgaacggcgaagtcctggcgcagatccagcgcgccggcaaggacgatgtcgagcgcgccgtcgtcgcggccgaaaagggtcagaaaatctgggccgccatgactgcggtcgagcgttcgcgcatcctgcgccgtgccgtcgacatcctgcgcgagcgcaacgatgaactggccgctctggaaaccctggataccggcaaggccatctccgaaacccgctacgtggatatcgtgaccggcgccgacgtgctggaatactacgcaggtctggtgccggccatcgaaggcgagcagatcccgctgcgcgattcctccttcgtgtacacccgccgcgagccgctgggtgtggtggccggtatcggcgcatggaactacccgatccagatcgcactgtggaaatccgccccggcactggcggcgggcaatgcgatgatcttcaagccgagtgaagtcacttcgctgaccaccctgaagctggcagaaatctacaccgaagcgggcgtaccgaacggcgtattcaacgtgctcaccggcagcggccgtgaagtcggcacctggatcaccgagcacccgcgcatcgagaaagtctccttcaccggcggcaccgacaccggcaagaaagtcatggccagcgcctcgagctcgtcgctcaaggaagtgaccatggagctaggcggtaagtcaccgctgatcgtgtttgacgatgccgatctggatcgcgccgctgacatcgcgatgatggccaacttctacagctccggccaggtctgcaccaacggcacccgcgtgttcgtgccgaatgccctgaaagccgagttcgaagcgaagatcctcgagcgtgtgaagcgcatccgcgccggtaacccggaagacgaaaacatcaatttcggcccgctggtcagcttcgagcacatggaaagcgtgctgggctatatcgccaagggcaaagagcagggcgcacgtctgttgtgcggcggcgatcgcctgaccggcggtgtgttcgacaaaggcgcgttcgttgcgccgaccgtgttcaccgactgcaccgacgagatgaccatcgtgcgtgaagaaatcttcggcccggtgatgagcatcctcggttacgacaccgaagatgaagtggtgcgccgcgccaacgataccgacttcggtctggccgcaggcatcgtgacccgtgacctgaaccgcgcccaccgcgtgattcatctgctggaagccggtatctgctggatcaacgcctggggcgagtcggcggcacaaatgccggtcggcggttacaagcagtcgggcgtcggtcgtgagaacggcatcagctcgctggcccagtacacgcgcatcaagtcggtacagatcgaactgggcgattacgcctcggttttctaa

SEQ ID NO: 121482 - protein, 490 aa, Pseudomonas syringae pv
MARFELQKLYIDGGYVDASNPETFDAINPANGEVLAQIQRAGKDDVERAVVAAEKGQKIWAAMTAVERSRILRRAVDILRERNDELAALETLDTGKAISETRYVDIVTGADVLEYYAGLVPAIEGEQIPLRDSSFVYTRREPLGVVAGIGAWNYPIQIALWKSAPALAAGNAMIFKPSEVTSLTTLKLAEIYTEAGVPNGVFNVLTGSGREVGTWITEHPRIEKVSFTGGTDTGKKVMASASSSSLKEVTMELGGKSPLIVFDDADLDRAADIAMMANFYSSGQVCTNGTRVFVPNALKAEFEAKILERVKRIRAGNPEDENINFGPLVSFEHMESVLGYIAKGKEQGARLLCGGDRLTGGVFDKGAFVAPTVFTDCTDEMTIVREEIFGPVMSILGYDTEDEVVRRANDTDFGLAAGIVTRDLNRAHRVIHLLEAGICWINAWGESAAQMPVGGYKQSGVGRENGISSLAQYTRIKSVQIELGDYASVF

SEQ ID NO: 121483 - DNA, 1464 bp, Rhizobium loti
  CDS (1)..(1464): transl_table=11
atgcgcgcccagcccacggcatcgcactatgtcaacggacgctacatcgacgacgagcaaggggcgccattgccggtcatctatccggcaaccggcgagaccatcgccatgctgcgctcggcgacgccgaatgtgctggagctcgccatcgaggccgcacgcgccgcgcaaccggcatgggcgcggctgaagccggtcgagcgcggccgcatcctgcgccgcgcagccgacattctgcgcgcccgcaacgccgacctcgcccgcatcgagacgctcgacaccggcaaggccatccaggaaacgctggtggcggacgcaccgtcggccgcggactgcctggaatacttcgggggcgcggtcgccgcctataatggcgaggccgtcgatctcggcggtcccttcgcctacacacggcgcgaggcgctcggcgtctgtgtcggcatcggcgcctggaactacccgatccagatcgccggctggaaatccgcccctgcgctggccatgggcaacgccatggtattcaagccgtcggaaaacacgccgttgtcagcgctggcgctggccgaaatctacagcgaggccggcctgcccgacgggctgttcaatgtcgtgcagggctatggcgatgttggcgcgggcctcgtcggccacgatgtcgtggcaaaagtttcggtgaccggttcggtgccgaccgggcgcaaggttctgtcgcttgcgggttcgaagatgaagcacgcgacgatggagctcggcggcaagtcgccgctgatcgtcttcgacgatgccgacatcgaaaacgccattggcggcgccatgctcggcaatttttactccacaggccagatctgctccaacggcacgcgtgtcttcgtgcaaagcggcatccacgaccgcttcgtcgagcggctggtcgagcggacgaagaaaatccgcatcggcaatccgcttgatcccgagacgcagatgggaccactggtctccaaggcacagcacgagaaggtcgtcggctatattgggattggcaagcaggacggcgctgttctcgcctgcggtggcaatgtgccgtcgctgcagggttttgacggcggcttcttcgtcgagccgacggtgttcaccggggtcaccgacacgatgcgcatcgcccgcgaggagattttcggacctgtcatgagcgtgctgaaattcgacggcgaggacgaggtgatcgaccgcgccaacgacaccgaattcggcctcgccgcgggcgtcttcacccgcgacctgccgcgcgcccaccgcgtgatcgccgaattgcaggccggcacctgctggatcaacgcctacaatctgacgccggtggaaatccccttcggcggcttcaagcagtccggcatcggccgcgagaattcgctggcggcattggcgctctattcgcagctgaagtcgatctatgtcgagactggggacgtggcgagcccgtattga

SEQ ID NO: 121484 - protein, 487 aa, Rhizobium loti
MRAQPTASHYVNGRYIDDEQGAPLPVIYPATGETIAMLRSATPNVLELAIEAARAAQPAWARLKPVERGRILRRAADILRARNADLARIETLDTGKAIQETLVADAPSAADCLEYFGGAVAAYNGEAVDLGGPFAYTRREALGVCVGIGAWNYPIQIAGWKSAPALAMGNAMVFKPSENTPLSALALAEIYSEAGLPDGLFNVVQGYGDVGAGLVGHDVVAKVSVTGSVPTGRKVLSLAGSKMKHATMELGGKSPLIVFDDADIENAIGGAMLGNFYSTGQICSNGTRVFVQSGIHDRFVERLVERTKKIRIGNPLDPETQMGPLVSKAQHEKVVGYIGIGKQDGAVLACGGNVPSLQGFDGGFFVEPTVFTGVTDTMRIAREEIFGPVMSVLKFDGEDEVIDRANDTEFGLAAGVFTRDLPRAHRVIAELQAGTCWINAYNLTPVEIPFGGFKQSGIGRENSLAALALYSQLKSIYVETGDVASPY

SEQ ID NO: 121485 - DNA, 1461 bp, Vibrio parahaemolyticus
  CDS (1)..(1461): transl_table=11
atggaaatgaaaacacattacatcgatggtgcaatgtatatcggatgttctgaagagcatttcaccacttacaatccggcaaatggtgagccattggccaatattaaacaagcaaaccagagcgatatggaagccgctattgaatctgcaaagcgcggctttgaggtttggtctgcaatgacggccattgaacgtagccggattcttaataaagcggtagcgattctgcgtgaacgcaatgacgagttagccgctttagaagtggcggacacgggtaagccaattcaagaagcgatcgctgttgatattacgacaggcgcagatgttatcgaatattacgctggtcttgcaccaagtttgcagggtgagcaacaaccacttaatgaaaaccagtttttctatacccgccgtgaacctttgggaatttgcgcaggtattggcgcctggaactatcctattcaaatcgcaatgtggaaatcagcaccagcactggctgcgggtaatgcaatgatctttaagccgtcggaagaaacaccgcttacagcacttaagcttgcggaaatttattctgaagcgggccttcctgatggtgtgtttaacgtcgtgcagggtgattaccgggtagggcagatgctaacggcgcatccggatattgctaaagtatcgttcactggcgaatcaggcactggcaaagttgttatgggtgacagtgcaaaaacgcttaagcaagtcacaatggagttaggtggtaagtcaccactgatcgtattcgacgatgcgaagctggacgatgcggtatcagcagcaatggttgctaacttttacactcagggtgaggtatgtaccaacggtacccgtgtatttgtccatgaatctatctacgacgactttgttgcacagcttaaaactcgtactgagaaactggttgtcggagaccctcttgatgaaaatacacaaatcggtgccctaatttcaaaagaacatgaaagcaaagtgctgtcagcgattgagagcgcaaaagcgagcggtgccactctgctgaccggcggttacaaagtaacagataatggtctgcaaaatggtaacttcgttgctccaaccgtatttatcgactgtgacgatagcatgagccacgtacagcaagagatctttggtcctgtaatgtccgtgcttaaatttagcgaagaagctgaagttatcgagcgagctaacgatacggactatggcttggctgctggtgtctttactcagaacctctctcgcgctcatcgcgtaattcataagattcaggcaggtatctgctgggttaatgcatggggtgactctccggcagaaatgccagttggtggctataagcaatccggtattggccgtgagaacggcgtcgaaacactgaagcactacacgcaaactaagagcgtactggttcagcttagcgacttcgaaagcccttacgcctaa

SEQ ID NO: 121486 - protein, 486 aa, Vibrio parahaemolyticus
MEMKTHYIDGAMYIGCSEEHFTTYNPANGEPLANIKQANQSDMEAAIESAKRGFEVWSAMTAIERSRILNKAVAILRERNDELAALEVADTGKPIQEAIAVDITTGADVIEYYAGLAPSLQGEQQPLNENQFFYTRREPLGICAGIGAWNYPIQIAMWKSAPALAAGNAMIFKPSEETPLTALKLAEIYSEAGLPDGVFNVVQGDYRVGQMLTAHPDIAKVSFTGESGTGKVVMGDSAKTLKQVTMELGGKSPLIVFDDAKLDDAVSAAMVANFYTQGEVCTNGTRVFVHESIYDDFVAQLKTRTEKLVVGDPLDENTQIGALISKEHESKVLSAIESAKASGATLLTGGYKVTDNGLQNGNFVAPTVFIDCDDSMSHVQQEIFGPVMSVLKFSEEAEVIERANDTDYGLAAGVFTQNLSRAHRVIHKIQAGICWVNAWGDSPAEMPVGGYKQSGIGRENGVETLKHYTQTKSVLVQLSDFESPYA

SEQ ID NO: 121487 - DNA, 1461 bp, Vibrio vulnificus
  CDS (1)..(1461): transl_table=11
atggaagttacagcacattacattggagggaagcctttcgttggtgacactggcgaatcttttgcgaccttaaatccagcaaccggagaagtgttagcacacatcgagcaagccgacgaaagggtgttaggtcacgccatcgagagcgcgaagcttggcttttctgtgtggtcatctatgagcgctgccgagcgcagccgatgcttactcaaagcggcgcagctgattcgcgatcacaatgatgaactagcagagttggaagtgcgcgatacgggcaaaccaattcaagaagcgagtgtggttgacattgctactggcgcagatgttatcgagtattttgctggattagtgaatggcttaggtggcgagcaacaatcccttggttccaatcagtttttttacaccagaagagaacctctgggcatttgtgccggcatcggcgcttggaattatccgattcaaattgcaatgtggaaagccgcgcctgcattagcagctggcaacgcgatgatctttaaaccctcagaagaaacgccactttcggcactcaaactggctgaactctttacgcaagcgggcgtgcctgatggcgtgtttaacgttgttcaaggggactatcgtgttgggcaaatgctcaccgcgcatcctgaaatcgacaaagtctcatttaccggtgagtcaggcacgggcaagaaagtgatggccgatagtgcagcgacactcaaacccgtcaccatggaattgggggggaaatcgcccttgattattttcgatgatgccgatcttgatgatgctgtctcggcagcaatggtggcaaatttttacactcaaggtgaggtgtgtacccatggcacgcgagtttatgttcaacgagcgatgtacgacgcgtttgttgaacagctaaaagagcgcacggaaaagctcattgtcggcgatccaatgaacatggaaacgcaaattggctcactgatttctaaatcgcatctagaaaaagtactcggtgctatttcgagtgcgaaagagagtggtgcaacgttgctcactggtggtttccaagtgacggaaagagggctagagaaagggtgttttgttgcgcctaccgtctttgtcgattgccgcgatgagatgcctcatgtgcaaaatgaaatctttggacctgtcatgtcggtgctggtgtttgatgacgaagatgaagtcattgctcgcgcgaacaacacccaatacggcttggccgctggggtatttacgcagaatctatccaaagcccatagagtcattcaccaactgcaagcgggcatttgctggataaacacttggggaaattcacccgcagagatgccggtggggggctacaagttgtcgggcattggccgcgaaaatggccaagagacgttactgcactatacgcagaccaaaagcgtgtttgtcgaactgggtgcgttcgactccccttacgcttaa

SEQ ID NO: 121488 - protein, 486 aa, Vibrio vulnificus
MEVTAHYIGGKPFVGDTGESFATLNPATGEVLAHIEQADERVLGHAIESAKLGFSVWSSMSAAERSRCLLKAAQLIRDHNDELAELEVRDTGKPIQEASVVDIATGADVIEYFAGLVNGLGGEQQSLGSNQFFYTRREPLGICAGIGAWNYPIQIAMWKAAPALAAGNAMIFKPSEETPLSALKLAELFTQAGVPDGVFNVVQGDYRVGQMLTAHPEIDKVSFTGESGTGKKVMADSAATLKPVTMELGGKSPLIIFDDADLDDAVSAAMVANFYTQGEVCTHGTRVYVQRAMYDAFVEQLKERTEKLIVGDPMNMETQIGSLISKSHLEKVLGAISSAKESGATLLTGGFQVTERGLEKGCFVAPTVFVDCRDEMPHVQNEIFGPVMSVLVFDDEDEVIARANNTQYGLAAGVFTQNLSKAHRVIHQLQAGICWINTWGNSPAEMPVGGYKLSGIGRENGQETLLHYTQTKSVFVELGAFDSPYA

SEQ ID NO: 121489 - DNA, 1461 bp, Vibrio vulnificus
  CDS (1)..(1461): transl_table=11
atggaagttacagcacattacattggagggaagcctttcgttggtgacactggcgaatcttttgcgaccttaaatccagcaaccggagaagtgttagcacacatcgagcaagccgacgaaagggtgttagctcacgccatcgagagcgcgaagcttggcttttctgtgtggtcatctatgagcgctgccgagcgcagccgatgcttactcaaagcggcgcagctgattcgcgatcacaatgatgaactagcagagttggaagtgcgcgatacgggcaaaccaattcaagaagcgagtgtggttgacattgctactggcgcagatgttatcgagtattttgctggattagtgaatggcttaggtggcgagcaacaatcccttggttccaatcagtttttttacaccagaagagaacctctgggcatttgtgccggcatcggcgcttggaattatccgattcaaattgcaatgtggaaagccgcgcctgcattagcagctggcaacgcgatgatctttaaaccctcagaagaaacgccactttcggcactcaaactggctgaactctttacgcaagcgggcgtgcctgatggcgtgtttaacgttgttcaaggggactatcgtgttgggcaaatgctcaccgcgcatcctgaaatcgccaaagtctcatttactggtgagtcaggcaccggcaagaaagtgatggccgatagtgcagcgacactcaaacccgtcaccatggaattgggggggaaatcgcccttgattattttcgatgatgccgatcttgatgatgctgtctcggcagcaatggtggcaaatttttacactcaaggtgaggtgtgtacccatggcacgcgagtttatgttcaacgagcgatgtacgacgcgtttgttgaacagctaaaagagcgcacggaaaagctcattgtcggcgatccaatgaacatggaaacgcaaattggctcactgatttctaaatcgcatctagaaaaagtactcggtgctatttcgagtgcgaaagagagcggtgcaacgttgctcactggtggtttccaagtgacggaaagagggctagagaaagggtgttttgttgcgcctaccgtctttgtcgattgtcgcgatgagatgcctcatgtgcaaaatgaaatctttggacctgtcatgtcagtgctggtgtttgatgacgaagatgaagtcattgctcgcgcgaataacacccaatacggcttggctgctggggtatttacgcaaaatctatccaaagcccatagagtcattcaccaactgcaagcgggcatctgctggataaacacttggggaaattcacccgcagagatgccggtaggtggctacaagctgtcgggcattggtcgcgaaaatggccaagagacgttactgcactatacgcagaccaaaagcgtgtttgtcgaactgggtgcgttcgactccccttacgcttaa

SEQ ID NO: 121490 - protein, 486 aa, Vibrio vulnificus
MEVTAHYIGGKPFVGDTGESFATLNPATGEVLAHIEQADERVLAHAIESAKLGFSVWSSMSAAERSRCLLKAAQLIRDHNDELAELEVRDTGKPIQEASVVDIATGADVIEYFAGLVNGLGGEQQSLGSNQFFYTRREPLGICAGIGAWNYPIQIAMWKAAPALAAGNAMIFKPSEETPLSALKLAELFTQAGVPDGVFNVVQGDYRVGQMLTAHPEIAKVSFTGESGTGKKVMADSAATLKPVTMELGGKSPLIIFDDADLDDAVSAAMVANFYTQGEVCTHGTRVYVQRAMYDAFVEQLKERTEKLIVGDPMNMETQIGSLISKSHLEKVLGAISSAKESGATLLTGGFQVTERGLEKGCFVAPTVFVDCRDEMPHVQNEIFGPVMSVLVFDDEDEVIARANNTQYGLAAGVFTQNLSKAHRVIHQLQAGICWINTWGNSPAEMPVGGYKLSGIGRENGQETLLHYTQTKSVFVELGAFDSPYA

SEQ ID NO: 121491 - DNA, 1473 bp, Xanthomonas axonopodis pv
  CDS (1)..(1473): transl_table=11
atgccacgtttccccgaccagttgctgtatatcggcggccgttatgttcccgcccgcggcggccacacgctcgaagtggtcaaccccgctaccggcgaggtgctggccaacgtgcacaacgccggcgtcgacgatctggatgccgccgtcgatagcgcgaaggcaggccagcaacgatgggcagccctgacgacggtggagcgctcgcgcattctgctgcgtgcggtggcgttgctacgcgaacgcaacgatgcactggcgcaattggaaacgctcaacaccggcaagccgctgagcgagacacgcagcgtcgatgtggtcaccggtgccgacgtactggagtattacgctggcgttgcgcaggcgctgcagggtgcgcaagtgcccctgcgcgaaggcagcttcttctacacgcgccacgaaccgctgggcgttgtgggtgcgatcggcgcgtggaattaccccatccagatcgcactgtggaaagccgcgcccgccctggccgccggtaacgcgatgatcttcaaacccagcgaagtcaccccgctcaccgcgctgaaactggccgaaatctttaccgaggccggcctgcccgatggcgtgttcaacgtgttgcccggcgatggcgccagcgtgggcactgcgctcaccgagcatccgcagatcgaaaagatcagtttcaccggcggcaccgccaccggccgcaaggtgatggccagcgcatcgagttcgtcgctgaaggaggtgaccatggaactgggcggcaagtcgccgctgattgtctgcgccgatgccgatctggacgtggctgccgacatcgccatgatggccaacttctacagctccgggcaggtgtgcaccaacggcacgcgcgtgttcgtgccgcgcgccttgcgtcacgcattcgaagcgcgcctgctggcccgcgtgcaacggatccatatcggcgacccgctcgatgagcgcaccaccttcggtccgctggccagcgccgcgcatatgcagcgcgtgctggagcatatcgaacagggcaaggcagaaggcgcacgtcttctatgcggcggcgagcgcctgcaagatggcgcactggtgcaaggctattacgtggcgccgaccatcttcagcgattgcaccgatgtgatgaccatcgtgcgcgaggaaatcttcggaccggtcttgagcctgctcacctacgacgacgaagacgaagcggtgacgcgcgccaacgccaccacgtatgggctggctgcaggcgtggtcacgccggacctggcgcgtgcacaccggctgatccatcgcctggaagcgggcatctgctgggtcaacacctggggcgagtcgccggccccgatgccggtgggcggctacaagcagtcgggcgtggggcgcgaaaacggtttggcgaccttgcaggcctacacgcgcaccaaatcggtccagatcgaactggaacgttacgcgtcggtgttctga

SEQ ID NO: 121492 - protein, 490 aa, Xanthomonas axonopodis pv
MPRFPDQLLYIGGRYVPARGGHTLEVVNPATGEVLANVHNAGVDDLDAAVDSAKAGQQRWAALTTVERSRILLRAVALLRERNDALAQLETLNTGKPLSETRSVDVVTGADVLEYYAGVAQALQGAQVPLREGSFFYTRHEPLGVVGAIGAWNYPIQIALWKAAPALAAGNAMIFKPSEVTPLTALKLAEIFTEAGLPDGVFNVLPGDGASVGTALTEHPQIEKISFTGGTATGRKVMASASSSSLKEVTMELGGKSPLIVCADADLDVAADIAMMANFYSSGQVCTNGTRVFVPRALRHAFEARLLARVQRIHIGDPLDERTTFGPLASAAHMQRVLEHIEQGKAEGARLLCGGERLQDGALVQGYYVAPTIFSDCTDVMTIVREEIFGPVLSLLTYDDEDEAVTRANATTYGLAAGVVTPDLARAHRLIHRLEAGICWVNTWGESPAPMPVGGYKQSGVGRENGLATLQAYTRTKSVQIELERYASVF

SEQ ID NO: 121493 - DNA, 1473 bp, Xanthomonas campestris pv
  CDS (1)..(1473): transl_table=11
atgccacgtttccccgaccagctgctgtacatcggcggccgctatgttcccgcccgcggcggccacacgttcgaggtggtgaacccggccaccggtgaagtccttgccaacgtccacaacgccgacgccgacgatctggatgcagccgtggacagcgccaaggccggccaacggcactgggccgcactcactgtggtggagcgctcacgcattctgttgcgtgccgtcgcgctactgcgcgagcgcaacgacgccctggcggagctggaaacgctcaacaccggcaagccgctgagcgaaacgcgcagcgtggacatcgtcaccggcgccgacgtgttggagtactacgccggcgtggcgcaggcgctgcagggcgtgcaggtgccattgcgcgaaggcagcttcttctacacgcggcacgaaccgcttggtgtggtgggcgcgatcggcgcgtggaattacccgatccagatcgcgctctggaaagccgcaccggccctggccgccggcaacgcgatgatcttcaagcccagcgaggtgacgccgctcaccgcgctcaagctggctgaaattttcaccgaagccggcctgccggatggcgtgttcaacgtgctgcccggcgacggcgccagcgtgggccacgcgcttaccgagcatccggagatcgaaaagatcagcttcaccggtggcaccgcaaccggccgcaaggtgatggccagcgcctccagttcgtcgttgaaggacgtgaccatggaactgggcggcaaatcgccactgattgtctgtgccgatgccgacctggacctggcggccgacatcgcgatgatggccaacttctacagctccggccaggtgtgcaccaacggcacgcgcgtcttcgtgccgcgggcactgcgcactgcattcgaagcgcgtctgctggcacgcgtgcaacgcatccatatcggcgacccgctcgatgagcgaaccacgttcgggccgatggtcagtgccgcgcacatgcagcgcgtgctggaacacatcgagcaaggcaaggccgaaggggcgcgcctgctgttcggtggcgagcggctgcgcgatggtgcactggcgcagggttgctacgtggcgccgaccatcttcagcgattgcaccgacgtgatgaccatcgtgcgcgaagagatcttcgggccggtgctgagcctgctcacctacgacgacgaagatgaggcaatcacgcgcgccaacgccaccagctatggcctggcggcgggtgttgtgacgccggatctgtcacgcgcgcatcggctgatccatcgcctggaggccggcatctgctggatcaacacctggggcgaatcaccggcgccgatgccggtgggcggctacaagcaatcgggtgtgggccgcgagaacggcctggccacgctgcaggcctacacacgcaccaagtctgtccaggtcgaactggaacgctacgcgtcggtgttctag

SEQ ID NO: 121494 - protein, 490 aa, Xanthomonas campestris pv
MPRFPDQLLYIGGRYVPARGGHTFEVVNPATGEVLANVHNADADDLDAAVDSAKAGQRHWAALTVVERSRILLRAVALLRERNDALAELETLNTGKPLSETRSVDIVTGADVLEYYAGVAQALQGVQVPLREGSFFYTRHEPLGVVGAIGAWNYPIQIALWKAAPALAAGNAMIFKPSEVTPLTALKLAEIFTEAGLPDGVFNVLPGDGASVGHALTEHPEIEKISFTGGTATGRKVMASASSSSLKDVTMELGGKSPLIVCADADLDLAADIAMMANFYSSGQVCTNGTRVFVPRALRTAFEARLLARVQRIHIGDPLDERTTFGPMVSAAHMQRVLEHIEQGKAEGARLLFGGERLRDGALAQGCYVAPTIFSDCTDVMTIVREEIFGPVLSLLTYDDEDEAITRANATSYGLAAGVVTPDLSRAHRLIHRLEAGICWINTWGESPAPMPVGGYKQSGVGRENGLATLQAYTRTKSVQVELERYASVF

SEQ ID NO: 121495 - DNA, 1473 bp, Yersinia pestis
  CDS (1)..(1473): transl_table=11
atgtcccgctacggcttgcaaaaactttatatcaacggcgcgtacaccgacagcaccagtggtgatactttcgatgccgtgaaccccgcgaatggcgaatgcattgcacaactccaggccgccaacgcacaggatgttgataaggcggtagccgccgccaaacaaggtcagcctgtgtgggcagcgatgaccgcgatggaacgttcacgcatcttgcgccgggccgtggatatcttgcgtgatcgtaatgatgaactggcggcaattgaaacggcagacaccggtaaacccctatccgaaacccgatctgtggacatcgttaccggtgccgatgtgctggaatattatgctggcctaatccccgcccttgaagggcaacagatcccactacgtggcagcgcatttgtctatacccgccgtgagccactgggcgtggttgccggtattggtgcctggaactatccccttcagatcgctttgtggaaatctgcaccggcgctggcggcgggcaacgctatgatcttcaaaccaagtgaagtgacatcgctgaccgcactgaaattggcgggaatctacaccgaagcgggtttaccggctggcgtatttaacgtattgaccggcagtggtgaccaggttgggcagatgctgacagagcatccgggtattgcaaaggtctccttcaccggggggattgccagcggtaaaaaggtgatggctaacgccgcgggatcgaccctgaaagatgtcaccatggagttgggcggaaagtccccactaattatttttgctgatgccgatctcgataaggccgctgatattgcgatgatggccaatttctacagctcaggacaagtctgcaccaacggcacgcgagtttttgtcccgcaggcgttacaggccgcgtttgagcagaaaatcgttgaacgggtcaagcggattcatattggtgacccaagcgatgaacgaaccaactttggcccgttggttagcttccagcaccgcgattcagtgatgcgttacattgacagcggtaaacgggaaggcgcaaccctgctgatcgggggatacagtctgaccgagggcgcactggcacacggggcctatgtcgcccctacggtattcacccactgccgtgatgacatgcaaattgtgcgtgaagagatcttcggaccggtgatgagcattcttagttatcaaagcgaagaggaagtcattcgccgcgccaatgataccgagtacggtttagcggcgggggtcgttacacaggatttgaaccgtgcccatcgcgtgattcatcaactgcaagcgggtatctgctggatcaatacttggggcgaatcggcaccagagatgcctgtaggcggatataagcattctggtgtaggccgtgaaaacggtatcagcacgctggaacattacacgcaaatcaaatcaattcaggttgagttaggcagcttcaattctgttttttaa

SEQ ID NO: 121496 - protein, 490 aa, Yersinia pestis
MSRYGLQKLYINGAYTDSTSGDTFDAVNPANGECIAQLQAANAQDVDKAVAAAKQGQPVWAAMTAMERSRILRRAVDILRDRNDELAAIETADTGKPLSETRSVDIVTGADVLEYYAGLIPALEGQQIPLRGSAFVYTRREPLGVVAGIGAWNYPLQIALWKSAPALAAGNAMIFKPSEVTSLTALKLAGIYTEAGLPAGVFNVLTGSGDQVGQMLTEHPGIAKVSFTGGIASGKKVMANAAGSTLKDVTMELGGKSPLIIFADADLDKAADIAMMANFYSSGQVCTNGTRVFVPQALQAAFEQKIVERVKRIHIGDPSDERTNFGPLVSFQHRDSVMRYIDSGKREGATLLIGGYSLTEGALAHGAYVAPTVFTHCRDDMQIVREEIFGPVMSILSYQSEEEVIRRANDTEYGLAAGVVTQDLNRAHRVIHQLQAGICWINTWGESAPEMPVGGYKHSGVGRENGISTLEHYTQIKSIQVELGSFNSVF

SEQ ID NO: 121497 - DNA, 1473 bp, Yersinia pseudotuberculosis
  CDS (1)..(1473): transl_table=11
atgtcccgctacggcttgcaaaaactttatatcaacggcgcgtacaccgacagcaccagtggtgatactttcgatgccgtgaaccccgcgaatggcgaatgcattgcacaactccaggccgccaacgcacaggatgttgataaggcggtagccgccgccaaacaaggtcagcctgtgtgggcagcgatgaccgcgatggaacgttcacgcatcttgcgccgggccgtggatatcttgcgtgatcgtaatgatgaactggcggcaattgaaacggcagacaccggtaaacccctatccgaaacccgatctgtggacatcgttaccggtgccgatgtgctggaatattatgctggcctaatccccgcccttgaagggcaacagatcccactacgtggcagcgcatttgtctatacccgccgtgagccactgggcgtggttgccggtattggtgcctggaactatccccttcagatcgctttgtggaaatctgcaccggcgctggcggcgggcaacgctatgatcttcaaaccaagtgaagtgacatcgctgaccgcactgaaattggcgggaatctacaccgaagcgggtttaccggctggcgtatttaacgtattgaccggcagtggtgaccaggttgggcagatgctgacagagcatccgggtattgcaaaggtctccttcaccggggggattgccagcggtaaaaaggtgatggctaacgccgcgggatcgaccctgaaagatgtcaccatggagttgggcggaaagtccccactaattatttttgctgatgccgatctcgataaggccgctgatattgcgatgatggccaatttctacagctcaggacaagtctgcaccaacggcacgcgagtttttgtcccgctggcgttacaggccgcgtttgagcagaaaatcgttgaacgggtcaagcggattcatattggtgacccaagcgatgaacgaaccaactttggcccgttggttagcttccagcaccgcgattcagtgatgcgttacattgacagcggtaaacgggaaggcgcaaccctgctgatcgggggatacagtctgaccgagggcgcactggcacacggggcctatgtcgcccctacggtattcacccactgccgtgatgacatgcaaattgtgcgtgaagagatcttcggaccggtgatgagcattctgagttatcaaagcgaagaggaagtcattcgccgcgccaatgataccgagtacggtttagcggcgggggtcgttacacaggatttgaaccgtgcccatcgcgtgattcatcaactgcaagcgggtatctgctggatcaatacttggggcgaatcggcaccagagatgcctgtaggcggatataagcattctggtgtaggccgtgaaaacggtatcagcacgctggaacattacacgcaaatcaaatcaattcaggttgagttaagcagcttcaattctgttttttaa

SEQ ID NO: 121498 - protein, 490 aa, Yersinia pseudotuberculosis
MSRYGLQKLYINGAYTDSTSGDTFDAVNPANGECIAQLQAANAQDVDKAVAAAKQGQPVWAAMTAMERSRILRRAVDILRDRNDELAAIETADTGKPLSETRSVDIVTGADVLEYYAGLIPALEGQQIPLRGSAFVYTRREPLGVVAGIGAWNYPLQIALWKSAPALAAGNAMIFKPSEVTSLTALKLAGIYTEAGLPAGVFNVLTGSGDQVGQMLTEHPGIAKVSFTGGIASGKKVMANAAGSTLKDVTMELGGKSPLIIFADADLDKAADIAMMANFYSSGQVCTNGTRVFVPLALQAAFEQKIVERVKRIHIGDPSDERTNFGPLVSFQHRDSVMRYIDSGKREGATLLIGGYSLTEGALAHGAYVAPTVFTHCRDDMQIVREEIFGPVMSILSYQSEEEVIRRANDTEYGLAAGVVTQDLNRAHRVIHQLQAGICWINTWGESAPEMPVGGYKHSGVGRENGISTLEHYTQIKSIQVELSSFNSVF

SEQ ID NO: 121499 - DNA, 1491 bp, Octopus dofleini; identical to SEQ ID NO: 38077
  CDS (1)..(1491)

SEQ ID NO: 121500 - protein, 496 aa, Octopus dofleini; identical to SEQ ID NO: 38078

SEQ ID NO: 121501 - DNA, 1488 bp, Ommastrephes sloanei; identical to SEQ ID NO: 38079
  CDS (1)..(1488)

SEQ ID NO: 121502 - protein, 495 aa, Ommastrephes sloanei; identical to SEQ ID NO: 38080

SEQ ID NO: 121503 - DNA, 1461 bp, Pseudomonas sp
  CDS (1)..(1461): transl_table=11
atgaaagagatcaagcacttcattaacggcgccttcgtcggctcggctagcggccgcaccttcgaggacgtcaaccccgctaatggccaggtgattgcccgtgttcacgaagctggtcgcgccgaagtcgacgcagcggtgcaggccgcacgcgccgcgctgaaaggcccctggggcaagatgagcgtgagcgagcgggcggagatcctgcaccgcgtggccgacggcatcaccgcacgtttcgacgagttcctcgaagcggaatgcctggataccggcaagcccaagtcgctcgccagccatatcgacatcccgcgcggtgcggccaacttcaaggtcttcgccgacctactgaagaacgtcgccaccgaagccttcgagatggccacgccggatggtagtggcgcgatcaactacgcggtgcgccgccccaagggggtgatcggggtgatcagcccgtggaacctgccgctactgctgatgacctggaaggtcggcccggccctggcctgcggcaacacggtggtggtcaagccctcggaggaaaccccactgactaccgcgctgctcggcgaggtgatgcaggcggccggcgtgccggctggggtgtacaacgtggtgcatggcttcggcccggattcggccggcgccttcctcaccgagcacccggacgtcaacgccatcaccttcaccggcgaaacccgcaccggcgaggcgatcatgcgcgcggcggccaagggtgtgcggccggtgtccttcgaactgggcggcaagaacgccggcatcgtcttcgccgactgcgacctggacaaggccatcgaaggcagcatgcggtcggtgttcgccaacggcggccaggtctgcctgggcaccgagcgcctgtatgtcgagcggccgatcttcgatgagtttgtcgcccgcctcaaggccggcgccgagagcctggtgataggtacgccggatgacccgcaggccaacttcggcccgttgatcagcctgcagcaccgcgagaaggtcctctcctattaccagaaggcggttgatgagggcgccacagtggtcaccggcggcggcgtgcccgagatgccggccgaactggctggcggcgcctgggtgcaaccgaccatctggaccggcttggccgacggtgccgcggtggtcaccgaggaaatcttcgggccctgctgccatatccgcccgttcgaccgcgaggaagaagccgtcgagttggccaatagcctgccctatggcctggcggcgaccatctggaccgagaacacctcgcgcgcgcaccgcgtcgccgggcaactggaggccggcatcgtctgggttaacagctggttcctgcgcgatctgcgtaccgccttcggcggcagcaagcagtcgggtataggccgggaagggggtgtgcactcgctggagttctacaccgaactgaaaaacatctgcgtgaagttgtga

SEQ ID NO: 121504 - protein, 486 aa, Pseudomonas sp
MKEIKHFINGAFVGSASGRTFEDVNPANGQVIARVHEAGRAEVDAAVQAARAALKGPWGKMSVSERAEILHRVADGITARFDEFLEAECLDTGKPKSLASHIDIPRGAANFKVFADLLKNVATEAFEMATPDGSGAINYAVRRPKGVIGVISPWNLPLLLMTWKVGPALACGNTVVVKPSEETPLTTALLGEVMQAAGVPAGVYNVVHGFGPDSAGAFLTEHPDVNAITFTGETRTGEAIMRAAAKGVRPVSFELGGKNAGIVFADCDLDKAIEGSMRSVFANGGQVCLGTERLYVERPIFDEFVARLKAGAESLVIGTPDDPQANFGPLISLQHREKVLSYYQKAVDEGATVVTGGGVPEMPAELAGGAWVQPTIWTGLADGAAVVTEEIFGPCCHIRPFDREEEAVELANSLPYGLAATIWTENTSRAHRVAGQLEAGIVWVNSWFLRDLRTAFGGSKQSGIGREGGVHSLEFYTELKNICVKL

SEQ ID NO: 121505 - DNA, 1584 bp, Oryza sativa; identical to SEQ ID NO: 38085
  CDS (1)..(1584)

SEQ ID NO: 121506 - protein, 527 aa, Oryza sativa; identical to SEQ ID NO: 38086

SEQ ID NO: 121507 - DNA, 1686 bp, Oryza sativa; identical to SEQ ID NO: 38087
  CDS (1)..(1686)

SEQ ID NO: 121508 - protein, 561 aa, Oryza sativa; identical to SEQ ID NO: 38088

SEQ ID NO: 121509 - DNA, 1533 bp, Oryza sativa; identical to SEQ ID NO: 38091
  CDS (1)..(1533)

SEQ ID NO: 121510 - protein, 510 aa, Oryza sativa; identical to SEQ ID NO: 38092

SEQ ID NO: 121511 - DNA, 1518 bp, Oryza sativa; identical to SEQ ID NO: 38093
  CDS (1)..(1518)

SEQ ID NO: 121512 - protein, 505 aa, Oryza sativa; identical to SEQ ID NO: 38094

SEQ ID NO: 121513 - DNA, 1605 bp, Oryza sativa; identical to SEQ ID NO: 38097
  CDS (1)..(1605)

SEQ ID NO: 121514 - protein, 534 aa, Oryza sativa; identical to SEQ ID NO: 38098

SEQ ID NO: 121515 - DNA, 1794 bp, Oryza sativa; identical to SEQ ID NO: 38099
  CDS (1)..(1794)

SEQ ID NO: 121516 - protein, 597 aa, Oryza sativa; identical to SEQ ID NO: 38100

SEQ ID NO: 121517 - DNA, 1512 bp, Oryza sativa; identical to SEQ ID NO: 38101
  CDS (1)..(1512)

SEQ ID NO: 121518 - protein, 503 aa, Oryza sativa; identical to SEQ ID NO: 38102

SEQ ID NO: 121519 - DNA, 1500 bp, Oryza sativa; identical to SEQ ID NO: 38103
  CDS (1)..(1500)

SEQ ID NO: 121520 - protein, 499 aa, Oryza sativa; identical to SEQ ID NO: 38104

SEQ ID NO: 121521 - DNA, 1530 bp, Oryza sativa; identical to SEQ ID NO: 87264
  CDS (1)..(1530)

SEQ ID NO: 121522 - protein, 509 aa, Oryza sativa; identical to SEQ ID NO: 87265

SEQ ID NO: 121523 - DNA, 1512 bp, Brassica napus; identical to SEQ ID NO: 38105
  CDS (1)..(1512)

SEQ ID NO: 121524 - protein, 503 aa, Brassica napus; identical to SEQ ID NO: 38106

SEQ ID NO: 121525 - DNA, 1509 bp, Brassica napus; identical to SEQ ID NO: 38107
  CDS (1)..(1509)

SEQ ID NO: 121526 - protein, 502 aa, Brassica napus; identical to SEQ ID NO: 38108

SEQ ID NO: 121527 - DNA, 1614 bp, Brassica napus; identical to SEQ ID NO: 38109
  CDS (1)..(1614)

SEQ ID NO: 121528 - protein, 537 aa, Brassica napus; identical to SEQ ID NO: 38110

SEQ ID NO: 121529 - DNA, 1614 bp, Brassica napus; identical to SEQ ID NO: 38111
  CDS (1)..(1614)

SEQ ID NO: 121530 - protein, 537 aa, Brassica napus; identical to SEQ ID NO: 38112

SEQ ID NO: 121531 - DNA, 1620 bp, Glycine max; identical to SEQ ID NO: 38113
  CDS (1)..(1620)

SEQ ID NO: 121532 - protein, 539 aa, Glycine max; identical to SEQ ID NO: 38114

SEQ ID NO: 121533 - DNA, 1611 bp, Glycine max; identical to SEQ ID NO: 38115
  CDS (1)..(1611)

SEQ ID NO: 121534 - protein, 536 aa, Glycine max; identical to SEQ ID NO: 38116

SEQ ID NO: 121535 - DNA, 1527 bp, Linum usitatissimum; identical to SEQ ID NO: 38117
  CDS (1)..(1527)

SEQ ID NO: 121536 - protein, 508 aa, Linum usitatissimum; identical to SEQ ID NO: 38118

SEQ ID NO: 121537 - DNA, 1482 bp, Zea mays; identical to SEQ ID NO: 38119
  CDS (1)..(1482)

SEQ ID NO: 121538 - protein, 493 aa, Zea mays; identical to SEQ ID NO: 38120

SEQ ID NO: 121539 - DNA, 1530 bp, Hordeum vulgare; identical to SEQ ID NO: 38121
  CDS (1)..(1530)

SEQ ID NO: 121540 - protein, 509 aa, Hordeum vulgare; identical to SEQ ID NO: 38122

SEQ ID NO: 121541 - DNA, 1509 bp, Brassica napus; identical to SEQ ID NO: 38123
  CDS (1)..(1509)

SEQ ID NO: 121542 - protein, 502 aa, Brassica napus; identical to SEQ ID NO: 38124

SEQ ID NO: 121543 - DNA, 1530 bp, Brassica napus; identical to SEQ ID NO: 38125
  CDS (1)..(1530)

SEQ ID NO: 121544 - protein, 509 aa, Brassica napus; identical to SEQ ID NO: 38126

SEQ ID NO: 121545 - DNA, 1491 bp, Brassica napus; identical to SEQ ID NO: 38127
  CDS (1)..(1491)

SEQ ID NO: 121546 - protein, 496 aa, Brassica napus; identical to SEQ ID NO: 38128

SEQ ID NO: 121547 - DNA, 1614 bp, Brassica napus; identical to SEQ ID NO: 38129
  CDS (1)..(1614)

SEQ ID NO: 121548 - protein, 537 aa, Brassica napus; identical to SEQ ID NO: 38130

SEQ ID NO: 121549 - DNA, 1614 bp, Brassica napus; identical to SEQ ID NO: 38131
  CDS (1)..(1614)

SEQ ID NO: 121550 - protein, 537 aa, Brassica napus; identical to SEQ ID NO: 38132

SEQ ID NO: 121551 - DNA, 1593 bp, Brassica napus; identical to SEQ ID NO: 38133
  CDS (1)..(1593)

SEQ ID NO: 121552 - protein, 530 aa, Brassica napus; identical to SEQ ID NO: 38134

SEQ ID NO: 121553 - DNA, 1620 bp, Brassica napus; identical to SEQ ID NO: 38135
  CDS (1)..(1620)

SEQ ID NO: 121554 - protein, 539 aa, Brassica napus; identical to SEQ ID NO: 38136

SEQ ID NO: 121555 - DNA, 1506 bp, Brassica napus; identical to SEQ ID NO: 38137
  CDS (1)..(1506)

SEQ ID NO: 121556 - protein, 501 aa, Brassica napus; identical to SEQ ID NO: 38138

SEQ ID NO: 121557 - DNA, 1512 bp, Brassica napus; identical to SEQ ID NO: 38139
  CDS (1)..(1512)

SEQ ID NO: 121558 - protein, 503 aa, Brassica napus; identical to SEQ ID NO: 38140

SEQ ID NO: 121559 - DNA, 1530 bp, Brassica napus; identical to SEQ ID NO: 38141
  CDS (1)..(1530)

SEQ ID NO: 121560 - protein, 509 aa, Brassica napus; identical to SEQ ID NO: 38142

SEQ ID NO: 121561 - DNA, 1491 bp, Brassica napus; identical to SEQ ID NO: 38143
  CDS (1)..(1491)

SEQ ID NO: 121562 - protein, 496 aa, Brassica napus; identical to SEQ ID NO: 38144

SEQ ID NO: 121563 - DNA, 1620 bp, Brassica napus; identical to SEQ ID NO: 38145
  CDS (1)..(1620)

SEQ ID NO: 121564 - protein, 539 aa, Brassica napus; identical to SEQ ID NO: 38146

SEQ ID NO: 121565 - DNA, 1512 bp, Brassica napus; identical to SEQ ID NO: 38147
  CDS (1)..(1512)

SEQ ID NO: 121566 - protein, 503 aa, Brassica napus; identical to SEQ ID NO: 38148

SEQ ID NO: 121567 - DNA, 1530 bp, Brassica napus; identical to SEQ ID NO: 38149
  CDS (1)..(1530)

SEQ ID NO: 121568 - protein, 509 aa, Brassica napus; identical to SEQ ID NO: 38150

SEQ ID NO: 121569 - DNA, 1491 bp, Brassica napus; identical to SEQ ID NO: 38151
  CDS (1)..(1491)

SEQ ID NO: 121570 - protein, 496 aa, Brassica napus; identical to SEQ ID NO: 38152

SEQ ID NO: 121571 - DNA, 1554 bp, Glycine max; identical to SEQ ID NO: 38153
  CDS (1)..(1554)

SEQ ID NO: 121572 - protein, 517 aa, Glycine max; identical to SEQ ID NO: 38154

SEQ ID NO: 121573 - DNA, 1494 bp, Glycine max; identical to SEQ ID NO: 38155
  CDS (1)..(1494)

SEQ ID NO: 121574 - protein, 497 aa, Glycine max; identical to SEQ ID NO: 38156

SEQ ID NO: 121575 - DNA, 1623 bp, Glycine max; identical to SEQ ID NO: 38157
  CDS (1)..(1623)

SEQ ID NO: 121576 - protein, 540 aa, Glycine max; identical to SEQ ID NO: 38158

SEQ ID NO: 121577 - DNA, 1515 bp, Glycine max; identical to SEQ ID NO: 38159
  CDS (1)..(1515)

SEQ ID NO: 121578 - protein, 504 aa, Glycine max; identical to SEQ ID NO: 38160

SEQ ID NO: 121579 - DNA, 1527 bp, Glycine max; identical to SEQ ID NO: 38161
  CDS (1)..(1527)

SEQ ID NO: 121580 - protein, 508 aa, Glycine max; identical to SEQ ID NO: 38162

SEQ ID NO: 121581 - DNA, 1506 bp, Glycine max; identical to SEQ ID NO: 38163
  CDS (1)..(1506)

SEQ ID NO: 121582 - protein, 501 aa, Glycine max; identical to SEQ ID NO: 38164

SEQ ID NO: 121583 - DNA, 1500 bp, Glycine max; identical to SEQ ID NO: 38165
  CDS (1)..(1500)

SEQ ID NO: 121584 - protein, 499 aa, Glycine max; identical to SEQ ID NO: 38166

SEQ ID NO: 121585 - DNA, 1512 bp, Glycine max; identical to SEQ ID NO: 38167
  CDS (1)..(1512)

SEQ ID NO: 121586 - protein, 503 aa, Glycine max; identical to SEQ ID NO: 38168

SEQ ID NO: 121587 - DNA, 1518 bp, Glycine max; identical to SEQ ID NO: 38169
  CDS (1)..(1518)

SEQ ID NO: 121588 - protein, 505 aa, Glycine max; identical to SEQ ID NO: 38170

SEQ ID NO: 121589 - DNA, 1611 bp, Glycine max; identical to SEQ ID NO: 38171
  CDS (1)..(1611)

SEQ ID NO: 121590 - protein, 536 aa, Glycine max; identical to SEQ ID NO: 38172

SEQ ID NO: 121591 - DNA, 1506 bp, Glycine max; identical to SEQ ID NO: 38173
  CDS (1)..(1506)

SEQ ID NO: 121592 - protein, 501 aa, Glycine max; identical to SEQ ID NO: 38174

SEQ ID NO: 121593 - DNA, 1614 bp, Glycine max; identical to SEQ ID NO: 38175
  CDS (1)..(1614)

SEQ ID NO: 121594 - protein, 537 aa, Glycine max; identical to SEQ ID NO: 38176

SEQ ID NO: 121595 - DNA, 1611 bp, Glycine max; identical to SEQ ID NO: 38177
  CDS (1)..(1611)

SEQ ID NO: 121596 - protein, 536 aa, Glycine max; identical to SEQ ID NO: 38178

SEQ ID NO: 121597 - DNA, 1512 bp, Hordeum vulgare; identical to SEQ ID NO: 38179
  CDS (1)..(1512)

SEQ ID NO: 121598 - protein, 503 aa, Hordeum vulgare; identical to SEQ ID NO: 38180

SEQ ID NO: 121599 - DNA, 1581 bp, Hordeum vulgare; identical to SEQ ID NO: 38181
  CDS (1)..(1581)

SEQ ID NO: 121600 - protein, 526 aa, Hordeum vulgare; identical to SEQ ID NO: 38182

SEQ ID NO: 121601 - DNA, 1491 bp, Hordeum vulgare; identical to SEQ ID NO: 38183
  CDS (1)..(1491)

SEQ ID NO: 121602 - protein, 496 aa, Hordeum vulgare; identical to SEQ ID NO: 38184

SEQ ID NO: 121603 - DNA, 1584 bp, Zea mays; identical to SEQ ID NO: 38185
  CDS (1)..(1584)

SEQ ID NO: 121604 - protein, 527 aa, Zea mays; identical to SEQ ID NO: 38186

SEQ ID NO: 121605 - DNA, 1569 bp, Triticum aestivum; identical to SEQ ID NO: 38187
  CDS (1)..(1569)

SEQ ID NO: 121606 - protein, 522 aa, Triticum aestivum; identical to SEQ ID NO: 38188

SEQ ID NO: 121607 - DNA, 1650 bp, Triticum aestivum; identical to SEQ ID NO: 87362
  CDS (1)..(1650)

SEQ ID NO: 121608 - protein, 549 aa, Triticum aestivum; identical to SEQ ID NO: 37862

SEQ ID NO: 121609 - DNA, 1491 bp, Triticum aestivum; identical to SEQ ID NO: 38189
  CDS (1)..(1491)

SEQ ID NO: 121610 - protein, 496 aa, Triticum aestivum; identical to SEQ ID NO: 38190

SEQ ID NO: 121611 - DNA, 1503 bp, Triticum aestivum; identical to SEQ ID NO: 38191
  CDS (1)..(1503)

SEQ ID NO: 121612 - protein, 500 aa, Triticum aestivum; identical to SEQ ID NO: 38192

SEQ ID NO: 121613 - DNA, 1518 bp, Zea mays; identical to SEQ ID NO: 38193
  CDS (1)..(1518)

SEQ ID NO: 121614 - protein, 505 aa, Zea mays; identical to SEQ ID NO: 38194

SEQ ID NO: 121615 - DNA, 1530 bp, Zea mays; identical to SEQ ID NO: 38197
  CDS (1)..(1530)

SEQ ID NO: 121616 - protein, 509 aa, Zea mays; identical to SEQ ID NO: 38198

SEQ ID NO: 121617 - DNA, 1497 bp, Zea mays; identical to SEQ ID NO: 38199
  CDS (1)..(1497)

SEQ ID NO: 121618 - protein, 498 aa, Zea mays; identical to SEQ ID NO: 38200

SEQ ID NO: 121619 - DNA, 1584 bp, Zea mays; identical to SEQ ID NO: 38201
  CDS (1)..(1584)

SEQ ID NO: 121620 - protein, 527 aa, Zea mays; identical to SEQ ID NO: 38202

SEQ ID NO: 121621 - DNA, 1521 bp, Zea mays; identical to SEQ ID NO: 38205
  CDS (1)..(1521)

SEQ ID NO: 121622 - protein, 506 aa, Zea mays; identical to SEQ ID NO: 38206

SEQ ID NO: 121623 - DNA, 1530 bp, Zea mays; identical to SEQ ID NO: 38207
  CDS (1)..(1530)

SEQ ID NO: 121624 - protein, 509 aa, Zea mays; identical to SEQ ID NO: 38208

SEQ ID NO: 121625 - DNA, 1518 bp, Zea mays; identical to SEQ ID NO: 38209
  CDS (1)..(1518)

SEQ ID NO: 121626 - protein, 505 aa, Zea mays; identical to SEQ ID NO: 38210

SEQ ID NO: 121627 - DNA, 1782 bp, Zea mays; identical to SEQ ID NO: 38211
  CDS (1)..(1782)

SEQ ID NO: 121628 - protein, 593 aa, Zea mays; identical to SEQ ID NO: 38212

SEQ ID NO: 121629 - DNA, 22 bp, Artificial sequence
  primer
atgtcccgaatggcagaacagc

SEQ ID NO: 121630 - DNA, 26 bp, Artificial sequence
  primer
ttagaatatggactggaatttagcca

SEQ ID NO: 121631 - protein, 533 aa, Artificial sequence
  consensus sequence
  Variant (2)..(16): Xaa in position 2 to 16 is any amino acid
  Variant (17)..(20): Xaa in position 17 to 20 is any or no amino acid
  Variant (22)..(40): Xaa in position 22 to 40 is any amino acid
  Variant (42)..(44): Xaa in position 42 to 44 is any amino acid
  Variant (46)..(46): Xaa in position 46 is any amino acid
  Variant (47)..(47): Xaa in position 47 is any or no amino acid
  Variant (49)..(51): Xaa in position 49 to 51 is any amino acid
  Variant (52)..(56): Xaa in position 52 to 56 is any or no amino acid
  Variant (58)..(63): Xaa in position 58 to 63 is any amino acid
  Variant (64)..(82): Xaa in position 64 to 82 is any or no amino acid
  Variant (84)..(109): Xaa in position 84 to 109 is any amino acid
  Variant (112)..(130): Xaa in position 112 to 130 is any amino acid
  Variant (131)..(131): Xaa in position 131 is any or no amino acid
  Variant (133)..(139): Xaa in position 133 to 139 is any amino acid
  Variant (140)..(141): Xaa in position 140 to 141 is any or no amino acid
  Variant (143)..(154): Xaa in position 143 to 154 is any amino acid
  Variant (155)..(164): Xaa in position 155 to 164 is any or no amino acid
  Variant (166)..(166): Xaa in position 166 is any amino acid
  Variant (169)..(171): Xaa in position 169 to 171 is any amino acid
  Variant (173)..(174): Xaa in position 173 to 174 is any amino acid
  Variant (177)..(177): Xaa in position 177 is any amino acid
  Variant (179)..(183): Xaa in position 179 to 183 is any amino acid
  Variant (186)..(187): Xaa in position 186 to 187 is any amino acid
  Variant (192)..(192): Xaa in position 192 is any amino acid
  Variant (194)..(198): Xaa in position 194 to 198 is any amino acid
  Variant (200)..(201): Xaa in position 200 to 201 is any amino acid
  Variant (203)..(203): Xaa in position 203 is any amino acid
  Variant (205)..(208): Xaa in position 205 to 208 is any amino acid
  Variant (209)..(212): Xaa in position 209 to 212 is any or no amino acid
  Variant (214)..(220): Xaa in position 214 to 220 is any amino acid
  Variant (221)..(222): Xaa in position 221 to 222 is any or no amino acid
  Variant (224)..(224): Xaa in position 224 is any amino acid
  Variant (226)..(226): Xaa in position 226 is any amino acid
  Variant (229)..(229): Xaa in position 229 is any amino acid
  Variant (231)..(233): Xaa in position 231 to 233 is any amino acid
  Variant (235)..(235): Xaa in position 235 is any amino acid
  Variant (237)..(237): Xaa in position 237 is any amino acid
  Variant (238)..(243): Xaa in position 238 to 243 is any or no amino acid
  Variant (245)..(257): Xaa in position 245 to 257 is any amino acid
  Variant (261)..(262): Xaa in position 261 to 262 is any amino acid
  Variant (263)..(264): Xaa in position 263 to 264 is any or no amino acid
  Variant (266)..(281): Xaa in position 266 to 281 is any amino acid
  Variant (282)..(282): Xaa in position 282 is any or no amino acid
  Variant (288)..(288): Xaa in position 288 is any amino acid
  Variant (290)..(290): Xaa in position 290 is any amino acid
  Variant (292)..(294): Xaa in position 292 to 294 is any amino acid
  Variant (296)..(300): Xaa in position 296 to 300 is any amino acid
  Variant (301)..(306): Xaa in position 301 to 306 is any or no amino acid
  Variant (308)..(314): Xaa in position 308 to 314 is any amino acid
  Variant (315)..(319): Xaa in position 315 to 319 is any or no amino acid
  Variant (322)..(322): Xaa in position 322 is any amino acid
  Variant (324)..(327): Xaa in position 324 to 327 is any amino acid
  Variant (329)..(338): Xaa in position 329 to 338 is any amino acid
  Variant (340)..(351): Xaa in position 340 to 351 is any amino acid
  Variant (352)..(354): Xaa in position 352 to 354 is any or no amino acid
  Variant (356)..(356): Xaa in position 356 is any amino acid
  Variant (358)..(363): Xaa in position 358 to 363 is any amino acid
  Variant (364)..(364): Xaa in position 364 is any or no amino acid
  Variant (367)..(385): Xaa in position 367 to 385 is any amino acid
  Variant (386)..(387): Xaa in position 386 to 387 is any or no amino acid
  Variant (390)..(393): Xaa in position 390 to 393 is any amino acid
  Variant (396)..(398): Xaa in position 396 to 398 is any amino acid
  Variant (399)..(408): Xaa in position 399 to 408 is any or no amino acid
  Variant (410)..(413): Xaa in position 410 to 413 is any amino acid
  Variant (416)..(422): Xaa in position 416 to 422 is any amino acid
  Variant (423)..(423): Xaa in position 423 is any or no amino acid
  Variant (425)..(428): Xaa in position 425 to 428 is any amino acid
  Variant (431)..(431): Xaa in position 431 is any amino acid
  Variant (436)..(440): Xaa in position 436 to 440 is any amino acid
  Variant (442)..(445): Xaa in position 442 to 445 is any amino acid
  Variant (446)..(453): Xaa in position 446 to 453 is any or no amino acid
  Variant (455)..(458): Xaa in position 455 to 458 is any amino acid
  Variant (461)..(464): Xaa in position 461 to 464 is any amino acid
  Variant (467)..(485): Xaa in position 467 to 485 is any amino acid
  Variant (486)..(487): Xaa in position 486 to 487 is any or no amino acid
  Variant (489)..(490): Xaa in position 489 to 490 is any amino acid
  Variant (492)..(492): Xaa in position 492 is any amino acid
  Variant (494)..(501): Xaa in position 494 to 501 is any amino acid
  Variant (502)..(505): Xaa in position 502 to 505 is any or no amino acid
  Variant (507)..(507): Xaa in position 507 is any amino acid
  Variant (510)..(510): Xaa in position 510 is any amino acid
  Variant (512)..(512): Xaa in position 512 is any amino acid
  Variant (515)..(515): Xaa in position 515 is any amino acid
  Variant (516)..(517): Xaa in position 516 to 517 is any or no amino acid
  Variant (521)..(528): Xaa in position 521 to 528 is any amino acid
  Variant (530)..(532): Xaa in position 530 to 532 is any amino acid
IXXXXXXXXXXXXXXXXXXXPXXXXXXXXXXXXXXXXXXXAXXXAXXAXXXXXXXXWXXXXXXXXXXXXXXXXXXXXXXXXXRXXXXXXXXXXXXXXXXXXXXXXXXXXGKXXXXXXXXXXXXXXXXXXXXAXXXXXXXXXGXXXXXXXXXXXXXXXXXXXXXXPXGVXXXIXXWNXPXXXXXWKXXPALAXGXXXXXKXXEXTXXXXXXXXLXXXXXXXXXGXPXGVXNXXXGXGXXXXXXXGXXXXXXXXXXXXXFTGXXXXGXXXXXXXXXXXXXXXXXELGGKXPXIXXXDXXXXXXXXXXXAXXXXXXXXXXXXGQXCXXXXRXXXXXXXXXXFXXXXXXXXXXXXXXXGXPXXXXXXXGPXXXXXXXXXXXXXXXXXXXXXGAXXXXGGXXXXXXXXXXXXXGXXXXPTXXXXXXXXMXXXXEEXFGPVXXXXXFXXXXXXXXXXXXEXXXXANXXXXGLXXXXXXXXXXXXXXXXXXXXXGXXWXNXXXXXXXXXXXXPXGGXKXSGXXXGREXXXXXXXXYXXXK

SEQ ID NO: 121632 - protein, 20 aa, Artificial sequence
  protein pattern
  Variant (3)..(3): Xaa in position 3 is any amino acid
  Variant (5)..(10): Xaa in position 5 to 10 is any amino acid
  Variant (12)..(12): Xaa in position 12 is any amino acid
  Variant (13)..(13): Xaa in position 13 is Ala, Gly or Ser
  Variant (14)..(14): Xaa in position 14 is Ala or Pro
  Variant (15)..(15): Xaa in position 15 is Ala, Cys, Gly or Ser
  Variant (18)..(18): Xaa in position 18 is any amino acid
  Variant (20)..(20): Xaa in position 20 is Cys, Asp or Asn
WNXPXXXXXXKXXXXLAXGX

SEQ ID NO: 121633 - protein, 13 aa, Artificial sequence
  protein pattern
  Variant (6)..(6): Xaa in position 6 is Ala, Asp, Asn or Ser
  Variant (7)..(7): Xaa in position 7 is Ala, Pro or Ser
  Variant (8)..(8): Xaa in position 8 is any amino acid
  Variant (9)..(9): Xaa in position 9 is Ile, Leu or Val
  Variant (10)..(10): Xaa in position 10 is Phe, Ile, Met or Val
  Variant (11)..(12): Xaa in position 11 to 12 is any amino acid
ELGGKXXXXXXXD

SEQ ID NO: 121634 - protein, 12 aa, Artificial sequence
  protein pattern
  Variant (2)..(2): Xaa in position 2 is Ile or Val
  Variant (7)..(8): Xaa in position 7 to 8 is any amino acid
  Variant (9)..(9): Xaa in position 9 is Ala, Ile, Leu or Val
  Variant (10)..(11): Xaa in position 10 to 11 is any amino acid
  Variant (12)..(12): Xaa in position 12 is Phe or Tyr
EXFGPVXXXXXX

SEQ ID NO: 121635 - protein, 19 aa, Artificial sequence
  protein pattern
  Variant (2)..(2): Xaa in position 2 is Ala, Gly or Val
  Variant (3)..(3): Xaa in position 3 is Ile, Leu or Val
  Variant (4)..(5): Xaa in position 4 to 5 is any amino acid
  Variant (6)..(6): Xaa in position 6 is Ala, Cys or Asn
  Variant (8)..(11): Xaa in position 8 to 11 is any amino acid
  Variant (14)..(14): Xaa in position 14 is any amino acid
  Variant (15)..(15): Xaa in position 15 is Ala, Cys, Gly, Ser or Thr
  Variant (16)..(18): Xaa in position 16 to 18 is any amino acid
  Variant (19)..(19): Xaa in position 19 is Gly, Ser or Thr
EXXXXXNXXXXGLXXXXXX

SEQ ID NO: 121636 - protein, 11 aa, Artificial sequence
  protein pattern
  Variant (2)..(2): Xaa in position 2 is any amino acid
  Variant (3)..(3): Xaa in position 3 is Gly or Gln
  Variant (5)..(5): Xaa in position 5 is any amino acid
  Variant (7)..(7): Xaa in position 7 is any amino acid
  Variant (10)..(10): Xaa in position 10 is any amino acid
PXXGXKXSGXG

SEQ ID NO: 121637 - DNA, 1461 bp, Escherichia coli
  CDS (1)..(1461): transl_table=11
atgcactcctggaaaaagaaacttgtagtatcacaattagcattggcttgcactctggctatcacctctcaggctaatgcagcaaactatgatacctggacttatatcgataatcccgttacagcacttgattgggatcatatggataaggcaggcactgtagatggcaactatgtaaactatagtggttttgtctattacaacaacaccaatggtgatttcgatcagtcctttaacggcgataccgttaacggcacgatctcaacctattatttgaaccatgattatgcagacagtactgctaatcagcttgatatcagtaattcagtgattcacggttcgattacttctatgctgcctggcggttattatgatcgttttgatgcagatggtaataatctgggtggatatgatttttacactgatgcggttgttgatacacactggcgtgatggtgatgttttcactttgaacattgctaacactactattgatgatgattatgaagctctttacttcactgattcttataaagatggtgatgtaaccaagcacacaaatgagacatttgatacaagtgaaggcgttgctgttaatcttgatgtagaaagtaacatcaatatttccaataactcccgcgttgcaggtattgcattatctcaaggtaatacttacaacgaaacctacactaccgaatctcatacttgggataacaatatctctgtaaaagattccacagtgacttcgggttcaaattatatcctggatagcaatacttatggcaaaactggtcactttggcaattctgatgaaccgagtgattatgctggcccgggtgatgttgcaatgtcctttactgcttcaggttccgactatgcgatgaagaacaatgtattcctcagcaattcaacgctgatgggtgatgttgcctttaccagcacctggaatagtaattttgatccgaatggtcatgattccaacggtgacggggtgaaagataccaacgggggttggactgatgatagcctcaacgttgatgaactaaatctcactctcgataacggaagcaagtgggttggtcaggcaatttataacgttgctgaaacgtcagcaatgtatgatgttgctacaaacagccttactcctgatgcaacatatgaaaacaatgactggaaacgtgttgttgatgacaaggtcttccagagcggtgtatttaacgtagcgttgaataacggttctgaatgggatactacaggtcgttccatcgttgataccttgacagttaataatggttctcaggttaatgtttcggaatctaaattaacttcagatactatcgatttaactaacggttcttcgctgaacattggtgaagatggctacgttgataccgatcatctgactattaactcctacagtactgttgcgttgaccgaatctactgggtggggggctgattaa

SEQ ID NO: 121638 - protein, 486 aa, Escherichia coli
MHSWKKKLVVSQLALACTLAITSQANAANYDTWTYIDNPVTALDWDHMDKAGTVDGNYVNYSGFVYYNNTNGDFDQSFNGDTVNGTISTYYLNHDYADSTANQLDISNSVIHGSITSMLPGGYYDRFDADGNNLGGYDFYTDAVVDTHWRDGDVFTLNIANTTIDDDYEALYFTDSYKDGDVTKHTNETFDTSEGVAVNLDVESNINISNNSRVAGIALSQGNTYNETYTTESHTWDNNISVKDSTVTSGSNYILDSNTYGKTGHFGNSDEPSDYAGPGDVAMSFTASGSDYAMKNNVFLSNSTLMGDVAFTSTWNSNFDPNGHDSNGDGVKDTNGGWTDDSLNVDELNLTLDNGSKWVGQAIYNVAETSAMYDVATNSLTPDATYENNDWKRVVDDKVFQSGVFNVALNNGSEWDTTGRSIVDTLTVNNGSQVNVSESKLTSDTIDLTNGSSLNIGEDGYVDTDHLTINSYSTVALTESTGWGAD

SEQ ID NO: 121639 - DNA, 2943 bp, Escherichia coli O157:H7 EDL933
  CDS (1)..(2943): transl_table=11
  misc_feature (2570)..(2570): s is g or c
atgcactcctggaaaaagaaacttatagtatcacaattagcattggcttgcactctggctatcacctctcaggctaatgcagcgaccaatgatatttctggtcaaacttacaatactttccatcactacaacgacgccacctatgctgatgacgtttactatgatggttatgtaggctggaacaactatgccgctgatagctattacaacggcgatatctacccggtcattaataacgctaccgttaacggcgtgatttctacctactatctggacgacggtatttctaccaataccaacgccaatagtctgacaatcaaaaacagcactattcacggtatgattacctctgagtgcatgactactgattgtgctgatgaccgtgctactggttatgtttatgatcgtctgacactgagcgttgataattcaacgatcgatgacaactacgagcattatacttacaacggtacctataataatgccgctgacactcatgttgtagatgtttacgatatgggtactgctattacactggatcaggaagttgatctgtccatcactaataactctcatgtagcaggtattacgctgactcagggttatgagtgggaagatattgacgacaacacagtcagcactggcgtaaacagcagcgaagtgtttaataacactattactgttaaagattctactgtgacctctggttcatggactgatgaaggtactactggttggtttggccatactggtaatgccagcaactatagcaacacgctgactgcagacgatgttgcaattgccgcaatcgcaaatccgtatgctgataatgcgatgcagactacagtaactttagacaactcaacactgatgggtgatgttgttttctccagtaatttcgatgaaaacttcttcccgcaaggtgctaacagctatcgcgatgctgatggtgatgtagataccaacggttgggatggcacagaccgtatggatgtgactctgaacaacggcagcaagtgggttggcgctgcaatgtctgttcatatggttgatgaagatggtgatggttcttacgacggatatgctgttggtactgaagcaactgcaactctgctcgatattgcagctaacagcctgtggccttcatcaactgtcggtgttgataacatcaatactcaatatgacgaaaatggccatatcgtaggaaacgaagtttaccagagcggtttgtttaatgtgactttgaacggtggttcagagtgggatacaacaaaatcttctctgattgatactttaagtattaacagcggttcccaagttaatgttgcagactctcgtctgatctctgacactgtctctctgactggcggttctaacctgaacatcggtgaagacggtcatgtagcgactaataccctgaccatcgacaatagtaccgttaaaatgtctgatgatgtttctgcgggctggggtttagaagatgctgcactgtacgcaaataccatcaccgtaactaacgacggtctgttggatattaacgttgatcagttcgatgctaacccgttccaggccgataccctgaatctgaccagtaccactgatactaacggcaacattcacgctggtgtattcgatatccatagcagtgattacgtaatggataccgatctggtcaacgatcgtaccaacgatactaccaagtcaaactacggttatggcttaatcgcaatgaactctgatggtcacctgactattaacggtaacggcgataacgacaacactgcttctatcgaagctggtcagaacgaagttgataacaacggtgaccatgttgcagccgcgaccggtaactacaaagttcgtatcgacaacgctactggtgctggttctatcgctgactacaacggcaacgagctgatctacgtcaacgacaaaaacagcaacgcgaccttctctgctgctaacaaagctgacctgggtgcatacacctatcaggctgaacagcgcggtaacaccgttgttctgcaacagatggagttgaccgactacgctaacatggcgctgagcatcccatctgcgaacaccaatatctggaacctggaacaagacaccgttggtactcgtttgaccaactctcgtcatggcctggctgataacggcggcgcatgggtaagctacttcggtggtaacttcaacggcgacaacggcaccatcaactatgatcaggatgttaacggcatcatggtcggtgttgataccaaaattgacggtaacaacgctaagtggatcgtcggtgcggctgcaggcttcgctaaaggtgacatgaatgaccgttctggtcaggtggatcaagacagccagactgcctacatctactcttctgctcacttcgcgaacaacgtctttgttgatggtagcttgagctactctcacttcaacaacgacctgtctgcaaccatgagcaacggtacttacgttgacggtagcaccaactccgacgcttggggcttcggtttgaaagccggttacgacttcaaactgggtgatgctggttacgtgactccttacgscagcatttctggtctgttccagtctggtgatgactaccagctgagcaacgacatgaaagttgacggtcagtcttacgacagcatgcgttatgaactgggtgtagatgcaggttataccttcacctacagcgaagatcaggctctgactccgtacttcaaactggcttacgtctacgacgactctaacaacgataacgatgtgaacggtgattccatcgataacggtactgaagggtctgcggtacgtgttggtctgggtactcagttcagcttcaccaagaacttcagcgcctataccgatgctaactacctcggtggtggtgacgtagatcaagactggtccgcgaacgtgggtgttaaatatacctggtaa

SEQ ID NO: 121640 - protein, 980 aa, Escherichia coli O157:H7 EDL933
  misc_feature (857)..(857): The Xaa at location 857 stands for Ala, or Gly.
MHSWKKKLIVSQLALACTLAITSQANAATNDISGQTYNTFHHYNDATYADDVYYDGYVGWNNYAADSYYNGDIYPVINNATVNGVISTYYLDDGISTNTNANSLTIKNSTIHGMITSECMTTDCADDRATGYVYDRLTLSVDNSTIDDNYEHYTYNGTYNNAADTHVVDVYDMGTAITLDQEVDLSITNNSHVAGITLTQGYEWEDIDDNTVSTGVNSSEVFNNTITVKDSTVTSGSWTDEGTTGWFGHTGNASNYSNTLTADDVAIAAIANPYADNAMQTTVTLDNSTLMGDVVFSSNFDENFFPQGANSYRDADGDVDTNGWDGTDRMDVTLNNGSKWVGAAMSVHMVDEDGDGSYDGYAVGTEATATLLDIAANSLWPSSTVGVDNINTQYDENGHIVGNEVYQSGLFNVTLNGGSEWDTTKSSLIDTLSINSGSQVNVADSRLISDTVSLTGGSNLNIGEDGHVATNTLTIDNSTVKMSDDVSAGWGLEDAALYANTITVTNDGLLDINVDQFDANPFQADTLNLTSTTDTNGNIHAGVFDIHSSDYVMDTDLVNDRTNDTTKSNYGYGLIAMNSDGHLTINGNGDNDNTASIEAGQNEVDNNGDHVAAATGNYKVRIDNATGAGSIADYNGNELIYVNDKNSNATFSAANKADLGAYTYQAEQRGNTVVLQQMELTDYANMALSIPSANTNIWNLEQDTVGTRLTNSRHGLADNGGAWVSYFGGNFNGDNGTINYDQDVNGIMVGVDTKIDGNNAKWIVGAAAGFAKGDMNDRSGQVDQDSQTAYIYSSAHFANNVFVDGSLSYSHFNNDLSATMSNGTYVDGSTNSDAWGFGLKAGYDFKLGDAGYVTPYXSISGLFQSGDDYQLSNDMKVDGQSYDSMRYELGVDAGYTFTYSEDQALTPYFKLAYVYDDSNNDNDVNGDSIDNGTEGSAVRVGLGTQFSFTKNFSAYTDANYLGGGDVDQDWSANVGVKYTW

SEQ ID NO: 121641 - DNA, 2988 bp, Escherichia coli CFT073
  CDS (1)..(2988): transl_table=11
atgcactcctggaaaaagaaacttgtagtatcacaattagcattggcttgcactctggctatcacctctcaggctaatgcagcaaactatgatacctgggggtatcatgacaacaccacgaccgatttagtttggccgtatgacactgacaatgatggaattgccgatgctggcggcatggacccgatgggttcagacggtaactacgtaacttacaatggttttgtttactataacaatgccaatggcgatttcgatactgtctttaaaggcgataccgttaacggtaccatttctacttattacttgaatcatgattacgctagcggttctgttaaccaggtagatatcagcaattcagtaattcatggggcaatcacctctgaactgccatttggttattacagcattactcctgcagaagttaatgctaaaggtgaagttgtaactccacagacctataatggctataatttctataacggaatcactactgaccttgactacaattggtacgatggtgacgtattcactctgaacgtatccaattccaccattgatgatgactatgaagctctttacttcactgacacatatcttgatggtgataaatctaagtcaaccaatgaaacgttctataccgctctgggtgttgcagtaaatcttgatgttgaaagcaatatcaatattactaacaactcccgtgtagctggtattgcgctgtctgaaggcaatacaagcaacacgacttatactagcgaatatcatcagtgggacaacaacattaatgtgtctaactccactgtaacttcagggtcacagactccgctggaagaaagcaatggcttcttcggtaaatctgctgaaccaagtgattacgctggtaatggtggcgaaaatgacgtagctctgtcattctctgacaatgctggctcaaattattccatgaaaaacaatgtaaactttgaccattcaaccctgttgggtgatgtcgagttcacaagccactggaataacgatggcgtattcttctattcaaccggccatgacagcaatggtgacggtgtccttgataccaacggtggttgggtagatgatgctcagaacgttgatgaactgaacattactctgaacaacggtagtaagtgggttggctcagcaaacatgagtgctgaagtaattgctccggcagatatgtatgatgttgcgccgaacagcctgacccctggtgccactatcgaagctaacgattggggtcgtattattgacaacaaggtattccagagcggcgtatttaacgtagcactgaacaatggttcagaatggaataccgttaatagttcagtaattgatacattagctgtaaataatggctctcaggtaaatgttactgattcctctctggtctcagataccattggtttaaccaacggctcctcactgaatattggtgaagatggtttggttgctacagaccacctgactgttgatagctacagtaccgttaatttaaccgaatctactggctggaataactattctaacctgtatgccaataccatcaccgtaactaacggtggtgtactggatgtgaacgttgatcagtttgatactgaagctttccgtactgacaaactggaactgactagcggcaacatcgctgaccacaacggcaatgtagtttctggtgtgttcgatatcaacagcagcgattatgttctgaacgctgacctggtgaacgaccgtacttgggataccgctcaggctaactacggctacggtgttgttgctatgaactctgatggtcatctgactatcaacggtaacggcgacgtagacaacggtactgaactggataacagttctgtagacaacgttgttgcggcaaccggtaactacaaagttcgtatcgacaacgcaactggcgctggcgcaatcgctgattacaaagataaagaaattatctatgtaaacgacgtcaacagcaacgcgaccttctctgctgctaacaaagctgacctgggtgcatacacctatcaggctgagcagcgtggtaacaccgttgttctgcaacagatggagctgaccgactacgctaacatggcgctgagcatcccgtctgcgaacaccaatatctggaacctggaacaagacaccgttggtactcgtctggccaactctcgtcatggtctggctgataacggcggcgcatgggtaagctacttcggtggtaacttcaacggcgacaacggcaccatcaactatgatcaggatgttaacggcatcatggtcggtgttgataccaaaattgacggtaacaacgctaagtggatcgtcggtgcggctgcaggcttcgctaaaggtgatatgaatgaccgttctggtcaggtggatcaagacagccagactgcctacatctactcttctgctcacttcgcgaacaacgtctttgttgacggtagcttgagctactctcacttcaacaacgacctgtctgcaaccatgagcaacggtacttacgttgacggcagcaccaactccgacgcttggggctttggtttgaaagccggttacgacttcaaactgggtgatgcaggttacgtgactccttacggcagcgtttctggtctgttccagtctggtgatgattaccagctgagcaacgacatgaaagttgatggtcagtcttacgacagcatgcgttatgaactgggtgtagatgcaggttataccttcacctacagcgaagaccaggctctgactccgtacttcaaactggcttacgtctacgacgactctaacaacgataacgatgtgaacggtgattccatcgataacggtactgaagggtctgcggtacgtgttggtctgggtactcagttcagcttcaccaagaacttcagcgcctataccgatgctaactacctcggtggtggtgacgtagatcaagactggtccgcgaatgtgggtgttaaatatacctggtaa

SEQ ID NO: 121642 - protein, 995 aa, Escherichia coli CFT073
MHSWKKKLVVSQLALACTLAITSQANAANYDTWGYHDNTTTDLVWPYDTDNDGIADAGGMDPMGSDGNYVTYNGFVYYNNANGDFDTVFKGDTVNGTISTYYLNHDYASGSVNQVDISNSVIHGAITSELPFGYYSITPAEVNAKGEVVTPQTYNGYNFYNGITTDLDYNWYDGDVFTLNVSNSTIDDDYEALYFTDTYLDGDKSKSTNETFYTALGVAVNLDVESNINITNNSRVAGIALSEGNTSNTTYTSEYHQWDNNINVSNSTVTSGSQTPLEESNGFFGKSAEPSDYAGNGGENDVALSFSDNAGSNYSMKNNVNFDHSTLLGDVEFTSHWNNDGVFFYSTGHDSNGDGVLDTNGGWVDDAQNVDELNITLNNGSKWVGSANMSAEVIAPADMYDVAPNSLTPGATIEANDWGRIIDNKVFQSGVFNVALNNGSEWNTVNSSVIDTLAVNNGSQVNVTDSSLVSDTIGLTNGSSLNIGEDGLVATDHLTVDSYSTVNLTESTGWNNYSNLYANTITVTNGGVLDVNVDQFDTEAFRTDKLELTSGNIADHNGNVVSGVFDINSSDYVLNADLVNDRTWDTAQANYGYGVVAMNSDGHLTINGNGDVDNGTELDNSSVDNVVAATGNYKVRIDNATGAGAIADYKDKEIIYVNDVNSNATFSAANKADLGAYTYQAEQRGNTVVLQQMELTDYANMALSIPSANTNIWNLEQDTVGTRLANSRHGLADNGGAWVSYFGGNFNGDNGTINYDQDVNGIMVGVDTKIDGNNAKWIVGAAAGFAKGDMNDRSGQVDQDSQTAYIYSSAHFANNVFVDGSLSYSHFNNDLSATMSNGTYVDGSTNSDAWGFGLKAGYDFKLGDAGYVTPYGSVSGLFQSGDDYQLSNDMKVDGQSYDSMRYELGVDAGYTFTYSEDQALTPYFKLAYVYDDSNNDNDVNGDSIDNGTEGSAVRVGLGTQFSFTKNFSAYTDANYLGGGDVDQDWSANVGVKYTW

SEQ ID NO: 121643 - DNA, 2886 bp, Salmonella enterica subsp. enterica serovar Typhi Ty2
  CDS (1)..(2886): transl_table=11
atgcactcctggaaaaagaaacttgtagtctcacaattagcattggcttgcactctggcaatcacttctcaggcgaatgctactacatacgatacttttgggtaccatgacgatgcggccactgtttttggctgggatgataccaacgaccatgactatctaacttatggtggttatgtctacaacaccccagctagtgatagcggctattttgatacaaaatttactggtgacactgtaaatggcgttatttcaacttattatctgaatcatgattacgccaatgatactgcgaatacattggatgttaccaactcaaccattcatggtatgattacttcttaccagatgggctacggtcaatatgtttggactaacggtagtgattatacgacccatgattgggttgatgatgatacttttaatctaaacatttctaattctacaatcgatgatgactttgaggcgttttacttcactgatacctatctcgattctgatggaaaaacagtcaaaaccgattatgacaaattggttactgctggtttaggcactgctataacccttgatgttgaaagtaatattaatattactaacaattctcatgtggctggtattgctctttaccaaaatgatcttggcaattcaacatatacaaccgaagcacatcagtgggataacactattaacgtagcgaattcaactgtaacttcaggctcctggtccgaagatgaggaacaaggccattttggcaattcaagtgaaccaagcgattataatggcaatggttggaataaagatgatgttgctttagcttttgttgacgatccttattcaaattaccgtatggtaaacaacgttacgtttaccgactcgcagttactgggggatgtcgtccttgagagctcctggaattataatttctattctaatggccgtttagtcgatgattccactactgtctatacgaatggtggttgggcagatgatgatcaaaacgttgatcacctgacattgaccctgaataacactaaatgggttggtgcggcggttaatgattcacagtcaatggatccagtgcaattctatgatgttgatgccaatagcttagatccagactcgactaattatgatgcctggggacgtgttaatagtgctgcttccttccagagcggtatctttgacgtcagcttgaataatggatctgagtgggataccacaaaaacatctgtaatagataccttagcagtaaatagcggctctcaggttgatgtcgctaatggctccaatttaaccgctgataccattactctaaacggtggttcagctatgaacatcggggaaggtggctacgttgatactgatcacctgaccgttgatactttcagtacagttactttggctgatgatgtcagcagtgcatggagtgatgatgcactgtatgctaatactattaccgtaactcacggtggtatgttagatattcaaaccaacaatacaaacgcagatagcgtcattgatactgatacgttagaactgactagcagtaacgttgcggataataatggcaatgtttatgctggtgtgttcaacattcatagcaatgactataccctaaatgccgatttggtgaacgaccgtacctgggataccactcaggctaactacggttacggcgttgtcgcgatgaactctgatggtcatctgactatcaacggtaacggcgatatcaacaatggtgacgaggctgatgcaagtagcaccactgacaacgttgtagcggccactggtaattataaagtgcgcatcgacaacgctactggtgccggttctgttgcggattacaaaggtaacgagctgatttatgtcaatgacataaacaccgacgctaccttctctgcagcaaacaaagctgacctgggtgcttacacctatcaggctaagcaggaaggcaacactgtcgtgctggaacagatggaactgaccgactacgctaacatggcgctgagcattccttctgcgaacaccaatatctggaacctggaacaagacaccgttggtactcgtctgaccaacgctcgtcatggcctggcggataacggcggcgcatgggtaagctacttcggcggtaacttcaacggcgacaacggcaccattaactacgatcaggatgttaatggcatcatggtcggtgttgataccaaagttgacggtaacaacgctaagtggatcgttggtgcggcagcaggcttcgcgaaaggcgatctgagcgatcgtaccggtcaggtggatcaggacagccagtctgcctacatctactcttccgctcgtttcgcaaacaacatctttgttgacggtaacttaagctactctcacttcaacaacgatttgtctgctaacatgagcgacggtacttacgttgacggcaacacctcttctgacgcctggggcttcggcttgaaactgggttatgatctgaagctgggtgatgcaggctacgtaacgccttacggcagcgtatccggtctgttccagtccggcgacgactaccagctgagcaacgacatgaaagttgacggtcagtcttacgacagcatgcgttatgaactcggtgtagatgcaggttataccttcacttacagcgaagatcaggcgctgaccccgtacttcaaactggcttacgtttacgacgactccaacaacgatgctgacgtaaacggcgactctatcgacaacggcgtagaaggttttgcggtacgtgttggtctgggtactcagttcagcttcacgaagaacttcagcgcctacaccgatgctaactacctcggcggcggtgatgttgatcaagactggtctgcaaacgttggtgttaaatatacctggtaa

SEQ ID NO: 121644 - protein, 961 aa, Salmonella enterica subsp. enterica serovar Typhi Ty2
MHSWKKKLVVSQLALACTLAITSQANATTYDTFGYHDDAATVFGWDDTNDHDYLTYGGYVYNTPASDSGYFDTKFTGDTVNGVISTYYLNHDYANDTANTLDVTNSTIHGMITSYQMGYGQYVWTNGSDYTTHDWVDDDTFNLNISNSTIDDDFEAFYFTDTYLDSDGKTVKTDYDKLVTAGLGTAITLDVESNINITNNSHVAGIALYQNDLGNSTYTTEAHQWDNTINVANSTVTSGSWSEDEEQGHFGNSSEPSDYNGNGWNKDDVALAFVDDPYSNYRMVNNVTFTDSQLLGDVVLESSWNYNFYSNGRLVDDSTTVYTNGGWADDDQNVDHLTLTLNNTKWVGAAVNDSQSMDPVQFYDVDANSLDPDSTNYDAWGRVNSAASFQSGIFDVSLNNGSEWDTTKTSVIDTLAVNSGSQVDVANGSNLTADTITLNGGSAMNIGEGGYVDTDHLTVDTFSTVTLADDVSSAWSDDALYANTITVTHGGMLDIQTNNTNADSVIDTDTLELTSSNVADNNGNVYAGVFNIHSNDYTLNADLVNDRTWDTTQANYGYGVVAMNSDGHLTINGNGDINNGDEADASSTTDNVVAATGNYKVRIDNATGAGSVADYKGNELIYVNDINTDATFSAANKADLGAYTYQAKQEGNTVVLEQMELTDYANMALSIPSANTNIWNLEQDTVGTRLTNARHGLADNGGAWVSYFGGNFNGDNGTINYDQDVNGIMVGVDTKVDGNNAKWIVGAAAGFAKGDLSDRTGQVDQDSQSAYIYSSARFANNIFVDGNLSYSHFNNDLSANMSDGTYVDGNTSSDAWGFGLKLGYDLKLGDAGYVTPYGSVSGLFQSGDDYQLSNDMKVDGQSYDSMRYELGVDAGYTFTYSEDQALTPYFKLAYVYDDSNNDADVNGDSIDNGVEGFAVRVGLGTQFSFTKNFSAYTDANYLGGGDVDQDWSANVGVKYTW

SEQ ID NO: 121645 - DNA, 3003 bp, Escherichia coli B
  CDS (1)..(3003): transl_table=11
atgcactcctggaaaaagaaacttgtagtatcacaattagcattggcttgcactctggctatcacctctcaggctaatgcagcgaccaacgatatttctggtcaaacttacaatactttccatcactacaacgacgccacctatgctgatgacgtttactatgatggttatgtaggctggaacaactatgccgctgatagctattacaacggcgatatctacccggtcattaataacgctaccgttaacggcgtgatttctacctactatctggacgacggtatttctaccaataccaacgccaatagtctgacaatcaaaaacagcactattcacggtatgatttattccgagtgcatgacaactgattgtgctgatcgtgcggatgattactaccatgaccgtctggcgctgactgttgataattcaacgatcgacgacaactacgaacactacacatataacggcacttacaataatgccgctgatactcatgttgtagacgtttacaacattggtacggctattactctggatcaggaagttgatctgtccatcactaataactctcacgttgcgggtattacgttgactcagggttatgagtgggaagatattgacgacaacactgtcagcactggcgtaaacagcagcgaagtgtttaataacaccatcactgttaaagattctaccgtaacctctggttcatggactgatgaaggtactactggttggttcggtaatacaggtaatgccagcgattatagtggtaaatctaactttgtcaccgtagatactgacggagatggtgttgctgatagcactattgcaagctgggatgatgttgcattagctgtagttgcacatccgaatgctgataatgctatgcagaccaccgctgactttagtaactctactttgatgggcgatgtaatcttctctagcaactttgatgaaaacttcttcccacgtggtgcagatagttatcgcgatgctgatggtgaagtagacaccaacggttgggatggaacagatcgcctggatctgacattaaataacggtagtaaatgggtaggggcagcacaatctgttcatcaaactggttctattgatgttgatggagatggtaaaggtgacatcgctacatacggtgttggcaccgaggcaactgcaactctgattgatattgaggataatagcctgtggccgttatcaaccgttggtgttgaaaacgatgatacaagttacagtgaattcgatcatattactggtaatcaggtttaccagagcggtctgttcaatgtgaccctgaataccggttcacagtgggataccaccaaaacttctctgattgatactctgagcatcaacagtggttcaactgttaatgttgctgattcaacgctgatttctgactctatctctctgacaggtctttctgcgctgaacatcaacgaagatggtcatgttgcaactgattcactgactgtcgacaacagtaccgtaaccatttctgatgaagtttctgctggttgggctgtaggtgatgctgctctgtatgccaacaacatcaaagtgactaacgacggtattctggatgtaggtaacactgcggcgaatgctctgcaggttgatactctgaacctgaccagcactactgataccagtggtaacattcacgctggtgtgttcaacatcgaaagcaaccgcttcgtacttgatgcagacctgaccaacgaccgtaccaacgatactaccaagtcaaactacggttatggcttaatcgcaatgaactctgatggtcacctgaccattaacggtaacggcgataacgacaacactgcttctatcgaagctggtcagaacgaagttgataacaacggtgaccatgttgcagctgcaaccggtaactacaaagttcgtatcgacaacgctactggtgctggttctatcgctgactacaacggcaacgagctgatctacgtcaacgacaaaaatagcaacgcgaccttctctgctgctaacaaagctgacctgggtgcatacacctatcaggctgaacagcgcggtaacaccgttgttctgcaacagatggagctgaccgactacgctaacatggcgctgagcatcccttctgcgaacaccaatatctggaacctggaacaagacaccgttggtactcgtctgaccaactctcgtcatggcctggctgataacggcggcgcatgggtaagctacttcggtggtaacttcaacggcgacaacggcaccatcaactatgatcaggatgttaacggcatcatggtcggtgttgataccaaaattgacggtaacaacgctaagtggatcgtcggtgcggctgcaggcttcgctaaaggtgacatgaatgaccgttctggtcaggtagatcaagacagccagactgcctacatctactcttctgctcacttcgcgaacaacgtctttgttgatggtagcttgagctactctcacttcaacaacgacctgtctgcaaccatgagcaacggtacttacgttgacggtagcaccaactccgacgcttggggcttcggcttgaaagccggttacgacttcaaactgggtgatgctggttatgtgactccttacggcagcatttctggtctgttccagtctggtgatgactaccagctgagcaacgacatgaaagttgacggtcagtcttacgacagcatgcgttatgaactgggtgtagatgcaggttataccttcacctacagcgaagaccaggctctgactccgtacttcaaactggcttacgtctacgacgactctaacaacgataacgatgtgaacggtgattccatcgataacggtactgaagggtctgcggtacgtgttggtctgggtactcagttcagcttcaccaagaacttcagcgcctataccgatgctaactacctcggtggtggtgacgtagatcaagattggtccgcgaacgtgggtgttaaatatacctggtaa

SEQ ID NO: 121646 - protein, 1000 aa, Escherichia coli B
MHSWKKKLVVSQLALACTLAITSQANAATNDISGQTYNTFHHYNDATYADDVYYDGYVGWNNYAADSYYNGDIYPVINNATVNGVISTYYLDDGISTNTNANSLTIKNSTIHGMIYSECMTTDCADRADDYYHDRLALTVDNSTIDDNYEHYTYNGTYNNAADTHVVDVYNIGTAITLDQEVDLSITNNSHVAGITLTQGYEWEDIDDNTVSTGVNSSEVFNNTITVKDSTVTSGSWTDEGTTGWFGNTGNASDYSGKSNFVTVDTDGDGVADSTIASWDDVALAVVAHPNADNAMQTTADFSNSTLMGDVIFSSNFDENFFPRGADSYRDADGEVDTNGWDGTDRLDLTLNNGSKWVGAAQSVHQTGSIDVDGDGKGDIATYGVGTEATATLIDIEDNSLWPLSTVGVENDDTSYSEFDHITGNQVYQSGLFNVTLNTGSQWDTTKTSLIDTLSINSGSTVNVADSTLISDSISLTGLSALNINEDGHVATDSLTVDNSTVTISDEVSAGWAVGDAALYANNIKVTNDGILDVGNTAANALQVDTLNLTSTTDTSGNIHAGVFNIESNRFVLDADLTNDRTNDTTKSNYGYGLIAMNSDGHLTINGNGDNDNTASIEAGQNEVDNNGDHVAAATGNYKVRIDNATGAGSIADYNGNELIYVNDKNSNATFSAANKADLGAYTYQAEQRGNTVVLQQMELTDYANMALSIPSANTNIWNLEQDTVGTRLTNSRHGLADNGGAWVSYFGGNFNGDNGTINYDQDVNGIMVGVDTKIDGNNAKWIVGAAAGFAKGDMNDRSGQVDQDSQTAYIYSSAHFANNVFVDGSLSYSHFNNDLSATMSNGTYVDGSTNSDAWGFGLKAGYDFKLGDAGYVTPYGSISGLFQSGDDYQLSNDMKVDGQSYDSMRYELGVDAGYTFTYSEDQALTPYFKLAYVYDDSNNDNDVNGDSIDNGTEGSAVRVGLGTQFSFTKNFSAYTDANYLGGGDVDQDWSANVGVKYTW

SEQ ID NO: 121647 - DNA, 2886 bp, Salmonella typhi
  CDS (1)..(2886): transl_table=11
  misc_feature (16)..(16): n is a, g, c or t
  misc_feature (1647)..(1647): n is a, g, c or t
atgcactcctggaaanagaaacttgtagtctcacaattagcattggcttgcactctggcaatcacttctcaggcgaatgctactacatacgatacttttgggtaccatgacgatgcggccactgtttttggctgggatgataccaacgaccatgactatctaacttatggtggttatgtctacaacaccccagctagtgatagcggctattttgatacaaaatttactggtgacactgtaaatggcgttatttcaacttattatctgaatcatgattacgccaatgatactgcgaatacattggatgttaccaactcaaccattcatggtatgattacttcttaccagatgggctacggtcaatatgtttggactaacggtagtgattatacgacccatgattgggttgatgatgatacttttaatctaaacatttctaattctacaatcgatgatgactttgaggcgttttacttcactgatacctatctcgattctgatggaaaaacagtcaaaaccgattatgacaaattggttactgctggtttaggcactgctataacccttgatgttgaaagtaatattaatattactaacaattctcatgtggctggtattgctctttaccaaaatgatcttggcaattcaacatatacaaccgaagcacatcagtgggataacactattaacgtagcgaattcaactgtaacttcaggctcctggtccgaagatgaggaacaaggccattttggcaattcaagtgaaccaagcgattataatggcaatggttggaataaagatgatgttgctttagcttttgttgacgatccttattcaaattaccgtatggtaaacaacgttacgtttaccgactcgcagttactgggggatgtcgtccttgagagctcctggaattataatttctattctaatggccgtttagtcgatgattccactactgtctatacgaatggtggttgggcagatgatgatcaaaacgttgatcacctgacattgaccctgaataacactaaatgggttggtgcggcggttaatgattcacagtcaatggatccagtgcaattctatgatgttgatgccaatagcttagatccagactcgactaattatgatgcctggggacgtgttaatagtgctgcttccttccagagcggtatctttgacgtcagcttgaataatggatctgagtgggataccacaaaaacatctgtaatagataccttagcagtaaatagcggctctcaggttgatgtcgctaatggctccaatttaaccgctgataccattactctaaacggtggttcagctatgaacatcggggaaggtggctacgttgatactgatcacctgaccgttgatactttcagtacagttactttggctgatgatgtcagcagtgcatggagtgatgatgcactgtatgctaatactattaccgtaactcacggtggtatgttagatattcaaaccaacaatacaaacgcagatagcgtcattgatactgatacgttagaactgactagcagtaacgttgcggataataatggcaatgtttatgctggtgtgttcaacattcatagcaatgactataccctaaatgccgatttggtgaacgaccgtacctgngataccactcaggctaactacggttacggcgttgtcgcgatgaactctgatggtcatctgactatcaacggtaacggcgatatcaacaatggtgacgaggctgatgcaagtagcaccactgacaacgttgtagcggccactggtaattataaagtgcgcatcgacaacgctactggtgccggttctgttgcggattacaaaggtaacgagctgatttatgtcaatgacataaacaccgacgctaccttctctgcagcaaacaaagctgacctgggtgcttacacctatcaggctaagcaggaaggcaacactgtcgtgctggaacagatggaactgaccgactacgctaacatggcgctgagcattccttctgcgaacaccaatatctggaacctggaacaagacaccgttggtactcgtctgaccaacgctcgtcatggcctggcggataacggcggcgcatgggtaagctacttcggcggtaacttcaacggcgacaacggcaccattaactacgatcaggatgttaatggcatcatggtcggtgttgataccaaagttgacggtaacaacgctaagtggatcgttggtgcggcagcaggcttcgcgaaaggcgatctgagcgatcgtaccggtcaggtggatcaggacagccagtctgcctacatctactcttccgctcgtttcgcaaacaacatctttgttgacggtaacttaagctactctcacttcaacaacgatttgtctgctaacatgagcgacggtacttacgttgacggcaacacctcttctgacgcctggggcttcggcttgaaactgggttatgatctgaagctgggtgatgcaggctacgtaacgccttacggcagcgtatccggtctgttccagtccggcgacgactaccagctgagcaacgacatgaaagttgacggtcagtcttacgacagcatgcgttatgaactcggtgtagatgcaggttataccttcacttacagcgaagatcaggcgctgaccccgtacttcaaactggcttacgtttacgacgactccaacaacgatgctgacgtaaacggcgactctatcgacaacggcgtagaaggttttgcggtacgtgttggtctgggtactcagttcagcttcacgaagaacttcagcgcctacaccgatgctaactacctcggcggcggtgatgttgatcaagactggtctgcaaacgttggtgttaaatatacctggtaa

SEQ ID NO: 121648 - protein, 961 aa, Salmonella typhi
  misc_feature (6)..(6): The Xaa at location 6 stands for Stop, Gln, Glu, or Lys.
  misc_feature (549)..(549): The Xaa at location 549 stands for Stop, Cys, or Trp.
MHSWKXKLVVSQLALACTLAITSQANATTYDTFGYHDDAATVFGWDDTNDHDYLTYGGYVYNTPASDSGYFDTKFTGDTVNGVISTYYLNHDYANDTANTLDVTNSTIHGMITSYQMGYGQYVWTNGSDYTTHDWVDDDTFNLNISNSTIDDDFEAFYFTDTYLDSDGKTVKTDYDKLVTAGLGTAITLDVESNINITNNSHVAGIALYQNDLGNSTYTTEAHQWDNTINVANSTVTSGSWSEDEEQGHFGNSSEPSDYNGNGWNKDDVALAFVDDPYSNYRMVNNVTFTDSQLLGDVVLESSWNYNFYSNGRLVDDSTTVYTNGGWADDDQNVDHLTLTLNNTKWVGAAVNDSQSMDPVQFYDVDANSLDPDSTNYDAWGRVNSAASFQSGIFDVSLNNGSEWDTTKTSVIDTLAVNSGSQVDVANGSNLTADTITLNGGSAMNIGEGGYVDTDHLTVDTFSTVTLADDVSSAWSDDALYANTITVTHGGMLDIQTNNTNADSVIDTDTLELTSSNVADNNGNVYAGVFNIHSNDYTLNADLVNDRTXDTTQANYGYGVVAMNSDGHLTINGNGDINNGDEADASSTTDNVVAATGNYKVRIDNATGAGSVADYKGNELIYVNDINTDATFSAANKADLGAYTYQAKQEGNTVVLEQMELTDYANMALSIPSANTNIWNLEQDTVGTRLTNARHGLADNGGAWVSYFGGNFNGDNGTINYDQDVNGIMVGVDTKVDGNNAKWIVGAAAGFAKGDLSDRTGQVDQDSQSAYIYSSARFANNIFVDGNLSYSHFNNDLSANMSDGTYVDGNTSSDAWGFGLKLGYDLKLGDAGYVTPYGSVSGLFQSGDDYQLSNDMKVDGQSYDSMRYELGVDAGYTFTYSEDQALTPYFKLAYVYDDSNNDADVNGDSIDNGVEGFAVRVGLGTQFSFTKNFSAYTDANYLGGGDVDQDWSANVGVKYTW

SEQ ID NO: 121649 - DNA, 2937 bp, Salmonella typhimurium
  CDS (1)..(2937): transl_table=11
atgcactcctggaaaaagaaacttgtagtctcacaattagcattggcttgcactctggcaatcacttctcaggcgaatgctactacttacgatacctggacttattacgacaatcctaccaccgcgcttgattggaataatatggatgccgcaggcactgttgatggtaactatgtaaactatagcggtttcgtttactacaacaatgccaatggtgatttcgatcagacgttcaacggtgacactgttaacggtacgatttctacctattatctgaaccatgattataatgacgcaaccagtaatgagctgaatattagtaattcagttattcatggctcgattacttccatgctgccgattggttattacgatcgttttgatacgttggatcacgatgggtattctgaatattatcggttcaacaacggtactgatactgttgacggaaactggtatgacggtgatgtgttcacgctgaacatcgctaattccaccattgatgatgattatgaagcgttttacttcactgattcctataaggatggtgatgtaactaagtacacaaatgaaacattcgatgtcagcgaaggcgtggcggtgaatcttgatgtagaaagcaacatcaatatttccaacaattcccgtgttgcaggtattgccttgtctcagggaaatacttacaacaacacttacacgacggaatcccataactgggataacaatattaatgtatttgactctactgtaacttccggttcagattatatcctggatagtgcttatactactgacactggtacttttggcacaggtcactttggcaattccgatgagccgagcgattatactggtgctggcgacgttgcattatctttcactgatgacaatggtgcttcagactatgcaatgaagaacaatgtgtacttcagtaattctacgctgatgggtgatgtcaaatttaccagtaactggaacgccaatttcgatgctgatggtgatgatactaacggtgatggtgttcctgataccaaccatggctgggctgatgacggcctcaacgtcgacgaactgaaccttacacttgataatggcagtaagtgggttggtcaggcgacttatactgttgatacaacgtcccgtatgtatgatgttgaaacgaacagccttactccaggcgcaacattggaagataatgcctggaatcgtatcgttggtaatgaagttttccagagcggcgtgtttaacgtgacgctgaacaatggttctgaatgggacaccgttggggactcgactgttgatacgctggctgtaaacaatggttctcaggttaatgtttctaattctgatttaacatcagacaccattgatttgactaatggttcttcactgaacattggtgaaggtggttatgttgacaccgatcacctgacaattgactcctatagtactgttggtttgaccgaatctactggctggagtacttactcaaacctgtatgctaataccatcaccgtaactaacggtggtgtgttggatgtgaatgttggtcagtttgataccgaagtattcagcactgataaactggaactgaccagcggcaatactgctgatcacaacggtaatgttgtttctggtgtgttcaatatccatagcagcgattatgttctgaacgctgacctggtgaacgaccgtacctgggataccactcaggctaactatggttacggtactatcgcaatgaactctgacggtcacctgaccatcaacggtaatggcgatatcaacaacggcgacgaactggataacagctctgttgacaacgttgtagcggctaccggtaactataaagttcgcatcgacaacgctactggtgccggttctgttgcggattacaaaggcaacgagctgatttatgtcaatgacgtaaacaccgacgcaaccttctctgcagcaaacaaagctgacctgggtgcttacacctatcaggctaagcaggaaggcaacactgtcgtgctggaacagatggaactgaccgactacgctaacatggcgctgagcattccttctgcgaacaccaatatctggaacctggaacaagacaccgttggtactcgtctgaccaacgctcgtcatggcctggcggataacggcggcgcatgggtaagctacttcggcggtaacttcaacggcgacaacggcaccattaactacgatcaggatgttaatggcatcatggtcggtgttgataccaaagttgacggtaacaacgctaagtggatcgttggtgcggcagcaggtttcgcgaaaggcgatctgagcgatcgtaccggtcaggtggatcaggacagccagtctgcctacatctactcttccgctcgtttcgcaaacaacatctttgttgacggtaacttgagctactctcacttcaacaacgatttgtctgctaacatgagcgacggtacttacgttgacggcaacacatcttctgacgcctggggcttcggcttgaaactgggttatgatctgaagctgggtgatgcaggctacgtaacgccttacggcagcgtatccggtctgttccagtctggcgacgactaccagctgagcaatgacatgaaagttgacggtcagtcttacgacagcatgcgttatgaactcggtgtagatgcaggttataccttcacttacagcgaagatcaggcgctgaccccgtacttcaaactggcttacgtttacgacgactccaacaacgatgctgacgtaaacggcgactctatcgacaacggcgtagaaggttctgcggtacgtgttggtctgggtactcagttcagcttcacgaagaacttcagcgcctacaccgatgctaactacctcggcggcggtgatgttgatcaagactggtctgcaaacgttggtgttaaatatacctggtaa

SEQ ID NO: 121650 - protein, 978 aa, Salmonella typhimurium
MHSWKKKLVVSQLALACTLAITSQANATTYDTWTYYDNPTTALDWNNMDAAGTVDGNYVNYSGFVYYNNANGDFDQTFNGDTVNGTISTYYLNHDYNDATSNELNISNSVIHGSITSMLPIGYYDRFDTLDHDGYSEYYRFNNGTDTVDGNWYDGDVFTLNIANSTIDDDYEAFYFTDSYKDGDVTKYTNETFDVSEGVAVNLDVESNINISNNSRVAGIALSQGNTYNNTYTTESHNWDNNINVFDSTVTSGSDYILDSAYTTDTGTFGTGHFGNSDEPSDYTGAGDVALSFTDDNGASDYAMKNNVYFSNSTLMGDVKFTSNWNANFDADGDDTNGDGVPDTNHGWADDGLNVDELNLTLDNGSKWVGQATYTVDTTSRMYDVETNSLTPGATLEDNAWNRIVGNEVFQSGVFNVTLNNGSEWDTVGDSTVDTLAVNNGSQVNVSNSDLTSDTIDLTNGSSLNIGEGGYVDTDHLTIDSYSTVGLTESTGWSTYSNLYANTITVTNGGVLDVNVGQFDTEVFSTDKLELTSGNTADHNGNVVSGVFNIHSSDYVLNADLVNDRTWDTTQANYGYGTIAMNSDGHLTINGNGDINNGDELDNSSVDNVVAATGNYKVRIDNATGAGSVADYKGNELIYVNDVNTDATFSAANKADLGAYTYQAKQEGNTVVLEQMELTDYANMALSIPSANTNIWNLEQDTVGTRLTNARHGLADNGGAWVSYFGGNFNGDNGTINYDQDVNGIMVGVDTKVDGNNAKWIVGAAAGFAKGDLSDRTGQVDQDSQSAYIYSSARFANNIFVDGNLSYSHFNNDLSANMSDGTYVDGNTSSDAWGFGLKLGYDLKLGDAGYVTPYGSVSGLFQSGDDYQLSNDMKVDGQSYDSMRYELGVDAGYTFTYSEDQALTPYFKLAYVYDDSNNDADVNGDSIDNGVEGSAVRVGLGTQFSFTKNFSAYTDANYLGGGDVDQDWSANVGVKYTW

SEQ ID NO: 121651 - DNA, 25 bp, Artificial sequence
  primer
atgcactcctggaaaaagaaacttg

SEQ ID NO: 121652 - DNA, 23 bp, Artificial sequence
  primer
ttaatcagccccccacccagtag

SEQ ID NO: 121653 - protein, 1074 aa, Artificial sequence
  consensus sequence
  Variant (28)..(30): Xaa in position 28 to 30 is any amino acid
  Variant (32)..(38): Xaa in position 32 to 38 is any amino acid
  Variant (39)..(40): Xaa in position 39 to 40 is any or no amino acid
  Variant (42)..(57): Xaa in position 42 to 57 is any amino acid
  Variant (58)..(68): Xaa in position 58 to 68 is any or no amino acid
  Variant (71)..(88): Xaa in position 71 to 88 is any amino acid
  Variant (89)..(92): Xaa in position 89 to 92 is any or no amino acid
  Variant (97)..(97): Xaa in position 97 is any amino acid
  Variant (104)..(110): Xaa in position 104 to 110 is any amino acid
  Variant (112)..(112): Xaa in position 112 is any amino acid
  Variant (113)..(113): Xaa in position 113 is any or no amino acid
  Variant (115)..(115): Xaa in position 115 is any amino acid
  Variant (117)..(119): Xaa in position 117 to 119 is any amino acid
  Variant (122)..(122): Xaa in position 122 is any amino acid
  Variant (126)..(126): Xaa in position 126 is any amino acid
  Variant (130)..(149): Xaa in position 130 to 149 is any amino acid
  Variant (150)..(179): Xaa in position 150 to 179 is any or no amino acid
  Variant (181)..(183): Xaa in position 181 to 183 is any amino acid
  Variant (190)..(191): Xaa in position 190 to 191 is any amino acid
  Variant (193)..(199): Xaa in position 193 to 199 is any amino acid
  Variant (201)..(214): Xaa in position 201 to 214 is any amino acid
  Variant (215)..(220): Xaa in position 215 to 220 is any or no amino acid
  Variant (222)..(222): Xaa in position 222 is any amino acid
  Variant (224)..(225): Xaa in position 224 to 225 is any amino acid
  Variant (228)..(228): Xaa in position 228 is any amino acid
  Variant (230)..(233): Xaa in position 230 to 233 is any amino acid
  Variant (235)..(235): Xaa in position 235 is any amino acid
  Variant (239)..(239): Xaa in position 239 is any amino acid
  Variant (244)..(244): Xaa in position 244 is any amino acid
  Variant (246)..(246): Xaa in position 246 is any amino acid
  Variant (248)..(253): Xaa in position 248 to 253 is any amino acid
  Variant (254)..(257): Xaa in position 254 to 257 is any or no amino acid
  Variant (259)..(260): Xaa in position 259 to 260 is any amino acid
  Variant (262)..(267): Xaa in position 262 to 267 is any amino acid
  Variant (268)..(270): Xaa in position 268 to 270 is any or no amino acid
  Variant (272)..(272): Xaa in position 272 is any amino acid
  Variant (274)..(274): Xaa in position 274 is any amino acid
  Variant (276)..(277): Xaa in position 276 to 277 is any amino acid
  Variant (285)..(291): Xaa in position 285 to 291 is any amino acid
  Variant (292)..(301): Xaa in position 292 to 301 is any or no amino acid
  Variant (303)..(303): Xaa in position 303 is any amino acid
  Variant (306)..(310): Xaa in position 306 to 310 is any amino acid
  Variant (314)..(314): Xaa in position 314 is any amino acid
  Variant (316)..(317): Xaa in position 316 to 317 is any amino acid
  Variant (318)..(338): Xaa in position 318 to 338 is any or no amino acid
  Variant (342)..(352): Xaa in position 342 to 352 is any amino acid
  Variant (353)..(354): Xaa in position 353 to 354 is any or no amino acid
  Variant (356)..(358): Xaa in position 356 to 358 is any amino acid
  Variant (360)..(363): Xaa in position 360 to 363 is any amino acid
  Variant (365)..(365): Xaa in position 365 is any amino acid
  Variant (367)..(367): Xaa in position 367 is any amino acid
  Variant (371)..(373): Xaa in position 371 to 373 is any amino acid
  Variant (375)..(378): Xaa in position 375 to 378 is any amino acid
  Variant (380)..(382): Xaa in position 380 to 382 is any amino acid
  Variant (384)..(386): Xaa in position 384 to 386 is any amino acid
  Variant (388)..(397): Xaa in position 388 to 397 is any amino acid
  Variant (398)..(399): Xaa in position 398 to 399 is any or no amino acid
  Variant (403)..(403): Xaa in position 403 is any amino acid
  Variant (405)..(407): Xaa in position 405 to 407 is any amino acid
  Variant (408)..(411): Xaa in position 408 to 411 is any or no amino acid
  Variant (413)..(413): Xaa in position 413 is any amino acid
  Variant (415)..(416): Xaa in position 415 to 416 is any amino acid
  Variant (419)..(419): Xaa in position 419 is any amino acid
  Variant (421)..(421): Xaa in position 421 is any amino acid
  Variant (422)..(422): Xaa in position 422 is any or no amino acid
  Variant (427)..(427): Xaa in position 427 is any amino acid
  Variant (429)..(439): Xaa in position 429 to 439 is any amino acid
  Variant (440)..(461): Xaa in position 440 to 461 is any or no amino acid
  Variant (463)..(465): Xaa in position 463 to 465 is any amino acid
  Variant (469)..(469): Xaa in position 469 is any amino acid
  Variant (471)..(472): Xaa in position 471 to 472 is any amino acid
  Variant (474)..(487): Xaa in position 474 to 487 is any amino acid
  Variant (488)..(495): Xaa in position 488 to 495 is any or no amino acid
  Variant (499)..(499): Xaa in position 499 is any amino acid
  Variant (501)..(501): Xaa in position 501 is any amino acid
  Variant (503)..(503): Xaa in position 503 is any amino acid
  Variant (506)..(506): Xaa in position 506 is any amino acid
  Variant (513)..(515): Xaa in position 513 to 515 is any amino acid
  Variant (517)..(518): Xaa in position 517 to 518 is any amino acid
  Variant (522)..(523): Xaa in position 522 to 523 is any amino acid
  Variant (525)..(525): Xaa in position 525 is any amino acid
  Variant (530)..(530): Xaa in position 530 is any amino acid
  Variant (532)..(533): Xaa in position 532 to 533 is any amino acid
  Variant (534)..(534): Xaa in position 534 is any or no amino acid
  Variant (536)..(536): Xaa in position 536 is any amino acid
  Variant (538)..(539): Xaa in position 538 to 539 is any amino acid
  Variant (543)..(543): Xaa in position 543 is any amino acid
  Variant (545)..(546): Xaa in position 545 to 546 is any amino acid
  Variant (549)..(550): Xaa in position 549 to 550 is any amino acid
  Variant (555)..(555): Xaa in position 555 is any amino acid
  Variant (557)..(557): Xaa in position 557 is any amino acid
  Variant (559)..(559): Xaa in position 559 is any amino acid
  Variant (562)..(562): Xaa in position 562 is any amino acid
  Variant (565)..(565): Xaa in position 565 is any amino acid
  Variant (567)..(567): Xaa in position 567 is any amino acid
  Variant (568)..(568): Xaa in position 568 is any or no amino acid
  Variant (572)..(578): Xaa in position 572 to 578 is any amino acid
  Variant (579)..(580): Xaa in position 579 to 580 is any or no amino acid
  Variant (582)..(584): Xaa in position 582 to 584 is any amino acid
  Variant (585)..(587): Xaa in position 585 to 587 is any or no amino acid
  Variant (592)..(592): Xaa in position 592 is any amino acid
  Variant (594)..(594): Xaa in position 594 is any amino acid
  Variant (597)..(598): Xaa in position 597 to 598 is any amino acid
  Variant (600)..(600): Xaa in position 600 is any amino acid
  Variant (603)..(613): Xaa in position 603 to 613 is any amino acid
  Variant (614)..(616): Xaa in position 614 to 616 is any or no amino acid
  Variant (618)..(618): Xaa in position 618 is any amino acid
  Variant (620)..(620): Xaa in position 620 is any amino acid
  Variant (624)..(625): Xaa in position 624 to 625 is any amino acid
  Variant (626)..(627): Xaa in position 626 to 627 is any or no amino acid
  Variant (629)..(630): Xaa in position 629 to 630 is any amino acid
  Variant (633)..(635): Xaa in position 633 to 635 is any amino acid
  Variant (639)..(639): Xaa in position 639 is any amino acid
  Variant (641)..(641): Xaa in position 641 is any amino acid
  Variant (643)..(649): Xaa in position 643 to 649 is any amino acid
  Variant (652)..(652): Xaa in position 652 is any amino acid
  Variant (657)..(657): Xaa in position 657 is any amino acid
  Variant (660)..(662): Xaa in position 660 to 662 is any amino acid
  Variant (668)..(669): Xaa in position 668 to 669 is any amino acid
  Variant (685)..(686): Xaa in position 685 to 686 is any amino acid
  Variant (688)..(696): Xaa in position 688 to 696 is any amino acid
  Variant (697)..(702): Xaa in position 697 to 702 is any or no amino acid
  Variant (704)..(704): Xaa in position 704 is any amino acid
  Variant (706)..(706): Xaa in position 706 is any amino acid
  Variant (724)..(725): Xaa in position 724 to 725 is any amino acid
  Variant (729)..(731): Xaa in position 729 to 731 is any amino acid
  Variant (733)..(733): Xaa in position 733 is any amino acid
  Variant (739)..(739): Xaa in position 739 is any amino acid
  Variant (741)..(742): Xaa in position 741 to 742 is any amino acid
  Variant (761)..(761): Xaa in position 761 is any amino acid
  Variant (763)..(763): Xaa in position 763 is any amino acid
  Variant (770)..(770): Xaa in position 770 is any amino acid
  Variant (804)..(804): Xaa in position 804 is any amino acid
  Variant (806)..(806): Xaa in position 806 is any amino acid
  Variant (849)..(849): Xaa in position 849 is any amino acid
  Variant (869)..(870): Xaa in position 869 to 870 is any amino acid
  Variant (873)..(873): Xaa in position 873 is any amino acid
  Variant (882)..(882): Xaa in position 882 is any amino acid
  Variant (890)..(890): Xaa in position 890 is any amino acid
  Variant (895)..(895): Xaa in position 895 is any amino acid
  Variant (900)..(900): Xaa in position 900 is any amino acid
  Variant (913)..(913): Xaa in position 913 is any amino acid
  Variant (916)..(916): Xaa in position 916 is any amino acid
  Variant (923)..(923): Xaa in position 923 is any amino acid
  Variant (925)..(925): Xaa in position 925 is any amino acid
  Variant (935)..(935): Xaa in position 935 is any amino acid
  Variant (939)..(939): Xaa in position 939 is any amino acid
  Variant (951)..(951): Xaa in position 951 is any amino acid
  Variant (953)..(953): Xaa in position 953 is any amino acid
  Variant (1016)..(1016): Xaa in position 1016 is any amino acid
  Variant (1027)..(1027): Xaa in position 1027 is any amino acid
  Variant (1030)..(1030): Xaa in position 1030 is any amino acid
MHSWKKKLVVSQLALACTLAITSQANAXXXDXXXXXXXXXTXXXXXXXXXXXXXXXXXXXXXXXXXXXYVXXXXXXXXXXXXXXXXXXXXXXTVNGXISTYYLXXXXXXXTXXNXLXXXNSXIHGXITSXXXXXXXXXXXXXXXXXXXXXXXXXXXXXXXXXXXXXXXXXXXXXXXXXXLXXXNSTIDDXXEXXXXXXXYXXXXXXXXXXXXXXXXXXXXGXAXXLDXEXXXXIXNNSXVAGIXLXQXXXXXXXXXXTXXTXXXXXXXXXNXIXVXXSTVTSGSXXXXXXXXXXXXXXXXXGXFGXXXXXSDYXGXXXXXXXXXXXXXXXXXXXXXXXDVAXXXXXXXXXXXXXMXXXVXXXXSXLXGDVXXXSXXXXNXXXFXXXGXXXXXXXXXXXXTNGXWXXXXXXXDXLXXTLXNXXKWVGXAXXXXXXXXXXXXXXXXXXXXXXXXXXXXXXXXXDXXXNSLXPXXTXXXXXXXXXXXXXXXXXXXXXXQSGXFXVXLNXGSEWDTXXXSXXDTLXXNXGSQVXVXXXSXLXXDTIXLXXGSXXNIGEXGXVXTDXLTXDXXSTVXXXXXXXXXWXXXXXXLYANXIXVTXXGXLDXXXXXXXXXXXXXXDXLXLTSXXXXDXXGNXXXGVFXIXSXXXXXXXDLXNDRTXDTXXXNYGYGXXAMNSDGHLTINGNGDXXNXXXXXXXXXXXXXXXDXVXAATGNYKVRIDNATGAGXXADYXXXEXIYVNDXNXXATFSAANKADLGAYTYQAXQXGNTVVLXQMELTDYANMALSIPSANTNIWNLEQDTVGTRLXNXRHGLADNGGAWVSYFGGNFNGDNGTINYDQDVNGIMVGVDTKXDGNNAKWIVGAAAGFAKGDXXDRXGQVDQDSQXAYIYSSAXFANNXFVDGXLSYSHFNNDLSAXMSXGTYVDGXTXSDAWGFGLKXGYDXKLGDAGYVTPYXSXSGLFQSGDDYQLSNDMKVDGQSYDSMRYELGVDAGYTFTYSEDQALTPYFKLAYVYDDSNNDXDVNGDSIDNGXEGXAVRVGLGTQFSFTKNFSAYTDANYLGGGDVDQDWSANVGVKYTW

SEQ ID NO: 121654 - protein, 32 aa, Artificial sequence
  protein pattern
  Variant (9)..(9): Xaa in position 9 is any or no amino acid
  Variant (11)..(11): Xaa in position 11 is any or no amino acid
  Variant (29)..(29): Xaa in position 29 is Ala or Thr
  Variant (30)..(30): Xaa in position 30 is Asn or Thr
  Variant (31)..(31): Xaa in position 31 is any amino acid
MHSWKKKLXVXSQLALACTLAITSQANAXXXD

SEQ ID NO: 121655 - protein, 25 aa, Artificial sequence
  protein pattern
  Variant (2)..(2): Xaa in position 2 is any amino acid
  Variant (3)..(7): Xaa in position 3 to 7 is any or no amino acid
  Variant (11)..(11): Xaa in position 11 is Ile, Leu or Val
  Variant (13)..(13): Xaa in position 13 is Asp or Asn
  Variant (15)..(15): Xaa in position 15 is Ala, Ser or Thr
  Variant (18)..(18): Xaa in position 18 is Gly or Asn
  Variant (23)..(23): Xaa in position 23 is Asp or Asn
  Variant (25)..(25): Xaa in position 25 is Thr or Val
VXXXXXXQSGXFXVXLNXGSEWXTX

SEQ ID NO: 121656 - protein, 20 aa, Artificial sequence
  protein pattern
  Variant (2)..(2): Xaa in position 2 is Ile or Val
  Variant (3)..(3): Xaa in position 3 is Asn or Thr
  Variant (6)..(6): Xaa in position 6 is any amino acid
  Variant (8)..(8): Xaa in position 8 is Ser or Val
  Variant (9)..(9): Xaa in position 9 is Asp or Asn
  Variant (10)..(10): Xaa in position 10 is Ile or Leu
  Variant (11)..(11): Xaa in position 11 is Asn or Ser
  Variant (13)..(13): Xaa in position 13 is Ser or Thr
  Variant (17)..(17): Xaa in position 17 is His or Arg
AXXLDXEXXXXIXNNSXVAG

SEQ ID NO: 121657 - DNA, 1071 bp, Escherichia coli; identical to SEQ ID NO: 75768
  CDS (1)..(1071): transl_table=11

SEQ ID NO: 121658 - protein, 356 aa, Escherichia coli; identical to SEQ ID NO: 75769

SEQ ID NO: 121659 - DNA, 1071 bp, Bacillus licheniformis; identical to SEQ ID NO: 75290
  CDS (1)..(1071): transl_table=11

SEQ ID NO: 121660 - protein, 356 aa, Bacillus licheniformis; identical to SEQ ID NO: 75291

SEQ ID NO: 121661 - DNA, 1089 bp, Pseudomonas aeruginosa
  CDS (1)..(1089): transl_table=11
ttgagtaccacgatggctgatttacagatcgacgaccttaacgttgcctccaacgagaccctgatcacgccggagcagctcaagcgtgaaattcccctgaccgacaaggccctgcagaccgtggcccatggtcgccaggtggtgcgcgacatcctggatggcaaggaccaccgtctgttcgtggtgatcggcccctgctccatccacgacatcaaggccgcccacgaatacgccgaccgcctcaaggcgctcgcggccgaagtggcggatacgctgttcctggtgatgcgcgtgtacttcgagaagccgcgtaccacggtgggctggaaaggcctgatcaacgatccgtacctggacgactcgttcaagatccaggatggcctgcacatcggtcgccaactgctccgcgacctcgccgagaaaggcttgcccaccgccaccgaagcgctcgacccgatttccccgcagtacctgcaggacctgatcagctggtcggcgatcggcgcccgtaccaccgaatcgcagacccaccgcgagatggcctccggcctgtcttccgcggtcggcttcaagaacggcaccgatggcagcctgaccgtggcgatcaatgccctgcagtcggtctccagcccgcatcgcttcctcggcatcaaccagcagggcggcgtatccatcgtcaccaccaagggcaaccgctatggtcacgtggtgttgcgcggcggcaacggcaagccgaactacgattcggtcagcgtcgcgctctgcgagcaggacctgaacaaggcgaaaatcccgctgaacatcatggtcgactgcagccacgccaactccaacaaggacccggccctgcaaccgctggtgatggacaacgtcagcaaccagatcgtcgaaggcaacaactcgatcgtcggcctgatggtggaaagccacctgggctggggcagccagccgattccgaaggatctcgaccaacttcagtacggcgtctccatcaccgatgcatgcatcgactgggcgaccaccgagaagagcatccgcagcatgcacgccaagctcaaggacgtgctgccgaaacgccagcgcggctga

SEQ ID NO: 121662 - protein, 362 aa, Pseudomonas aeruginosa
LSTTMADLQIDDLNVASNETLITPEQLKREIPLTDKALQTVAHGRQVVRDILDGKDHRLFVVIGPCSIHDIKAAHEYADRLKALAAEVADTLFLVMRVYFEKPRTTVGWKGLINDPYLDDSFKIQDGLHIGRQLLRDLAEKGLPTATEALDPISPQYLQDLISWSAIGARTTESQTHREMASGLSSAVGFKNGTDGSLTVAINALQSVSSPHRFLGINQQGGVSIVTTKGNRYGHVVLRGGNGKPNYDSVSVALCEQDLNKAKIPLNIMVDCSHANSNKDPALQPLVMDNVSNQIVEGNNSIVGLMVESHLGWGSQPIPKDLDQLQYGVSITDACIDWATTEKSIRSMHAKLKDVLPKRQRG

SEQ ID NO: 121663 - DNA, 1053 bp, Klebsiella pneumoniae subsp. pneumoniae MGH 78578
  CDS (1)..(1053): transl_table=11
atgaattatcagaacgacgatttacgcattaaagagatcaacgaattattacctcccgttgcgctcctggaaaaattccctgctaccgaaaatgctgcaaacaccgttgcacatgctcgcaaagcgatccatcagatcctcaaaggcgacgatgaccgtctgctggtggtgattgggccttgttctattcacgatccggcagcggcgaaagagtatgccgcccgcctgctgaccctgcgcgaggcgctgaagggcgagctcgagatcgtcatgcgggtctattttgaaaaaccgcgcaccaccgtcggctggaaagggctcatcaacgatccccatatggataacagcttccgcatcaacgacgggttgcgcatcgcgcgcaaactgctgctggatattaacgacagcggcctgccggcggcgggggaattcctcgatatgatcaccccgcagtatgtcgccgatctgatgagctggggcgccattggcgcgcgaaccaccgaatcccaggtgcaccgtgagctcgcctccggactctcctgcccggtgggctttaaaaacggtaccgatggcaccatcaaggtggctatcgatgcgattaacgccgccggcgcgccgcactgtttcctgtcggtcaccaagtggggccactccgccatcgtgaataccagcggtaacggcgactgccatattattttgcgcggcggcaaagagcctaactacagcgcgaagcacgtggcggaggtgaaaatcggtctggcgaaagcgggtcttccggcccaggtgatgatcgacttcagccatgccaactccagcaagcagttcaagaagcagatggaagtgggcgccgacgtatgccagcagatcgccggcggcgagcgcgccattatgggcgtgatgattgaaagccatctggtggaaggcaaccagagcctcgagagcggtgaaccgctgacctacggcaagagcgtcaccgacgcctgcatcggctgggaggataccgaaacgatcctgcgtcagctggcggaagcggtgaaaacccgccgcggctaa

SEQ ID NO: 121664 - protein, 350 aa, Klebsiella pneumoniae subsp. pneumoniae MGH 78578
MNYQNDDLRIKEINELLPPVALLEKFPATENAANTVAHARKAIHQILKGDDDRLLVVIGPCSIHDPAAAKEYAARLLTLREALKGELEIVMRVYFEKPRTTVGWKGLINDPHMDNSFRINDGLRIARKLLLDINDSGLPAAGEFLDMITPQYVADLMSWGAIGARTTESQVHRELASGLSCPVGFKNGTDGTIKVAIDAINAAGAPHCFLSVTKWGHSAIVNTSGNGDCHIILRGGKEPNYSAKHVAEVKIGLAKAGLPAQVMIDFSHANSSKQFKKQMEVGADVCQQIAGGERAIMGVMIESHLVEGNQSLESGEPLTYGKSVTDACIGWEDTETILRQLAEAVKTRRG

SEQ ID NO: 121665 - DNA, 1047 bp, Klebsiella pneumoniae subsp. pneumoniae MGH 78578
  CDS (1)..(1047): transl_table=11
atgaataaaacagacgaattgcgtaccgcgcgcattgagagcctggtaacgcccgcggagctggcccagcgccatcccgtgacggccgacgtggctgcccacgtctcggcctcccgccgccgaattgaaaaaatcctcaacggcgaagaccgccgactgctggtgattatcggcccctgctccattcacgacaccgacgcggcgctggagtatgcccgccgcctgcagggcatgcgcgagcgctaccagccgcagctggagatcgtgatgcgcacctactttgaaaaaccgcgtaccgtggtgggctggaaaggcttaatctccgatcccgacctcaacggcagctaccgggtcaaccacggaattgagctggcgcggcgcctgctgctgcaggttaatgagctgggagtaccgacggccaccgagtttctcgatatggtgaccggtcagtttatcgccgatctcatcagctggggggccatcggggcgcgcaccactgaaagccagatccaccgtgaaatggcctcagcgctctcctgcccggttggatttaaaaacggcaccgacggcaatacgcgcatcgcggtggacgccatccgcgcctcccgcgccagccatatgttcctctccccggacaagcaggggcagatgacgatttaccagaccagcggcaacccgtacgggcatatcattatgcgcggcggcaaacggccaaactatcacgccgaggatatcgccgccgccggcgaggcgctacgtgaattcgatctgccggaacagctggtcgttgatttcagccatggcaactgccagaagcagcaccgccgtcagctggaggtgtgcgccgatatctgtcagcaaattcgcgcgggctccaccgccatcgccgggattatggccgaaagcttcctgcaggaaggcactcagaaagtggtccccggacagccgttgacctggggccagtcgatcaccgacccctgcctgagctgggaagacagcgaaagattattgagcgagctggctgcggccaccgccacccgcctgtaa

SEQ ID NO: 121666 - protein, 348 aa, Klebsiella pneumoniae subsp. pneumoniae MGH 78578
MNKTDELRTARIESLVTPAELAQRHPVTADVAAHVSASRRRIEKILNGEDRRLLVIIGPCSIHDTDAALEYARRLQGMRERYQPQLEIVMRTYFEKPRTVVGWKGLISDPDLNGSYRVNHGIELARRLLLQVNELGVPTATEFLDMVTGQFIADLISWGAIGARTTESQIHREMASALSCPVGFKNGTDGNTRIAVDAIRASRASHMFLSPDKQGQMTIYQTSGNPYGHIIMRGGKRPNYHAEDIAAAGEALREFDLPEQLVVDFSHGNCQKQHRRQLEVCADICQQIRAGSTAIAGIMAESFLQEGTQKVVPGQPLTWGQSITDPCLSWEDSERLLSELAAATATRL

SEQ ID NO: 121667 - DNA, 1071 bp, Klebsiella pneumoniae subsp. pneumoniae MGH 78578
  CDS (1)..(1071): transl_table=11
atgcaaaaagacgcgctgaacaacgtacatattaccgacgaacatgtattaatgaccccggagcaactgaaggcggaattcccgctgagcgtcgagcaggaagcgcagatcgcgcacgcccgtcagaccatttcggatatcatcgccggtcgcgatccgcgcctgctggtggtatgtggtccttgctccattcacgatccggaagctgcgattgaatatgctcgtcggtttaaagcccttgccgcagaggtcagcgatagcctctacctggtgatgcgcgtctattttgaaaaaccccgtaccaccgtcggatggaaggggctgattaacgatccgcacatggatggttcgtttgatgttgaaggcggcctgaagattgcgcgtcgtctgctggtcgagctcgtcaatatgggactgccgctggcgacggaagcgctggatcccaacagcccgcagtacctcggggatctgttcagctggtccgctatcggcgcgcgtaccacggaatcacaaacgcaccgcgaaatggcctctggcctgtcgatgccggtcggctttaaaaacggtaccgacggtagcctggccacggccatcaacgccatgcgcgccgcggcgatgccgcaccgtttcgtaggcatcaaccaggccgggcaggtctgcctgctgcaaacgcagggtaatccgaacggccatgtgatcctccgcggcggcaaagcgccgaactacggtccggaagatgtggcgaaatgcgaaaaagagatggcgcaggcgggactgaagccgtcgctgatggtagattgcagtcatgggaactccaataaagatttccgccgccagccggccgtggctgaatccgtggtcgcgcagatcaaagatggcaaccgctccattatcggcctgatgatcgaaagtaatatccacgaaggcaatcagtcctctgaacagccgcgtgaggcgatgaaatacggcgtctcggtgacggatgcctgcatcagctgggagactaccgaggcgctgctgcgtgaactggataaggatctccgcggccacctggcggcccgtttggtttaa

SEQ ID NO: 121668 - protein, 356 aa, Klebsiella pneumoniae subsp. pneumoniae MGH 78578
MQKDALNNVHITDEHVLMTPEQLKAEFPLSVEQEAQIAHARQTISDIIAGRDPRLLVVCGPCSIHDPEAAIEYARRFKALAAEVSDSLYLVMRVYFEKPRTTVGWKGLINDPHMDGSFDVEGGLKIARRLLVELVNMGLPLATEALDPNSPQYLGDLFSWSAIGARTTESQTHREMASGLSMPVGFKNGTDGSLATAINAMRAAAMPHRFVGINQAGQVCLLQTQGNPNGHVILRGGKAPNYGPEDVAKCEKEMAQAGLKPSLMVDCSHGNSNKDFRRQPAVAESVVAQIKDGNRSIIGLMIESNIHEGNQSSEQPREAMKYGVSVTDACISWETTEALLRELDKDLRGHLAARLV

SEQ ID NO: 121669 - DNA, 1092 bp, Mesorhizobium loti MAFF303099; identical to SEQ ID NO: 75292
  CDS (1)..(1092): transl_table=11

SEQ ID NO: 121670 - protein, 363 aa, Mesorhizobium loti MAFF303099; identical to SEQ ID NO: 75293

SEQ ID NO: 121671 - DNA, 1074 bp, Vibrio cholerae O1 biovar eltor str. N16961; identical to SEQ ID NO: 75294
  CDS (1)..(1074): transl_table=11

SEQ ID NO: 121672 - protein, 357 aa, Vibrio cholerae O1 biovar eltor str. N16961; identical to SEQ ID NO: 75295

SEQ ID NO: 121673 - DNA, 1053 bp, Pasteurella multocida subsp. multocida str. Pm70; identical to SEQ ID NO: 75298
  CDS (1)..(1053): transl_table=11

SEQ ID NO: 121674 - protein, 350 aa, Pasteurella multocida subsp. multocida str. Pm70; identical to SEQ ID NO: 75299

SEQ ID NO: 121675 - DNA, 1077 bp, Pseudomonas aeruginosa PAO1; identical to SEQ ID NO: 75300
  CDS (1)..(1077): transl_table=11

SEQ ID NO: 121676 - protein, 358 aa, Pseudomonas aeruginosa PAO1; identical to SEQ ID NO: 75301

SEQ ID NO: 121677 - DNA, 1071 bp, Escherichia coli O157:H7 EDL933; identical to SEQ ID NO: 88899
  CDS (1)..(1071): transl_table=11

SEQ ID NO: 121678 - protein, 356 aa, Escherichia coli O157:H7 EDL933; identical to SEQ ID NO: 88900

SEQ ID NO: 121679 - DNA, 1095 bp, Xylella fastidiosa 9a5c; identical to SEQ ID NO: 75314
  CDS (1)..(1095): transl_table=11

SEQ ID NO: 121680 - protein, 364 aa, Xylella fastidiosa 9a5c; identical to SEQ ID NO: 75315

SEQ ID NO: 121681 - DNA, 1032 bp, Streptococcus pneumoniae R6; identical to SEQ ID NO: 75320
  CDS (1)..(1032): transl_table=11

SEQ ID NO: 121682 - protein, 343 aa, Streptococcus pneumoniae R6; identical to SEQ ID NO: 75321

SEQ ID NO: 121683 - DNA, 1110 bp, Caulobacter crescentus CB15; identical to SEQ ID NO: 75324
  CDS (1)..(1110): transl_table=11

SEQ ID NO: 121684 - protein, 369 aa, Caulobacter crescentus CB15; identical to SEQ ID NO: 75325

SEQ ID NO: 121685 - DNA, 1053 bp, Salmonella enterica subsp. enterica serovar Typhi str. CT18; identical to SEQ ID NO: 75404
  CDS (1)..(1053): transl_table=11

SEQ ID NO: 121686 - protein, 350 aa, Salmonella enterica subsp. enterica serovar Typhi str. CT18; identical to SEQ ID NO: 75405

SEQ ID NO: 121687 - DNA, 1053 bp, Salmonella typhimurium LT2; identical to SEQ ID NO: 75326
  CDS (1)..(1053): transl_table=11

SEQ ID NO: 121688 - protein, 350 aa, Salmonella typhimurium LT2; identical to SEQ ID NO: 75327

SEQ ID NO: 121689 - DNA, 1131 bp, Nostoc sp. PCC 7120; identical to SEQ ID NO: 75328
  CDS (1)..(1131): transl_table=11

SEQ ID NO: 121690 - protein, 376 aa, Nostoc sp. PCC 7120; identical to SEQ ID NO: 75329

SEQ ID NO: 121691 - DNA, 1179 bp, Ralstonia solanacearum GMI1000; identical to SEQ ID NO: 75330
  CDS (1)..(1179): transl_table=11

SEQ ID NO: 121692 - protein, 392 aa, Ralstonia solanacearum GMI1000; identical to SEQ ID NO: 75331

SEQ ID NO: 121693 - DNA, 1119 bp, Schizosaccharomyces pombe 972h-; identical to SEQ ID NO: 75334
  CDS (1)..(1119)

SEQ ID NO: 121694 - protein, 372 aa, Schizosaccharomyces pombe 972h-; identical to SEQ ID NO: 75335

SEQ ID NO: 121695 - DNA, 1062 bp, Thermosynechococcus elongatus BP-1; identical to SEQ ID NO: 75348
  CDS (1)..(1062): transl_table=11

SEQ ID NO: 121696 - protein, 353 aa, Thermosynechococcus elongatus BP-1; identical to SEQ ID NO: 75349

SEQ ID NO: 121697 - DNA, 1071 bp, Shigella flexneri 2a str. 301; identical to SEQ ID NO: 75356
  CDS (1)..(1071): transl_table=11

SEQ ID NO: 121698 - protein, 356 aa, Shigella flexneri 2a str. 301; identical to SEQ ID NO: 75357

SEQ ID NO: 121699 - DNA, 1092 bp, Shewanella oneidensis MR-1; identical to SEQ ID NO: 75360
  CDS (1)..(1092): transl_table=11

SEQ ID NO: 121700 - protein, 363 aa, Shewanella oneidensis MR-1; identical to SEQ ID NO: 75361

SEQ ID NO: 121701 - DNA, 1170 bp, Corynebacterium efficiens YS-314; identical to SEQ ID NO: 75370
  CDS (1)..(1170): transl_table=11

SEQ ID NO: 121702 - protein, 389 aa, Corynebacterium efficiens YS-314; identical to SEQ ID NO: 75371

SEQ ID NO: 121703 - DNA, 1113 bp, Pseudomonas putida KT2440; identical to SEQ ID NO: 75372
  CDS (1)..(1113): transl_table=11

SEQ ID NO: 121704 - protein, 370 aa, Pseudomonas putida KT2440; identical to SEQ ID NO: 75373

SEQ ID NO: 121705 - DNA, 1062 bp, Pseudomonas putida KT2440; identical to SEQ ID NO: 75374
  CDS (1)..(1062): transl_table=11

SEQ ID NO: 121706 - protein, 353 aa, Pseudomonas putida KT2440; identical to SEQ ID NO: 75375

SEQ ID NO: 121707 - DNA, 1071 bp, Vibrio vulnificus CMCP6; identical to SEQ ID NO: 75382
  CDS (1)..(1071): transl_table=11

SEQ ID NO: 121708 - protein, 356 aa, Vibrio vulnificus CMCP6; identical to SEQ ID NO: 75383

SEQ ID NO: 121709 - DNA, 1086 bp, Bradyrhizobium japonicum USDA 110; identical to SEQ ID NO: 75390
  CDS (1)..(1086): transl_table=11

SEQ ID NO: 121710 - protein, 361 aa, Bradyrhizobium japonicum USDA 110; identical to SEQ ID NO: 75391

SEQ ID NO: 121711 - DNA, 1077 bp, Pseudomonas syringae pv. tomato str. DC3000; identical to SEQ ID NO: 75394
  CDS (1)..(1077): transl_table=11

SEQ ID NO: 121712 - protein, 358 aa, Pseudomonas syringae pv. tomato str. DC3000; identical to SEQ ID NO: 75395

SEQ ID NO: 121713 - DNA, 1074 bp, Vibrio parahaemolyticus RIMD 2210633; identical to SEQ ID NO: 75398
  CDS (1)..(1074): transl_table=11

SEQ ID NO: 121714 - protein, 357 aa, Vibrio parahaemolyticus RIMD 2210633; identical to SEQ ID NO: 75399

SEQ ID NO: 121715 - DNA, 1179 bp, Nitrosomonas europaea ATCC 19718; identical to SEQ ID NO: 75408
  CDS (1)..(1179): transl_table=11

SEQ ID NO: 121716 - protein, 392 aa, Nitrosomonas europaea ATCC 19718; identical to SEQ ID NO: 75409

SEQ ID NO: 121717 - DNA, 1038 bp, Wigglesworthia glossinidia endosymbiont of Glossina brevipalpis; identical to SEQ ID NO: 75412
  CDS (1)..(1038): transl_table=11

SEQ ID NO: 121718 - protein, 345 aa, Wigglesworthia glossinidia endosymbiont of Glossina brevipalpis; identical to SEQ ID NO: 75413

SEQ ID NO: 121719 - DNA, 1080 bp, Haemophilus ducreyi 35000HP; identical to SEQ ID NO: 75414
  CDS (1)..(1080): transl_table=11

SEQ ID NO: 121720 - protein, 359 aa, Haemophilus ducreyi 35000HP; identical to SEQ ID NO: 75415

SEQ ID NO: 121721 - DNA, 1086 bp, Candidatus Blochmannia floridanus; identical to SEQ ID NO: 75420
  CDS (1)..(1086): transl_table=11

SEQ ID NO: 121722 - protein, 361 aa, Candidatus Blochmannia floridanus; identical to SEQ ID NO: 75421

SEQ ID NO: 121723 - DNA, 1119 bp, Bordetella bronchiseptica RB50; identical to SEQ ID NO: 75428
  CDS (1)..(1119): transl_table=11

SEQ ID NO: 121724 - protein, 372 aa, Bordetella bronchiseptica RB50; identical to SEQ ID NO: 75429

SEQ ID NO: 121725 - DNA, 1119 bp, Gloeobacter violaceus PCC 7421; identical to SEQ ID NO: 75440
  CDS (1)..(1119): transl_table=11

SEQ ID NO: 121726 - protein, 372 aa, Gloeobacter violaceus PCC 7421; identical to SEQ ID NO: 75441

SEQ ID NO: 121727 - DNA, 1095 bp, Photorhabdus luminescens subsp. laumondii TTO1; identical to SEQ ID NO: 75442
  CDS (1)..(1095): transl_table=11

SEQ ID NO: 121728 - protein, 364 aa, Photorhabdus luminescens subsp. laumondii TTO1; identical to SEQ ID NO: 75443

SEQ ID NO: 121729 - DNA, 1095 bp, Rhodopseudomonas palustris CGA009; identical to SEQ ID NO: 75456
  CDS (1)..(1095): transl_table=11

SEQ ID NO: 121730 - protein, 364 aa, Rhodopseudomonas palustris CGA009; identical to SEQ ID NO: 75457

SEQ ID NO: 121731 - DNA, 1068 bp, Geobacter sulfurreducens PCA; identical to SEQ ID NO: 75458
  CDS (1)..(1068): transl_table=11

SEQ ID NO: 121732 - protein, 355 aa, Geobacter sulfurreducens PCA; identical to SEQ ID NO: 75459

SEQ ID NO: 121733 - DNA, 1071 bp, Treponema denticola ATCC 35405; identical to SEQ ID NO: 75460
  CDS (1)..(1071): transl_table=11

SEQ ID NO: 121734 - protein, 356 aa, Treponema denticola ATCC 35405; identical to SEQ ID NO: 75461

SEQ ID NO: 121735 - DNA, 1113 bp, Magnaporthe grisea 70-15; identical to SEQ ID NO: 75462
  CDS (1)..(1113)

SEQ ID NO: 121736 - protein, 370 aa, Magnaporthe grisea 70-15; identical to SEQ ID NO: 75463

SEQ ID NO: 121737 - DNA, 1152 bp, Magnaporthe grisea 70-15; identical to SEQ ID NO: 75464
  CDS (1)..(1152)

SEQ ID NO: 121738 - protein, 383 aa, Magnaporthe grisea 70-15; identical to SEQ ID NO: 75465

SEQ ID NO: 121739 - DNA, 1128 bp, Gibberella zeae PH-1; identical to SEQ ID NO: 75466
  CDS (1)..(1128)

SEQ ID NO: 121740 - protein, 375 aa, Gibberella zeae PH-1; identical to SEQ ID NO: 75467

SEQ ID NO: 121741 - DNA, 1098 bp, Gibberella zeae PH-1; identical to SEQ ID NO: 75468
  CDS (1)..(1098)

SEQ ID NO: 121742 - protein, 365 aa, Gibberella zeae PH-1; identical to SEQ ID NO: 75469

SEQ ID NO: 121743 - DNA, 1071 bp, Candida glabrata CBS 138; identical to SEQ ID NO: 75470
  CDS (1)..(1071)

SEQ ID NO: 121744 - protein, 356 aa, Candida glabrata CBS 138; identical to SEQ ID NO: 75471

SEQ ID NO: 121745 - DNA, 1119 bp, Candida glabrata CBS 138; identical to SEQ ID NO: 75472
  CDS (1)..(1119)

SEQ ID NO: 121746 - protein, 372 aa, Candida glabrata CBS 138; identical to SEQ ID NO: 75473

SEQ ID NO: 121747 - DNA, 1095 bp, Kluyveromyces lactis NRRL Y-1140; identical to SEQ ID NO: 75474
  CDS (1)..(1095)

SEQ ID NO: 121748 - protein, 364 aa, Kluyveromyces lactis NRRL Y-1140; identical to SEQ ID NO: 75475

SEQ ID NO: 121749 - DNA, 1119 bp, Kluyveromyces lactis NRRL Y-1140; identical to SEQ ID NO: 75476
  CDS (1)..(1119)

SEQ ID NO: 121750 - protein, 372 aa, Kluyveromyces lactis NRRL Y-1140; identical to SEQ ID NO: 75477

SEQ ID NO: 121751 - DNA, 1107 bp, Debaryomyces hansenii CBS767; identical to SEQ ID NO: 75478
  CDS (1)..(1107)

SEQ ID NO: 121752 - protein, 368 aa, Debaryomyces hansenii CBS767; identical to SEQ ID NO: 75479

SEQ ID NO: 121753 - DNA, 1122 bp, Debaryomyces hansenii CBS767; identical to SEQ ID NO: 75480
  CDS (1)..(1122)

SEQ ID NO: 121754 - protein, 373 aa, Debaryomyces hansenii CBS767; identical to SEQ ID NO: 75481

SEQ ID NO: 121755 - DNA, 1089 bp, Yarrowia lipolytica CLIB122; identical to SEQ ID NO: 75482
  CDS (1)..(1089)

SEQ ID NO: 121756 - protein, 362 aa, Yarrowia lipolytica CLIB122; identical to SEQ ID NO: 75483

SEQ ID NO: 121757 - DNA, 1074 bp, Yarrowia lipolytica CLIB122; identical to SEQ ID NO: 75484
  CDS (1)..(1074)

SEQ ID NO: 121758 - protein, 357 aa, Yarrowia lipolytica CLIB122; identical to SEQ ID NO: 75485

SEQ ID NO: 121759 - DNA, 1143 bp, Aspergillus nidulans FGSC A4; identical to SEQ ID NO: 75486
  CDS (1)..(1143)

SEQ ID NO: 121760 - protein, 380 aa, Aspergillus nidulans FGSC A4; identical to SEQ ID NO: 75487

SEQ ID NO: 121761 - DNA, 1089 bp, Aspergillus nidulans FGSC A4; identical to SEQ ID NO: 75488
  CDS (1)..(1089)

SEQ ID NO: 121762 - protein, 362 aa, Aspergillus nidulans FGSC A4; identical to SEQ ID NO: 75489

SEQ ID NO: 121763 - DNA, 1182 bp, Ustilago maydis 521; identical to SEQ ID NO: 75490
  CDS (1)..(1182)

SEQ ID NO: 121764 - protein, 393 aa, Ustilago maydis 521; identical to SEQ ID NO: 75491

SEQ ID NO: 121765 - DNA, 1560 bp, Ustilago maydis 521; identical to SEQ ID NO: 75492
  CDS (1)..(1560)

SEQ ID NO: 121766 - protein, 519 aa, Ustilago maydis 521; identical to SEQ ID NO: 75493

SEQ ID NO: 121767 - DNA, 1131 bp, Cryptococcus neoformans var. neoformans B-3501A; identical to SEQ ID NO: 75494
  CDS (1)..(1131)

SEQ ID NO: 121768 - protein, 376 aa, Cryptococcus neoformans var. neoformans B-3501A; identical to SEQ ID NO: 75495

SEQ ID NO: 121769 - DNA, 1179 bp, Cryptococcus neoformans var. neoformans B-3501A
  CDS (1)..(1179)
atgtctgctactccctctccagacaggaacagacccctcgacgacaggaaggtcactggctatgaccctctcatccctcccgcccttcttcgacatgaccttcccgttcctcccgtcgcctccaagaccatctccgcttcccgacgaaccacctcttccatcgtgcgcggtaccgaccccctttcccgattggtcgtcgttgtcggcccttgcagtatccacgatgtcgaccaggccaaggagtacgcctctagactgagaaagggcgtgcaagagggaaagtggcctggtttggaggtcgttatgagagtctactttgaaaagcccagaacgactgtcgggtggaagggtctcatcaatgaccccgatatcgacggttccttcaagatcaacaagggtctgagaatggctagggagctcttgtgcgacatcaatgccatgggtatgcccgttggttgtgagctccttgacactattagccctcagtttattgccgacctcatcagttggggtgctatcggtgcccgaaccaccgagtctcaactccaccgagagctcgcttccggcgcctctttccccatcggttttaagaacggtacagatggctcagtcggtgttgccatcgacgccatgcaatccgcctcccaccctcactgtttcatgggtatcaactctcagggcatggccagtatcgtcaggacttccggcaacagggactgtcatgtcatcttgagaggtggcactggtggccccaactactctgctgagcacgtgcagaaagccctctccaccatgcgttccaagaaccctgatgcctttgcttccatcatggtcgactgctctcacggcaactcctccaagaaccacctcaaccagcccaaggttgccgccgaccttgctgctcagattgcggcgggcgaagtcggtatcaccggtatcatgtttgagagtaacttgaagggtggcaagcaaagcagtgacaaggggagagacaaccttgagtacggagtgtccatcaccgatgcttgtgtcgattgggaaatgaccgttgacatgcttgacaacctcaaccaggcctcccttgcccgaagagcccttctcgaatcccgggaagctaatgccaacggtcatctcaatggcgacactcctgctgtcaagaggctgaagactgacgagtaa

SEQ ID NO: 121770 - protein, 392 aa, Cryptococcus neoformans var. neoformans B-3501A
MSATPSPDRNRPLDDRKVTGYDPLIPPALLRHDLPVPPVASKTISASRRTTSSIVRGTDPLSRLVVVVGPCSIHDVDQAKEYASRLRKGVQEGKWPGLEVVMRVYFEKPRTTVGWKGLINDPDIDGSFKINKGLRMARELLCDINAMGMPVGCELLDTISPQFIADLISWGAIGARTTESQLHRELASGASFPIGFKNGTDGSVGVAIDAMQSASHPHCFMGINSQGMASIVRTSGNRDCHVILRGGTGGPNYSAEHVQKALSTMRSKNPDAFASIMVDCSHGNSSKNHLNQPKVAADLAAQIAAGEVGITGIMFESNLKGGKQSSDKGRDNLEYGVSITDACVDWEMTVDMLDNLNQASLARRALLESREANANGHLNGDTPAVKRLKTDE

SEQ ID NO: 121771 - DNA, 1083 bp, Prochlorococcus marinus str. MIT 9303; identical to SEQ ID NO: 75502
  CDS (1)..(1083): transl_table=11

SEQ ID NO: 121772 - protein, 360 aa, Prochlorococcus marinus str. MIT 9303; identical to SEQ ID NO: 75503

SEQ ID NO: 121773 - DNA, 1065 bp, Herminiimonas arsenicoxydans; identical to SEQ ID NO: 75508
  CDS (1)..(1065): transl_table=11

SEQ ID NO: 121774 - protein, 354 aa, Herminiimonas arsenicoxydans; identical to SEQ ID NO: 75509

SEQ ID NO: 121775 - DNA, 1131 bp, Burkholderia vietnamiensis G4; identical to SEQ ID NO: 75510
  CDS (1)..(1131): transl_table=11

SEQ ID NO: 121776 - protein, 376 aa, Burkholderia vietnamiensis G4; identical to SEQ ID NO: 75511

SEQ ID NO: 121777 - DNA, 1080 bp, Dichelobacter nodosus VCS1703A; identical to SEQ ID NO: 75514
  CDS (1)..(1080): transl_table=11

SEQ ID NO: 121778 - protein, 359 aa, Dichelobacter nodosus VCS1703A; identical to SEQ ID NO: 75515

SEQ ID NO: 121779 - DNA, 1113 bp, Acinetobacter sp. ADP1; identical to SEQ ID NO: 75522
  CDS (1)..(1113): transl_table=11

SEQ ID NO: 121780 - protein, 370 aa, Acinetobacter sp. ADP1; identical to SEQ ID NO: 75523

SEQ ID NO: 121781 - DNA, 1074 bp, Erwinia carotovora subsp. atroseptica SCRI1043; identical to SEQ ID NO: 75528
  CDS (1)..(1074): transl_table=11

SEQ ID NO: 121782 - protein, 357 aa, Erwinia carotovora subsp. atroseptica SCRI1043; identical to SEQ ID NO: 75529

SEQ ID NO: 121783 - DNA, 1071 bp, Yersinia pseudotuberculosis IP 32953; identical to SEQ ID NO: 75322
  CDS (1)..(1071): transl_table=11

SEQ ID NO: 121784 - protein, 356 aa, Yersinia pseudotuberculosis IP 32953; identical to SEQ ID NO: 75323

SEQ ID NO: 121785 - DNA, 1056 bp, Mannheimia succiniciproducens MBEL55E; identical to SEQ ID NO: 75532
  CDS (1)..(1056): transl_table=11

SEQ ID NO: 121786 - protein, 351 aa, Mannheimia succiniciproducens MBEL55E; identical to SEQ ID NO: 75533

SEQ ID NO: 121787 - DNA, 1056 bp, Neisseria gonorrhoeae FA 1090; identical to SEQ ID NO: 75546
  CDS (1)..(1056): transl_table=11

SEQ ID NO: 121788 - protein, 351 aa, Neisseria gonorrhoeae FA 1090; identical to SEQ ID NO: 75547

SEQ ID NO: 121789 - DNA, 1077 bp, Pseudomonas fluorescens Pf-5; identical to SEQ ID NO: 75556
  CDS (1)..(1077): transl_table=11

SEQ ID NO: 121790 - protein, 358 aa, Pseudomonas fluorescens Pf-5; identical to SEQ ID NO: 75557

SEQ ID NO: 121791 - DNA, 1083 bp, Psychrobacter arcticus 273-4; identical to SEQ ID NO: 75558
  CDS (1)..(1083): transl_table=11

SEQ ID NO: 121792 - protein, 360 aa, Psychrobacter arcticus 273-4; identical to SEQ ID NO: 75559

SEQ ID NO: 121793 - DNA, 1068 bp, Colwellia psychrerythraea 34H; identical to SEQ ID NO: 75564
  CDS (1)..(1068): transl_table=11

SEQ ID NO: 121794 - protein, 355 aa, Colwellia psychrerythraea 34H; identical to SEQ ID NO: 75565

SEQ ID NO: 121795 - DNA, 1077 bp, Pseudomonas syringae pv. phaseolicola 1448A; identical to SEQ ID NO: 75566
  CDS (1)..(1077): transl_table=11

SEQ ID NO: 121796 - protein, 358 aa, Pseudomonas syringae pv. phaseolicola 1448A; identical to SEQ ID NO: 75567

SEQ ID NO: 121797 - DNA, 1062 bp, Thermobifida fusca YX; identical to SEQ ID NO: 75574
  CDS (1)..(1062): transl_table=11

SEQ ID NO: 121798 - protein, 353 aa, Thermobifida fusca YX; identical to SEQ ID NO: 75575

SEQ ID NO: 121799 - DNA, 1131 bp, Anabaena variabilis ATCC 29413; identical to SEQ ID NO: 75584
  CDS (1)..(1131): transl_table=11

SEQ ID NO: 121800 - protein, 376 aa, Anabaena variabilis ATCC 29413; identical to SEQ ID NO: 75585

SEQ ID NO: 121801 - DNA, 1065 bp, Synechococcus elongatus PCC 7942; identical to SEQ ID NO: 75602
  CDS (1)..(1065): transl_table=11

SEQ ID NO: 121802 - protein, 354 aa, Synechococcus elongatus PCC 7942; identical to SEQ ID NO: 75603

SEQ ID NO: 121803 - DNA, 1386 bp, Syntrophus aciditrophicus SB; identical to SEQ ID NO: 75608
  CDS (1)..(1386): transl_table=11

SEQ ID NO: 121804 - protein, 461 aa, Syntrophus aciditrophicus SB; identical to SEQ ID NO: 75609

SEQ ID NO: 121805 - DNA, 1113 bp, Francisella tularensis subsp. holarctica; identical to SEQ ID NO: 75610
  CDS (1)..(1113): transl_table=11

SEQ ID NO: 121806 - protein, 370 aa, Francisella tularensis subsp. holarctica; identical to SEQ ID NO: 75611

SEQ ID NO: 121807 - DNA, 1062 bp, Saccharophagus degradans 2-40; identical to SEQ ID NO: 75614
  CDS (1)..(1062): transl_table=11

SEQ ID NO: 121808 - protein, 353 aa, Saccharophagus degradans 2-40; identical to SEQ ID NO: 75615

SEQ ID NO: 121809 - DNA, 1083 bp, Methylobacillus flagellatus KT; identical to SEQ ID NO: 75616
  CDS (1)..(1083): transl_table=11

SEQ ID NO: 121810 - protein, 360 aa, Methylobacillus flagellatus KT; identical to SEQ ID NO: 75617

SEQ ID NO: 121811 - DNA, 1095 bp, Silicibacter sp. TM1040; identical to SEQ ID NO: 75628
  CDS (1)..(1095): transl_table=11

SEQ ID NO: 121812 - protein, 364 aa, Silicibacter sp. TM1040; identical to SEQ ID NO: 75629

SEQ ID NO: 121813 - DNA, 1080 bp, Haemophilus somnus 129PT; identical to SEQ ID NO: 75634
  CDS (1)..(1080): transl_table=11

SEQ ID NO: 121814 - protein, 359 aa, Haemophilus somnus 129PT; identical to SEQ ID NO: 75635

SEQ ID NO: 121815 - DNA, 1092 bp, Shewanella sp. MR-4; identical to SEQ ID NO: 75640
  CDS (1)..(1092): transl_table=11

SEQ ID NO: 121816 - protein, 363 aa, Shewanella sp. MR-4; identical to SEQ ID NO: 75641

SEQ ID NO: 121817 - DNA, 1077 bp, Alkalilimnicola ehrlichei MLHE-1; identical to SEQ ID NO: 75648
  CDS (1)..(1077): transl_table=11

SEQ ID NO: 121818 - protein, 358 aa, Alkalilimnicola ehrlichei MLHE-1; identical to SEQ ID NO: 75649

SEQ ID NO: 121819 - DNA, 1062 bp, Rhizobium leguminosarum bv. viciae 3841; identical to SEQ ID NO: 75650
  CDS (1)..(1062): transl_table=11

SEQ ID NO: 121820 - protein, 353 aa, Rhizobium leguminosarum bv. viciae 3841; identical to SEQ ID NO: 75651

SEQ ID NO: 121821 - DNA, 1092 bp, Shewanella sp. ANA-3; identical to SEQ ID NO: 75658
  CDS (1)..(1092): transl_table=11

SEQ ID NO: 121822 - protein, 363 aa, Shewanella sp. ANA-3; identical to SEQ ID NO: 75659

SEQ ID NO: 121823 - DNA, 1062 bp, Mycobacterium avium 104; identical to SEQ ID NO: 75662
  CDS (1)..(1062): transl_table=11

SEQ ID NO: 121824 - protein, 353 aa, Mycobacterium avium 104; identical to SEQ ID NO: 75663

SEQ ID NO: 121825 - DNA, 1077 bp, Azoarcus sp. BH72; identical to SEQ ID NO: 75666
  CDS (1)..(1077): transl_table=11

SEQ ID NO: 121826 - protein, 358 aa, Azoarcus sp. BH72; identical to SEQ ID NO: 75667

SEQ ID NO: 121827 - DNA, 1119 bp, Acidovorax sp. JS42; identical to SEQ ID NO: 75676
  CDS (1)..(1119): transl_table=11

SEQ ID NO: 121828 - protein, 372 aa, Acidovorax sp. JS42; identical to SEQ ID NO: 75677

SEQ ID NO: 121829 - DNA, 1059 bp, Nostoc punctiforme PCC 73102; identical to SEQ ID NO: 75678
  CDS (1)..(1059): transl_table=11

SEQ ID NO: 121830 - protein, 352 aa, Nostoc punctiforme PCC 73102; identical to SEQ ID NO: 75679

SEQ ID NO: 121831 - DNA, 1089 bp, Haemophilus influenzae R2846; identical to SEQ ID NO: 75680
  CDS (1)..(1089): transl_table=11

SEQ ID NO: 121832 - protein, 362 aa, Haemophilus influenzae R2846; identical to SEQ ID NO: 75681

SEQ ID NO: 121833 - DNA, 1038 bp, Streptococcus suis 89/1591; identical to SEQ ID NO: 75690
  CDS (1)..(1038): transl_table=11

SEQ ID NO: 121834 - protein, 345 aa, Streptococcus suis 89/1591; identical to SEQ ID NO: 75691

SEQ ID NO: 121835 - DNA, 1074 bp, Synechococcus sp. WH 5701; identical to SEQ ID NO: 75698
  CDS (1)..(1074): transl_table=11

SEQ ID NO: 121836 - protein, 357 aa, Synechococcus sp. WH 5701; identical to SEQ ID NO: 75699

SEQ ID NO: 121837 - DNA, 1071 bp, Photobacterium sp. SKA34; identical to SEQ ID NO: 75704
  CDS (1)..(1071): transl_table=11

SEQ ID NO: 121838 - protein, 356 aa, Photobacterium sp. SKA34; identical to SEQ ID NO: 75705

SEQ ID NO: 121839 - DNA, 1068 bp, Oceanospirillum sp. MED92; identical to SEQ ID NO: 75706
  CDS (1)..(1068): transl_table=11

SEQ ID NO: 121840 - protein, 355 aa, Oceanospirillum sp. MED92; identical to SEQ ID NO: 75707

SEQ ID NO: 121841 - DNA, 1068 bp, Oceanobacter sp. RED65; identical to SEQ ID NO: 75712
  CDS (1)..(1068): transl_table=11

SEQ ID NO: 121842 - protein, 355 aa, Oceanobacter sp. RED65; identical to SEQ ID NO: 75713

SEQ ID NO: 121843 - DNA, 1077 bp, marine gamma proteobacterium HTCC2080; identical to SEQ ID NO: 75722
  CDS (1)..(1077): transl_table=11

SEQ ID NO: 121844 - protein, 358 aa, marine gamma proteobacterium HTCC2080; identical to SEQ ID NO: 75723

SEQ ID NO: 121845 - DNA, 1062 bp, Pseudomonas putida GB-1; identical to SEQ ID NO: 75726
  CDS (1)..(1062): transl_table=11

SEQ ID NO: 121846 - protein, 353 aa, Pseudomonas putida GB-1; identical to SEQ ID NO: 75727

SEQ ID NO: 121847 - DNA, 1077 bp, Pseudomonas putida GB-1; identical to SEQ ID NO: 75728
  CDS (1)..(1077): transl_table=11

SEQ ID NO: 121848 - protein, 358 aa, Pseudomonas putida GB-1; identical to SEQ ID NO: 75729

SEQ ID NO: 121849 - DNA, 1077 bp, Marinobacter sp. ELB17; identical to SEQ ID NO: 75732
  CDS (1)..(1077): transl_table=11

SEQ ID NO: 121850 - protein, 358 aa, Marinobacter sp. ELB17; identical to SEQ ID NO: 75733

SEQ ID NO: 121851 - DNA, 1068 bp, Moritella sp. PE36
  CDS (1)..(1068): transl_table=11
atggaaaaagacaccttaaataatgtacatatttgttctgaacaagtattgatgaccccttccgaattaaaagttaaattacctatttcagatcatgcccttggttatatacaaacagcacgtgaaacgattgctaatattattgctggtaaagataaacgtttgcttgtggtgtgtggtccttgctcaatccatgatgacaaagcggcgttagaatatgccggcagattaaaagcactgcatgacgaattaggcgagcagctatatattgttatgcgtgtctattttgaaaaaccacgtaccactgttggctggaaaggcgcgattaatgatccgcacatggatggctcatttgatgttgaaactggtttaatcaatgcgcgtaaactacttattaccctagcggaaatggaaattccaaccgccacggaagcactcgatccaattagcccacaataccttgctgaattattttcttggtctgcgattggcgcgcgtactacagagtcacaaactcaccgtgaaatggcgtctggtctgtctatgcctgttggttttaaaaatggtaccgacggcagtttatcaacggcaatcaatgcgatgaagtctgcatctcattcacatcgcttcatgggtattaatcaagacggtcaagttgcgttactacaaactcagggtaatcctgatggtcacgtgatcttacgtggtggtaaacaaccaaactatgattcagttgccgttgcattagccgagcaagacatggtcaaagcgggtttacgtccaagtttgatggtggattgcagccatgctaattcgaataaaaaccatgaactacaaccgctgatagcgaaaaatgttattcaccagatccaagaaggtaatagttcaatcatgggtgtcatgattgaaagtcatctacatggtggtaatcaatcatcagaacagcctattgctgatatggcatacggtgtatctgtgaccgacgcgtgtattgattgggatacgactgatacattattacgtgaaacagcagcggagctaagcggctgtttgactaaaagaacatag

SEQ ID NO: 121852 - protein, 355 aa, Moritella sp. PE36
MEKDTLNNVHICSEQVLMTPSELKVKLPISDHALGYIQTARETIANIIAGKDKRLLVVCGPCSIHDDKAALEYAGRLKALHDELGEQLYIVMRVYFEKPRTTVGWKGAINDPHMDGSFDVETGLINARKLLITLAEMEIPTATEALDPISPQYLAELFSWSAIGARTTESQTHREMASGLSMPVGFKNGTDGSLSTAINAMKSASHSHRFMGINQDGQVALLQTQGNPDGHVILRGGKQPNYDSVAVALAEQDMVKAGLRPSLMVDCSHANSNKNHELQPLIAKNVIHQIQEGNSSIMGVMIESHLHGGNQSSEQPIADMAYGVSVTDACIDWDTTDTLLRETAAELSGCLTKRT

SEQ ID NO: 121853 - DNA, 1089 bp, Amycolatopsis orientalis; identical to SEQ ID NO: 75736
  CDS (1)..(1089): transl_table=11

SEQ ID NO: 121854 - protein, 362 aa, Amycolatopsis orientalis; identical to SEQ ID NO: 75737

SEQ ID NO: 121855 - DNA, 1074 bp, Vibrio anguillarum; identical to SEQ ID NO: 75738
  CDS (1)..(1074): transl_table=11

SEQ ID NO: 121856 - protein, 357 aa, Vibrio anguillarum; identical to SEQ ID NO: 75739

SEQ ID NO: 121857 - DNA, 1182 bp, Ustilago hordei; identical to SEQ ID NO: 75742
  CDS (1)..(1182)

SEQ ID NO: 121858 - protein, 393 aa, Ustilago hordei; identical to SEQ ID NO: 75743

SEQ ID NO: 121859 - DNA, 1065 bp, Pasteurella piscicida; identical to SEQ ID NO: 75744
  CDS (1)..(1065): transl_table=11

SEQ ID NO: 121860 - protein, 354 aa, Pasteurella piscicida; identical to SEQ ID NO: 75745

SEQ ID NO: 121861 - DNA, 1137 bp, Aspergillus oryzae; identical to SEQ ID NO: 75746
  CDS (1)..(1137)

SEQ ID NO: 121862 - protein, 378 aa, Aspergillus oryzae; identical to SEQ ID NO: 75747

SEQ ID NO: 121863 - DNA, 1095 bp, Aspergillus oryzae; identical to SEQ ID NO: 75748
  CDS (1)..(1095)

SEQ ID NO: 121864 - protein, 364 aa, Aspergillus oryzae; identical to SEQ ID NO: 75749

SEQ ID NO: 121865 - DNA, 1173 bp, Paxillus involutus; identical to SEQ ID NO: 113556
  CDS (1)..(1173)

SEQ ID NO: 121866 - protein, 390 aa, Paxillus involutus; identical to SEQ ID NO: 75751

SEQ ID NO: 121867 - DNA, 1035 bp, Escherichia coli; identical to SEQ ID NO: 75752
  CDS (1)..(1035): transl_table=11

SEQ ID NO: 121868 - protein, 344 aa, Escherichia coli; identical to SEQ ID NO: 75753

SEQ ID NO: 121869 - DNA, 1086 bp, Amycolatopsis methanolica; identical to SEQ ID NO: 75754
  CDS (1)..(1086): transl_table=11

SEQ ID NO: 121870 - protein, 361 aa, Amycolatopsis methanolica; identical to SEQ ID NO: 75755

SEQ ID NO: 121871 - DNA, 1083 bp, Amycolatopsis mediterranei; identical to SEQ ID NO: 75762
  CDS (1)..(1083): transl_table=11

SEQ ID NO: 121872 - protein, 360 aa, Amycolatopsis mediterranei; identical to SEQ ID NO: 75763

SEQ ID NO: 121873 - DNA, 1125 bp, Emericella nidulans; identical to SEQ ID NO: 75764
  CDS (1)..(1125)

SEQ ID NO: 121874 - protein, 374 aa, Emericella nidulans; identical to SEQ ID NO: 75765

SEQ ID NO: 121875 - DNA, 1107 bp, Candida albicans; identical to SEQ ID NO: 75766
  CDS (1)..(1107): transl_table=12

SEQ ID NO: 121876 - protein, 368 aa, Candida albicans; identical to SEQ ID NO: 75767

SEQ ID NO: 121877 - DNA, 1071 bp, Salmonella typhi; identical to SEQ ID NO: 75770
  CDS (1)..(1071): transl_table=11

SEQ ID NO: 121878 - protein, 356 aa, Salmonella typhi; identical to SEQ ID NO: 75771

SEQ ID NO: 121879 - DNA, 1107 bp, Schizosaccharomyces pombe; identical to SEQ ID NO: 75772
  CDS (1)..(1107)

SEQ ID NO: 121880 - protein, 368 aa, Schizosaccharomyces pombe; identical to SEQ ID NO: 75773

SEQ ID NO: 121881 - DNA, 1113 bp, Saccharomyces cerevisiae; identical to SEQ ID NO: 75774
  CDS (1)..(1113)

SEQ ID NO: 121882 - protein, 370 aa, Saccharomyces cerevisiae; identical to SEQ ID NO: 75775

SEQ ID NO: 121883 - DNA, 1113 bp, Candida albicans; identical to SEQ ID NO: 113576
  CDS (1)..(1113): transl_table=12

SEQ ID NO: 121884 - protein, 370 aa, Candida albicans; identical to SEQ ID NO: 75777

SEQ ID NO: 121885 - DNA, 1053 bp, Escherichia coli O157; identical to SEQ ID NO: 113578
  CDS (1)..(1053): transl_table=11

SEQ ID NO: 121886 - protein, 350 aa, Escherichia coli O157; identical to SEQ ID NO: 75287

SEQ ID NO: 121887 - DNA, 1113 bp, Saccharomyces cerevisiae; identical to SEQ ID NO: 75780
  CDS (1)..(1113)

SEQ ID NO: 121888 - protein, 370 aa, Saccharomyces cerevisiae; identical to SEQ ID NO: 75781

SEQ ID NO: 121889 - DNA, 1047 bp, Escherichia coli O157; identical to SEQ ID NO: 75784
  CDS (1)..(1047): transl_table=11

SEQ ID NO: 121890 - protein, 348 aa, Escherichia coli O157; identical to SEQ ID NO: 75785

SEQ ID NO: 121891 - DNA, 1047 bp, Escherichia coli; identical to SEQ ID NO: 75788
  CDS (1)..(1047): transl_table=11

SEQ ID NO: 121892 - protein, 348 aa, Escherichia coli; identical to SEQ ID NO: 75789

SEQ ID NO: 121893 - DNA, 1047 bp, Enterobacter agglomerans; identical to SEQ ID NO: 75790
  CDS (1)..(1047): transl_table=11

SEQ ID NO: 121894 - protein, 348 aa, Enterobacter agglomerans; identical to SEQ ID NO: 75791

SEQ ID NO: 121895 - DNA, 1047 bp, Salmonella typhimurium; identical to SEQ ID NO: 75792
  CDS (1)..(1047): transl_table=11

SEQ ID NO: 121896 - protein, 348 aa, Salmonella typhimurium; identical to SEQ ID NO: 75793

SEQ ID NO: 121897 - DNA, 23 bp, Artificial sequence
  primer
atgcaaaaagacgcgctgaataa

SEQ ID NO: 121898 - DNA, 21 bp, Artificial sequence
  primer
ttaagccacgcgagccgtcag

SEQ ID NO: 121899 - protein, 352 aa, Artificial sequence
  consensus sequence
  Variant (2)..(3): Xaa in position 2 to 3 is any amino acid
  Variant (5)..(6): Xaa in position 5 to 6 is any amino acid
  Variant (8)..(11): Xaa in position 8 to 11 is any amino acid
  Variant (13)..(24): Xaa in position 13 to 24 is any amino acid
  Variant (25)..(25): Xaa in position 25 is any or no amino acid
  Variant (27)..(31): Xaa in position 27 to 31 is any amino acid
  Variant (33)..(36): Xaa in position 33 to 36 is any amino acid
  Variant (38)..(38): Xaa in position 38 is any amino acid
  Variant (39)..(41): Xaa in position 39 to 41 is any or no amino acid
  Variant (44)..(45): Xaa in position 44 to 45 is any amino acid
  Variant (46)..(47): Xaa in position 46 to 47 is any or no amino acid
  Variant (55)..(57): Xaa in position 55 to 57 is any amino acid
  Variant (59)..(60): Xaa in position 59 to 60 is any amino acid
  Variant (63)..(64): Xaa in position 63 to 64 is any amino acid
  Variant (66)..(74): Xaa in position 66 to 74 is any amino acid
  Variant (75)..(76): Xaa in position 75 to 76 is any or no amino acid
  Variant (78)..(80): Xaa in position 78 to 80 is any amino acid
  Variant (83)..(83): Xaa in position 83 is any amino acid
  Variant (85)..(85): Xaa in position 85 is any amino acid
  Variant (91)..(91): Xaa in position 91 is any amino acid
  Variant (103)..(106): Xaa in position 103 to 106 is any amino acid
  Variant (108)..(112): Xaa in position 108 to 112 is any amino acid
  Variant (115)..(117): Xaa in position 115 to 117 is any amino acid
  Variant (119)..(119): Xaa in position 119 is any amino acid
  Variant (121)..(128): Xaa in position 121 to 128 is any amino acid
  Variant (129)..(130): Xaa in position 129 to 130 is any or no amino acid
  Variant (132)..(134): Xaa in position 132 to 134 is any amino acid
  Variant (136)..(136): Xaa in position 136 is any amino acid
  Variant (139)..(141): Xaa in position 139 to 141 is any amino acid
  Variant (144)..(146): Xaa in position 144 to 146 is any amino acid
  Variant (148)..(150): Xaa in position 148 to 150 is any amino acid
  Variant (152)..(152): Xaa in position 152 is any amino acid
  Variant (163)..(163): Xaa in position 163 is any amino acid
  Variant (167)..(167): Xaa in position 167 is any amino acid
  Variant (173)..(173): Xaa in position 173 is any amino acid
  Variant (175)..(175): Xaa in position 175 is any amino acid
  Variant (184)..(187): Xaa in position 184 to 187 is any amino acid
  Variant (189)..(190): Xaa in position 189 to 190 is any amino acid
  Variant (192)..(198): Xaa in position 192 to 198 is any amino acid
  Variant (200)..(200): Xaa in position 200 is any amino acid
  Variant (202)..(205): Xaa in position 202 to 205 is any amino acid
  Variant (206)..(207): Xaa in position 206 to 207 is any or no amino acid
  Variant (209)..(212): Xaa in position 209 to 212 is any amino acid
  Variant (213)..(214): Xaa in position 213 to 214 is any or no amino acid
  Variant (216)..(216): Xaa in position 216 is any amino acid
  Variant (219)..(221): Xaa in position 219 to 221 is any amino acid
  Variant (223)..(224): Xaa in position 223 to 224 is any amino acid
  Variant (229)..(231): Xaa in position 229 to 231 is any amino acid
  Variant (232)..(237): Xaa in position 232 to 237 is any or no amino acid
  Variant (240)..(255): Xaa in position 240 to 255 is any amino acid
  Variant (256)..(266): Xaa in position 256 to 266 is any or no amino acid
  Variant (268)..(268): Xaa in position 268 is any amino acid
  Variant (270)..(270): Xaa in position 270 is any amino acid
  Variant (273)..(273): Xaa in position 273 is any amino acid
  Variant (276)..(276): Xaa in position 276 is any amino acid
  Variant (278)..(281): Xaa in position 278 to 281 is any amino acid
  Variant (283)..(284): Xaa in position 283 to 284 is any amino acid
  Variant (286)..(291): Xaa in position 286 to 291 is any amino acid
  Variant (293)..(295): Xaa in position 293 to 295 is any amino acid
  Variant (297)..(298): Xaa in position 297 to 298 is any amino acid
  Variant (299)..(302): Xaa in position 299 to 302 is any or no amino acid
  Variant (304)..(304): Xaa in position 304 is any amino acid
  Variant (306)..(306): Xaa in position 306 is any amino acid
  Variant (308)..(308): Xaa in position 308 is any amino acid
  Variant (311)..(314): Xaa in position 311 to 314 is any amino acid
  Variant (316)..(316): Xaa in position 316 is any amino acid
  Variant (318)..(322): Xaa in position 318 to 322 is any amino acid
  Variant (323)..(333): Xaa in position 323 to 333 is any or no amino acid
  Variant (336)..(336): Xaa in position 336 is any amino acid
  Variant (338)..(338): Xaa in position 338 is any amino acid
  Variant (341)..(341): Xaa in position 341 is any amino acid
  Variant (343)..(344): Xaa in position 343 to 344 is any amino acid
  Variant (346)..(347): Xaa in position 346 to 347 is any amino acid
  Variant (349)..(351): Xaa in position 349 to 351 is any amino acid
LXXPXXLXXXXPXXXXXXXXXXXXXRXXXXXIXXXXDXXXXRLXXXXGPCSIHDXXXAXXYAXXLXXXXXXXXXXXLXXXMRXYXEKPRTXTVGWKGLINDPXXXXSXXXXXGLXXXRXLXXXXXXXXXXPXXXEXLDXXXPQXXXDXXXWXAIGARTTESQXHREXASGLSXPXGFKNGTDGXXXXAXXAXXXXXXXHXFXXXXXXGXXXXXXTXGNXXXHXXLRGGXXXXXXXXXNYXXXXXXXXXXXXXXXXXXXXXXXXXXXMXDXSHXNSXKXXXXQXXVXXXXXXQXXXGXXXXXXIXGXMXESXXXXGXQXXXXXXXXXXXXXXXXYGXSXTDXCXXWXXTXXXL

SEQ ID NO: 121900 - protein, 39 aa, Artificial sequence
  protein pattern
  Variant (2)..(2): Xaa in position 2 is Phe or Tyr
  Variant (3)..(3): Xaa in position 3 is any amino acid
  Variant (4)..(4): Xaa in position 4 is Ala, Gly, Gln or Ser
  Variant (5)..(5): Xaa in position 5 is Asp or Glu
  Variant (6)..(7): Xaa in position 6 to 7 is any amino acid
  Variant (8)..(8): Xaa in position 8 is Ala, Cys, Gly, Ser or Thr
  Variant (9)..(9): Xaa in position 9 is any amino acid
  Variant (10)..(10): Xaa in position 10 is Ala, Gly, Ser or Thr
  Variant (12)..(14): Xaa in position 12 to 14 is any or no amino acid
  Variant (21)..(21): Xaa in position 21 is any amino acid
  Variant (24)..(24): Xaa in position 24 is Glu or Gln
  Variant (25)..(25): Xaa in position 25 is Leu or Met
  Variant (26)..(26): Xaa in position 26 is Ala, Ser or Val
  Variant (28)..(28): Xaa in position 28 is Ala or Gly
  Variant (29)..(29): Xaa in position 29 is any amino acid
  Variant (31)..(31): Xaa in position 31 is any amino acid
  Variant (32)..(32): Xaa in position 32 is Ala, Pro or Ser
  Variant (33)..(33): Xaa in position 33 is Ile or Val
  Variant (38)..(38): Xaa in position 38 is Ala, Gly or Ser
QXXXXXXXXXAXXXRTTESQXHRXXXSXXSXXXGFKNXT

SEQ ID NO: 121901 - protein, 25 aa, Artificial sequence
  protein pattern
  Variant (7)..(7): Xaa in position 7 is Asn or Ser
  Variant (10)..(10): Xaa in position 10 is any amino acid
  Variant (11)..(11): Xaa in position 11 is Ile, Leu, Met or Val
  Variant (12)..(12): Xaa in position 12 is Asp or Asn
  Variant (13)..(13): Xaa in position 13 is Asp, Glu, Gly, Asn, Gln or Ser
  Variant (14)..(14): Xaa in position 14 is Gly, Ser or Thr
  Variant (15)..(16): Xaa in position 15 to 16 is any amino acid
  Variant (17)..(17): Xaa in position 17 is Ile, Leu or Val
  Variant (18)..(19): Xaa in position 18 to 19 is any amino acid
  Variant (21)..(21): Xaa in position 21 is Ile or Leu
  Variant (22)..(23): Xaa in position 22 to 23 is any amino acid
  Variant (24)..(24): Xaa in position 24 is Ala, Gly or Ser
GWKGLIXDPXXXXXXXXXXGXXXXR

SEQ ID NO: 121902 - protein, 22 aa, Artificial sequence
  protein pattern
  Variant (2)..(3): Xaa in position 2 to 3 is any amino acid
  Variant (4)..(4): Xaa in position 4 is any or no amino acid
  Variant (6)..(6): Xaa in position 6 is any amino acid
  Variant (7)..(7): Xaa in position 7 is any or no amino acid
  Variant (12)..(12): Xaa in position 12 is Ile or Val
  Variant (15)..(16): Xaa in position 15 to 16 is any amino acid
  Variant (17)..(17): Xaa in position 17 is Ala, Gln, Ser or Thr
  Variant (19)..(19): Xaa in position 19 is any amino acid
  Variant (20)..(20): Xaa in position 20 is Ala, Asp or Glu
  Variant (22)..(22): Xaa in position 22 is Ala, Cys, Gly or Ser
RXXXVXXGPCSXHDXXXAXXYX

SEQ ID NO: 121903 - protein, 16 aa, Artificial sequence
  protein pattern
  Variant (2)..(2): Xaa in position 2 is any amino acid
  Variant (3)..(3): Xaa in position 3 is Ile, Leu or Val
  Variant (4)..(4): Xaa in position 4 is any amino acid
  Variant (5)..(5): Xaa in position 5 is Leu or Met
  Variant (7)..(7): Xaa in position 7 is Ala, Cys, Ser or Val
  Variant (9)..(9): Xaa in position 9 is Phe, Leu or Val
  Variant (16)..(16): Xaa in position 16 is Ile, Leu or Val
LXXXXRXYXEKPRTTX

SEQ ID NO: 121904 - protein, 24 aa, Artificial sequence
  protein pattern
  Variant (2)..(2): Xaa in position 2 is any amino acid
  Variant (5)..(5): Xaa in position 5 is Ala or Gly
  Variant (8)..(8): Xaa in position 8 is any amino acid
  Variant (10)..(13): Xaa in position 10 to 13 is any amino acid
  Variant (15)..(16): Xaa in position 15 to 16 is any amino acid
  Variant (18)..(20): Xaa in position 18 to 20 is any amino acid
  Variant (21)..(21): Xaa in position 21 is Ala, Ile, Leu or Val
  Variant (22)..(23): Xaa in position 22 to 23 is any amino acid
DXSHXNSXKXXXXQXXVXXXXXXQ

SEQ ID NO: 121905 - protein, 19 aa, Artificial sequence
  protein pattern
  Variant (3)..(3): Xaa in position 3 is any amino acid
  Variant (5)..(5): Xaa in position 5 is Ile or Val
  Variant (8)..(8): Xaa in position 8 is any amino acid
  Variant (10)..(10): Xaa in position 10 is Ile, Leu, Met or Val
  Variant (11)..(11): Xaa in position 11 is any amino acid
  Variant (13)..(14): Xaa in position 13 to 14 is any amino acid
  Variant (15)..(15): Xaa in position 15 is Ser or Thr
  Variant (16)..(18): Xaa in position 16 to 18 is any amino acid
  Variant (19)..(19): Xaa in position 19 is Phe, Ile, Leu or Val
YGXSXTDXCXXWXXXXXXX

SEQ ID NO: 121906 - protein, 14 aa, Artificial sequence
  protein pattern
  Variant (2)..(2): Xaa in position 2 is any amino acid
  Variant (5)..(6): Xaa in position 5 to 6 is any amino acid
  Variant (7)..(7): Xaa in position 7 is Cys, Gly or Thr
  Variant (8)..(8): Xaa in position 8 is Phe or His
  Variant (9)..(9): Xaa in position 9 is Ile, Leu or Val
  Variant (10)..(10): Xaa in position 10 is Ile or Val
TXGNXXXXXXLRGG

SEQ ID NO: 121907 - protein, 19 aa, Artificial sequence
  protein pattern
  Variant (2)..(2): Xaa in position 2 is Asp, Glu, Asn or Ser
  Variant (3)..(4): Xaa in position 3 to 4 is any amino acid
  Variant (5)..(5): Xaa in position 5 is Ile, Leu or Val
  Variant (6)..(6): Xaa in position 6 is any amino acid
  Variant (8)..(8): Xaa in position 8 is Ile, Leu, Met or Val
  Variant (10)..(10): Xaa in position 10 is any amino acid
  Variant (13)..(13): Xaa in position 13 is any amino acid
  Variant (14)..(14): Xaa in position 14 is Ile or Leu
  Variant (15)..(16): Xaa in position 15 to 16 is any amino acid
  Variant (18)..(18): Xaa in position 18 is any amino acid
GXXXXXGXMXESXXXXGXQ

SEQ ID NO: 121908 - DNA, 2142 bp, Saccharomyces cerevisiae
  CDS (1)..(2142)
atgtcgccctctgccgtacaatcatcaaaactagaagaacagtcaagtgaaattgacaagttgaaagcaaaaatgtcccagtctgccgccactgcgcagcagaagaaggaacatgagtatgaacatttgacttcggtcaagatcgtgccacaacggcccatctcagatagactgcagcccgcaattgctacccactattctccacacttggacgggttgcaggactatcagcgcttgcacaaggagtctattgaagaccctgctaagttcttcggttctaaagctacccaatttttaaactggtctaagccattcgataaggtgttcatcccagaccctaaaacgggcaggccctccttccagaacaatgcatggttcctcaacggccaattaaacgcctgttacaactgtgttgacagacatgccttgaagactcctaacaagaaagccattattttcgaaggtgacgagcctggccaaggctattccattacctacaaggaactacttgaagaagtttgtcaagtggcacaagtgctgacttactctatgggcgttcgcaagggcgatactgttgccgtgtacatgcctatggtcccagaagcaatcataaccttgttggccatttcccgtatcggtgccattcactccgtagtctttgccgggttttcttccaactccttgagagatcgtatcaacgatggggactctaaagttgtcatcactacagatgaatccaacagaggtggtaaagtcattgagactaaaagaattgttgatgacgcgctaagagagaccccaggcgtgagacacgtcttggtttatagaaagaccaacaatccatctgttgctttccatgcccccagagatttggattgggcaacagaaaagaagaaatacaagacctactatccatgcacacccgttgattctgaggatccattattcttgttgtatacgtctggttctactggtgcccccaagggtgttcaacattctaccgcaggttacttgctgggagctttgttgaccatgcgctacacttttgacactcaccaagaagacgttttcttcacagctggagacattggctggattacaggccacacttatgtggtttatggtcccttactatatggttgtgccactttggtctttgaagggactcctgcgtacccaaattactcccgttattgggatattattgatgaacacaaagtcacccaattttatgttgcgccaactgctttgcgtttgttgaaaagagctggtgattcctacatcgaaaatcattccttaaaatctttgcgttgcttgggttcggtcggtgagccaattgctgctgaagtttgggagtggtactctgaaaaaataggtaaaaatgaaatccccattgtagacacctactggcaaacagaatctggttcgcatctggtcaccccgctggctggtggtgttacaccaatgaaaccgggttctgcctcattccccttcttcggtattgatgcagttgttcttgaccctaacactggtgaagaacttaacaccagccacgcagagggtgtccttgccgtcaaagctgcatggccatcatttgcaagaactatttggaaaaatcatgataggtatctagacacttatttgaacccttaccctggctactatttcactggtgatggtgctgcaaaggataaggatggttatatctggattttgggtcgtgtagacgatgtggtgaacgtctctggtcaccgtctgtctaccgctgaaattgaggctgctattatcgaagatccaattgtggccgagtgtgctgttgtcggattcaacgatgacttgactggtcaagcagttgctgcatttgtggtgttgaaaaacaaatctagttggtccaccgcaacagatgatgaattacaagatatcaagaagcatttggtctttactgttagaaaagacatcgggccatttgccgcaccaaaattgatcattttagtggatgacttgcccaagacaagatccggcaaaattatgagacgtattttaagaaaaatcctagcaggagaaagtgaccaactaggcgacgtttctacattgtcaaaccctggcattgttagacatctaattgattcggtcaagttgtaa

SEQ ID NO: 121909 - protein, 713 aa, Saccharomyces cerevisiae
MSPSAVQSSKLEEQSSEIDKLKAKMSQSAATAQQKKEHEYEHLTSVKIVPQRPISDRLQPAIATHYSPHLDGLQDYQRLHKESIEDPAKFFGSKATQFLNWSKPFDKVFIPDPKTGRPSFQNNAWFLNGQLNACYNCVDRHALKTPNKKAIIFEGDEPGQGYSITYKELLEEVCQVAQVLTYSMGVRKGDTVAVYMPMVPEAIITLLAISRIGAIHSVVFAGFSSNSLRDRINDGDSKVVITTDESNRGGKVIETKRIVDDALRETPGVRHVLVYRKTNNPSVAFHAPRDLDWATEKKKYKTYYPCTPVDSEDPLFLLYTSGSTGAPKGVQHSTAGYLLGALLTMRYTFDTHQEDVFFTAGDIGWITGHTYVVYGPLLYGCATLVFEGTPAYPNYSRYWDIIDEHKVTQFYVAPTALRLLKRAGDSYIENHSLKSLRCLGSVGEPIAAEVWEWYSEKIGKNEIPIVDTYWQTESGSHLVTPLAGGVTPMKPGSASFPFFGIDAVVLDPNTGEELNTSHAEGVLAVKAAWPSFARTIWKNHDRYLDTYLNPYPGYYFTGDGAAKDKDGYIWILGRVDDVVNVSGHRLSTAEIEAAIIEDPIVAECAVVGFNDDLTGQAVAAFVVLKNKSSWSTATDDELQDIKKHLVFTVRKDIGPFAAPKLIILVDDLPKTRSGKIMRRILRKILAGESDQLGDVSTLSNPGIVRHLIDSVKL

SEQ ID NO: 121910 - DNA, 2127 bp, Arabidopsis thaliana
  CDS (1)..(2127)
atgtcgtctaattccctgaggcatgtcgagtccatgtcccagctaccctcaggtgccggaaagatctctcaattaaacgccgtcgtgttaggagaatcccttgcatcggaggagaatgatctcgtctttcccagcaaggaattctccggccaggctcttgtttcctcccctcaacagtacatggaaatgcataagaggtcgatggatgaccctgctgctttttggtctgatattgcgtctgagttttactggaagcagaaatggggtgaccaagtgttttccgagaatctcgatgtcaggaagggtcctattagcatcgagaaaatgtttcgtcgtgatgacatgtctgggatcatgtatgaccagtggtttaaagggggaatcaccaatatttgctacaactgtttggacaaaaacgttgaagctggtttgggtgataaaacagccatacactgggaaggaaatgaacttggggtagatgcttccttaacttattctgagttgctccaacgagtttgccagcttgctaattacttgaaagataatggagtgaagaagggtgatgctgttgtaatttatttacctatgttgatggaacttcccatcgctatgcttgcatgtgcaaggatcggagctgttcattcggtcgtttttgctggattttctgcggactctcttgcccaaagaatcgttgattgcaagccaaatgtaatactgacttgcaatgctgttaaaagaggccctaagaccataaaccttaaagctattgttgatgctgcacttgaccaatcttctaaagatggagtctctgtaggcatatgcttgacctatgacaactcattagcgacaacaagggaaaacactaaatggcagaatggaagagatgtgtggtggcaggatgttatttctcaatatccaacatcgtgtgaggtggaatgggttgatgcagaagatcccctgtttttgctctacaccagtggaagtactgggaagccaaagggtgtcctacacacaactggagggtatatgatctacactgctacaacgttcaaatatgcatttgactacaaatcaacagatgtatactggtgtacagcagattgtggttggataactggccatagctatgttacttatggaccaatgcttaatggagccactgttgttgtctttgagggggctccaaactaccctgaccctggacgctgttgggatattgttgacaaatacaaggtttcaatattttatactgccccaacattggtgaggtctctcatgcgcgatgacgataagtttgtaacacgtcactcgcgcaaatcgctgcgggtccttggaagtgttggtgagcccatcaatcctagtgcctggagatggttcttcaatgtagtcggtgattcaaggtgtcccatttcagatacgtggtggcaaactgaaactggtggcttcatgataaccccattgccaggtgcttggccccagaaacctggttcagccactttccctttctttggtgttcagcctgtcatagttgatgaaaagggcaatgaaatcgaaggcgagtgtagtggttatctttgtgtcaaaggttcatggcccggggcgtttcgaactctgtttggggatcatgaaagatacgaaaccacatactttaaaccttttgccggatattatttcagtggtgatggttgcagcagagacaaggatggttactactggcttacagggagggttgatgatgttatcaacgtcagtggccatcgaatcggaactgctgaagtagaatctgctctggttttacaccctcaatgtgcagaagcagctgttgtaggcatagaacatgaggtaaaaggtcagggaatttatgcgtttgtcactcttctggaaggtgttccttacagcgaggagcttcgtaaaagcctagtactaatggtccgaaatcagattggggcttttgcagcaccggacagaatacattgggcaccagggttgccaaagacgagaagcggaaagataatgaggagaatcttgagaaagattgcttcgaggcaattagaagaactcggagatactagcacactcgcggatcctagtgtagttgatcagcttattgcacttgccgatgtgtga

SEQ ID NO: 121911 - protein, 708 aa, Arabidopsis thaliana
MSSNSLRHVESMSQLPSGAGKISQLNAVVLGESLASEENDLVFPSKEFSGQALVSSPQQYMEMHKRSMDDPAAFWSDIASEFYWKQKWGDQVFSENLDVRKGPISIEKMFRRDDMSGIMYDQWFKGGITNICYNCLDKNVEAGLGDKTAIHWEGNELGVDASLTYSELLQRVCQLANYLKDNGVKKGDAVVIYLPMLMELPIAMLACARIGAVHSVVFAGFSADSLAQRIVDCKPNVILTCNAVKRGPKTINLKAIVDAALDQSSKDGVSVGICLTYDNSLATTRENTKWQNGRDVWWQDVISQYPTSCEVEWVDAEDPLFLLYTSGSTGKPKGVLHTTGGYMIYTATTFKYAFDYKSTDVYWCTADCGWITGHSYVTYGPMLNGATVVVFEGAPNYPDPGRCWDIVDKYKVSIFYTAPTLVRSLMRDDDKFVTRHSRKSLRVLGSVGEPINPSAWRWFFNVVGDSRCPISDTWWQTETGGFMITPLPGAWPQKPGSATFPFFGVQPVIVDEKGNEIEGECSGYLCVKGSWPGAFRTLFGDHERYETTYFKPFAGYYFSGDGCSRDKDGYYWLTGRVDDVINVSGHRIGTAEVESALVLHPQCAEAAVVGIEHEVKGQGIYAFVTLLEGVPYSEELRKSLVLMVRNQIGAFAAPDRIHWAPGLPKTRSGKIMRRILRKIASRQLEELGDTSTLADPSVVDQLIALADV

SEQ ID NO: 121912 - DNA, 2127 bp, Arabidopsis thaliana; identical to SEQ ID NO: 121910
  CDS (34)..(2127)

SEQ ID NO: 121913 - protein, 697 aa, Arabidopsis thaliana
MSQLPSGAGKISQLNAVVLGESLASEENDLVFPSKEFSGQALVSSPQQYMEMHKRSMDDPAAFWSDIASEFYWKQKWGDQVFSENLDVRKGPISIEKMFRRDDMSGIMYDQWFKGGITNICYNCLDKNVEAGLGDKTAIHWEGNELGVDASLTYSELLQRVCQLANYLKDNGVKKGDAVVIYLPMLMELPIAMLACARIGAVHSVVFAGFSADSLAQRIVDCKPNVILTCNAVKRGPKTINLKAIVDAALDQSSKDGVSVGICLTYDNSLATTRENTKWQNGRDVWWQDVISQYPTSCEVEWVDAEDPLFLLYTSGSTGKPKGVLHTTGGYMIYTATTFKYAFDYKSTDVYWCTADCGWITGHSYVTYGPMLNGATVVVFEGAPNYPDPGRCWDIVDKYKVSIFYTAPTLVRSLMRDDDKFVTRHSRKSLRVLGSVGEPINPSAWRWFFNVVGDSRCPISDTWWQTETGGFMITPLPGAWPQKPGSATFPFFGVQPVIVDEKGNEIEGECSGYLCVKGSWPGAFRTLFGDHERYETTYFKPFAGYYFSGDGCSRDKDGYYWLTGRVDDVINVSGHRIGTAEVESALVLHPQCAEAAVVGIEHEVKGQGIYAFVTLLEGVPYSEELRKSLVLMVRNQIGAFAAPDRIHWAPGLPKTRSGKIMRRILRKIASRQLEELGDTSTLADPSVVDQLIALADV

SEQ ID NO: 121914 - DNA, 2516 bp, Oryza sativa
  CDS (102)..(2219)
gagcagcagcagcagccgcgcccccacacctcgcctcctcctcggcttggatctcgccgcatcatctgccgccgacgacgacgaagaggaagacgaccgccatggggacggcgagcggggaccagccggcaggggcgtcgtcggacaagctgcggcacgtggagtccatgtcggagctgccctccggcgccggcaggatctccgggatcaacgccgtcgtcctcggcgagtcactcgccgccgaggagcacgacctcgtctacccctccgccgagttctccgccgacgccctcgtcccctcccccaagaagtaccaaaagatgtatgagaggtcaatcaacgacccggccgggttctggtcggagatcgccgacgccttctactggaaggagaagtggaaccccagtgaggtctgctccgagaacctcgacgtcaccaaggggcctgtccagatcagttggttcaaaggtggcaaaacaaacatatgttacaatgctgttgatcgcaacgtcgaggctgggaacggagacaagatcgcgatgtattgggagggcaatgagcctggtcaggatgggaagctcacctattcagagctcttggacagggtttgccagcttgccaattacttgaagagtgttggtgtcggcaagggtgatgctgtgatcatctacttaccaatgttgctggagcttcccattgccatgcttgcttgtgcccgcattggtgctgttcactcggttgtatttgctggcttttctgcggattccctggcccaaaggatcgttgattgcaagcctaagcttgtgatcacttgcaatgcagtcaaaagaggggtgaagcccatccttctgaaagatatagtggatgctggtctggctgaaagtgagaaacaaggagtcgctgtaggtctatgtttgacatatgaaaatcagtcagcaatgaagagagaagacacaaaatggcaagcaggaaggggtgtttggtggcaggatgttgtgaccagtttcccaaccaagtgcgatgtagaatgggtggatgcagaggacccattgttccttctgtacacaagtggcagtacaggaaagccaaagggtgtgttgcatactactgggggctacatggtttacagtgcaacaacatttaagtatgcatttgattacaagccgtcggacatatactggtgcactgcagactgtggctggattactggacacagctatgtgacgtatggtccactcctgaatggagcaacagttctcgtttttgaagggactccaaattaccctgattctggtcggtgctgggacattgtggacaagtacaaggtgacaatattttacactgcaccaacactcgttcgatcactcatgcgtgatggcaccgagtatgttacacgtcactctcgaaaatctcttcgagtcttgggaagtgttggtgagccaattaatcctagcgcatggagatggttctacaatattgtcggggactctcgatgccctatctccgacacctggtggcagactgaaactggtggcttcatgatcactcctttacctggcgcctggcctcaaaaaccaggttctgcaacctttcctttctttggtgttcagcctgtcattgttgatgagaaagggaaggagattgaaggagaatgcagtggatatctttgcataaagaaatcatggcctggggctttccggactctctatggagatcatgatagatatgagaccacttacttcaagccatttgctggctactattttactggggatggttgcagcagggacaaagacggttaccactggctgactggaagagtagatgatgtcatcaatgtcagtggacaccggattggtacagcagaggttgagtctgcgttggtttcacacccaaagtgtgcagaggctgctgttgttgctgttgagcatgaagtgaaaggtcaaggaatatatgcttttgtaactttggtggatggtgttccttatagtgaagaactacggaaaagcctcatattgacagtccgcaaccagattggggcatttgcagctcctgacaagatccactgggcaccaggacttcctaaaacgagaagcggtaagataatgcgcaggattctgcgcaaaattgcctcaaaacagctggatgaacttggtgacacaagcacccttgctgatcctggcgtcgttgaccagctgattgcgctcaaagattgctagattgtaaaaattagatgacagatgcacttccactgatgcttgtgcgttccatttctcttcctatatgatggagatgcactttctcttcctacattttagtgtccatagtctttcgtttattcggtggaagttgctcctggtctagggaactgaaacacgatatggaatgatctgagagtgtggtgttggacttctgtatacttgtgttacacattgagatgacttgctccatgaatgtatttgatggacgcaataaatccatttcaataaaatattttgtatgattttccccgttct

SEQ ID NO: 121915 - protein, 705 aa, Oryza sativa
MGTASGDQPAGASSDKLRHVESMSELPSGAGRISGINAVVLGESLAAEEHDLVYPSAEFSADALVPSPKKYQKMYERSINDPAGFWSEIADAFYWKEKWNPSEVCSENLDVTKGPVQISWFKGGKTNICYNAVDRNVEAGNGDKIAMYWEGNEPGQDGKLTYSELLDRVCQLANYLKSVGVGKGDAVIIYLPMLLELPIAMLACARIGAVHSVVFAGFSADSLAQRIVDCKPKLVITCNAVKRGVKPILLKDIVDAGLAESEKQGVAVGLCLTYENQSAMKREDTKWQAGRGVWWQDVVTSFPTKCDVEWVDAEDPLFLLYTSGSTGKPKGVLHTTGGYMVYSATTFKYAFDYKPSDIYWCTADCGWITGHSYVTYGPLLNGATVLVFEGTPNYPDSGRCWDIVDKYKVTIFYTAPTLVRSLMRDGTEYVTRHSRKSLRVLGSVGEPINPSAWRWFYNIVGDSRCPISDTWWQTETGGFMITPLPGAWPQKPGSATFPFFGVQPVIVDEKGKEIEGECSGYLCIKKSWPGAFRTLYGDHDRYETTYFKPFAGYYFTGDGCSRDKDGYHWLTGRVDDVINVSGHRIGTAEVESALVSHPKCAEAAVVAVEHEVKGQGIYAFVTLVDGVPYSEELRKSLILTVRNQIGAFAAPDKIHWAPGLPKTRSGKIMRRILRKIASKQLDELGDTSTLADPGVVDQLIALKDC

SEQ ID NO: 121916 - DNA, 2007 bp, Zea mays
  CDS (79)..(1977)
gaggagaacgacctcatcgtccccagccccgagttctctgccagcgccctcgtctcttctccgaaacagtatcgcgagatgtatgagaggtccattaaggacccggccgggttctggtcggagattgccgagaccttttactggaaggagaagtggaaccccgccgaggtctgctcggagaacctcgatgtcaccaagggacccgtccagatcaactggttcaagggagggaaaaccaacatatgttacaacgctgttgaccgcaacatcgagtctggcaatggcgacaaggttgcaatgtactgggagggtaatgagcccggtcaggatgggaagcttacctattccgagctcctggagaaggtttgccagcttgcaaattacttgaagagccttggtgtcggcaagggtgatgctgttattatatacctaccaatgttgctggagcttcccattgccatgcttgcctgtgcccgcattggtgccgttcactcggttgtgtttgctggcttctcagcagattcgctagctcaaaggattgtcgattgcaagcctaagcttgtcatcacgtgcaatgctgtgaagcggggagtcaagcccatctttctcaaagatatagtggatgcagctttggttgaaagtgagaagaatggagtctctgtaggtctctgtttgacgtatgaaaaccagtcagccatgaagagggaaaacacaaaatggcaagcagaaagggatgtttggtggcaggacgttgtcacaaaatttccaaccaaatgtgatgtggagtgggtggatgcagaggatccattgttccttttgtacacaagtggcagcacagggaagccaaagggtgtactgcatacttctgggggctacatggtgtacactgcaacaacatttaagtacgcatttgactacaagccaactgacatatactggtgcactgcagactgtggctggattactggacatagttatgtaacatatggtcctctcctgaatggtgctacggttctcgtttttgaagggacgccgaactaccctgattcgggccgatgctgggatattgtggacaagtacaatgtgacaatattttatactgccccaactcttgttcgttcactcatgcgtgatggcactgagtatgttacacgttactctcgaaagtctctccgagtcctgggaagtgttggtgagccaatcaatcctagtgcatggagatggttctacaatactgttggggattcccggtgccctatatcagacacctggtggcaaactgaaactggcggtttcatgatcacccctttgcctggcgcctggcctcaaaaaccaggttctgcaacctttcctttctttggtgttcagccggtcattgttgacgagaaagggcaagagattgaaggggaatgtagtggatatctttgcataaagaaatcatggcctggggctttccggactctgtatggagatcatgagagatacgagaccacgtacttcaaaccatttgctgggtactatttcactggtgatggttgcagcagagacaaagatggttaccactggctgactggaagagtagatgatgtcatcaatgtcagtggacaccgaatcggcacagcagaggttgagtcagctttagtgtcacatccacagtgtgcagaggctgctgttgttggtgttgagcatgaggtcaaaggtcaaggaatttatgcttttgtaactttggtggatggtgttccgtatagtgaggaactacgaaaaagcctcataatgacagtgcgcaaccagattggggcatttgcagctcctgacaagatccactgggcaccgggacttcctaaaacccggagtggcaagatcatgcgaaggattttgcgcaagattgctgcacggcaactggatgaacttggggacataagcaccctcgctgaacctgctgtagttgaccagcttatttcgctcagcaattgttaggttgcaacgtaattggatggtggatacatc

SEQ ID NO: 121917 - protein, 632 aa, Zea mays
MYERSIKDPAGFWSEIAETFYWKEKWNPAEVCSENLDVTKGPVQINWFKGGKTNICYNAVDRNIESGNGDKVAMYWEGNEPGQDGKLTYSELLEKVCQLANYLKSLGVGKGDAVIIYLPMLLELPIAMLACARIGAVHSVVFAGFSADSLAQRIVDCKPKLVITCNAVKRGVKPIFLKDIVDAALVESEKNGVSVGLCLTYENQSAMKRENTKWQAERDVWWQDVVTKFPTKCDVEWVDAEDPLFLLYTSGSTGKPKGVLHTSGGYMVYTATTFKYAFDYKPTDIYWCTADCGWITGHSYVTYGPLLNGATVLVFEGTPNYPDSGRCWDIVDKYNVTIFYTAPTLVRSLMRDGTEYVTRYSRKSLRVLGSVGEPINPSAWRWFYNTVGDSRCPISDTWWQTETGGFMITPLPGAWPQKPGSATFPFFGVQPVIVDEKGQEIEGECSGYLCIKKSWPGAFRTLYGDHERYETTYFKPFAGYYFTGDGCSRDKDGYHWLTGRVDDVINVSGHRIGTAEVESALVSHPQCAEAAVVGVEHEVKGQGIYAFVTLVDGVPYSEELRKSLIMTVRNQIGAFAAPDKIHWAPGLPKTRSGKIMRRILRKIAARQLDELGDISTLAEPAVVDQLISLSNC

SEQ ID NO: 121918 - DNA, 2005 bp, Zea mays
  CDS (77)..(1975)
ccccggcatcctcgtccaccccagcgccgacttcgccgcccaggcgctcgtctcgtccacgcaacagtaccgagatatgtaccaaaagtcgatcgacgacccagctggtttctggtcggaaatcgcagatgagttctactggaagcagaagtggagccctgataatgtttgcgctgagaaccttgacgtgaccaaggggccgatcatgattgaatggtttaaggggggaaagaccaacatatgctacaatgcagtggaccgcaatgtggaggcagggaatggggacaagatcgccatgtactgggaggggaatgagcccagtcaggatgggaagctcacctactctgaactgctggaaaaggtttgccagctgtcaaattacttgaaaagcgtcggcgtacgaaagggtgatgccgtggtgatctacctaccaatgttgatggagctgccgattgcaatgcttgcttgtgctcgcattggtgttgttcactcggttgtgtttgctggcttctcagcagatgcactggcccaacgagtcattgattgcaagcctaaggttgttattacctgcaatgctgtgaaaagggggatgaaaatcatccctctcaaagatatagtagatgcatctctggatcaaagtgcaaagaatggagttgatgtaggcatttgcttgacatatgaaaatcagtccgctctgaataaagtagacactcgacggaaaacaggaagagatgtctggtggcaggatgttgtgcctgatttcccaactaaatgcgatgtggaatgggttgatgcagaggatccactgtttcttttgtacacaagtggcagcacaggaaagccaaagggtgtgttgcatacaactgggggatatatggtctactctgctacaacatttaagcatgcatttgactacaaaccaacagatatatactggtgcactgcagattgtggctggattactggacatagttatgtgacatatggtccactattgaatggagccacagttcttgttttcgaaggggccccaaattaccctgatcctggccgctgttgggacattgttgataaatatggagtgacaatattttatactgcaccaacacttatacgctcacttatgcgtgatggtactgagtatgttgctcggtactctcgcaagtctctccgagtacttggaagtgtgggtgagccaatcaaccccaccgcatggaggtggttttatgatgttattggtgactcacgatgccccatatcagatacttggtggcagactgaaactgggggattcatgatcactcctttacctggtgcttggcctcaaaagcctggatcggcaacgtttcctttcttcggtgtgcagccagtcattgttgacgagaaaggtcgggaaatggaaggagaatgcagtggatatctttgcataaagaaatcatggcctggggctttccggactctgtatggagataaagagagatatgagacgacatacttcaaaccatttgctggatattatttctcgggcgatggctgcagcagggataaagatggctaccactggctgactggaagagttgatgatgttatcaatgttagtggacaccggattgggacagcggaagttgagtctgctctggtttcacatccaaaatgtgctgaggctgctgttgttggtattgatcatgaggttaaaggtcagggaatatatgcttttgtgactttggtggatggtgttccctacagtgatgatctacggaaaagcctcgttacgacggtccgcagtcagattggtgcttttgctgctcctgaaaagattcattgggcacctgggctccctaagacacgaagtgggaagatcatgcgaagaatcttaagaaaaatcgcatccaggcaactagatgagctcggcgacacgagcacgcttgctgaccccggtgttgtggaccagctgattgcactcagtgacagctaatctatcggctatgtgggagggggtgagaca

SEQ ID NO: 121919 - protein, 632 aa, Zea mays
MYQKSIDDPAGFWSEIADEFYWKQKWSPDNVCAENLDVTKGPIMIEWFKGGKTNICYNAVDRNVEAGNGDKIAMYWEGNEPSQDGKLTYSELLEKVCQLSNYLKSVGVRKGDAVVIYLPMLMELPIAMLACARIGVVHSVVFAGFSADALAQRVIDCKPKVVITCNAVKRGMKIIPLKDIVDASLDQSAKNGVDVGICLTYENQSALNKVDTRRKTGRDVWWQDVVPDFPTKCDVEWVDAEDPLFLLYTSGSTGKPKGVLHTTGGYMVYSATTFKHAFDYKPTDIYWCTADCGWITGHSYVTYGPLLNGATVLVFEGAPNYPDPGRCWDIVDKYGVTIFYTAPTLIRSLMRDGTEYVARYSRKSLRVLGSVGEPINPTAWRWFYDVIGDSRCPISDTWWQTETGGFMITPLPGAWPQKPGSATFPFFGVQPVIVDEKGREMEGECSGYLCIKKSWPGAFRTLYGDKERYETTYFKPFAGYYFSGDGCSRDKDGYHWLTGRVDDVINVSGHRIGTAEVESALVSHPKCAEAAVVGIDHEVKGQGIYAFVTLVDGVPYSDDLRKSLVTTVRSQIGAFAAPEKIHWAPGLPKTRSGKIMRRILRKIASRQLDELGDTSTLADPGVVDQLIALSDS

SEQ ID NO: 121920 - DNA, 2082 bp, Arabidopsis thaliana
  CDS (1)..(2082)
atgtcgtctaattccctgaggcatgtcgagtccatgtcccagctaccctcaggtgccggaaagatctctcaattaaacgccgtcgtgttaggagaatcccttgcatcggaggagaatgatctcgtctttcccagcaaggaattctccggccaggctcttgtttcctcccctcaacagtacatggaaatgcataagaggtcgatggatgaccctgctgctttttggtctgatattgcgtctgagttttactggaagcagaaatggggtgaccaagtgttttccgagaatctcgatgtcaggaagggtcctattagcatcgagtggtttaaagggggaatcaccaatatttgctacaactgtttggacaaaaacgttgaagctggtttgggtgataaaacagccatacactgggaaggaaatgaacttggggtagatgcttccttaacttattctgagttgctccaacgagtttgccagcttgctaattacttgaaagataatggagtgaagaagggtgatgctgttgtaatttatttacctatgttgatggaacttcccatcgctatgcttgcatgtgcaaggatcggagctgttcattcggtcgtttttgctggattttctgcggactctcttgcccaaagaatcgttgattgcaagccaaatgtaatactgacttgcaatgctgttaaaagaggccctaagaccataaaccttaaagctattgttgatgctgcacttgaccaatcttctaaagatggagtctctgtaggcatatgcttgacctatgacaactcattagcgacaacaagggaaaacactaaatggcagaatggaagagatgtgtggtggcaggatgttatttctcaatatccaacatcgtgtgaggtggaatgggttgatgcagaagatcccctgtttttgctctacaccagtggaagtactgggaagccaaagggtgtcctacacacaactggagggtatatgatctacactgctacaacgttcaaatatgcatttgactacaaatcaacagatgtatactggtgtacagcagattgtggttggataactggccatagctatgttacttatggaccaatgcttaatggagccactgttgttgtctttgagggggctccaaactaccctgaccctggacgctgttgggatattgttgacaaatacaaggtttcaatattttatactgccccaacattggtgaggtctctcatgcgcgatgacgataagtttgtaacacgtcactcgcgcaaatcgctgcgggtccttggaagtgttggtgagcccatcaatcctagtgcctggagatggttcttcaatgtagtcggtgattcaaggtgtcccatttcagatacgtggtggcaaactgaaactggtggcttcatgataaccccattgccaggtgcttggccccagaaacctggttcagccactttccctttctttggtgttcagcctgtcatagttgatgaaaagggcaatgaaatcgaaggcgagtgtagtggttatctttgtgtcaaaggttcatggcccggggcgtttcgaactctgtttggggatcatgaaagatacgaaaccacatactttaaaccttttgccggatattatttcagtggtgatggttgcagcagagacaaggatggttactactggcttacagggagggttgatgatgttatcaacgtcagtggccatcgaatcggaactgctgaagtagaatctgctctggttttacaccctcaatgtgcagaagcagctgttgtaggcatagaacatgaggtaaaaggtcagggaatttatgcgtttgtcactcttctggaaggtgttccttacagcgaggagcttcgtaaaagcctagtactaatggtccgaaatcagattggggcttttgcagcaccggacagaatacattgggcaccagggttgccaaagacgagaagcggaaagataatgaggagaatcttgagaaagattgcttcgaggcaattagaagaactcggagatactagcacactcgcggatcctagtgtagttgatcagcttattgcacttgccgatgtgtga

SEQ ID NO: 121921 - protein, 693 aa, Arabidopsis thaliana
MSSNSLRHVESMSQLPSGAGKISQLNAVVLGESLASEENDLVFPSKEFSGQALVSSPQQYMEMHKRSMDDPAAFWSDIASEFYWKQKWGDQVFSENLDVRKGPISIEWFKGGITNICYNCLDKNVEAGLGDKTAIHWEGNELGVDASLTYSELLQRVCQLANYLKDNGVKKGDAVVIYLPMLMELPIAMLACARIGAVHSVVFAGFSADSLAQRIVDCKPNVILTCNAVKRGPKTINLKAIVDAALDQSSKDGVSVGICLTYDNSLATTRENTKWQNGRDVWWQDVISQYPTSCEVEWVDAEDPLFLLYTSGSTGKPKGVLHTTGGYMIYTATTFKYAFDYKSTDVYWCTADCGWITGHSYVTYGPMLNGATVVVFEGAPNYPDPGRCWDIVDKYKVSIFYTAPTLVRSLMRDDDKFVTRHSRKSLRVLGSVGEPINPSAWRWFFNVVGDSRCPISDTWWQTETGGFMITPLPGAWPQKPGSATFPFFGVQPVIVDEKGNEIEGECSGYLCVKGSWPGAFRTLFGDHERYETTYFKPFAGYYFSGDGCSRDKDGYYWLTGRVDDVINVSGHRIGTAEVESALVLHPQCAEAAVVGIEHEVKGQGIYAFVTLLEGVPYSEELRKSLVLMVRNQIGAFAAPDRIHWAPGLPKTRSGKIMRRILRKIASRQLEELGDTSTLADPSVVDQLIALADV

SEQ ID NO: 121922 - DNA, 2118 bp, Oryza sativa (japonica cultivar-group)
  CDS (1)..(2118)
atggggacggcgagcggggaccagccggcaggggcgtcgtcggacaagctgcggcacgtggagtccatgtcggagctgccctccggcgccggcaggatctccgggatcaacgccgtcgtcctcggcgagtcactcgccgccgaggagcacgacctcgtctacccctccgccgagttctccgccgacgccctcgtcccctcccccaagaagtaccaaaagatgtatgagaggtcaatcaacgacccggccgggttctggtcggagatcgccgacgccttctactggaaggagaagtggaaccccagtgaggtctgctccgagaacctcgacgtcaccaaggggcctgtccagatcagttggttcaaaggtggcaaaacaaacatatgttacaatgctgttgatcgcaacgtcgaggctgggaacggagacaagatcgcgatgtattgggagggcaatgagcctggtcaggatgggaagctcacctattcagagctcttggacagggtttgccagcttgccaattacttgaagagtgttggtgtcggcaagggtgatgctgtgatcatctacttaccaatgttgctggagcttcccattgccatgcttgcttgtgcccgcattggtgctgttcactcggttgtatttgctggcttttctgcggattccctggcccaaaggatcgttgattgcaagcctaagcttgtgatcacttgcaatgcagtcaaaagaggggtgaagcccatccttctgaaagatatagtggatgctggtctggctgaaagtgagaaacaaggagtcgctgtaggtctatgtttgacatatgaaaatcagtcagcaatgaagagagaagacacaaaatggcaagcaggaagggatgtttggtggcaggatgttgtgaccagtttcccaaccaagtgcgatgtagaatgggtggatgcagaggacccattgttccttctgtacacaagtggcagtacaggaaagccaaagggtgtgttgcatactactgggggctacatggtttacagtgcaacaacatttaagtatgcatttgattacaagccgtcggacatatactggtgcactgcagactgtggctggattactggacacagctatgtgacgtatggtccactcctgaatggagcaacagttctcgtttttgaagggactccaaattaccctgattctggtcggtgctgggacattgtggacaagtacaaggtgacaatattttacactgcaccaacactcgttcgatcactcatgcgtgatggcaccgagtatgttacacgtcactctcgaaaatctcttcgagtcttgggaagtgttggtgagccaattaatcctagcgcatggagatggttctacaatattgtcggggactctcgatgccctatctccgacacctggtggcagactgaaactggtggcttcatgatcactcctttacctggcgcctggcctcaaaaaccaggttctgcaacctttcctttctttggtgttcagcctgtcattgttgatgagaaagggaaggagattgaaggagaatgcagtggatatctttgcataaagaaatcatggcctggggctttccggactctctatggagatcatgatagatatgagaccacttacttcaagccatttgctggctactattttactggggatggttgcagcagggacaaagacggttaccactggctgactggaagagtagatgatgtcatcaatgtcagtggacaccggattggtacagcagaggttgagtctgcgttggtttcacacccaaagtgtgcagaggctgctgttgttgctgttgagcatgaagtgaaaggtcaaggaatatatgcttttgtaactttggtggatggtgttccttatagtgaagaactacggaaaagcctcatattgacagtccgcaaccagattggggcatttgcagctcctgacaagatccactgggcaccaggacttcctaaaacgagaagcggtaagataatgcgcaggattctgcgcaaaattgcctcaaaacagctggatgaacttggtgacacaagcacccttgctgatcctggcgtcgttgaccagctgattgcgctcaaagattgctag

SEQ ID NO: 121923 - protein, 705 aa, Oryza sativa (japonica cultivar-group)
MGTASGDQPAGASSDKLRHVESMSELPSGAGRISGINAVVLGESLAAEEHDLVYPSAEFSADALVPSPKKYQKMYERSINDPAGFWSEIADAFYWKEKWNPSEVCSENLDVTKGPVQISWFKGGKTNICYNAVDRNVEAGNGDKIAMYWEGNEPGQDGKLTYSELLDRVCQLANYLKSVGVGKGDAVIIYLPMLLELPIAMLACARIGAVHSVVFAGFSADSLAQRIVDCKPKLVITCNAVKRGVKPILLKDIVDAGLAESEKQGVAVGLCLTYENQSAMKREDTKWQAGRDVWWQDVVTSFPTKCDVEWVDAEDPLFLLYTSGSTGKPKGVLHTTGGYMVYSATTFKYAFDYKPSDIYWCTADCGWITGHSYVTYGPLLNGATVLVFEGTPNYPDSGRCWDIVDKYKVTIFYTAPTLVRSLMRDGTEYVTRHSRKSLRVLGSVGEPINPSAWRWFYNIVGDSRCPISDTWWQTETGGFMITPLPGAWPQKPGSATFPFFGVQPVIVDEKGKEIEGECSGYLCIKKSWPGAFRTLYGDHDRYETTYFKPFAGYYFTGDGCSRDKDGYHWLTGRVDDVINVSGHRIGTAEVESALVSHPKCAEAAVVAVEHEVKGQGIYAFVTLVDGVPYSEELRKSLILTVRNQIGAFAAPDKIHWAPGLPKTRSGKIMRRILRKIASKQLDELGDTSTLADPGVVDQLIALKDC

SEQ ID NO: 121924 - DNA, 2001 bp, Vibrio cholerae O1 biovar eltor str. N16961
  CDS (1)..(2001): transl_table=11
ttgaaacgcgccctttcaggaaatttgccgaattcacaaggagaacccgtaatgagtgaagcccatatttatccggtcaaacagaacatcaaagcgcatacgcatgccgataacgacacctatctggcgatgtatcaacagtccatcaaagatccggaaggcttttggagcgaacacggcaaaatcgtcgactggattaaacctttcaccaaggtgaaacacacctcttttgacccagggcacatcgatatccgctggtttgaagatggcacgttaaacgtttctgccaactgtattgatcgccatttggcgacccgtggcgaccaagtcgcgatcatttgggaaggcgacgacccgactcaagacaaaactctgacgtataagcaactgcaccaagaagtgtgccgttttgccaatgcgctgaaagagcaaggcgtacgcaagggtgatgttgtctgtatctacatgcctatggtgccagaagcggcggttgctatgttggcttgtacccgtattggcgcagtgcacactatcgtctttggtggcttctcgccagaagcactggctggacgcattatcgactcgaacgccaaattagtgatcactgccgacgaaggtgttcgcggcggccgcgccgtccccctaaagaaaaacgtcgatgaagcactgtgcaatccagaagtcaaaaacatcagtaaagtgatggttcttaagcgtactggcggcaatgtcgcttggcatgaacaccgtgacatttggtggcatgaagcaaccgcaaaagcctccgataattgtccaccagaagagatgaaagccgaagatccgctgtttatcctctacacctctggctcaaccggtaaaccgaaaggcgtattgcacaccactggcggttatttggtttatgcgactatgaccttcaaatatgtattcgactatcagcccaatgaagtgttctggtgtaccgctgatgtgggttggataacgggtcactcctatctggtgtatggcccattggcgaatggcgcaaaaaccattctgtttgaaggcgtgccaaactaccccaccaccgcacgcatgagcgaggtggtagacaagcataaggtcaatatcctttacactgcgccaacggcgatccgtgcgctgatggccaaaggtgatgaagcgattaaaggcactagccgtgacagcttgcgcattatgggctctgtgggtgaaccgattaacccagaagcgtgggagtggtactaccgcacgatcggtaacgaaaaatcaccgattgtggatacttggtggcaaaccgaaaccggcggtatcttgatcacgccactgccgggggcaacggcgttgaaaccaggttcggccacacgcccgttctttggtgtgcagccagcgttagtcgataacatgggcgaaattgtggaaggcgcaactgaaggcaacttggtactgctcgattcatggccgggtcaaatgcgcactgtgtatggcgatcacgaccgctttgaacaaacctacttctctacctttaaaggcatgtactttaccggtgacggcgcgcgtcgcgatgaagacggttactactggatcacaggccgtgtcgatgacgtactcaacgtttcgggtcaccgtatgggaacggcagaaattgaatccgcactggtggcattcaataagattgcagaagccgccgtggtcggtgttccacacgatatcaaaggccaagcgatttacgcttacatcacactcaatgatggggtgtatccgagcgctgaactgcataaagaagtgaaagattgggtacgcaaagagattggcgctatcgcgacaccggatgtcctacactggaccgatgcgctaccgaaaacccgttcaggtaaaattatgcgccgtattttgcgtaaaattgccaccggcgataccagtaacttgggggatacctcaacgctggccgatccaagcgtggttgaccgcctgattgcggaaaaagcccaacttaaataa

SEQ ID NO: 121925 - protein, 666 aa, Vibrio cholerae O1 biovar eltor str. N16961
MKRALSGNLPNSQGEPVMSEAHIYPVKQNIKAHTHADNDTYLAMYQQSIKDPEGFWSEHGKIVDWIKPFTKVKHTSFDPGHIDIRWFEDGTLNVSANCIDRHLATRGDQVAIIWEGDDPTQDKTLTYKQLHQEVCRFANALKEQGVRKGDVVCIYMPMVPEAAVAMLACTRIGAVHTIVFGGFSPEALAGRIIDSNAKLVITADEGVRGGRAVPLKKNVDEALCNPEVKNISKVMVLKRTGGNVAWHEHRDIWWHEATAKASDNCPPEEMKAEDPLFILYTSGSTGKPKGVLHTTGGYLVYATMTFKYVFDYQPNEVFWCTADVGWITGHSYLVYGPLANGAKTILFEGVPNYPTTARMSEVVDKHKVNILYTAPTAIRALMAKGDEAIKGTSRDSLRIMGSVGEPINPEAWEWYYRTIGNEKSPIVDTWWQTETGGILITPLPGATALKPGSATRPFFGVQPALVDNMGEIVEGATEGNLVLLDSWPGQMRTVYGDHDRFEQTYFSTFKGMYFTGDGARRDEDGYYWITGRVDDVLNVSGHRMGTAEIESALVAFNKIAEAAVVGVPHDIKGQAIYAYITLNDGVYPSAELHKEVKDWVRKEIGAIATPDVLHWTDALPKTRSGKIMRRILRKIATGDTSNLGDTSTLADPSVVDRLIAEKAQLK

SEQ ID NO: 121926 - DNA, 1974 bp, Agrobacterium tumefaciens str. C58
  CDS (1)..(1974): transl_table=11
ttggttcaggaggagttcatgtctgccaaaatctacccggtgctcaaatcggcgaaagcccgcacgctcatcgacaatgagcgttaccagaaatggtatcaggagagcgtcgaggatccggaaaaattctgggacaagcacggccggcggatcgactggttcaagccctataccaaggtcaagaacacctcattcaaggggcgtgtgccgatcaaatggttcgaagacggcctgacgaacgtctcctataactgtatcgaccggcatttgaagacgcatggcgagcgcacggcgatcatctgggaaggcgacaatccctatatcgacaagaagatcacctataaccagctctatgattatgtctgccgtctggccaatgtgctgaagaagcacggcgttaagaagggtgaccgcgtcaccatctacatgccgatgattcccgaggcggcctatgccatgcttgcctgcgcccgcatcggtgccgtgcattccgtcgtctttggcggcttctcgcccgaagcgctggccggtcgtatcgttgactgcgaatcgaccttcgtcatcacctgcgatgaaggcgttcgcggcggcaagccgatcccgctcaaggaaaataccgacaaggcgatcgatatcgccgccaagcaatatgtcatcgtcaacaaggttctggtcgtgcgccgcaccggcggcaagaccggctgggcgccgggccgcgacatctggtatcatcaggaaattgcgaccgtgaagccggattgcccgccggtgaagatgcgggcggaagatccgctgttcatcctctacacttcaggctccaccggcaagcccaagggtgtgttgcacaccacgggcggctatctcgtctatacgtcgatgacgcatgaatatgtgttcgattacaaggatggtgaagtcttctggtgtacggccgatgttggctgggttaccggccattcctacatcgtctacgggccactcgccaattgtgcgacaacgctgatgttcgagggtgttcccaacttcccggatcaggggcgtttctgggaggtcatcgacaagcacaaggtcaatatcttctataccgcgccgacggcgctccgatcgctgatgggggcgggcgaccagttcgttcagcgctcgtcgcgcgaaagcctgcggcttctcggaacggtgggtgagccgatcaatccggaagcgtgggagtggtattaccatgtggtcggcgaggacaagagcccgatcgtagacacctggtggcagacggaaacgggcggcattctcatctcgccgttgccgggtgcgaccgatctgaagccagggtcggcaacaaggccgttcttcggcgtgcagccgcagcttgtcgatgccgagggcaatgtgctggaagggccggcggacggcaatctctgcatcatcgacagctggccgggccagtcgcggtccgtttatggggatcaccagcgattcgtcgacacctacttctcgacctacaagggcaagtacttcaccggtgacggctgccggcgcgacgaggacggttattactggatcacaggtcgcgtcgatgacgtgctcaacgtctccggccaccgcctaggcacggccgaggtagaatcggcactggtctcgcatcatcaggtttcggaagcggcggtggtcggttatccgcaccccatcaaggggcagggcatttattgttatgtcacgctgatggcggggcagagtggcgattatgcgctgcgcgaggagctggtaaagcatgtgcgcaacgagatcggaccggttgcgacgcccgacaagatccagtttgcgcccggcctgccgaagacccgctcaggcaagatcatgcggcgcattctgcgcaaaatcgccgaggacgatttcggtgcgcttggggatacgtcgacgcttgccgatccggcggtggtggaagatctcatcgccaaccgccagaaccgcacggcgtcctga

SEQ ID NO: 121927 - protein, 657 aa, Agrobacterium tumefaciens str. C58
MVQEEFMSAKIYPVLKSAKARTLIDNERYQKWYQESVEDPEKFWDKHGRRIDWFKPYTKVKNTSFKGRVPIKWFEDGLTNVSYNCIDRHLKTHGERTAIIWEGDNPYIDKKITYNQLYDYVCRLANVLKKHGVKKGDRVTIYMPMIPEAAYAMLACARIGAVHSVVFGGFSPEALAGRIVDCESTFVITCDEGVRGGKPIPLKENTDKAIDIAAKQYVIVNKVLVVRRTGGKTGWAPGRDIWYHQEIATVKPDCPPVKMRAEDPLFILYTSGSTGKPKGVLHTTGGYLVYTSMTHEYVFDYKDGEVFWCTADVGWVTGHSYIVYGPLANCATTLMFEGVPNFPDQGRFWEVIDKHKVNIFYTAPTALRSLMGAGDQFVQRSSRESLRLLGTVGEPINPEAWEWYYHVVGEDKSPIVDTWWQTETGGILISPLPGATDLKPGSATRPFFGVQPQLVDAEGNVLEGPADGNLCIIDSWPGQSRSVYGDHQRFVDTYFSTYKGKYFTGDGCRRDEDGYYWITGRVDDVLNVSGHRLGTAEVESALVSHHQVSEAAVVGYPHPIKGQGIYCYVTLMAGQSGDYALREELVKHVRNEIGPVATPDKIQFAPGLPKTRSGKIMRRILRKIAEDDFGALGDTSTLADPAVVEDLIANRQNRTAS

SEQ ID NO: 121928 - DNA, 2013 bp, Brucella melitensis 16M
  CDS (1)..(2013): transl_table=11
gtgcattatgcaatgccggatggttctatttggctgcaaatgctgaaggaggaaatcatgtcggaaaagctttaccccgtgctgccggaggcaaagaaaaacacgctcatcgacaacgagacttatctcgaatggtatgaggagagcgtgagcgacccggatggcttctgggccaagcacggccggcgtatcgactggttcaagcctttcaccaaggtcaagaacaccgatttcaacggcgatgtaacgatcaagtggtatgaggatggcgtcaccaacgtctcatataattgcatcgaccgccatctgaagagccgcggcgacaaggtcgccatcatctgggaaggcgacaacccctatatcgacaagaagatcacctatcgcgagctttacgagaatgtctgccgcatggcgaatgtgctcaagaagcatggggtgaagaagggcgaccgcgtcacgatctatctgccgatgatcccggaagccgcctatgccatgctcgcctgcgcgcgcatcggcgccgtgcattcggtcgtctttgccggtttctcgccggaggcgctcgctggccgcatcgttgactgcgaatccactttcgtcatcaccgccgatgaaggtgtgcgcggcggcaagcctgttgcgctgaaggaaaacaccgataccgccatcgacatcgccgccaagcaatatgtgatggtcaacaaggtgctggtcgtgcgccgcaccggcggcaaggtaagctggggccgcggccgcgatctgtggtaccatcaggaagtcgcaagcgtcgaaccgcattgcgaaccggaaccgatgaatgcggaagacccgcttttcattctctacacatccggttccaccggcaagccgaagggtgtgctgcataccaccggcggctacctcgtctatgcctcgatgacgcatcaatatgtcttcgattaccatgatggcgagatctactggtgcacggcggatgtgggttgggtaacgggccactcctatatcgtctacggaccgctggccaatggcgcgacaacgctgatgtttgaaggcgtgcccaacttccccgatcagggccgtttctgggaagtcgtcgacaagcaccatgtcaatatcttctacaccgcgccaaccgcgctgcgcgcgcttatgggcgcgggcgatgaattcgtaacccgctcatcgcgttcgacgctgcgcctgctgggctcggtcggcgagccgatcaatccagaggcctgggagtggtattacaatgtcgtgggcgaccagaaatgccccatcgtcgatacctggtggcagacggaaaatggcggcatcctcatcaccccacttcccggcgcgaccgatttgaaacccggttcggcaacacgcccgttcttcggcgtcaagccggtgctggtggacaatgaaggcaatgtgcaggagggcgtagccgacggcaacctgtgcatctccgactcctggccgggccagatgcgcaccgtctatggcgaccacaagcgtttcatcgaaacctacttctccacctataaggggatgtatttttcgggcgatggctgccgccgcgacgaggacggctattactggatcaccggccgcgtcgatgacgtgctgaatatttccggccatcgcctcggcacggcggaaatcgaatcggcacttgtctcgcatcactcggtttcggaagccgccgtggtcggctatccgcacccgatcaagggacagggcatctattgctatgtcacgctgatgaccggcgcagacgcgcaggacccggacgagttgcgcaaggaactggtccagcatgtgcgcaaggaaatcggccccatcgccacaccggacaagatccagtttgcgcccggactgccgaaaacccgttccggcaagatcatgcgccgcatcctgcgcaagatcgccgaagacgagttcggcgcattgggcgacacctcaacgctcgccgatcggggcgtggtggacgacctgatcgaaaatcgccagaacaagaaatga

SEQ ID NO: 121929 - protein, 670 aa, Brucella melitensis 16M
MHYAMPDGSIWLQMLKEEIMSEKLYPVLPEAKKNTLIDNETYLEWYEESVSDPDGFWAKHGRRIDWFKPFTKVKNTDFNGDVTIKWYEDGVTNVSYNCIDRHLKSRGDKVAIIWEGDNPYIDKKITYRELYENVCRMANVLKKHGVKKGDRVTIYLPMIPEAAYAMLACARIGAVHSVVFAGFSPEALAGRIVDCESTFVITADEGVRGGKPVALKENTDTAIDIAAKQYVMVNKVLVVRRTGGKVSWGRGRDLWYHQEVASVEPHCEPEPMNAEDPLFILYTSGSTGKPKGVLHTTGGYLVYASMTHQYVFDYHDGEIYWCTADVGWVTGHSYIVYGPLANGATTLMFEGVPNFPDQGRFWEVVDKHHVNIFYTAPTALRALMGAGDEFVTRSSRSTLRLLGSVGEPINPEAWEWYYNVVGDQKCPIVDTWWQTENGGILITPLPGATDLKPGSATRPFFGVKPVLVDNEGNVQEGVADGNLCISDSWPGQMRTVYGDHKRFIETYFSTYKGMYFSGDGCRRDEDGYYWITGRVDDVLNISGHRLGTAEIESALVSHHSVSEAAVVGYPHPIKGQGIYCYVTLMTGADAQDPDELRKELVQHVRKEIGPIATPDKIQFAPGLPKTRSGKIMRRILRKIAEDEFGALGDTSTLADRGVVDDLIENRQNKK

SEQ ID NO: 121930 - DNA, 1899 bp, Encephalitozoon cuniculi GB-M1; identical to SEQ ID NO: 28120
  CDS (1)..(1899)

SEQ ID NO: 121931 - protein, 632 aa, Encephalitozoon cuniculi GB-M1; identical to SEQ ID NO: 28121

SEQ ID NO: 121932 - DNA, 2025 bp, Drosophila melanogaster
  CDS (1)..(2025)
atggaacccggtcctagtgcagtgaactacgaaggcagtgaatctgtatgcggcatgccggtggaggctcacgatcctctctacttgaaggcctatcgccagagtgttcagaatccggctgcattttgggaggagcagggtaacctgctcgactgggatcggccatgggagaaggtactggacaacagtaatccgccattcaccaagtggtatgtgggtggctacctgaatgcctgctacaattccattgatcgccacatactggccggccgcggctccaatgtggccctaatccatgacagccccttgactggcacactgcgtcgggttacctatcaggagctgtatgaccagatcgttctgctggcaggcggcctggccaaattgggcgtggtcaaaggtgatcgcgtcgtgatctacatgcccctcatcccggagaccatcattgccatgctggcaattgtgcgtctgggtgcgattcactccgtggtcttcggtggcttcgctgcccgcgaactctgctcgcgcatcgaacatgtggaaccaaaactggtgatcgcctccaatgtgggcgtggagccgggcaaagtggtgccctacctggacatccttcattcagctattagcatgtcgcgatggcgaccaccgcagcgtaacataatctttcggcgtgataatgtttcgccagataccaccaaactggatcctctgacggatgtgctctggtcggatattcttaagatggcggagggcgagcggcccatagcctgtgttcccatcgaggccaacgatcctttgtatatcctctatacctctggaacgacggataagcccaagggagtacttcgcaccatcggaggtcacttggttgctctggtgtacacgctgagaactctctatggcatcaatcctggccacacctggtgggcggcctcagatatgggctgggtggtgggtcactcgtacatctgctacggtccactctgcctcggagccaccagtgttatgtacgagggtaaaccggaccgtactcctgacccgggtcagtactttaggatcatcgaccaataccaggtgcgctcgatcttctcggtacctacctccttccgtgttatccgtcgtgctgatccggacatcagctatgggcgacagtactccatgaagtcgctgcgtgccatcttcattgccggcgagcactgcgactacgagaccaagtcctggatcgagaagaccttcaaggtgcccgtgctcaaccactggtggcagacggagactggttccgcggtcaccgccacatgcctgggcttccagcagaacctcagtccgcccacttactccactggcttgccactcatgggctacgacgtcaagatcctgaaagcggacggcagcgaggcgcagacctcggagctgggcaggattgctcttaagctaccactgccacccggaaacatggccactctttacaaaaacgaagagctcttccgcacgctttactttcaaaagtttccgggttactatgatacaatggatgcgggctacaaggacgaacgtggctatatctttgtgacagctcgcgacgatgatgtaatcaatgtggctggccatcgcttgtccacctctagcctggaagacgccgtgcttcggcatccggacgtcgtggacgtggccgttttcggggtgcccgaggccaccaagggacaggtaccactgtgcctgtacattccggtggagaactgcaagaagaccgatgccaagctgtcgacggagatcatcaagctgatccgcgacgtcgtaggccccatagccgccttccggctggtcacgtccgtcaacaacctgccacgcactcgatccggtaagacgatgcgcaaggcgatggcggactttgcccgcaatgagcgcgttgtcctgccggcgactatcgatgatgccagcgtgttcatcgagatccggagggctctgaaccagttgggctatgccatgaccgcaccggatccgattgtggccaagttactcgactga

SEQ ID NO: 121933 - protein, 674 aa, Drosophila melanogaster
MEPGPSAVNYEGSESVCGMPVEAHDPLYLKAYRQSVQNPAAFWEEQGNLLDWDRPWEKVLDNSNPPFTKWYVGGYLNACYNSIDRHILAGRGSNVALIHDSPLTGTLRRVTYQELYDQIVLLAGGLAKLGVVKGDRVVIYMPLIPETIIAMLAIVRLGAIHSVVFGGFAARELCSRIEHVEPKLVIASNVGVEPGKVVPYLDILHSAISMSRWRPPQRNIIFRRDNVSPDTTKLDPLTDVLWSDILKMAEGERPIACVPIEANDPLYILYTSGTTDKPKGVLRTIGGHLVALVYTLRTLYGINPGHTWWAASDMGWVVGHSYICYGPLCLGATSVMYEGKPDRTPDPGQYFRIIDQYQVRSIFSVPTSFRVIRRADPDISYGRQYSMKSLRAIFIAGEHCDYETKSWIEKTFKVPVLNHWWQTETGSAVTATCLGFQQNLSPPTYSTGLPLMGYDVKILKADGSEAQTSELGRIALKLPLPPGNMATLYKNEELFRTLYFQKFPGYYDTMDAGYKDERGYIFVTARDDDVINVAGHRLSTSSLEDAVLRHPDVVDVAVFGVPEATKGQVPLCLYIPVENCKKTDAKLSTEIIKLIRDVVGPIAAFRLVTSVNNLPRTRSGKTMRKAMADFARNERVVLPATIDDASVFIEIRRALNQLGYAMTAPDPIVAKLLD

SEQ ID NO: 121934 - DNA, 2013 bp, Drosophila melanogaster
  CDS (1)..(2013)
atgccagcggaaaaatcaatatacgatcccaacccggccatcagccaaaatgcctacatatccagcttcgaggagtaccagaagttctaccaggagtcactggacaatccggccgagttctggtcccgcgtggccaagcagttccactgggaaacgccagccgatcaggataagttcctcaagtacaacttcaacatctcgaagggacccatttcgatcaaatggatggagggtgcctccaccaatctgtgctacaatctcctagatcgcaacgttaggaacggcctgggcgaccagatagcctactactgggagggcaaccaccccgacgattattcccggggtctcacctatcgcaagttgctggaggaggtgtgccgcttcgccaacgtgctgaaggatcatggcattcgaaagggcgatcgtgtatccatttacatgcccatgattctggagctgcctatcgcgatgctggcctgcgctcgcattggagccgtgcactcgatcgtattcgccggattctcaccggactcactggcggagcggatgttcgattgcaaggccaagctgctgattacggcggatggagcctggcgtggagagaaacccctgtacctgaaggctctgtgcgacacggccttggagaaagtcgaggagatggggcactccgtggagaagtgcatcgtggtgtcgcatttgaagcgagtgactccgtgccagccggatcatgtcgaggaggaaatcccatggaccgatgaccgcgattactggtggcacgaggagatggaggacaaggagccggcctgctatccggagtggatggacgccgaggatccattgttcatgctctacaccagtggctccactggcaagcccaagggagtgctccacacgactgccggatatctgctgtatgcggccacgacctttaagatcgtatttgactataagccaggggatatctactggtgcaccggcgatgttggctggatcacgggacacacctacgtggtgtacggaccattggccaatggagccacttcagtgattttcgaaggcacaccattcttccctggaaacgatcggtactggagtgtcattgacaaatataaggtaactcagttctacacagctccaacggcgattcgtgccctcatgaagttcggcgagggtcccgttctaaagcacaacctgagcggactcaaagttttgggcagcgtgggtgagcccatcaacccggaggcctggctctggtattacaaatacattggaaaggagcagtgctccattgtggacaccttttggcaaacggaaaccggtggtcatgtcattacacctctgcctggagcgactcccatgaagccgggatctgcttcattccccttctttggagtgaagcccactttgctggatgagtgcggcattgaaattaagggggagggagagggctacttggtcttctcgcaaccttggccgggaatgatgcgcactttgtacaacaaccatgaacgcttcgaggacacttatttctccaagttcccaggctactactgcactggcgatggagcccgacgcgatgctgacggctatttgtggatcactggtcgtgtggacgacatgttaaacgtgtccgggcacctgatgtccactgccgaggtagagtcggttctcacagagcatcctcgcgtggctgagtccgccgtggtttcccgtccgcatcccgtcaagggcgagtgtctctactgcttcataacgccgaacgagaacgaggtattcgaccagaagctaatttcggacctgaagaagatggtgcgagaacgtatcggaccttttgccatgccggatgtcattcaaaacgctcccggactgcccaaaactcgttccggcaagattatgcgtcgtgtgctgcgcaagatcgcggttaacgatcgcaacgtgggcgacacatctaccttggccgatgagcaaattgtggagcaactgttcgccaaccggccagtggaggccaagtag

SEQ ID NO: 121935 - protein, 670 aa, Drosophila melanogaster
MPAEKSIYDPNPAISQNAYISSFEEYQKFYQESLDNPAEFWSRVAKQFHWETPADQDKFLKYNFNISKGPISIKWMEGASTNLCYNLLDRNVRNGLGDQIAYYWEGNHPDDYSRGLTYRKLLEEVCRFANVLKDHGIRKGDRVSIYMPMILELPIAMLACARIGAVHSIVFAGFSPDSLAERMFDCKAKLLITADGAWRGEKPLYLKALCDTALEKVEEMGHSVEKCIVVSHLKRVTPCQPDHVEEEIPWTDDRDYWWHEEMEDKEPACYPEWMDAEDPLFMLYTSGSTGKPKGVLHTTAGYLLYAATTFKIVFDYKPGDIYWCTGDVGWITGHTYVVYGPLANGATSVIFEGTPFFPGNDRYWSVIDKYKVTQFYTAPTAIRALMKFGEGPVLKHNLSGLKVLGSVGEPINPEAWLWYYKYIGKEQCSIVDTFWQTETGGHVITPLPGATPMKPGSASFPFFGVKPTLLDECGIEIKGEGEGYLVFSQPWPGMMRTLYNNHERFEDTYFSKFPGYYCTGDGARRDADGYLWITGRVDDMLNVSGHLMSTAEVESVLTEHPRVAESAVVSRPHPVKGECLYCFITPNENEVFDQKLISDLKKMVRERIGPFAMPDVIQNAPGLPKTRSGKIMRRVLRKIAVNDRNVGDTSTLADEQIVEQLFANRPVEAK

SEQ ID NO: 121936 - DNA, 1959 bp, Bradyrhizobium japonicum USDA 110
  CDS (1)..(1959): transl_table=11
gtggagggaaatatgtccgagaagatttacgacgtgccggcggaatgggcaaagcgcgcctgggtcgaccaagccaagtacaaggaaatgtacgcccgctcgatctcggacccgaacggtttctgggccgaacaggccaagcgcatcgactggatgaaggcgccgacgaaaatcgagaacgtctccttcgcgccgggcaacgtctcgatcaaatggttcgaggacggcgtcctcaacgtcgcccataactgcatcgaccgtcatctgcacaagcgcgccaaccagaccgcaatcatctgggaaggtgacgatccctcgcagtcccgccacatcacctacaaggagctccacgacgaggtctgccggatggccaacatcctgcgtacccgcaacgtcaagaagggcgaccgcgtcaccatctacctgccgatgattccggaagcggcctacgcgatgctggcgtgcgcgcggatcggcgcgatccactccgtggtgttcgcgggcttctcgcccgacagcctcgcccaacgcatcaacgactgccagtccaaggtgatcatcaccgccgacgaaggcctgcgcggcggcaagaaggtgccgctgaaggccaatgtcgacgcggcgctcgccaaggccgacggcgtcgactgggtcgtcgtggtcaagcgcaccggcggcaagatcgacatgaacccgacccgcgacctctggtatcacgaggcggcggcgatggtgacgacggaatgcccggtcgagcatatgcacgccgaggatccgctgttcatcctctatacctcaggctcgaccggccagcccaagggcgtgctgcacacctccgccggctatctcgtctatgccgcgatgacgcatcaatacgtcttcgactatcacgacggcgacatctactggtgcaccgccgacgtcggctgggtcacgggccacagctacattctctacgggccgctcgccaacggcgcgaccacgctgatgttcgagggcgtgccgaattatccggacaattcccgcttctggaacgtcatcgacaagcacaaggtcaataccttctacaccgcgccgaccgcgatccgcgcgctgatgcagggtggcgacgagccggtgaagaagacctcgcgcgcctcgctgcgcctgctcggctcggtcggcgagcccatcaatccggaagcctgggagtggtatcaccgcgtcgtcggcgaggaccgctgcccgatcgtcgatacctggtggcagaccgagaccggcggcatcctgatcacgccgctgccgggcgccactaagctcaagccgggctcggcgacgcagcccttcttcggcgtggtgccggagatcgtcgatgccgacggcaaggttctggaaggcgagaccaccggcaatctctgtctcacccgggcatggccgggcatgatgcgcacggtctatggcgatcacgcgcggttcgagcagacctatttctcgacctacaagggcaagtattttacgggcgacggctgccggcgcgacgccgacggctattactggatcaccggccgcgtcgacgacgtcatcaacgtctccggccaccgcatgggcaccgcggaggtcgagagcgcgctggttgcgcatgagaaggtgtcggaagctgccgtcgtcggcttcccgcacgacatcaagggccagggcatctacgcctatgtcaccctgatggccggcgtccagccgaccgaggatctgcgcaaggagctcgtgacctgggtgcgcaaggagatcggcccgatcgcctcgcccgaccagatccagttcgcgccgggcctgcccaagacccgctccggcaagatcatgcgccgcatcctgcgcaagatcgccgaggacgagccgggcagcctgggcgacacctcgaccctggccgatcccgccgtggtcgacgacctcgtcaagaaccggcagaacaagaagtcggcgtaa

SEQ ID NO: 121937 - protein, 652 aa, Bradyrhizobium japonicum USDA 110
MEGNMSEKIYDVPAEWAKRAWVDQAKYKEMYARSISDPNGFWAEQAKRIDWMKAPTKIENVSFAPGNVSIKWFEDGVLNVAHNCIDRHLHKRANQTAIIWEGDDPSQSRHITYKELHDEVCRMANILRTRNVKKGDRVTIYLPMIPEAAYAMLACARIGAIHSVVFAGFSPDSLAQRINDCQSKVIITADEGLRGGKKVPLKANVDAALAKADGVDWVVVVKRTGGKIDMNPTRDLWYHEAAAMVTTECPVEHMHAEDPLFILYTSGSTGQPKGVLHTSAGYLVYAAMTHQYVFDYHDGDIYWCTADVGWVTGHSYILYGPLANGATTLMFEGVPNYPDNSRFWNVIDKHKVNTFYTAPTAIRALMQGGDEPVKKTSRASLRLLGSVGEPINPEAWEWYHRVVGEDRCPIVDTWWQTETGGILITPLPGATKLKPGSATQPFFGVVPEIVDADGKVLEGETTGNLCLTRAWPGMMRTVYGDHARFEQTYFSTYKGKYFTGDGCRRDADGYYWITGRVDDVINVSGHRMGTAEVESALVAHEKVSEAAVVGFPHDIKGQGIYAYVTLMAGVQPTEDLRKELVTWVRKEIGPIASPDQIQFAPGLPKTRSGKIMRRILRKIAEDEPGSLGDTSTLADPAVVDDLVKNRQNKKSA

SEQ ID NO: 121938 - DNA, 1977 bp, Prochlorococcus marinus subsp. marinus str. CCMP1375
  CDS (1)..(1977): transl_table=11
atgagctctgattcttcagcaaaaattgagacagtacttcaggaagaaagggtttttaatccttctgatgaaacaattaatcgagcaagtattaaaggttttgctcaatatcagaagatggttaattctgccaagtcggatcctcaaaagttttggggtgaggcagctttagagggattgcattggtttaagccttttaatactgttttggattggactgatcctccttttgcaagatggtttgatggaggtaagacaaatgtttcatataattgtttagatcgtcatgtaaagcaagggaaaggcgaaaaaattgcaattatttgggaaggtgagcctggagaagttaggaaaatcacctataagcaacttttagaacaagtatgtcgcacagctaatgcattaaaagaaattggtattaaaaaaggtgatttggttgcactgtatatgccaatggtccctgaggctgctgtggctatgcttgcttgcgccagaataggggctcctcattctgtagtttttggaggtttctcttcagaagctttacgagaccgaataaatgatggccaagcaaaagcaattattactgcagatggtggttttcgtaaagataaaataatctccttaaaaaatgctgttgattctgctttgtcggggaatagttgtccaagcgttgaatctgttttagtagtaaaaagaacttctgaaagtatttcctttagtcctggtagagattattggtggcatgagttagtacctgctcaatcaatagattgccctgctgaagaaatggatagcgaggatagactttttgttctttatacgtcaggttccacaggaaagccaaaaggtgttgttcatactacggcaggttataacttgtgggcccatatgacttttcagtggatttttgatgttcgtgaagaggaaatttattggtgcacagctgatgttggatggattaccgggcatagctacatcgtttatggtccattgtctaatggttcaacaactgtcatgtatgaaggcgtaccacgcccttccaacccaggagcattttgggatcttatagaacgtcataagatcaatattttttatactgcgccaacagccattagagcttttatgaaatctggtagggatatcccagataaatataatttgaaaagtttgagattactaggaacagttggcgaacctattaatccagaagcttggatttggtatagagatgttataggaggcaattcctgtccaattgttgatacttggtggcagacagagactggcggtgtgatgataagtcctttgcctggcgcaattcctactaagcctggctcagcaactctccctttgcccggtatagaggctgaaatagttaatgctgaaggcaaatctgtagatgttaatcaaggtgggtatttagttatcaaacatccttggcctggaatgatgagaacggttcatggaaaccctcaaagatttcgtgaaagttattgggagtatttgcctccaattaatggaagccttgtttattttgccggtgatggtgctagacgagataaggatggctatttttggatcatgggaagggttgatgatgtaattaatgtatctggacaccgtttaggaactatggaaatagagtctgctcttgtaagccataattcagttgctgaagcagcagttgtaggaaaaccagatgatattaaaggagaagcaattgttgcgttcgtgactttggagtcaggagcaaatcacaacgaaaagcttttaactgatttaaaagtacatgtaagtacggaaataggagctattgctaggccggatgaaattcgttttaccaattctttaccaaaaacaaggagtggaaaaattatgcggcgattacttagagcattagcagcaggtgaggaagttaagggagacacaagtacattagaagataggaatgttttagatgaacttaggaagtga

SEQ ID NO: 121939 - protein, 658 aa, Prochlorococcus marinus subsp. marinus str. CCMP1375
MSSDSSAKIETVLQEERVFNPSDETINRASIKGFAQYQKMVNSAKSDPQKFWGEAALEGLHWFKPFNTVLDWTDPPFARWFDGGKTNVSYNCLDRHVKQGKGEKIAIIWEGEPGEVRKITYKQLLEQVCRTANALKEIGIKKGDLVALYMPMVPEAAVAMLACARIGAPHSVVFGGFSSEALRDRINDGQAKAIITADGGFRKDKIISLKNAVDSALSGNSCPSVESVLVVKRTSESISFSPGRDYWWHELVPAQSIDCPAEEMDSEDRLFVLYTSGSTGKPKGVVHTTAGYNLWAHMTFQWIFDVREEEIYWCTADVGWITGHSYIVYGPLSNGSTTVMYEGVPRPSNPGAFWDLIERHKINIFYTAPTAIRAFMKSGRDIPDKYNLKSLRLLGTVGEPINPEAWIWYRDVIGGNSCPIVDTWWQTETGGVMISPLPGAIPTKPGSATLPLPGIEAEIVNAEGKSVDVNQGGYLVIKHPWPGMMRTVHGNPQRFRESYWEYLPPINGSLVYFAGDGARRDKDGYFWIMGRVDDVINVSGHRLGTMEIESALVSHNSVAEAAVVGKPDDIKGEAIVAFVTLESGANHNEKLLTDLKVHVSTEIGAIARPDEIRFTNSLPKTRSGKIMRRLLRALAAGEEVKGDTSTLEDRNVLDELRK

SEQ ID NO: 121940 - DNA, 1980 bp, Bordetella pertussis Tohama I
  CDS (1)..(1980): transl_table=11
atgtcgaatgccattcaatccgtcctggtcgagaatcgcgtattcccgccgccggcgagcgccgtgcaaggcgccgcgatttcgggcatggacgcctattgggccctgtgcgaggaagcggacaaggacttcaacgggttctggtcgcgcctggcgcgcgagaacctgcaatggaccaagtccttcacgcaggtcctggacgagtccgaggcgcctttctatcggtggtttggcgatggcgaactcaacgtatcggccaactgcctggacgtgcacctgcataacggcaacgccgacaagaccgccatcatcttcgaatccgacgacggcaaggtcgacaagatcagctaccgcgaactgctggcgcgcgtgtgccgcttcgccaatggcctgaaggccatggggtacaagaagggcgaccgcgccatcatctacatgcccatgtcgatcgaggcggtggtggccgtgcaggcctgcgcccgcctgggcgtgacgcactcggtggtgttcggcggcttctcggccaagagcctgcaggagcgtatcgtcgacgtcggcgccacggtggtgatcaccgccgacgagcaggtgcgaggcggcaagaccatcccgctcaagcccgccgtcgaggaagcgttcgccatgggcggttgcgaggccgtttccaaggtagtggtgtatcgccgcaccggcggcaagatcgcctggcaggaagggcgcgacgtctggatgcacgacgtggaggccggccaggccgatacctgcgagccgcaggcggtcaatgccgagcatccgttgttcatcctgtacacgtcgggctccaccggcaagcccaagggcgtgcagcatgcctccgcgggctatctgctgtgggcgctgctgaccatgaagtggaccttcgacgcccgcgccgatgatgtgtactggtgcacggccgacgtgggctgggtgaccggccatacctatatcacctacggcccgctggccgccggcgtgacgcaggtggtgttcgagggcgtgcccacgttccccaacgccggacgcttctgggacatgatcgcgcgccacaaggtgtcggtgttctataccgcgccgaccgcgatccgctcgctcatcaaggccgccgaggccaaccaggaggtgcacccgcgccaatacgacctggacagcctgcgcatcatcggttcggtgggcgagcccatcaactccgaggcctggatctggtaccacaagaatgtcggccgcgagcgctgcccggtcgtcgacacctggtggcagaccgagaccggcgggcacatgctcacgccgctgccgggcgccacgccgctcaagccgggatcgtgcacgctgccgctgccgggcattgtcgcggccatcgtcgacgagaccggcggcgatgtcgcgcagggcaatggcggcttcctggtcatcaagcgcccctggccggccatgatccgcaacatctggggcgacccggagcggttcaagaagagctacttcccgcccgagctgcgcggctactacctggccggcgacggcgcccagcgcgacgccgatggctatttctggatcatggggcgcatcgacgacgtgctcaacgtgtccggccaccgcctcggcaccatggaggtggagtcggcgctggtggcgcacgaaatggtggccgaggccgccgtggtgggccgtcccgacgacaccaccggcgaagccgtggtggccttcgtggtgctcaagcgcagccgccccgagggcgacgaagcccaggccatcgccaggcaactgcgcgactgggtgggcaaggaaatcggccccatcgccaagcccaaggacatccgtttcggcgacaacctgcccaagacccgttcgggcaagatcatgcgccgcctgctgcgcgtggtcgccaagggcgaggaaatcacccaggacgtgtccaccctggagaaccccgccatcctcgagcaactggccaagccgttgtga

SEQ ID NO: 121941 - protein, 659 aa, Bordetella pertussis Tohama I
MSNAIQSVLVENRVFPPPASAVQGAAISGMDAYWALCEEADKDFNGFWSRLARENLQWTKSFTQVLDESEAPFYRWFGDGELNVSANCLDVHLHNGNADKTAIIFESDDGKVDKISYRELLARVCRFANGLKAMGYKKGDRAIIYMPMSIEAVVAVQACARLGVTHSVVFGGFSAKSLQERIVDVGATVVITADEQVRGGKTIPLKPAVEEAFAMGGCEAVSKVVVYRRTGGKIAWQEGRDVWMHDVEAGQADTCEPQAVNAEHPLFILYTSGSTGKPKGVQHASAGYLLWALLTMKWTFDARADDVYWCTADVGWVTGHTYITYGPLAAGVTQVVFEGVPTFPNAGRFWDMIARHKVSVFYTAPTAIRSLIKAAEANQEVHPRQYDLDSLRIIGSVGEPINSEAWIWYHKNVGRERCPVVDTWWQTETGGHMLTPLPGATPLKPGSCTLPLPGIVAAIVDETGGDVAQGNGGFLVIKRPWPAMIRNIWGDPERFKKSYFPPELRGYYLAGDGAQRDADGYFWIMGRIDDVLNVSGHRLGTMEVESALVAHEMVAEAAVVGRPDDTTGEAVVAFVVLKRSRPEGDEAQAIARQLRDWVGKEIGPIAKPKDIRFGDNLPKTRSGKIMRRLLRVVAKGEEITQDVSTLENPAILEQLAKPL

SEQ ID NO: 121942 - DNA, 2046 bp, Bordetella parapertussis 12822
  CDS (1)..(2046): transl_table=11
gtggcgatacggttgcgtgtcggcaagaaaaacggcagcaccagaatcattcatcggagacacaccatgtcgaatgccattcaatccgtcctggtcgagaatcgcgtattcccgccgccggcgagcgccgtgcaaggcgccgcgatttcgggcatggacgcctattgggccctgtgcgaggaagcggacaaggatttcaacgggttctggtcgcgcctggcgcgcgagaacctgcaatggagcaagcccttcacccaggtcctggacgagtccgaggcgcctttctatcggtggttcggcgatggcgaactcaacgtatcggccaactgcctggacgtgcacctgcataacggcaacgccgacaagaccgccatcatcttcgaatccgacgacggcaaggtcgacaagatcagctaccgcgaactgctggcgcgcgtgtgccgcttcgccaatggcctgaaggccatggggtacaagaagggcgaccgcgccatcatctacatgcccatgtcgatcgaggcggtggtggccatgcaggcctgcgcccgcctgggcgtgacccactcggtggtgttcggcggcttctcggccaagagcctgcaggagcgtatcgtcgacgtcggcgccacggtggtgatcaccgccgacgagcaggtgcgcggcggcaagaccatcccgctcaagcccgccgtcgaggaagcgttcgccatgggcggttgcgaggccgtttccaaggtggtggtgtatcgccgcaccggcggcaagatcgcctggcaggaagggcgcgatgtctggatgcacgacgtggaagccggccaggccgatacctgcgagccgcaggcggtcaatgccgagcatccgttgttcatcctgtacacgtcgggctccaccggcaagcccaagggcgtgcagcatgcctccgcgggctatctgctgtgggcgctgctgaccatgaagtggaccttcgacgcccgcgccgatgatgtgtactggtgcacggccgacgtgggctgggtgaccggccatacctatatcacctacggcccgctggccgccggcgtgacgcaggtggtgttcgagggcgtgcccacgttccccaatgccggacgcttctgggacatgattgcgcgccacaaggtgtcggtgttctataccgcgccgaccgcgatccgctcgctcatcaaggccgccgaggccaaccaggaggtgcacccgcgccaatacgacctggacagcctgcgcatcatcggttcggtgggcgagcccatcaaccccgaggcctggatctggtaccacaagaacgtcggccgcgagcgctgcccggtcgtcgacacctggtggcagaccgagaccggcgggcacatgctcacgccgctgccgggcgccacgtcgctcaagccgggatcgtgcacgctgccgctgccgggcattgtcgcggccatcgtcgacgagaccggcggcgatgtcgcgcagggcaatggcggcttcctggtcatcaagcgtccctggccggccatgatccgcaacatctggggcgacccggagcggttcaagaagagctacttcccgcccgagctgcgcggctactacctggccggcgacggcgcccagcgcgacgccgatggctatttctggatcatggggcgcatcgacgacgtgctcaacgtgtccggccaccgcctcggcaccatggaggtggagtcggcgctggtggcgcacgaaatggtggccgaggccgccgtggtgggccgtcccgacgacaccaccggcgaagccgtggtggccttcgtggtgctcaagcgcagccgtcccgagggcgacgaagcccaggccatcgccaggcaactgcgcgactgggtgggcaaggaaatcggccccatcgccaagcccaaggacatccgtttcggcgacaacctgcccaagacccgttcgggcaagatcatgcgccgcctgctgcgcgtggtcgccaagggcgaggaaatcacccaggacgtgtccaccctggagaaccccgccatcctcgagcaactggccaagccgttgtga

SEQ ID NO: 121943 - protein, 681 aa, Bordetella parapertussis 12822
MAIRLRVGKKNGSTRIIHRRHTMSNAIQSVLVENRVFPPPASAVQGAAISGMDAYWALCEEADKDFNGFWSRLARENLQWSKPFTQVLDESEAPFYRWFGDGELNVSANCLDVHLHNGNADKTAIIFESDDGKVDKISYRELLARVCRFANGLKAMGYKKGDRAIIYMPMSIEAVVAMQACARLGVTHSVVFGGFSAKSLQERIVDVGATVVITADEQVRGGKTIPLKPAVEEAFAMGGCEAVSKVVVYRRTGGKIAWQEGRDVWMHDVEAGQADTCEPQAVNAEHPLFILYTSGSTGKPKGVQHASAGYLLWALLTMKWTFDARADDVYWCTADVGWVTGHTYITYGPLAAGVTQVVFEGVPTFPNAGRFWDMIARHKVSVFYTAPTAIRSLIKAAEANQEVHPRQYDLDSLRIIGSVGEPINPEAWIWYHKNVGRERCPVVDTWWQTETGGHMLTPLPGATSLKPGSCTLPLPGIVAAIVDETGGDVAQGNGGFLVIKRPWPAMIRNIWGDPERFKKSYFPPELRGYYLAGDGAQRDADGYFWIMGRIDDVLNVSGHRLGTMEVESALVAHEMVAEAAVVGRPDDTTGEAVVAFVVLKRSRPEGDEAQAIARQLRDWVGKEIGPIAKPKDIRFGDNLPKTRSGKIMRRLLRVVAKGEEITQDVSTLENPAILEQLAKPL

SEQ ID NO: 121944 - DNA, 2046 bp, Bordetella bronchiseptica RB50
  CDS (1)..(2046): transl_table=11
gtggcgatacggttgcgtgtcggcaagaaaaacggcagcaccagaatcattcatcggagacacaccatgtcgaatgccattcaatccgtcctggtcgagaatcgcgtattcccgccgccggcgagcgccgtgcaaggcgccgcgatttcgggcatggacgcctattgggccctgtgcgaggaagcggacaaggatttcaacgggttctggtcgcgcctggcgcgcgagaacctgcaatggagcaagcccttcactcaggtcctggacgagtccgaggcgcctttctatcggtggttcggcgatggcgaactcaacgtatcggccaactgcctggacgtgcacctgcataacggcaacgccgacaagaccgccatcatcttcgaatccgacgacggcaaggtcgacaagatcagctaccgcgaactgctggcgcgcgtgtgccgcttcgccaatggcctgaaggccatggggtacaagaagggcgaccgcgccatcatctacatgcccatgtcgatcgaggcggtggtggccatgcaggcctgcgcccgcctgggcgtgacccactcggtggtgttcggcggcttctcggccaagagcctgcaggagcgtatcgtcgacgtcggcgccacggtggtgatcaccgccgacgagcaggtgcgcggcggcaagaccatcccgctcaagcccgccgtcgaggaagcgttcgccatgggcggttgcgaggccgtttccaaggtggtggtgtatcgccgcaccggcggcaagatcgcctggcaggaagggcgcgatgtctggatgcacgacgtggaagccggccaggccgatacctgcgagccgcaggcggtcaatgccgagcatccgttgttcatcctgtacacgtcgggctccaccggcaagcccaagggcgtgcagcatgcctccgcgggctatctgctgtgggcgctgctgaccatgaagtggaccttcgacgcccgcgccgatgatgtgtactggtgcacggccgacgtgggctgggtgaccggccatacctatatcacctacggcccgctggccgccggcgtgacgcaggtggtgttcgagggcgtgcccacgttccccaatgccggacgcttctgggacatgattgcgcgccacaaggtgtcggtgttctataccgcgccgaccgcgatccgctcgctcatcaaggccgccgaggccaaccaggaggtgcacccgcgccaatacgacctggacagcctgcgcatcatcggttcggtgggcgagcccatcaaccccgaggcctggatctggtaccacaagaacgtcggccgcgagcgctgcccggtcgtcgacacctggtggcagaccgagaccggcgggcacatgctcacgccgctgccgggcgccacgccgctcaagccgggatcgtgcacgctgccgctgccgggcattgtcgcggcaatcgtcgacgagaccggcggcgatgtcgcgcagggcaatggcggcttcctggtcatcaagcgtccctggccggccatgatccgcaacatctggggcgacccggagcggttcaagaagagctacttcccgcccgaactgcgcggctactacctggccggcgacggcgcccagcgcgacgccgatggctatttctggatcatggggcgcatcgacgacgtgctcaacgtgtccggccaccgcctcggcaccatggaggtggagtcggcgctggtggcgcacgaaatggtggccgaggccgccgtggtgggccgtcccgacgacaccaccggcgaagccgtggtggccttcgtggtgctcaagcgcagccgtcccgagggcgacgaagcccaggccatcgccaggcaactgcgcgactgggtgggcaaggaaatcggccccatcgccaagcccaaggacatccgtttcggcgacaacctgcccaagacccgttcgggcaagatcatgcgccgcctgctgcgcgtggtcgccaagggcgaggaaatcacccaggacgtgtccaccctggagaaccccgccatcctcgagcaactggccaagccgttgtga

SEQ ID NO: 121945 - protein, 681 aa, Bordetella bronchiseptica RB50
MAIRLRVGKKNGSTRIIHRRHTMSNAIQSVLVENRVFPPPASAVQGAAISGMDAYWALCEEADKDFNGFWSRLARENLQWSKPFTQVLDESEAPFYRWFGDGELNVSANCLDVHLHNGNADKTAIIFESDDGKVDKISYRELLARVCRFANGLKAMGYKKGDRAIIYMPMSIEAVVAMQACARLGVTHSVVFGGFSAKSLQERIVDVGATVVITADEQVRGGKTIPLKPAVEEAFAMGGCEAVSKVVVYRRTGGKIAWQEGRDVWMHDVEAGQADTCEPQAVNAEHPLFILYTSGSTGKPKGVQHASAGYLLWALLTMKWTFDARADDVYWCTADVGWVTGHTYITYGPLAAGVTQVVFEGVPTFPNAGRFWDMIARHKVSVFYTAPTAIRSLIKAAEANQEVHPRQYDLDSLRIIGSVGEPINPEAWIWYHKNVGRERCPVVDTWWQTETGGHMLTPLPGATPLKPGSCTLPLPGIVAAIVDETGGDVAQGNGGFLVIKRPWPAMIRNIWGDPERFKKSYFPPELRGYYLAGDGAQRDADGYFWIMGRIDDVLNVSGHRLGTMEVESALVAHEMVAEAAVVGRPDDTTGEAVVAFVVLKRSRPEGDEAQAIARQLRDWVGKEIGPIAKPKDIRFGDNLPKTRSGKIMRRLLRVVAKGEEITQDVSTLENPAILEQLAKPL

SEQ ID NO: 121946 - DNA, 1983 bp, Prochlorococcus marinus subsp. pastoris str. CCMP1986
  CDS (1)..(1983): transl_table=11
atgacattagataagaaacattcaatcaacaatattcttgaagaaaatagactcttccccccttcaaaagaattctcagataaatcaaatataaaaagttttgaggaattacaaagtttaaaaaaacaatctttagagaacccaacaaaattctgggaatcttttgcaaattcggaaattgattggttcgaaccatttcagactgttttagaccgagaaaatgcgcccttttttaaatggtttaaggaaggtaagttgaatatcacttataactgcttagatagacatatcaaaaacggaattgggaataaaacagcgcttgtatgggaaggcgagccaggagataacaagaaatatacgtatcaagaacttctcaaagaagtatgcaaagcttcaaatgctttgaaatctttgggaataaaaaagggtgatttggtctgtatttatatgccaatgattcctgaggcgatggttgccatgctcgcttgcgcgagaattggagctcctcattccgtagtttttggaggcttctcctctgagtcgttaaaagataggttaattgatggaaatgccagatttgttataacggcagatggtggttttagaaaagataaggtaattgagcttaagaaagctgttgatgcggcaattgaaagtggggcaaataagattgttgaaaaagttattgttgttcaaagaactaaaaaagatatctcgatggtaaacaatagggatttttggtggcacgaattattaaaagatcaaaaagattggtgtgaacctgaaattatgaatagcgaagatagattgtttgtcttatatacttcaggatccactggtaaaccaaagggtgttgttcatacaactgctggttataatctctggtctcaccttacattcaagtggatttttgatataaaagatgatgatgtctattggtgtacagcagatgttgggtggattactggacatagttatatagtatatggacctttatccaatggagcaacaactcttatgtttgaaggtgttccaagggcatctaacttaggggctttttgggaaattattcaaaaatacaaagttactattttctatacagcgccaacagcgataagatcatttatgaaatctggacgtgaaatccctgaccaatacgatttaagatctttgagacttttggggacagttggcgagccaattaatcctgaagcatggatgtggtatcgagaggtaataggtgataataagtgtccaatagtagatacatggtggcaaactgaaactggtggtgtgatgataagcccgttaccaggagccgttgctacaaagccaggttccgcaacattctctttgcctggaatcgaggttgaagttgtagataaaaatggagaaaaggtggtggaaaatgagggtggatatttggttgttaaaaaaccttggcctggaatgatgcgtacaattcatgaaaactctcaaagatatttagaaagttattgggaatatatttcttttaaaggtgaaaaaaatgtttatttcgctggtgatggggctcggattgataatgatggatatatttggattatgggaagagttgatgatgttataagtgtttccgggcatcgtttgggaactatggagatagagtccgcattagtaagtcataaatcagttgcggaagctgctgttgtcggaagaaaagatgatttaaaaggtgaggctattgttgcatttgtatctttagaaaaagatataaatagttttccagaaatagttgaggagttaaagaaacatgtagttaatgaaattggaattattgctaaaccagaaaaaataataatttcagattctcttccaaaaacgcgtagtggaaaaataatgagaagaattttgagatccttggcagaaggcgaaaaaataagtggagatattagtactcttgaagatagttctgttttagaaaaattaaaggaaatatcttaa

SEQ ID NO: 121947 - protein, 660 aa, Prochlorococcus marinus subsp. pastoris str. CCMP1986
MTLDKKHSINNILEENRLFPPSKEFSDKSNIKSFEELQSLKKQSLENPTKFWESFANSEIDWFEPFQTVLDRENAPFFKWFKEGKLNITYNCLDRHIKNGIGNKTALVWEGEPGDNKKYTYQELLKEVCKASNALKSLGIKKGDLVCIYMPMIPEAMVAMLACARIGAPHSVVFGGFSSESLKDRLIDGNARFVITADGGFRKDKVIELKKAVDAAIESGANKIVEKVIVVQRTKKDISMVNNRDFWWHELLKDQKDWCEPEIMNSEDRLFVLYTSGSTGKPKGVVHTTAGYNLWSHLTFKWIFDIKDDDVYWCTADVGWITGHSYIVYGPLSNGATTLMFEGVPRASNLGAFWEIIQKYKVTIFYTAPTAIRSFMKSGREIPDQYDLRSLRLLGTVGEPINPEAWMWYREVIGDNKCPIVDTWWQTETGGVMISPLPGAVATKPGSATFSLPGIEVEVVDKNGEKVVENEGGYLVVKKPWPGMMRTIHENSQRYLESYWEYISFKGEKNVYFAGDGARIDNDGYIWIMGRVDDVISVSGHRLGTMEIESALVSHKSVAEAAVVGRKDDLKGEAIVAFVSLEKDINSFPEIVEELKKHVVNEIGIIAKPEKIIISDSLPKTRSGKIMRRILRSLAEGEKISGDISTLEDSSVLEKLKEIS

SEQ ID NO: 121948 - DNA, 1977 bp, Prochlorococcus marinus str. MIT 9313
  CDS (1)..(1977): transl_table=11
atgtcccctgatccatccggcaccattaagtcagtcctgcaggagcagcgcgtctttcatccctccgcagagttggcctcacagtcgatggttggaagcctggaagcctatcgtcggatggcagagcaagccaaaactgatcctgacagtttctggggtgaagccgctcgcactgagctggaatggttcgaaccctttgatagcgttctcgattggtcgaatcctccctttgcgcgttggtttgaaggaggcacgacaaatctttccttcaactgtcttgatcgccatctcaatgggccgaaggcaaacaaaacagccctgatctgggagggagagccaggtgatgtgcggcgcttcacctatcgagaacttcatgctgaagtgtgcagggctgccaatgcgctgaaagctcttggcattggcaaaggtgacctggttgccctttatatgccaatggtcccagaagcggccattgccatgttggcttgcgcccgtatcggagccccacattctgttgtctttggtggcttttccgctgaagcccttagagatcgtttggtggatggtgaagccaaagccgtgatcactgctgatggtggttttcgtaaggacaaggccgttgccttgaagccggcagtggatgctgcattagccgagggtgcctgccccagcgtgacgtcggtgctggtggtgcaacgcacgaaagaaagcgtggtgatggaagctggtcgagatcagtggtggcacgagcttgtgtcagctcaatcgcaagagtgcgcggcggaacccatggcgagtgaagatcgcctgtttgtgctctacacctctggctccactggaaagccaaagggcgttgtgcacagcacggcaggctataacctctgggctcacctcactttcaagtggatcttcgacattcgcgacgaagacgtctactggtgcacagccgatgtgggctggatcacaggccatagctacattgtttatgggcctctttccaatggggcgacaactgtgatgtatgagggggcaccacgcccatccaagcctggagccttttgggagctaattcagaaacacgggatcacgattttttacactgcacctacggcaattcgggcattcatgaaaagtggtcgggctgtacccgatcaatacgacatgagcagtctgcgcttgctaggtaccgtcggagaacccatcaatcctgaggcctggatgtggtatcgcgaggtcatcggtggtgatcgttgcccaattgtcgacacttggtggcaaacggagacaggtggggtgatgatcagcccattacctggtgcgacgccaacaaagccagggtctgcgacccttcccctaccaggcattgaggctgaggtggttgatgcacaaggcgagccagtagccgttgacgaaggtggatatctgatcgtgcgacgtccttggccaggaatgatgcgcaccgtgcacggaaatcctcaacgctttagagagagctattgggaatacttacgccctaaggatggcagtttcatctatttcgcaggcgatggagctcgtcgagatggtgatggttatttctgggtgatgggcagggtggatgatgtgattaacgtttcaggccatcgtcttggcacgatggaaatcgaatcggcattggtgagtcacccggcagtgtctgaagcggcagtggttggaagacctgatgaccttaaaggtgaagcgatcgtggccttcgtcaccttggaaggaagcagggaagtgagtgatgctttgattcaggagcttcgtgttcatgtgggcaaggagatcggccccattgctcgacctgatgagatccgttgcagtgatgccttacccaagacccgcagcggcaaaattatgcggcgtatcttgcgggctttggccgctggagaggaggtcaagggtgataccagcaccctggaagatcgctccgtactggatcggcttagagcctga

SEQ ID NO: 121949 - protein, 658 aa, Prochlorococcus marinus str. MIT 9313
MSPDPSGTIKSVLQEQRVFHPSAELASQSMVGSLEAYRRMAEQAKTDPDSFWGEAARTELEWFEPFDSVLDWSNPPFARWFEGGTTNLSFNCLDRHLNGPKANKTALIWEGEPGDVRRFTYRELHAEVCRAANALKALGIGKGDLVALYMPMVPEAAIAMLACARIGAPHSVVFGGFSAEALRDRLVDGEAKAVITADGGFRKDKAVALKPAVDAALAEGACPSVTSVLVVQRTKESVVMEAGRDQWWHELVSAQSQECAAEPMASEDRLFVLYTSGSTGKPKGVVHSTAGYNLWAHLTFKWIFDIRDEDVYWCTADVGWITGHSYIVYGPLSNGATTVMYEGAPRPSKPGAFWELIQKHGITIFYTAPTAIRAFMKSGRAVPDQYDMSSLRLLGTVGEPINPEAWMWYREVIGGDRCPIVDTWWQTETGGVMISPLPGATPTKPGSATLPLPGIEAEVVDAQGEPVAVDEGGYLIVRRPWPGMMRTVHGNPQRFRESYWEYLRPKDGSFIYFAGDGARRDGDGYFWVMGRVDDVINVSGHRLGTMEIESALVSHPAVSEAAVVGRPDDLKGEAIVAFVTLEGSREVSDALIQELRVHVGKEIGPIARPDEIRCSDALPKTRSGKIMRRILRALAAGEEVKGDTSTLEDRSVLDRLRA

SEQ ID NO: 121950 - DNA, 2070 bp, Synechococcus sp. WH 8102
  CDS (1)..(2070): transl_table=11
gtggtttcaccctctgtccgacggattgatacgggtcgtggaacggtcgatcgactcctccgtacccttgcaacaacagtctttggcccgcctgctgtgaccgagtccaatacgtcgatcgaaagtgtcctgcaggagcagcgggtatttcagccgccggcggagatggcggctgcagcacgcatcggcagtctggagagttaccgcgccatggcggcggcggcgaccaaggatcccgatgggttctggggggaggcagcccgtcgtgagctgcattggttcgagccgttccacacggttctcgattggtcggaacctcctttcgcccgctggtttgaagggggcaccaccaacctgtcgtacaactgtctcgaccgacatctcgagggggccaaggccgagaagaccgcgctgatctgggaaggggagcccggagacgtgcgccgtttcagctaccgcgagctccatgccgaggtgtgcaaagccgccaacgctctgaaggccatgggcattggcaaaggcgatctggtcgccctctacatgccgatgattccagaggccgccattgcgatgctcgcctgcgctcgcatcggtgccccccattccgttgtgttcggtggtttctctgccgaggccttgcgcgatcgcctcaaggacggtgaggcgaaggccgtgatcacagcggatgggggattcagaaaggacaagcccgtttccctcaaacctgctgttgatgcagctctagcggagggcgcctgtccttcggtgaccggcgtgctcgtggtgcagcgcaccaagcagcccgtggagatggttgccggccgcgatcagtggtggcacgacctcgtggatgcccagggcagcgattgccctgcggagccgatggccagtgaagatcgactgttcgtgctctacacctcaggttccaccggcaaacccaagggtgtagtgcacaccactgccggttacaacctctgggcccatctcaccttccagtggattttcgacatccgcgataacgacgtctactggtgcacagcggatgttggctggatcactggccacagctacatcgtgtacggcccgctgtccaacggtgcgaccaccgtgatgtacgagggggcgccgcgcccctccaaacccggtgcgttctgggagttgatccagaagcacggcatcacgatcttttacaccgcgccgactgcgattcgagccttcatgaagagtggccgccaggtgccggatcaattcgacatgagcagccttcgcctgctgggcaccgttggtgaaccgatcaatccggaggcctggatgtggtaccgcgacgtgattggcggcaaccgctgtccgattgtcgacacttggtggcagaccgaaaccggtggcgtgatgatcagtccgctgcctggagccactcccaccaaaccgggatccgccacgctgccgctgccgggcattcaggccgacatcgttgatggagaaggcaacagctgcgggcccgatgaaggtggatacctggctgtccgagccccctggcctggaatgatgcgcacggtccatggcaacccccagcgctttcgtgagagctattgggagcacatccgtcctgccgatggctcgtacctctatttcgctggggatggcgcccgccgtgatgccgatggatatttctgggtgatgggccgggtggatgacgtgatcaacgtctccggtcaccgcctcggcacgatggaaattgagtcggctctggtgagccatcccgcggtggcggaagctgctgtggtgggtcgtcccgatgacctcaaaggtgaaggcatcgttgcgttcgtcacccttgagtcggggcgtgagtcgtcggatgatctgatcaagcaactcagggcccatgtgggcacggagataggaccgatcgctcggccggatgagattcgttgcagtgatgcactgcccaagacccgcagcggcaagatcatgcgccggatcctgagggccctggccgccggtcaggaggtcagcggcgacaccagcaccctggaggatcgttcggtcctcgatcggctgcgggcttga

SEQ ID NO: 121951 - protein, 689 aa, Synechococcus sp. WH 8102
MVSPSVRRIDTGRGTVDRLLRTLATTVFGPPAVTESNTSIESVLQEQRVFQPPAEMAAAARIGSLESYRAMAAAATKDPDGFWGEAARRELHWFEPFHTVLDWSEPPFARWFEGGTTNLSYNCLDRHLEGAKAEKTALIWEGEPGDVRRFSYRELHAEVCKAANALKAMGIGKGDLVALYMPMIPEAAIAMLACARIGAPHSVVFGGFSAEALRDRLKDGEAKAVITADGGFRKDKPVSLKPAVDAALAEGACPSVTGVLVVQRTKQPVEMVAGRDQWWHDLVDAQGSDCPAEPMASEDRLFVLYTSGSTGKPKGVVHTTAGYNLWAHLTFQWIFDIRDNDVYWCTADVGWITGHSYIVYGPLSNGATTVMYEGAPRPSKPGAFWELIQKHGITIFYTAPTAIRAFMKSGRQVPDQFDMSSLRLLGTVGEPINPEAWMWYRDVIGGNRCPIVDTWWQTETGGVMISPLPGATPTKPGSATLPLPGIQADIVDGEGNSCGPDEGGYLAVRAPWPGMMRTVHGNPQRFRESYWEHIRPADGSYLYFAGDGARRDADGYFWVMGRVDDVINVSGHRLGTMEIESALVSHPAVAEAAVVGRPDDLKGEGIVAFVTLESGRESSDDLIKQLRAHVGTEIGPIARPDEIRCSDALPKTRSGKIMRRILRALAAGQEVSGDTSTLEDRSVLDRLRA

SEQ ID NO: 121952 - DNA, 1965 bp, Chromobacterium violaceum ATCC 12472
  CDS (1)..(1965): transl_table=11
atgtcgacgctagattccatcctcaaggaaacccgcagcttcgccccgtcggaagaattccgccgcaaggcgtccatcagcgggatcgaagcctaccacgcgctgtgcgagcaggccgacgaccactacctgtccttctggggggatctggcgcgcgaactgatcacctggaaaaaaccgttctcccgcgtgctggacgacagccaggcgccgttcttcaagtggttcgacgacggcgtgctgaacgcctcctacaactgcctggaccgccacctggccgccaacgccaacaagatcgccatcatcttcgaagccgacgacggcgaggtcacccgcgtcacctactccgagctgcaccgccgcgtctgccagttcgccaacggcctgaagagcctgggcgtgaagaaaggagaccgcgtcgtggtctacatgccgatgggcatcgaggcggtggtgacgatgcaggcctgcgcccgtatcggcgccatccactcggtggtgttcggcggcttctccgccggcgcggtgcgcgaccgcatccaggatgccggcgccaccgtggtggtcaccgccaacgagagcgtgcgcggcggcaagaacgtgccgctgaaggccaccgtcgacgaggcgctggcgctggaaggcgccgaatcggtcaggcacgtggtggtgtaccagcgcaccaacggcggcgccgactggaccgacggccgcgacgtgtggtggcacaagctgatcgaaggccagagcgaggcctgcgagccggaatggatgggcgccgaagacccgctgttcatcctctacacctccggctccaccggcaagcccaagggcatccagcacagcaccgccggctacctgctgggcgcgctgaacagcttccgctgggtgttcgactacaaacccaacgacgtcttctggtgcaccgccgacgtcggctggatcaccggccacagctacgtctgctacggcccgctggccaacggcgccacccaggtgatcttcgagggcgtgcccacctatcccgacgccggccgcttctggaagatgatcgagcagcacaaggtgtccatcttctataccgcgccgaccgcgatccgctcgctgatcaagctgggttcggacctgcccaagcaatacgacctgtccagcttgcgcgtgctgggcacggtcggcgagcccatcaaccccgaagcctggatctggtactacgaaaccgtcggcggcggccgctgccccatcgtcgacacctggtggcagaccgagaccggctcgacgatgatcgcgccgctgccgggcgcgatcgccaccaagcctggctcgtgcacgctgccgctgccgggcgtgatcgccgacatcgtcgacgagtccggcgcccaggtggagccgggccgcggcggcttcctggtgatcaagaagcccttccccagcctggtgcgcaccatctggaacgatccggaacgcttcaagaaaacctatttccccgacgagttcgacggcaagtactacctggccggcgactccgcccaccgcgacgagaacggctatttctggatcatgggccgcatcgacgacgtgctgaacgtgtccggccaccgcctgggcaccatggagatcgaatcggcgctggtggccaacccgctggtggccgaggccgccgtggtcggcaagccgcacgaggtgaagggcgaggcggtagtcgccttcgtggtgctgaagggcgcgcgtccgcagggcgacgcggccaagaccgtggcggccgaactgaagaactgggtcgcgcacgagatcggcaagatcgcgcagccggacgacatccgcttcggcgagaacctgcccaagacccgctccggcaagatcatgcgccgcctgctgcgttccatcgccaagggcgaggagatcacccaggacgtctccacgctggaaaacccgcaaatcctgcaacaactgcagcagccgctgtaa

SEQ ID NO: 121953 - protein, 654 aa, Chromobacterium violaceum ATCC 12472
MSTLDSILKETRSFAPSEEFRRKASISGIEAYHALCEQADDHYLSFWGDLARELITWKKPFSRVLDDSQAPFFKWFDDGVLNASYNCLDRHLAANANKIAIIFEADDGEVTRVTYSELHRRVCQFANGLKSLGVKKGDRVVVYMPMGIEAVVTMQACARIGAIHSVVFGGFSAGAVRDRIQDAGATVVVTANESVRGGKNVPLKATVDEALALEGAESVRHVVVYQRTNGGADWTDGRDVWWHKLIEGQSEACEPEWMGAEDPLFILYTSGSTGKPKGIQHSTAGYLLGALNSFRWVFDYKPNDVFWCTADVGWITGHSYVCYGPLANGATQVIFEGVPTYPDAGRFWKMIEQHKVSIFYTAPTAIRSLIKLGSDLPKQYDLSSLRVLGTVGEPINPEAWIWYYETVGGGRCPIVDTWWQTETGSTMIAPLPGAIATKPGSCTLPLPGVIADIVDESGAQVEPGRGGFLVIKKPFPSLVRTIWNDPERFKKTYFPDEFDGKYYLAGDSAHRDENGYFWIMGRIDDVLNVSGHRLGTMEIESALVANPLVAEAAVVGKPHEVKGEAVVAFVVLKGARPQGDAAKTVAAELKNWVAHEIGKIAQPDDIRFGENLPKTRSGKIMRRLLRSIAKGEEITQDVSTLENPQILQQLQQPL

SEQ ID NO: 121954 - DNA, 1965 bp, Wolinella succinogenes DSM 1740
  CDS (1)..(1965): transl_table=11
atgacccaaacccattctacggagttgttcaaacccaatcgtgcgtttgccaagaccgcccgtatcaagaatctctgtgaatatgaagacctgcgcttagatgcggaagaggactttgaaggtttctgggggaaattggccaaagagaaaattgactggatggagcccttttccaaggtactagacgagagcgaggctcccttttacaaatggtttgtcggaggcaaactcaatgtctgcgctcagtgcctcgatcgccatcttgacactcgcaaaaacaaagccgccatcatctttgaaggagagcttggtgattctcgtatcatcacctatcgagagctcttttacgaggtcaagcgcaccgccaacctcctcaaaaacaagttcaatgtcaaaaaaggcgaccgtgttgtcatctatatgcccatgattcccgaagcggccttcatgatgcttgcttgtgcgagaatcggagcgatccactccgtcgtctttggaggattctcggctgaggcgttgcgcgatcgaattattgacgccgaggcaaaactcgtcatcaccgctgatggagcctacagaagaggcaagccctatatgctaaagcccgtagtcgatgatgcactcgccgaaggcgcctgcccaagcatcgagaaggtgctcatcgtgattcgcaacaaagaagagatcaactatgtccctggacgcgactacatctacaacgagatgatcgggctagaatcagcccactgcccccctgagcctatggacgccgaagaccctctcttcttgctctacacctcaggctccacaggcaagcccaagggcgtccagcacaaccaagcaggctacatcctttgggcacagaccaccatggagtgggtctttgatgtgaaggagaatgacacctattggtgcaccgcggatgtgggctggatcacgggtcatacctatatcgtctatggccctctagccatgggcgctaccaccgtcatgtatgagggcgtgcccatctaccctgacacaggtcgatggtggaagatgatcgaacactaccgagtcaatcagttctacactgctcccacggcgattcgactccttcacaaagagggcaaagaggagcccaaaaaatacaatctctccaacctcaaagtgcttggcacggtgggcgaacccatcaaccctgatgcatggaattggtactacaacgagattggcggggggcaatgccccattgtagatacatggtggcagaccgagacagggggtcatatgatctcccctcttcccggcgcgacccctataaaacccggatgtgcgactttgcctttgccaggaatctttgcagaggtgattgacgaagaggggaatccaaagcctgcgggtgagcagggctacctctgcatcaccaagccttggccctctatgattcgcaatatttggggcgaccccaagcgctacgaatcgagctactttagcacttgtaagaaaaacggcaaacccgtctattttgctggagatggggcgattcgtgatgagagaggctacatcaccatcacagggcgaatggatgatgtcatcaatgtctctggccaccgcctcggaaccgccgagatcgaatcggctatcgccaagcaccccggagtcgccgagacagccgtggttagccgcttggatgagatcaaaggcgaatcggtttatgccttcatcgtgctcaaacccggctatgaggataatgtcgctgaagagctacaactcctcaaagagattaatgccgtcatcacaagagagatcgggcccttggctaaagccgacacgatgctctttgtccccggacttccaaaaactagaagcggaaagatcatgcggcgtatcctccgctctatcgccagaggcgaagagatcacgcaggacacctccaccctcgaagaccccgctatcgtccaaaaaatccaacaactcgcctaa

SEQ ID NO: 121955 - protein, 654 aa, Wolinella succinogenes DSM 1740
MTQTHSTELFKPNRAFAKTARIKNLCEYEDLRLDAEEDFEGFWGKLAKEKIDWMEPFSKVLDESEAPFYKWFVGGKLNVCAQCLDRHLDTRKNKAAIIFEGELGDSRIITYRELFYEVKRTANLLKNKFNVKKGDRVVIYMPMIPEAAFMMLACARIGAIHSVVFGGFSAEALRDRIIDAEAKLVITADGAYRRGKPYMLKPVVDDALAEGACPSIEKVLIVIRNKEEINYVPGRDYIYNEMIGLESAHCPPEPMDAEDPLFLLYTSGSTGKPKGVQHNQAGYILWAQTTMEWVFDVKENDTYWCTADVGWITGHTYIVYGPLAMGATTVMYEGVPIYPDTGRWWKMIEHYRVNQFYTAPTAIRLLHKEGKEEPKKYNLSNLKVLGTVGEPINPDAWNWYYNEIGGGQCPIVDTWWQTETGGHMISPLPGATPIKPGCATLPLPGIFAEVIDEEGNPKPAGEQGYLCITKPWPSMIRNIWGDPKRYESSYFSTCKKNGKPVYFAGDGAIRDERGYITITGRMDDVINVSGHRLGTAEIESAIAKHPGVAETAVVSRLDEIKGESVYAFIVLKPGYEDNVAEELQLLKEINAVITREIGPLAKADTMLFVPGLPKTRSGKIMRRILRSIARGEEITQDTSTLEDPAIVQKIQQLA

SEQ ID NO: 121956 - DNA, 1956 bp, Photorhabdus luminescens subsp. laumondii TTO1
  CDS (1)..(1956): transl_table=11
atgaccaaaataatgaagcaccctattcctatcgccattgcagaacatgccctgatgaatgagcaacaatatcagcaagactaccaattatcgttgcaagatcccgacaggttctggggtgaaaaaggaaaaattgttgactggattaagccttacaccaaggtaaagaatacctcttttgatcctggacatatcaatatccgctggtttgaagatggaacactaaacttaagcgcaaattgtctcgatcgtcatctaaaagaacgtggtgagcaaaccgctattatctgggaaggtgatgatccaacagaatccaaagcaataacctatcgtgaactacaccatgatgtatgtcagtttgccaatgtattgaaaaatatgggtattaaaaaaggcgatgttgttgctatttacatgccgatggtgccagaagcagcggttgccatgttagcatgtgcccgcattggtgctattcactctgttattttcgcaggtttttctcctgatgctgtatccgggcgtatcatcgattcaaacaccaaattggtcattaccgccgatgaaggattaagagccggacgtacaatccccctgaaaaagaatgttgatgacgcattaaataatgcagccgttgtcaatgtatccaatgtaatcgtttttaaacgtactggaaatattggtcactggcaatctggccgtgacctttggtggcatgaattggtcgcagacgcgagtgctgactgtccagttgaagagataaatgcagaagacccgctgtttattctctatacctcaggctctaccggtaaacccaaaggggtactgcacaccactggaggttaccttgtatatgcatctctaacatttaaatacgtattcgattatcagccgggggaagtctattggtgcacagccgatgtgggatgggttaccggacatagctacctgctctacggccccctttcctgtggtgctattaccctaatgtttgaaggcgtaccaaactatcctgcggttaaccgcctaagtcagattattgataaacatcaggtaaatatcctatatacagcacccacagcgattcgtgccctaatggcggaaggtgataaagctattgaaggaacaaaacgtacttccctgcgtattatgggatcagttggcgaaccgattaatccggaagcttgggaatggtattaccagaaaattggtaacagcaaatgcccgattgtcgatacctggtggcaaacagaaactggtggcttcatgatcacaccactaccaggcgcaaccgaactaaaagcaggttccgcaacgctacctttcttcggtgttcagcccgcattggttgataatcttggtgaacaactagaaggtgtttgtgaaggaaacctagttattaccgattcctggccaggacaagcacgctcactatttggcgatcatgaccgtttcgaacaaacctatttctctacctttaagggaatgtattttagtggtgatggcgcacgccgtgatgaagatggctactattggataactggtcgtgttgatgatgtgctgaatatttccggccaccgtctaggtactgctgaaattgaatcagctttggtctcccatcctaaaattgcagaagctgctgtcgtaggtaccccacataatattaaagggcaggcaatttatgcctatgtcaccttaaatcacggtgaagaaccctctccagaactctatacagaagtccgtaattgggtacgtaaagaaatcggcccgattgctacaccagatatcctacactggacagactccttaccaaaaacccgttcaggaaaaattatgcgtcgtatcctgcgcaaaatagcctccggcgataccaacaatctaggggacatttcaacactagcagatccaggagtagtagaaaaattgttagaagaaaaacaaacaatgagtatttcgtga

SEQ ID NO: 121957 - protein, 651 aa, Photorhabdus luminescens subsp. laumondii TTO1
MTKIMKHPIPIAIAEHALMNEQQYQQDYQLSLQDPDRFWGEKGKIVDWIKPYTKVKNTSFDPGHINIRWFEDGTLNLSANCLDRHLKERGEQTAIIWEGDDPTESKAITYRELHHDVCQFANVLKNMGIKKGDVVAIYMPMVPEAAVAMLACARIGAIHSVIFAGFSPDAVSGRIIDSNTKLVITADEGLRAGRTIPLKKNVDDALNNAAVVNVSNVIVFKRTGNIGHWQSGRDLWWHELVADASADCPVEEINAEDPLFILYTSGSTGKPKGVLHTTGGYLVYASLTFKYVFDYQPGEVYWCTADVGWVTGHSYLLYGPLSCGAITLMFEGVPNYPAVNRLSQIIDKHQVNILYTAPTAIRALMAEGDKAIEGTKRTSLRIMGSVGEPINPEAWEWYYQKIGNSKCPIVDTWWQTETGGFMITPLPGATELKAGSATLPFFGVQPALVDNLGEQLEGVCEGNLVITDSWPGQARSLFGDHDRFEQTYFSTFKGMYFSGDGARRDEDGYYWITGRVDDVLNISGHRLGTAEIESALVSHPKIAEAAVVGTPHNIKGQAIYAYVTLNHGEEPSPELYTEVRNWVRKEIGPIATPDILHWTDSLPKTRSGKIMRRILRKIASGDTNNLGDISTLADPGVVEKLLEEKQTMSIS

SEQ ID NO: 121958 - DNA, 2013 bp, Vibrio vulnificus YJ016
  CDS (1)..(2013): transl_table=11
atgactgttttaaacgtcatggaactccatcacgaagacaaaggcacaaggagagagacaatgagtgaagcccacatttatccggtaaaagagaacatcaaagcccatacccatgcggataatgatacctacctagccatgtaccagcagtcagtcactgacccagaaggtttctggagtgaacacggcaaaattgttgactggattaagcccttcaccaaagtcaaacaaacgtcttttgatactggccacgttgatattcgctggtttgaagatggcacgctcaacgtctcagcaaactgtattgaccgccatctagcagagcgcggcgatgatgtcgccatcatttgggaaggcgacaacccagcggacgacaaaactctgacttacaacgagctctacaccgaagtgtgtcgtttctcgaatgcactcaaagagcaaggcgtacgcaaaggcgacgtggtgtgtctctacatgccaatggtccctgaagcggcggttgcgatgttggcctgtacccgtattggtgcggtgcacaccatcgtctttggtggtttttcaccagaagcactggctggccgcatcatcgactccgatgccaaagtcgtcatcacggccgacgaaggcgttcgtggtggtcgcgcggtgccactgaaaaagaacgtggacgaagcactaaccaacccagaagtgaaaaccatcagcaaagtggtggtgttcaagcgcactggcggcaacattgattggcacgaacatcgtgatgtttggtggcacgaagcgacagcaaaagtctctgacgtttgcccaccagaagagatgaaagctgaagatccgctgttcatcctctacacgtcaggctcaaccggcaaaccgaaaggcgtgctgcacaccacgggcggctatttggtctacgcgaccatgacctttaagtacgtgtttgactaccagccaggcgaaactttctggtgtacggccgacgtgggttggatcactggccacacgtatctggtttacggtccactggcaaacggcgcgaaaaccattctctttgaaggcgtgccaaactatccaaacaccagccgcatgagtgaagtggtcgataagcaccaagtcaacattctttacaccgcaccaacggccattcgtgcgctgatggcaaaaggcaacgaagcgattgaaggtacggatcgtagcagcctacgcatcatgggctctgtgggtgaacctattaacccagaggcgtgggagtggtactacaagaccatcggcaacgagaaatcaccgattgtcgatacttggtggcaaaccgaaaccggcggcattttgatcacaccactgccaggcgccaccgcgctgaaaccgggttctgcaacgcgcccattctttggtgttcagcctgcactggtggacaacatgggtaatgtgatcgaagaccaagccgcagaaggtaacctcgttatcctcgattcttggccaggtcaaatgcgcacggtttatggtgaccatgaacgtttcgaacaaacctacttctcaacctttaaaggcatgtactttaccggagatggtgcgcgccgcgatgaagatggttactactggatcacaggccgtgtggatgacgtattaaacgtttctggccaccgtatgggtacagcggaaattgaatccgccctagtggcacacccgaaaattgctgaagcggcgattgttggcattccacacgacatcaaaggccaagcaatttacgcctatgtcaccctcaatgcgggcgagtatccaaccgccgagctgcataaagaagtgaaagattgggtacgtaaagagattggccccatcgcaacaccagatgtcctgcattggacagatgcactaccgaaaactcgttcaggtaaaatcatgcgccgcattttgcgcaagatcgccacgggagacaccagcaacttgggtgacacctcaacactggccgacccaagcgtagttgataagctgatcgcagaaaaagccgaactggtttaa

SEQ ID NO: 121959 - protein, 670 aa, Vibrio vulnificus YJ016
MTVLNVMELHHEDKGTRRETMSEAHIYPVKENIKAHTHADNDTYLAMYQQSVTDPEGFWSEHGKIVDWIKPFTKVKQTSFDTGHVDIRWFEDGTLNVSANCIDRHLAERGDDVAIIWEGDNPADDKTLTYNELYTEVCRFSNALKEQGVRKGDVVCLYMPMVPEAAVAMLACTRIGAVHTIVFGGFSPEALAGRIIDSDAKVVITADEGVRGGRAVPLKKNVDEALTNPEVKTISKVVVFKRTGGNIDWHEHRDVWWHEATAKVSDVCPPEEMKAEDPLFILYTSGSTGKPKGVLHTTGGYLVYATMTFKYVFDYQPGETFWCTADVGWITGHTYLVYGPLANGAKTILFEGVPNYPNTSRMSEVVDKHQVNILYTAPTAIRALMAKGNEAIEGTDRSSLRIMGSVGEPINPEAWEWYYKTIGNEKSPIVDTWWQTETGGILITPLPGATALKPGSATRPFFGVQPALVDNMGNVIEDQAAEGNLVILDSWPGQMRTVYGDHERFEQTYFSTFKGMYFTGDGARRDEDGYYWITGRVDDVLNVSGHRMGTAEIESALVAHPKIAEAAIVGIPHDIKGQAIYAYVTLNAGEYPTAELHKEVKDWVRKEIGPIATPDVLHWTDALPKTRSGKIMRRILRKIATGDTSNLGDTSTLADPSVVDKLIAEKAELV

SEQ ID NO: 121960 - DNA, 1953 bp, Rhodopseudomonas palustris CGA009
  CDS (1)..(1953): transl_table=11
atgtccgagaagatctacgacgtgcccgcagagtgggcgagccgcgccttcgtcgacgacgccaaatatcgccagatgtacgagcgctcggtcacggatccgaccggattctgggcggagcacgccaagcgcgtcgactggatcaaggcgccgaccaagatcgacaactggtcgttcgcgcccggcaacgtttcgatcaagtggttcgaggacggcgtcctcaacgccgcctacaactgcatcgaccgccacctcgacaagcgcggcgaccaggtcgcgatcatctgggaaggcgacgatccttcgcagtcgcgcagcatcacctatcgcgagctgcacgacgaggtctgcaagttcgccaacatcctgcgcaaccgcaatgtcggcaagggtgaccgcgtcaccatctatctgccgatgattccggaagccgcgttcgcgatgctggcctgcgcccggatcggcgcgatccactcggtggtgttcgccggcttctcgcccgacagcctcgcgggccgcatcaacgactgcaactcgaagatcgtcatcaccgccgacgaaggcctgcgcggcggccgcaaggtgccgctgaaggccaatgtcgacgcggcgctgaagaagtgcgagggcgtcgactgggtgatggtggtcaaacgcaccggcgccgcggtcgaaatggatgacgtccgcgacttctggtaccacgaagccgccgaggtggtgacgaccgagtgcccggtcgagcacatgcatgccgaagacccgctgttcatcctctacacctcgggctcgaccggccagccgaagggcgtgctgcataccaccggcggctatctggtgttcgcgtcgatgacgcaccaatacgtcttcgattatcacgacggcgacatctactggtgcaccgccgacgtcggctgggtcaccggccacagctacatcctgtacgggccgctcgccaacggcgccacgacgctgatgttcgaaggcgtgccgaactatccgaccaattcccggttctgggaagtgatcgacaagcacaaggtcaacatcttctacaccgcaccgaccgcgatccgcgcgctgatgcaggccggcgacgagccggtgaagaagacctcgcgcaagtcgctccgcctgctcggctcggtcggcgagccgatcaatccggaagcctgggagtggtaccaccgcgtcgtcggcgaggaccgctgcccgatcgtcgacacctggtggcagacggagaccggcggcatcctgatcaccccgctgcccggcgccaccaagctgaagcccggctctgcgacccggccgttcttcggcgtggtacccgagatcctcgatccggaaggcaacgttctggaaggcgaatgcaccggcaacctctgcctcgcccgctcctggccgggacaaatgcggaccgtgtacggcgaccatgcccggttcgagcagacctacttctcggcctacaagggcaagtacttcaccggtgacggctgccggcgcgacaccgacggcttctactggatcaccggccgggtcgacgacgtcatcaacgtctcgggtcaccgcatgggcaccgccgaggtcgaatcctcgctggtggcgcatccgaaggtgtccgaggcggcggtggtcggctatccgcacgacatcaagggccagggtatctacgcctatgtgaccctgatggccggcgaagagccgaccgaggagctgcgcaaggaactggtcgcctgggtccgcaaggacatcggcccgatcgcctcgcccgacctgatccagttcgcgcccggcctgcccaagacccgctccggcaagatcatgcgccgaatcctacgcaagatcgcggaggacgaaccgtcctcgctcggcgacacctcgacgctggccgatcccgcggtggtcgacgatctggtcgagcatcgccagaacaagcaccacaaggcgagctga

SEQ ID NO: 121961 - protein, 650 aa, Rhodopseudomonas palustris CGA009
MSEKIYDVPAEWASRAFVDDAKYRQMYERSVTDPTGFWAEHAKRVDWIKAPTKIDNWSFAPGNVSIKWFEDGVLNAAYNCIDRHLDKRGDQVAIIWEGDDPSQSRSITYRELHDEVCKFANILRNRNVGKGDRVTIYLPMIPEAAFAMLACARIGAIHSVVFAGFSPDSLAGRINDCNSKIVITADEGLRGGRKVPLKANVDAALKKCEGVDWVMVVKRTGAAVEMDDVRDFWYHEAAEVVTTECPVEHMHAEDPLFILYTSGSTGQPKGVLHTTGGYLVFASMTHQYVFDYHDGDIYWCTADVGWVTGHSYILYGPLANGATTLMFEGVPNYPTNSRFWEVIDKHKVNIFYTAPTAIRALMQAGDEPVKKTSRKSLRLLGSVGEPINPEAWEWYHRVVGEDRCPIVDTWWQTETGGILITPLPGATKLKPGSATRPFFGVVPEILDPEGNVLEGECTGNLCLARSWPGQMRTVYGDHARFEQTYFSAYKGKYFTGDGCRRDTDGFYWITGRVDDVINVSGHRMGTAEVESSLVAHPKVSEAAVVGYPHDIKGQGIYAYVTLMAGEEPTEELRKELVAWVRKDIGPIASPDLIQFAPGLPKTRSGKIMRRILRKIAEDEPSSLGDTSTLADPAVVDDLVEHRQNKHHKAS

SEQ ID NO: 121962 - DNA, 1938 bp, Bdellovibrio bacteriovorus HD100
  CDS (1)..(1938): transl_table=11
atgcacaaagaactttatcccgtgaattccgaggtggcgaaaaaagcctggattgatgaagccaaatacaaagccatgtatgagcgctccattcaagacaacgaagccttttgggccgagcaagccgagcgcctggactggatcaaaaagtgggataaggtcaaagaagtcagtttcaagaaacccgttagcatcaaatggtacttgggtggaaaaatgaatgtgtcctacaattgcgtggaccgtcatttaaaaacccgcggcgacaaaacagccctgctgtgggaagccgacaatccatccacaccttcacgcaaaatcacttacaaagaactgcatctggaagtgtgccgcttcgccaatgtcctgaaaaaaatgggcgtgaaaaaaggcgatgtggtgacgatctatatgccgatgattccggatacagccgtggcgatgctggcctgtgcgcgcatcggggcggttcattcggtggtgtttgccggtttttctccggattccatctcagatcgtattttggacgggcagtgccggtttgtgatcaccggtgatgccggcttccgcggcagcaaagtggtggcgttaaaagaaaatatcgataaagcacttgtgaaaactccggacgtgcaaaaagttctggtggtgaaatatgcgggcacgacggtggacatgaagccgggccgtgatctttggtatcacgaagaagtcaaaaccgtcagcgaccagtgtgaaccagaacccatggacgcggaagatcctttgtttattctttacacttccggttccacaggaaaacccaaaggggtgatgcacaccacggggggatatctggtgtatgccagcatgacccaccagtatgtctttgattatcacgaagatgatatctactggtgttctgctgacgtgggttgggtgaccggccatagctatatcgtgtatggcccgctggcgaatggggcgacaagtttgttctttgaaggggtgccgaactatccaactccaagccgtttctgggaagtggtcgacaaacacaaagtcacaatattctatacctcaccaacggcgattcgttctttgatgcgcgaaggggacgcggcggtgaaaaccacctcgcgaaaaaccctgcgcctgctggggtccgtcggggagccgatcaatccggaagcctgggcatggtatcacgatgtggtcggtgaaggacgctgcccggttgtcgatacatggtggcagacagaaaccggtggcattctgatcacgccactgccgggggcgattgcgcaaaagccggggtctgcaactttaccgttctttggggtgcaaccgaaacttttgaccaacgaaggacaagagatccatggaccgggcgaaggggtgctggtgattgcggattcctggccgggccagatgcgcacggtgtatcgcaatcacgaacgttttgaagacacgtatttctcgaactatcccgggtactatttcacaggcgacggctgtcgtcgcgatcaggacgggtattactggatcacgggacgggtggatgacgtgatcaacgtttccggtcaccgcctggggacggctgaaattgaatcagcgcttgtggcccatcacaaagtggctgaagccgccgtggttggatatccacatgatatcaaagggcaggggatttatgcctttgtcaccttgaagtccggtgaaacggccagtgaagagctgcgtaaagagctgattcagaccgtgcgtaaagagatcgggccgattgcgactccggatctgattcagtgggctccacgtctgccgaagacccgttctggcaagattatgcgccgaatcctgcgtaaaatcgccgagaaccacccggatcaactgggggatacgacaaccttgtcagagcctgcggtggtccaagaactggtggacaatcgcatgaaccggtga

SEQ ID NO: 121963 - protein, 645 aa, Bdellovibrio bacteriovorus HD100
MHKELYPVNSEVAKKAWIDEAKYKAMYERSIQDNEAFWAEQAERLDWIKKWDKVKEVSFKKPVSIKWYLGGKMNVSYNCVDRHLKTRGDKTALLWEADNPSTPSRKITYKELHLEVCRFANVLKKMGVKKGDVVTIYMPMIPDTAVAMLACARIGAVHSVVFAGFSPDSISDRILDGQCRFVITGDAGFRGSKVVALKENIDKALVKTPDVQKVLVVKYAGTTVDMKPGRDLWYHEEVKTVSDQCEPEPMDAEDPLFILYTSGSTGKPKGVMHTTGGYLVYASMTHQYVFDYHEDDIYWCSADVGWVTGHSYIVYGPLANGATSLFFEGVPNYPTPSRFWEVVDKHKVTIFYTSPTAIRSLMREGDAAVKTTSRKTLRLLGSVGEPINPEAWAWYHDVVGEGRCPVVDTWWQTETGGILITPLPGAIAQKPGSATLPFFGVQPKLLTNEGQEIHGPGEGVLVIADSWPGQMRTVYRNHERFEDTYFSNYPGYYFTGDGCRRDQDGYYWITGRVDDVINVSGHRLGTAEIESALVAHHKVAEAAVVGYPHDIKGQGIYAFVTLKSGETASEELRKELIQTVRKEIGPIATPDLIQWAPRLPKTRSGKIMRRILRKIAENHPDQLGDTTTLSEPAVVQELVDNRMNR

SEQ ID NO: 121964 - DNA, 1968 bp, Strongylocentrotus purpuratus
  CDS (1)..(1968)
atgcaagtttcatcaaccaacatcccagagctgaacgattttgaagcacttgggtattcatttaactcgcatgaagaactgtataaattttcactcaatgaacctgaaattttctggggaacactagcaagaaataggttgcgatggtacagaaagtttgatgaagtgatggactgcaatcttcaagagggcaaaattgcctggtttcaaggaggcaaaataaatgtatcagtgaactgtattgaccgtcacaaggaggcttcccccgatcgggtagccttgatatgggagaaagatgagcctaatcaggaggagaggatcacctacaagcaactgtatgagatgaccaatcaacttgccaactcactacgtcgtcaaggtgtaaagcgaggtgatcgagtcgctatctacatgcctgtttctcctcatacagtagctgctatgttagcatgtgcaaggattggggccattcacagtgttgtttttgcagggttcagtgctgaagccttggctagcagaatcattgatggtaagaatttaagcacaaacaggacaaccatttcagacactcttttggacacaaagaaatcagtctaccaaaagtatgataatgcgacaaaacaaactgatacaaatgcacgtgtcatgcacgtgtgtgtaggacatagtacctttaatgagtcatctgttcacacatttggttcttgttatatctttcaggctatggcacaagaatcaacagaatgtgaaccagaagtgttggacagtgaggatcttctcttcatgctttatacctcagggtctacagggtctcctaaaggtctcgctcattcacaagctggttaccttctctatgccagtctaactcacaagtttgtatttgactatcagcctggtgatgtctatgcgtgtgttgcagatgtaggctggattactggacacagctatgtcgtatatggtcctctcagtaatggcgccacaaccgtgttgtttgaaagcattcccacctaccctgatccaggaagatattgggagatggtagagaggctaaagatcaaccagatttatgtagcccctacagccgtgaggttgctactcaaatcaggagactcttatgtgacaaagtatgacagatctacattgagaacactgggatgtgttggtgagccactgaaccacgaggcatgggattggtacaacaatgttgttggagaaggacgttgctcactagctgatacatggtggcagacagaaaccggtggtatatgtatcacgccacgcccatctgctcccaatgctgaaataacaggtggtcctatgcgccccttctttggaatcgaacccgctctccttgatgaaaagtgtcgggaagtcacagtgaacaatgagcctggcgccctctgcatccggaaaccatggccaggaatagcaagaaccatatatggcaatcacaaacgctacctggagacgtacctgagtccgtacccaggattctatttctctggtgatggtgcagtccgagacgataaaggttactaccacatcacaggtagaatggatgatgtcatcaatgtcacaggtcatcgtctaggaacagcagaggtcgaggatgctatggatgagcatcctgccgtagcggagacagctgtagtgggctacccgcatgacattaaaggagaaggtgtgtatgcatatgtgactctgaaggatgatgtgacagaaagcgaaggagatatcatcaaggaattaaaggctctagtcagacagaagatcgctgcttatgctgttcctgatatcatccagatcactccaggactaccgaagacacgctctggtaagatcatgcgacgtgtcctcaggaaggtgtcagctgatcagagcgatgaactaggagacgtgtccaccttggctgatccttccatcgtagagatcatcgtaaagaaccatgataaagtggccaagaaatag

SEQ ID NO: 121965 - protein, 655 aa, Strongylocentrotus purpuratus
MQVSSTNIPELNDFEALGYSFNSHEELYKFSLNEPEIFWGTLARNRLRWYRKFDEVMDCNLQEGKIAWFQGGKINVSVNCIDRHKEASPDRVALIWEKDEPNQEERITYKQLYEMTNQLANSLRRQGVKRGDRVAIYMPVSPHTVAAMLACARIGAIHSVVFAGFSAEALASRIIDGKNLSTNRTTISDTLLDTKKSVYQKYDNATKQTDTNARVMHVCVGHSTFNESSVHTFGSCYIFQAMAQESTECEPEVLDSEDLLFMLYTSGSTGSPKGLAHSQAGYLLYASLTHKFVFDYQPGDVYACVADVGWITGHSYVVYGPLSNGATTVLFESIPTYPDPGRYWEMVERLKINQIYVAPTAVRLLLKSGDSYVTKYDRSTLRTLGCVGEPLNHEAWDWYNNVVGEGRCSLADTWWQTETGGICITPRPSAPNAEITGGPMRPFFGIEPALLDEKCREVTVNNEPGALCIRKPWPGIARTIYGNHKRYLETYLSPYPGFYFSGDGAVRDDKGYYHITGRMDDVINVTGHRLGTAEVEDAMDEHPAVAETAVVGYPHDIKGEGVYAYVTLKDDVTESEGDIIKELKALVRQKIAAYAVPDIIQITPGLPKTRSGKIMRRVLRKVSADQSDELGDVSTLADPSIVEIIVKNHDKVAKK

SEQ ID NO: 121966 - DNA, 2046 bp, Nasonia vitripennis
  CDS (1)..(2046)
atggccgacaggatataccagccgaatcctgagctcgccagggcggctcactgcaagagcatggagcagtacaagcgaatgcacgagaggtcgataaagcatccggcacaattttggggcgaaatagccaaggaattctactgggagacgcacacgactgaggacaaattcttctcttacaattttgacctgaatgcgggtgacatctacatcaagtggatggaaggagcctctacgaatttgagcttcaatctgctcgacaagaacgtcaagaacggaaagggcgatcaagtggccttttactgggagggcaatgacccggacgactactctcgtctcacttaccggaagctcctggaggagacctgtcgtttcgccaacgtgctcaagtcgaaaggcgtgcagaagggcgaccgcgtggccatctacatgcccatgatcctcgagctgcccatagcgatgctcgcctgcacgaggatcggcgcagttcacagcgtcgtgttcgcaggttactcggcggactcgctggccgagcgcatgctggactcgaaggccaaggtcctggtcacggctgacggggtctggcgcggggagaagcttctgctgctcaagaccatctgcgacgacgccctcgacaaggttaagaagcacggacaccaggtcgagagctgcatcgtcgtgtcgcatctcaggcggctcagcgctccccagggcaagaacgaaacccctcacgcgaatggcgcgacgaacggaaattcgaacggcgactcgcagcaggtgccctgggacgacgacagggacgcttggtggcacgacgagatggaggacgccgaggcgagttgctatcccgtctggatgaacgccgaagatccgctctttattctgtacacgagcggctcaacgggaaagcccaagggtgtccagcacacgacggccggctacttgatatacgccgcgacgactttcaaatacgtcttcgactatcatcccggggacgtgtactggtgcactgctgacatcggctggatcaccgggcacacctacgtcgtttacggacccctcgccaatggagccacgtccgtcttgttcgagggcacaccgttctatccgacgaacgacaggtactggtctgtcgtcgacaagtacaaagtcaatcagttctacacggcgccaaccgcaattcggtcactcatgaaattcggcgacgaccacgtgaagaagcacgatctgagcacgctcaaggttctcggctcggtgggcgagccgatcaactcggaagcttggctctggttctacaacctcgtgggtcacggtaagtgcagcatagccgacacgttctggcagaccgagaccggcggtcacgtcatcacaccgctgcccggcgcgacgcccatgaagcctggctcagccagctttccgttcttcggcgtacaacccgagctgctggacgaggacggccacgtgatcgagggcgaaggcgagggatatctcgtgttccgcaggccctggcccggcatgatgcgcacgctctacggcaaccacgagcgattccagagcacgtacttcgacaggtttcacggattctactgcacgggcgacggcgctcgaagggataaagacggctatctctgggtcaccggccgtatcgacgacatgttgaacgtgtccggtcacctcatgtccaccgccgaggtcgagagtgtgctggcggaacactcttccgtcgccgaagccgccgtcgtcagtaaacctcacccggtcaagggccagtgtctctactgctttgttacacccaacgagggcaagcccttcgataagaaactccaggatgagctcaagaaaaaggttcgcgaaagaatcggtccgttcgcccagccggacgtgatccagcacgctccaggtctgccgaaaactcggtccggcaagataatgcgacgggtgttgcgaaagatcgcgatcggcgacaagaacgtcggcgacgtctcgacgctggctgacgaaggtgtcgtcgaccttctcttctctctgaggccgcaacaagtctaa

SEQ ID NO: 121967 - protein, 681 aa, Nasonia vitripennis
MADRIYQPNPELARAAHCKSMEQYKRMHERSIKHPAQFWGEIAKEFYWETHTTEDKFFSYNFDLNAGDIYIKWMEGASTNLSFNLLDKNVKNGKGDQVAFYWEGNDPDDYSRLTYRKLLEETCRFANVLKSKGVQKGDRVAIYMPMILELPIAMLACTRIGAVHSVVFAGYSADSLAERMLDSKAKVLVTADGVWRGEKLLLLKTICDDALDKVKKHGHQVESCIVVSHLRRLSAPQGKNETPHANGATNGNSNGDSQQVPWDDDRDAWWHDEMEDAEASCYPVWMNAEDPLFILYTSGSTGKPKGVQHTTAGYLIYAATTFKYVFDYHPGDVYWCTADIGWITGHTYVVYGPLANGATSVLFEGTPFYPTNDRYWSVVDKYKVNQFYTAPTAIRSLMKFGDDHVKKHDLSTLKVLGSVGEPINSEAWLWFYNLVGHGKCSIADTFWQTETGGHVITPLPGATPMKPGSASFPFFGVQPELLDEDGHVIEGEGEGYLVFRRPWPGMMRTLYGNHERFQSTYFDRFHGFYCTGDGARRDKDGYLWVTGRIDDMLNVSGHLMSTAEVESVLAEHSSVAEAAVVSKPHPVKGQCLYCFVTPNEGKPFDKKLQDELKKKVRERIGPFAQPDVIQHAPGLPKTRSGKIMRRVLRKIAIGDKNVGDVSTLADEGVVDLLFSLRPQQV

SEQ ID NO: 121968 - DNA, 2055 bp, Nasonia vitripennis
  CDS (1)..(2055)
atgaacaagaaccagctgcagtcggactttctgccggcggagaactcggacaaggagagggacagcttcaaggcgaagatcgtcaggcagaagctgaggaccgatggctccgactacatactcaatcagaaccgctacaggagtaccatctacgaggaggcctttcgcaagtccatcgagaaccccgaggaattctgggcggaaataggccagtgcatcgagtggagcagaccctgggaccgtgtgctcgacaactccaacgagccgttcaccaaatggtacgtgggcggagagacgaacgcctgttacaacgcagtggaccgtcacgtggcagctggcctgggctcgaaaacggcactgatacacgacagtccgatgacggagacggtgcgtcgggtcagctacgcggagcttctcgaccgcacgtcacggttggccggtgctctggccgaattgggagttagcaggggggacagggtgctgatctacatgccgctgattcctgagacgatagtcgcgattctcgccaccgccaggctcggggctgtgcactcggtcgtattcggaggcttcgcggccaaggaacttgcgacgaggatcgatcacgccgagccgaaggtcatagtcgccgccagctgcggcctcgagcctggcaaagtggtaaagtacacggacatgctgaacgacgcgatgaatctgatctcggtggcggcgccccactgcgtggtctatcagcgcaggcacatctgggaggcgccgctgctcgagtcccagctcgactgggacgatctgctggaacacgccgagccgcatccctgcgtgcccgtcgaagccaatcagccgctctacattctctacacgtccggaaccacagataagccaaagggtatccagcggccgataggcggccacatagcgaccctctgctggacgatgaatgcgatctacggcatggacaagaactcggtctggtgggtagcctcggacctcggctgggtcgtcggtctctcctacatctgttacggccctctgctctacggcgccacgagcgtcatgtacgagggcaaacccgacaggacccccgacgcgggacagtacttcaggatcatagacgagcacaaagtcaacgcgctcttcaccgtccccacggctttccgcgttctgaggcgagctgatccggagacgcatctgggaagaaaatactcgacgaaatccttgaggacgatcttcgtggcgggggagcactgcgactacgaggcgaaggcctgggcggagaaggtgttcaaggtgccgattctgaaccactggtggcagaccgagaccggacacgccatcaccgcgacctgtctcggactgggccacaccaccagtccgccaaagtacagcactggaatgcccttcccgggatactacgtcgaggtgctgagggaagacggaagcaaggcggaaccgcacgaactcggcaggatcgccgtgaggctacctctgccaccgggaaccatgtccacgttgtaccacgcgccgggcaggttcaaggagatctacttctccaagtatccgggatactacgacacgatggacgccggctacatcgacgagtacggctacgtgttcgtgacggcgcgcgacgacgacgtgatcaacgtggccggtcaccggctctcaacctccgccctcgaggacgtcgtccttggacacccggaagtcgtcgacgctgccgtcgttggcgtaccggaacacaccaagggagagatcccgctctgcctctacgtcatgcgagaccactcgaggaagagcgagcaggagatcaacacagagctgatcgcccgagtgcgggagctcataggcccgatcgctgcgttcaaagtcgccgcgtcggtcaaagcactgcccaggacacgctccggcaagacctgccggaaatccatcgcggacctcgcgcgctcgaagcacgtccagatcccgagcacgatcgacgacccaaccgtctacagggacatcaagcaggtgctgcagaagctcggcttcgcgagaatggcaccggatccccagtag

SEQ ID NO: 121969 - protein, 684 aa, Nasonia vitripennis
MNKNQLQSDFLPAENSDKERDSFKAKIVRQKLRTDGSDYILNQNRYRSTIYEEAFRKSIENPEEFWAEIGQCIEWSRPWDRVLDNSNEPFTKWYVGGETNACYNAVDRHVAAGLGSKTALIHDSPMTETVRRVSYAELLDRTSRLAGALAELGVSRGDRVLIYMPLIPETIVAILATARLGAVHSVVFGGFAAKELATRIDHAEPKVIVAASCGLEPGKVVKYTDMLNDAMNLISVAAPHCVVYQRRHIWEAPLLESQLDWDDLLEHAEPHPCVPVEANQPLYILYTSGTTDKPKGIQRPIGGHIATLCWTMNAIYGMDKNSVWWVASDLGWVVGLSYICYGPLLYGATSVMYEGKPDRTPDAGQYFRIIDEHKVNALFTVPTAFRVLRRADPETHLGRKYSTKSLRTIFVAGEHCDYEAKAWAEKVFKVPILNHWWQTETGHAITATCLGLGHTTSPPKYSTGMPFPGYYVEVLREDGSKAEPHELGRIAVRLPLPPGTMSTLYHAPGRFKEIYFSKYPGYYDTMDAGYIDEYGYVFVTARDDDVINVAGHRLSTSALEDVVLGHPEVVDAAVVGVPEHTKGEIPLCLYVMRDHSRKSEQEINTELIARVRELIGPIAAFKVAASVKALPRTRSGKTCRKSIADLARSKHVQIPSTIDDPTVYRDIKQVLQKLGFARMAPDPQ

SEQ ID NO: 121970 - DNA, 2010 bp, Anopheles gambiae str. PEST
  CDS (1)..(2010)
atgccgtcggaaccggagaagattttcaacccccatccggatgtcgccagcaaggcgtacatcaacagtatgcagcagtaccgcgagttttaccagcagtcgctggagaatccgggccagttctgggccaatgtggccaagcagttccactgggagacgccgtacgatccgaagaacttcttctcgtacaacttcgacatctcgaaaggtcccatctacgtaaagtggatggagggtgcctcgaccaacatttgctacaacttgctggatcgcaacgtgaagaacgggctcggcgataccgtcgcttactactgggaaggcaatcatcccgatgactacagccggctaacgtacaggaagctgctcgaggaggtatgccggttcgcgaacgtgctaaagagccacggcgtccagaagggtgaccgggtgtcgatctacatgcccatgaccatggagctgccggttgcaatgctggcctgtgcacgcatcggtgccgttcactcgattgtgtttgccggtttctcgtccgattcgctcgccgagcgcatgcacgactgccaggcgaaggtgctgatcacggccgacggtgcctggcggggcgagaagatcctgcacctgaaggacatctgtgataccgcgatggacaaggcggaagagctcggccaccacgtgcagacgtgcattgtcgtgtcgcacattaaccgggtcacgccgggcaaggaggactgggacggttcgttcgataccccatggagagatggacgcgacttttggtggcaccaggagatggaggacgccgaaccggcctgctacccggagtggatgtcggccgaggacccactgtttatgctgtacactagcggctcgaccggcaaaccgaagggtgtgctgcatacgaccgccggctacctgctgtacgcggccacgaccttcaagatcgtgttcgactacaagccgaacgatatctactggtgcacggccgacatcggttggattacgggccacacgtacgtgctgtacggtccgctcgctaacggtgccacctcggtcatgttcgagggcacaccgttcttcccggacacggaccggtactgggagatcatcgacaagtacaaggtgtcgcagttttataccgcaccgaccgcgatccggtcgctgatgaagtttggcgacgagccggtgctgaagcatgatctatcgagtcttagagttctcggtagtgtcggtgagccgatcaatccggaagcgtggctttggtactatcgggtgatcggcaaggagcgctgttcgatcgtggacaccttctggcagacggagacaggcggacacgtgattacacccctgccgggcgctacaccaatgaagcctggctctgcatcattcccgttctttggcgtgaaaccgacgctgctggacgaaagcggtacggaaattacgggcgaaggtgaaggctatctcgtcttttcccagccctggccgggtatgatgcgcacgctgttcaacaaccatccgcgctacgaatcgacgtacttttccaagttcaatggatactactgtacgggtgatggcgcacgtcgcgatgcggacggctacttctgggtgacggggcgcgtcgacgacatgctgaacgtgtcgggccatctgatgtccacgtcggaggtcgagtcggtgctgaccgagcatccgcgcgtctcggaagcggccgtcgtatcccgacctcacccggtcaagggcgaatgtttgtactgcttcatcacgcccaaccagaacgaagcgttcgacaaaacgctcatcagcgagctgaaggtgctggtgcgggagcgcatcggtccgttcgcgcagccggacgtgatccagcatgcgcccgggctgccgaaaacgcgctcgggcaagattatgcgacgagtgctgcgcaaggtggccgtcaacgatcgggatgtgggcgatacgtccacactggcggacgaggccatcatcgagcagctgtttgctaaccggccggcccactaa

SEQ ID NO: 121971 - protein, 669 aa, Anopheles gambiae str. PEST
MPSEPEKIFNPHPDVASKAYINSMQQYREFYQQSLENPGQFWANVAKQFHWETPYDPKNFFSYNFDISKGPIYVKWMEGASTNICYNLLDRNVKNGLGDTVAYYWEGNHPDDYSRLTYRKLLEEVCRFANVLKSHGVQKGDRVSIYMPMTMELPVAMLACARIGAVHSIVFAGFSSDSLAERMHDCQAKVLITADGAWRGEKILHLKDICDTAMDKAEELGHHVQTCIVVSHINRVTPGKEDWDGSFDTPWRDGRDFWWHQEMEDAEPACYPEWMSAEDPLFMLYTSGSTGKPKGVLHTTAGYLLYAATTFKIVFDYKPNDIYWCTADIGWITGHTYVLYGPLANGATSVMFEGTPFFPDTDRYWEIIDKYKVSQFYTAPTAIRSLMKFGDEPVLKHDLSSLRVLGSVGEPINPEAWLWYYRVIGKERCSIVDTFWQTETGGHVITPLPGATPMKPGSASFPFFGVKPTLLDESGTEITGEGEGYLVFSQPWPGMMRTLFNNHPRYESTYFSKFNGYYCTGDGARRDADGYFWVTGRVDDMLNVSGHLMSTSEVESVLTEHPRVSEAAVVSRPHPVKGECLYCFITPNQNEAFDKTLISELKVLVRERIGPFAQPDVIQHAPGLPKTRSGKIMRRVLRKVAVNDRDVGDTSTLADEAIIEQLFANRPAH

SEQ ID NO: 121972 - DNA, 1941 bp, Anopheles gambiae str. PEST
  CDS (1)..(1941)
atgctgagcccactgtacatggaggcgtactgtcagtcgctcgagcagccggaatcgttctggggcgacctggcggaacagctcatcgattgggatcaaccgtgggagaaagtgctggacaatagcaacagcccattcacgaagtggtatgttggaggaaagctcaacgcttgctacaacgcaatcgaccgccatgtgctcgccgacaaggggagcaaggtggcgctcattcatgacagtcccaccaccaacacggtgcgccatgtgacgtacaatgagctgtatgataaggtgtcccgattagcgggaggattgcggcggctgggcgtccagaagggagaccgggtcgtcatctatatgccactgataccggaagccatcatcgcgatgctggccaccgcacggctcggtgccgttcattccgtcgtgtttggaggatttgcggcgagcgagctgtgtacgcgaatagagcatgccgagccgaaggtgatcattgccgcgaactgtggcgtcgagccgcacaagatcatctactatctggacatcctgcacgaggcggtcgcaatgtcgcgctggaagccggccaagaacatcatctaccgacgggcgaacatcctgatgtcggatctggacgagacgtgggacattgcctgggagaatgcgctcgacaccgtgccggtcgactgtgtgccggtcgaggcgaacgatccactgtacattctctacacttccgggacgacagacaaaccgaagggcatacagcgaccgatcggtggccatctggtcacgctgatgtacacgatgaacacgatctacggcctccagcaggacgatgtgtggtggaacgcgtccgacctgggctgggtcgtgggccactcgtacatctgctacgggccgctgctgtacggtgcgaccagcgtcatgtacgagggcaaaccggaccgaacgcccgatccgggccagtactttcgcatcatcgatcagcacaaggtgtcggccgtgttttccgtaccgaccgcttttcgcgtcatccggcgcgtcgatccggacgtcacgtatggccggaagtacagcttgaagtcgctgcgcgccatcttcatcgccggggagcactgtgatctggaaacgatgaaatggatgcgcaaaacgttcaaggtgcccgtgctgaaccagtggtggcaaacggagaccggttcggccatcacggcgacctgcgtcggctttgcgcagaacctgcagacgcccccgttcacgacgggcctgccgtactgcgggtacgacatctacgtgctggacaagaacggccacgaagcgaaaccgaacgagctgggacgcatcgtggtgaagctgccgctgccaccgggcaacatggccacgctgtaccgcagtgacgagctgttccgcaaaacgtacttccaacggtttccgggctactacgacacgatggacgccgggtacaaggacgagaatgggtacatctacgtgacggcacgggacgacgacgtgatcaatgttgctggccaccgtatctccacgtcgagcctggaggatgcgatcctgcggcatccggacgtagccgatgcggccgtgttcggtgtgcccgaaccgaccaagggccagataccgctctgcctgtacgtgaccaaggcgaacgtgtccaagccggccgccaagatgtcggtcgagctgatcaacatcatacgggaggtgatcggaccgatcgccgccttcaaactagccgcccaagtacaaagcttaccacgcacccgatccggcaaaacgttacgcaaagcgatggctgacctcgcggcaaacaagcacatcaccataccggccacggtcgaggacgcgacggtgtttgtcgacattaagcgcgcgctgcgcgagctcggctacgcgatggccgcgcccgatccggagctgcgacaaaccgtaagatga

SEQ ID NO: 121973 - protein, 646 aa, Anopheles gambiae str. PEST
MLSPLYMEAYCQSLEQPESFWGDLAEQLIDWDQPWEKVLDNSNSPFTKWYVGGKLNACYNAIDRHVLADKGSKVALIHDSPTTNTVRHVTYNELYDKVSRLAGGLRRLGVQKGDRVVIYMPLIPEAIIAMLATARLGAVHSVVFGGFAASELCTRIEHAEPKVIIAANCGVEPHKIIYYLDILHEAVAMSRWKPAKNIIYRRANILMSDLDETWDIAWENALDTVPVDCVPVEANDPLYILYTSGTTDKPKGIQRPIGGHLVTLMYTMNTIYGLQQDDVWWNASDLGWVVGHSYICYGPLLYGATSVMYEGKPDRTPDPGQYFRIIDQHKVSAVFSVPTAFRVIRRVDPDVTYGRKYSLKSLRAIFIAGEHCDLETMKWMRKTFKVPVLNQWWQTETGSAITATCVGFAQNLQTPPFTTGLPYCGYDIYVLDKNGHEAKPNELGRIVVKLPLPPGNMATLYRSDELFRKTYFQRFPGYYDTMDAGYKDENGYIYVTARDDDVINVAGHRISTSSLEDAILRHPDVADAAVFGVPEPTKGQIPLCLYVTKANVSKPAAKMSVELINIIREVIGPIAAFKLAAQVQSLPRTRSGKTLRKAMADLAANKHITIPATVEDATVFVDIKRALRELGYAMAAPDPELRQTVR

SEQ ID NO: 121974 - DNA, 1908 bp, Magnaporthe grisea 70-15
  CDS (1)..(1908)
atgcttgacaacctcgaggagtaccagcagctctacaaggagagcatctccgagcctaagcaattctgggcacggatggcacgagagcttttgacatggagtcgggatttcgaaacggtttactcggggagcctctctgctggcgacagtgcctggttcctggagggcgagctcaacgcttcgtataactgcatcgacaggcatgcgctcaaggatccaaaccgagtggccatcatatacgaggcggacgatccgagcagcgggcgaaccctgacctacggcgagctgatgcgcgaggtttgcaggacagcacatgttctccgtcagatgggtgttcgcaagggggacactgtagccgtgtaccttcccatgatccccgaggcgctcatcgcatttctggccgtcactcgcattggcgctgttcactccgttgtgtttgcaggtttctcggctgactcgctgcgcgaccgcgttgttgatggccagtccaaggtcgttatcactactgacgagggcaagcgcggtggcaagctgattggtacaaagcgcatcgttgacgaggccctgaagaactgcccagatgttagtcacgtgctggtttacaagaggacgggcgcagatgtgcccatgatgcaggggcgcgatttttggtggcatgaggaggttgagaagtggccaaactatatcccgcccgtccccatgaactcggaagatccactgttccttctgtacacgtccggttctacaggcaagccaaaaggtgttatgcataccaccgccggctacctgttgggcgccgccatgacgggcaagtatgtcttcgacatccacgacggggatcgctttttctgcggcggtgatgttggctggattactggacacacatatgtcgtttacgctcctctgcttctgggtgtttcaacggtcgtgttcgaaggcaccccagcgtacccaactttctctcgctactgggacatcatcgaccagcacaagatcactcacttttacgttgccccgactgctctcaggctgctaaagcgtgcaggagaccagtgggtcaagcatgaaatgaagcaccttcgggtcctgggctctgtcggagagcccattgcagccgaggtgtggaaatggtacttcgagatcgttggaaaggaacaggcgcaaatcgtggacacctattggcaaacagagacgggctccaatgtcatttgccctctcgcgggcgtcaccccaaccaaaccaggctctgcctcgctgcctttctttggcatcgaacctgccatcattgatcccgtatctggtgaggagatccacggcaatgacgttgaaggagtgcttggtttcaaacaggcatggcccagcatggcgaggacagtgtggggtgcccacaagaggtatatggagacttatatgaacgtttacaatggattctatttcactggagacggtgctgcacgggaccatgaagggttttattggatcagaggcagagtggacgacgttgttaacgtgagtggccaccgactgtcaacagcggagattgaagccgcgctactcgagcatcattatgttgccgaggctgccgttgtaggtatccaggacgagctcacgggtcaggcagtgaatgcatttgtgtcgctggccgagcatgttacaacggacaacgacgagtccctgaggaaggaactcattacccaggttcggcgtagcattggcccctttgcggcacccaaagccgtgttcgtcgtcccagatttaccacgcacaaggagtggtaagatcatgcggagaattctcaggaagatcctcgccggcgaggaggaccagcttggcgatgtcagcactctttcggacccgacagtggttgatagaatcatcacgaccgtccatgagtacaagaagaagtag

SEQ ID NO: 121975 - protein, 635 aa, Magnaporthe grisea 70-15
MLDNLEEYQQLYKESISEPKQFWARMARELLTWSRDFETVYSGSLSAGDSAWFLEGELNASYNCIDRHALKDPNRVAIIYEADDPSSGRTLTYGELMREVCRTAHVLRQMGVRKGDTVAVYLPMIPEALIAFLAVTRIGAVHSVVFAGFSADSLRDRVVDGQSKVVITTDEGKRGGKLIGTKRIVDEALKNCPDVSHVLVYKRTGADVPMMQGRDFWWHEEVEKWPNYIPPVPMNSEDPLFLLYTSGSTGKPKGVMHTTAGYLLGAAMTGKYVFDIHDGDRFFCGGDVGWITGHTYVVYAPLLLGVSTVVFEGTPAYPTFSRYWDIIDQHKITHFYVAPTALRLLKRAGDQWVKHEMKHLRVLGSVGEPIAAEVWKWYFEIVGKEQAQIVDTYWQTETGSNVICPLAGVTPTKPGSASLPFFGIEPAIIDPVSGEEIHGNDVEGVLGFKQAWPSMARTVWGAHKRYMETYMNVYNGFYFTGDGAARDHEGFYWIRGRVDDVVNVSGHRLSTAEIEAALLEHHYVAEAAVVGIQDELTGQAVNAFVSLAEHVTTDNDESLRKELITQVRRSIGPFAAPKAVFVVPDLPRTRSGKIMRRILRKILAGEEDQLGDVSTLSDPTVVDRIITTVHEYKKK

SEQ ID NO: 121976 - DNA, 2103 bp, Magnaporthe grisea 70-15
  CDS (1)..(2103)
atggatagccatccgcaagacgatttgcacgcacactcgctggccgacccggcctctttctggggccaacaagccgagcagctatattggcacaagaaacccgatgcagtcctgacagagagtgcaaagaaagtccccgatggagactctgaagcgtcgcacccgcactgggaatggttcccaggcggtgagatttcgacatgctacaactgtctagaccgccatgtcgaaaagggcaacggtgatgccccggcaatcttttacgacagtcccgtgaccggaagcaaacaacgacttagttataaggagctccttgatgaggtcgccttgttcgccgccgttttgaggcaggagggtgtgagaaaaggggatgttgttttggtttatatgcccatgatacctgctgctctcatcggtatactagctataaatcgcctcggcgccatccactccgtcgtctttggtggctttgcttccggagctctggcccaacgaattgatgcctcacgccccgttgccatcctgacggcatcgtgcggcgttgaagcgggtaaggggcccatagcgtatcgtaatctggtcagagaagccgttgccaagtccaaatggaagccgccaaagaccattgtgtggcagcgcgaacagctgcgatgggagccggtgaggcgagaggatggcgagcgtatctggcacaagcttgtctcctcggccaaggcgagaaagctgcctcctgccgagtgtgtacctgtgggtagcaacgatcccatctacatcatatacaccagtggaacgacgggcttgccgaaaggcgttgtaagggaatcaggaggccacgccgtcggtctatatttgtccatcaactccaagtttggcattcatggccctggggatgttatggcctgcttcagcgacatcggctgggtagtctcacactcatatacactctatggtccgctcatcaccggtgccgctacggtactctatgaaggaaagcccgtaggaactcctgatgcgggagccttctggcgcattgtggaggagtacaaagtcaacagcctctttactgcgccgactgcactcagggccatccgaaaagctgatcccgacaacaaattggttgaaaagtatggtcggcacggagggttgaagagcctccgagccctcttcctggccggcgaaaggtcagagcctgcgatcgtggaagcgtaccaggaggtcttgaacaagtatgccgcgcccaacgcccatgtcatagacaattggtggtcgaccgagtccggctcgcccatatcgggcatcgctctggtcccgcagcatggaaaggacggcaagacttgtgtcagaacccagaagactaagcccttgagttccaaacccggcagcgcaggcaagccaatgcctgggttcgacgtgagggttgtgaatgacgaaggtgaagagcttcctaggggcaagatgggcaacattgtcatggctgcaccccttgcgccgacagcgttccgaacgctgtgggatgatgagcctaggttcttccgcggctactttaagcgcttcaatgggctttgggttgacacgggcgatactggtgtcgttgatgaggatggttacgtgcacatcatgagcagatcagacgacatcatcaatgttgcagcccaccgactatctactggcactctggaggaagcaatcaccagccatcccctagtgacggaagtctgcgtcgtcggcatccccgattcactcaaggggcagatgccattcgcgctggtgacgaccacgccgaacaacgagcacgtgactgacgagcagctgctttccgagatacagcagctcatccgcaagcaggtcggcgctatcgcggcgctccgcggcataatccgcggtcagggcatgatccccaagactaggtcgggaaagactctccgccgcgtcatcagggagctgtttgagaatgcacgcataggacaggctgataaggaggtcacgataccgtctacggttgaggatgcggcggtggtcgaggtggcgagggccaagatcaaggagtactttgagcaacaggccaagggcggtggggatcgtgctcccaaggccaagttgtga

SEQ ID NO: 121977 - protein, 700 aa, Magnaporthe grisea 70-15
MDSHPQDDLHAHSLADPASFWGQQAEQLYWHKKPDAVLTESAKKVPDGDSEASHPHWEWFPGGEISTCYNCLDRHVEKGNGDAPAIFYDSPVTGSKQRLSYKELLDEVALFAAVLRQEGVRKGDVVLVYMPMIPAALIGILAINRLGAIHSVVFGGFASGALAQRIDASRPVAILTASCGVEAGKGPIAYRNLVREAVAKSKWKPPKTIVWQREQLRWEPVRREDGERIWHKLVSSAKARKLPPAECVPVGSNDPIYIIYTSGTTGLPKGVVRESGGHAVGLYLSINSKFGIHGPGDVMACFSDIGWVVSHSYTLYGPLITGAATVLYEGKPVGTPDAGAFWRIVEEYKVNSLFTAPTALRAIRKADPDNKLVEKYGRHGGLKSLRALFLAGERSEPAIVEAYQEVLNKYAAPNAHVIDNWWSTESGSPISGIALVPQHGKDGKTCVRTQKTKPLSSKPGSAGKPMPGFDVRVVNDEGEELPRGKMGNIVMAAPLAPTAFRTLWDDEPRFFRGYFKRFNGLWVDTGDTGVVDEDGYVHIMSRSDDIINVAAHRLSTGTLEEAITSHPLVTEVCVVGIPDSLKGQMPFALVTTTPNNEHVTDEQLLSEIQQLIRKQVGAIAALRGIIRGQGMIPKTRSGKTLRRVIRELFENARIGQADKEVTIPSTVEDAAVVEVARAKIKEYFEQQAKGGGDRAPKAKL

SEQ ID NO: 121978 - DNA, 2052 bp, Gibberella zeae PH-1
  CDS (1)..(2052)
atggcctctcccgctcccgctcccgcccctgcagccgctgagactgtctcattgaagagtgaagaaacacaagctcctgccaaagagactaaaggccctgtagttgctgaagcacatctcgttgatacataccaacacccccaccggccccaccttgccaatctcgaggagtataagcgactctacaaggaatccatcacacaacccgaaaagttctgggctgaacgcgcacgtgaactcatctcatgggacaacgacttcaagaccacccaaagtggttcacttctgaatgctgatgtctcatacttcaacgaaggccgcctgaatgcctcatacaactgtgttgaccgtcacgctttcaaggatcccgatcgtgttgccatcatctacgaggctgatgagcccagtgagggacgcaatgttacgtatggcgagctactgcgggaagtctctcgaactgcttgggttctcaagcagatgggtgtccgcaagggtgatactgtcgctatctacctacccatgattcctgaagccatcatcgcacttatggcctgtgttcgtattggcgcagttcattcagttatctttgctggtttctcctccgactccctgcgcgatcgtgttgtcgatgctggctccaaggtcgtcatcacaactgatgaaggcaagcgaggcggcaagttgattggcaccaagaagattgtcgacgatgctctcaagcagtgccctgctgttgagaatgttcttgtctataagcgcacaggctcagagatcccctggaccagcggccgtgacttctggtggcatgaggaggttgagaagtggcccaactacttccctcctgagcctgtcgcttccgaagaccccttattccttctctacacttctggttccactggcaagcccaagggtgttttgcacacgacagccggatatctccttggtgccgccatgactggcaagtatgtctttgatatccatgagggcgatagatacttctgcggcggtgacgtcggctggatcaccggtcatacttatgtcgtttatgctcccctgatgctcggtgtatccactgtcgtctttgagggtacacccgcctaccctaacttctcgcgatactgggacattattgagaagcacgacgttacccagttttacgtcgcccccaccgctctgagactgttgaagcgtgctggcgatgagcatgtccgaggaaagttcgctcatcttcgggtactaggctctgtcggcgagcctatcgctgccgagatctggaagtggtactttgaggttattggaaaggaggagtgccacatcgtcgacacatactggcaaaccgagtctggctcccatgttatcacccccctagctggaattactccaactaagcccggcagttgctcgctgcctttctttggtgttgagcctgcccttatcgatccagtttccggtgaagagattcatggaaacgatgtcgagggcgttctgacatttaagcaatcttggcccagcatggctcgtactgtctggggagcccataaccggtataaggagacttaccttgacgtctacaagggctactactttactggagatggtgctgcccgagaccacgagggtttctactggattcgaggtcgtgttgatgacgttgtcaacgtcagtggtcatcgtctatcgactgccgaaatcgaggcagcgctattggaacaccatgccgttgctgacgcagcagttgtcggtatcgctgatgagcttaccggccaggctgtcaacgcatttgttgatcttgagaagaatgttgaagcaaccgatgctctacgcaaggaactgattgttcaagtacgcaagagcattggaccttttgcagcacccaaggccgtatacattgtgccggatatgcctaagacgcgaagcggcaagattatgcgacgagtgttgagaaagattgttgctggagaagaagaccagcttggagataccactactctatcggatccttctgttgtggacaagatcatcaaggctgttcatgatgccaagcgcaagtga

SEQ ID NO: 121979 - protein, 683 aa, Gibberella zeae PH-1
MASPAPAPAPAAAETVSLKSEETQAPAKETKGPVVAEAHLVDTYQHPHRPHLANLEEYKRLYKESITQPEKFWAERARELISWDNDFKTTQSGSLLNADVSYFNEGRLNASYNCVDRHAFKDPDRVAIIYEADEPSEGRNVTYGELLREVSRTAWVLKQMGVRKGDTVAIYLPMIPEAIIALMACVRIGAVHSVIFAGFSSDSLRDRVVDAGSKVVITTDEGKRGGKLIGTKKIVDDALKQCPAVENVLVYKRTGSEIPWTSGRDFWWHEEVEKWPNYFPPEPVASEDPLFLLYTSGSTGKPKGVLHTTAGYLLGAAMTGKYVFDIHEGDRYFCGGDVGWITGHTYVVYAPLMLGVSTVVFEGTPAYPNFSRYWDIIEKHDVTQFYVAPTALRLLKRAGDEHVRGKFAHLRVLGSVGEPIAAEIWKWYFEVIGKEECHIVDTYWQTESGSHVITPLAGITPTKPGSCSLPFFGVEPALIDPVSGEEIHGNDVEGVLTFKQSWPSMARTVWGAHNRYKETYLDVYKGYYFTGDGAARDHEGFYWIRGRVDDVVNVSGHRLSTAEIEAALLEHHAVADAAVVGIADELTGQAVNAFVDLEKNVEATDALRKELIVQVRKSIGPFAAPKAVYIVPDMPKTRSGKIMRRVLRKIVAGEEDQLGDTTTLSDPSVVDKIIKAVHDAKRK

SEQ ID NO: 121980 - DNA, 1989 bp, Gibberella zeae PH-1; identical to SEQ ID NO: 28190
  CDS (1)..(1989)

SEQ ID NO: 121981 - protein, 662 aa, Gibberella zeae PH-1; identical to SEQ ID NO: 28191

SEQ ID NO: 121982 - DNA, 2109 bp, Gibberella zeae PH-1
  CDS (1)..(2109)
atgcctgacaacatagaagattaccacgttcaagacgaagttctacgttatagtcttgaagatcctgagcaattctggagacaccaggctgagcaacttcactggcacaagccattctcttcaactatccaactgacgcaaaagactttgaggagtggcatcacgcatgacagctgggagtggtttccagacggtgagatatctacctgctacaactgcgtcgatcgacatgtgctcgatggtcatggtgactctgtcgccatatactttgatagtcctgtgacaaataccaaagaaaagtatacctaccgtcagctgcttcatgaagtggaaacactcgctggtgccttgatggagcaaggcataggtaaaggagatgttataatgttgtatatacccacgattcctgctgcagttataggtatccttgctgcaaaccgccttggcgctattcactctattgtctttggcggcttcgccccttttgcgcttgcccaacgtatcgattcatgccatccagttgctatcctgacggcttcttgtggcattgacggcaacaaaccccccattgcatacaagcctttggtggaagaagcaatacgattggctactcataaaccaaaagacattattgtttggcagagggatcagctgagatggaatatcaacaccagtgctggtcagctggactggaaggctcttaccgaaaaggcacgatctcaatggatcaaggcagactgtgtccctgtcaagagcaccgatcctgtctatatcattcacacctcaggcacaactggaactcccaaaggcgtactacgtgacgccggcggccatgcagtcggtctgcatctttccatcagctacctatttcacatcaccggacctggttgtgtttccttcactgcctccgatattggctggattgtcggtcattcgtatattatatatggtcctcttcttaccggcgctgcaactgtcttatacgaggggaagcctgtcggtacacctgatgcatctgcgttctggcggatagttgatgagtacaaggtcaacaccatgttcacggcaccgacagctcttcgtgccatcagacgcgatgacccatataaccagatgttcatcgactatggaaaacgaggggctctcaggagtctaagaggtctctttctcgctggggaacgctctgagcctactcttattgagggttaccagaagcttatgacacagtattgtgctgaaaatgcccaagtagttgataattggtggtcgactgaagtcggttctcctatcactgggcgggcactcgtaccacacgctgggaaagatcgaagaacagaagtacgagggcatcagcctccttgtttgagagcgggtagtgctgggaaagcgatgccaggctttgacgttcgcattgttgatgatgaaggtgtcgaagtggaaagggaatctatgggaaatatcgttctagcgatgccgcttgctccaacaggcttccggactttatggcaggacgaagagcgattttggaagggttatctgaagagattcgatggtaaatggctggatacaggcgattcaggctggatcgatcgacaaggttatatccatgtgatggcgcgaagcgacgatgtgctgaatgtcagtgcacatcgtctttccagcggatccattgagcaagctatcgccactcatccacgcgttgttgaggtttgcatcatcggtatacctgactcgcttaaaggccaattgcccttcgcctttgtgacgctctcggggcaggtcgcttctgacccagcagtaccagaccagagagtcgtcaaggaaattcaacaattagtacgtggccaagtcggtgccatagcttccttgggtggcatcatccaaggcaagtgtatgattccgaaaacacgatccggcaaaatgctccggcgtgtacttaaggagatggcggaaaacgcaatccgcggcgaatttgaaaaagaggtcatggtacccagcacaattgaggacttggccaccttggatattgctcgtgccaaaattagcgagtactttgggcaggcagaaactagaaatgctgaggatgccatggtcaaggctcgtctataa

SEQ ID NO: 121983 - protein, 702 aa, Gibberella zeae PH-1
MPDNIEDYHVQDEVLRYSLEDPEQFWRHQAEQLHWHKPFSSTIQLTQKTLRSGITHDSWEWFPDGEISTCYNCVDRHVLDGHGDSVAIYFDSPVTNTKEKYTYRQLLHEVETLAGALMEQGIGKGDVIMLYIPTIPAAVIGILAANRLGAIHSIVFGGFAPFALAQRIDSCHPVAILTASCGIDGNKPPIAYKPLVEEAIRLATHKPKDIIVWQRDQLRWNINTSAGQLDWKALTEKARSQWIKADCVPVKSTDPVYIIHTSGTTGTPKGVLRDAGGHAVGLHLSISYLFHITGPGCVSFTASDIGWIVGHSYIIYGPLLTGAATVLYEGKPVGTPDASAFWRIVDEYKVNTMFTAPTALRAIRRDDPYNQMFIDYGKRGALRSLRGLFLAGERSEPTLIEGYQKLMTQYCAENAQVVDNWWSTEVGSPITGRALVPHAGKDRRTEVRGHQPPCLRAGSAGKAMPGFDVRIVDDEGVEVERESMGNIVLAMPLAPTGFRTLWQDEERFWKGYLKRFDGKWLDTGDSGWIDRQGYIHVMARSDDVLNVSAHRLSSGSIEQAIATHPRVVEVCIIGIPDSLKGQLPFAFVTLSGQVASDPAVPDQRVVKEIQQLVRGQVGAIASLGGIIQGKCMIPKTRSGKMLRRVLKEMAENAIRGEFEKEVMVPSTIEDLATLDIARAKISEYFGQAETRNAEDAMVKARL

SEQ ID NO: 121984 - DNA, 1989 bp, Apis mellifera
  CDS (1)..(1989)
atgtacaaaaatagtaaaattcttggtgataaaacaagtgtaaaagattatataattaattgccatcacatttcttgtccgaaatatgatgaaagttataaagaatctttggagaatccagaaaaattttggggaaatgttgcacagtgcatagattggagtaaaccatggaaaaaagtattggataacactaaacaaccatttacaaaatggtttatcggcggagaattgaatgcctgctacaatgcagtagatcgacacattttagccggaaacggaaataaagtagcattaattcatgacagtccccaaacatcaacaattcaaaaaataacttataatgaacttttaaaaaaggtatctttattagctggagtgttagctaatatgggtgtgggcaaaggcgacgtggtgattatttatatgccactgattcctgaaaccataatggcaattttagctactacacgacttggcgcgatccactctgttgtatttggcggatttgccgcgaacgaattggctattagaataaatcatgcaaaaccaaaagtaataattgcagctagctgtggtatagaaccttccaagatcgttcgatacacggatatgttaaatggcgctatgaacctcatatctgtaaagaaaccacaatgcatcatatttcaaaggagaaacatctgggagagtcctcttttggaagatcaattcgattgggatgaagtgataaagagatcaaaacctcatccatgtgaaccagttgaggcaaacgcgcctttgtacattatgtatacttcagggacaacaggtcaaccgaaaggaattttaagaacagtcggtggacatctggtcgctctctgttggacaatgaaaacggtttatggtatgaacaaagattccgtttggtgggtggcttcagacatgggatgggttgttggacactcttacatttgttacgggcctttgctttatggtataaccagcgtaatgtatgagggaaaacctgataggacaccagacgcggcacaatacttcagagtgatcgatcaacacaacgtgaatgcattgttttgcgtgcccaccgcacttcgcattataagacgtgcagatcctgatttatcattgagtcgaaaatactctatgaaatctttgaaaactatattcgttgctggagaattttgcgactacgagacgaaaatctgggcggagaaagctttcaaagtgccaattttgaacaattggtggcaaacggaaacaggccatcctatcacagcgttgtgcctgggatacgggcataatcctggtttaccgaaatacagtacaggtctcccaattcctggttatcacatcgacatattacgggagaacagcaacgaggcagaagctcacgaattagggagaatcgttataaaattaccattaccacccgggtgcgtgtcaactctttatcacaacgataagaaatttaaagaaatatacttttccagatatccaggttactacgacactatggatgttggctataaagatgaatttggatacgtttatgtgatggcacgtgatgacgatgttatcaatgttgctggtcacagattgtccacatcagcactggaagatgtcatcttaactcattcggatgtggtagacgctgcagtgatcggtgttccagatccgactaaaggagaaatacctttatgtctttatataatgaaacaagaagcgacgaaaaatgaaaaacagattaatgacgaactaatagcacgagtaagaagtttaatcggtcccatagcgtctttcagaatagccgccgctgtgagcgcattgcctcgaacacgttcagggaaaataattcgtaaatctattgctaatttagctcgttccagattgttcaagatatcaagtacaatagaagatgcatcggtatatgtcgagatcaaagaggtgcttcagaagctcggttatgctaaactggcaccggatcctcaatga

SEQ ID NO: 121985 - protein, 662 aa, Apis mellifera
MYKNSKILGDKTSVKDYIINCHHISCPKYDESYKESLENPEKFWGNVAQCIDWSKPWKKVLDNTKQPFTKWFIGGELNACYNAVDRHILAGNGNKVALIHDSPQTSTIQKITYNELLKKVSLLAGVLANMGVGKGDVVIIYMPLIPETIMAILATTRLGAIHSVVFGGFAANELAIRINHAKPKVIIAASCGIEPSKIVRYTDMLNGAMNLISVKKPQCIIFQRRNIWESPLLEDQFDWDEVIKRSKPHPCEPVEANAPLYIMYTSGTTGQPKGILRTVGGHLVALCWTMKTVYGMNKDSVWWVASDMGWVVGHSYICYGPLLYGITSVMYEGKPDRTPDAAQYFRVIDQHNVNALFCVPTALRIIRRADPDLSLSRKYSMKSLKTIFVAGEFCDYETKIWAEKAFKVPILNNWWQTETGHPITALCLGYGHNPGLPKYSTGLPIPGYHIDILRENSNEAEAHELGRIVIKLPLPPGCVSTLYHNDKKFKEIYFSRYPGYYDTMDVGYKDEFGYVYVMARDDDVINVAGHRLSTSALEDVILTHSDVVDAAVIGVPDPTKGEIPLCLYIMKQEATKNEKQINDELIARVRSLIGPIASFRIAAAVSALPRTRSGKIIRKSIANLARSRLFKISSTIEDASVYVEIKEVLQKLGYAKLAPDPQ

SEQ ID NO: 121986 - DNA, 1974 bp, Yarrowia lipolytica CLIB122
  CDS (1)..(1974)
atgtctgaagaccacccagccatccacccaccctccgagttcaaggacaaccacccccacttcggaggcccccacctcgactgtctgcaggactaccaccagctgcacaaggagtccattgaggaccccaaggccttctggaagaagatggccaacgagctcatctcctggtcaaccccctttgaaactgtgcgatctggcggcttcgagcacggcgacgtggcctggttccccgagggccagctcaacgcctcctacaactgtgtggatcgacacgcctttgccaaccccgacaagcccgccatcatttttgaggccgatgagccgggccagggccgaatcgtcacctacggcgaactgctgcgacaggtgtctcaggtcgcagccaccctgcgatccttcggcgtccagaagggcgatactgtggccgtctacctgcccatgatccccgaggccattgtcactctgctggccatcacccgaattggcgctgtccactcggtcatcttcgccggcttctcctccggttctctgcgagaccgaatcaacgacgccaagtccaaggttgtcgtcaccaccgacgcctccatgcgaggaggcaagaccatcgacaccaagaagattgtcgatgaagccttgcgagactgcccctctgttacccacaccctggtcttccgacgagcaggtgtcgagaacctggcctggactgagggccgggacttctggtggcacgaggaggtcgtcaagcaccgaccctaccttgcccccgtccccgttgcctccgaggaccccatcttcctgctttacacctctggatccaccggcacccccaagggtctggcccacgctaccggtggctacctgcttggtgctgccctgaccgccaagtacgtgtttgacatccacggagacgacaagctgttcaccgctggagacgttggctggatcaccggccacacctacgtgctctacggtcctctgatgctcggagccaccactgttgtgttcgagggaacccctgcctacccctccttctcgcgatactgggacattgtcgacgaccacaagatcacccacttctacgtggctcccaccgccctgcgtctcctgaagcgggccggcacccatcacattaagcacgacctgtcgtctctgcgaaccctcggctctgtgggtgagcccattgcccccgacgtgtggcagtggtacaacgacaacattggccgaggcaaggcccacatctgtgacacctactggcagaccgagactggctcgcatatcattgcccccatggccggcgtgacccccaccaagcccggttctgcttccctgcctgtctttggaattgatcccgttatcattgatcccgtgtctggcgaggagctcaagggtaacaacgttgagggtgttcttgccctgcgatctccctggccctccatggcccgaaccgtgtggaacacccacgagcgatacatggagacctacctgcggccctaccccggctactacttcaccggtgatggtgctgcccgagacaatgacggcttttactggatccgaggccgagtcgacgacgttgtcaacgtttctggccaccgtctttccaccgccgagattgaggctgctctcattgagcacgctcaggtgtctgagtctgccgttgttggtgtccatgacgatctgactggccaggccgtcaacgcctttgtggctctcaagaaccccgtcgaggatgtggacgctctgcgaaaggagcttgttgtgcaggtgcgaaagaccattggaccctttgctgctcccaagaatgtcatcatcgtggacgatctgcccaagactcggtctggcaagatcatgcgacgaattctgcgaaaggtgcttgctggcgaggaggaccagctcggagacatttccactcttgctaaccccgacgttgtccagaccatcattgaggttgttcactcgttgaaaaagtaa

SEQ ID NO: 121987 - protein, 657 aa, Yarrowia lipolytica CLIB122
MSEDHPAIHPPSEFKDNHPHFGGPHLDCLQDYHQLHKESIEDPKAFWKKMANELISWSTPFETVRSGGFEHGDVAWFPEGQLNASYNCVDRHAFANPDKPAIIFEADEPGQGRIVTYGELLRQVSQVAATLRSFGVQKGDTVAVYLPMIPEAIVTLLAITRIGAVHSVIFAGFSSGSLRDRINDAKSKVVVTTDASMRGGKTIDTKKIVDEALRDCPSVTHTLVFRRAGVENLAWTEGRDFWWHEEVVKHRPYLAPVPVASEDPIFLLYTSGSTGTPKGLAHATGGYLLGAALTAKYVFDIHGDDKLFTAGDVGWITGHTYVLYGPLMLGATTVVFEGTPAYPSFSRYWDIVDDHKITHFYVAPTALRLLKRAGTHHIKHDLSSLRTLGSVGEPIAPDVWQWYNDNIGRGKAHICDTYWQTETGSHIIAPMAGVTPTKPGSASLPVFGIDPVIIDPVSGEELKGNNVEGVLALRSPWPSMARTVWNTHERYMETYLRPYPGYYFTGDGAARDNDGFYWIRGRVDDVVNVSGHRLSTAEIEAALIEHAQVSESAVVGVHDDLTGQAVNAFVALKNPVEDVDALRKELVVQVRKTIGPFAAPKNVIIVDDLPKTRSGKIMRRILRKVLAGEEDQLGDISTLANPDVVQTIIEVVHSLKK

SEQ ID NO: 121988 - DNA, 2013 bp, Aspergillus nidulans FGSC A4; identical to SEQ ID NO: 28616
  CDS (1)..(2013)

SEQ ID NO: 121989 - protein, 670 aa, Aspergillus nidulans FGSC A4; identical to SEQ ID NO: 28617

SEQ ID NO: 121990 - DNA, 2085 bp, Aspergillus nidulans FGSC A4
  CDS (1)..(2085)
atgacacacccgcaacaagccgttcacgcggcctcactccaaaaccccgaggcattctggtctcaccatgcccagcagctccattggcacaagaaaccttcacgtgcaatcggtcggtcgactaagactcttgctagtggtgccagccatgagtcctggtcttggtttcctgacggtgagatctcgacaacgtacaactgtgttgaccgtcacgtgctcaatgggaatggggacaacgtcgctattatctgggactcggcggtgacggggaagaaggagaaatatacatatcgacaattgctggatgaggttgaggttctggctggagttctgagggaggagggtgtaaagaaaggggatgtcgtcatcatctatatgcctatgataccggcggcgctgatcggtgcgctggctgtcgctcggctgggtgcaatccacgcggctgtcttcggtggattcgcggccaaatcgctggcgcagcgcattgaggcggcacggccgcgggcaattctgacagcctcgtgcgggatcgaaggggcgaagggccccattgcgtatcgaccgttggtggagggagccatcgaagccagcagcttcaaaccggagaaggtacttatctggcaacgagaccagctgcgatggaataatccggataaactgggcgggcagcgaaactggaacaggctcgtaaagagcgcgcggatgcggggtattcgtgctgagccagtaccagtcagaagcactgacggtttgtatatcatctataccagtggcaccaccggactaccaaaaggagtcgtccgagaggcgggcggacatgcagttgggcttagtttatccatcaagtatctgttcgatattcatgggcccggtgacaccatgttttgcgcctcagacatcggctgggttgtagggcactcgtacatcttatacgccccgctgttggtgggagcaacgaccgttttattcgaaggcaaaccagtcggcactccagacgcgggcacattctggcgagtcgtcgccgagcataaggcgaatgtcctgttcaccgcgcccacggcgcttcgcgccatccgcaaagaagacccagacaacaaacactttgagaaagtcgctggggacaataacctccggcacttgcgagccctcttcctcgcaggagaacgcagcgagcccagcattgtgcgcgcgtaccaagaccttctaaccaagcatgccgctcggggggccctagtcgtagacaattggtggtcgtccgagtctgggtctccaatctcgggattggcgttgcggagcgccgtgggacgagtaccgccacgatcagacgagtacgatgttgcgcctctggcgatccgaccagggtcggctggtttaccgatgccgggcttcgatgtgcgggttgtagatgacgagggcaatgaagtcgcgcagggaacgatggggaacatcgtcatggcgacgccgctggcgcccacggcgttcacgcgcctcttcaacgacgacgagagattctataagggctacctcaaacggtttggcggacgttggttagataccggggatgcaggcatgatcgatcaagatgggtacatccatgtaatgtcgcggtctgacgatatcatcaatgtcgcggcgcatagattcagcacaggtcaaggctcgatcgaacaagcaatcctctcgcacccggcaatcggcgaagccagcgttgtcggcatccctgacgcactcaaaggccatctccctttcgcattcataacgttaaagcaaagtgggggtaacagccctgcgcgcccgagtgctgaactcttcaactcagtcaaccgtcttgtgcgcgagcagatcggcgccattgcgtcgctgggcgggatgatccagggtcagggaatgattccgaagacgaggagcgggaaaacgctcaggcgggtgttgcgggagctggtggagaatggagcgcgaggggagttcgagaaagaggttgcggtgccgccgacggtggaggatcggggggttgtggaggttgcgagagagaaggttagggagtattttgaatcccagagtggaagccccaaggcgaagctctaa

SEQ ID NO: 121991 - protein, 694 aa, Aspergillus nidulans FGSC A4
MTHPQQAVHAASLQNPEAFWSHHAQQLHWHKKPSRAIGRSTKTLASGASHESWSWFPDGEISTTYNCVDRHVLNGNGDNVAIIWDSAVTGKKEKYTYRQLLDEVEVLAGVLREEGVKKGDVVIIYMPMIPAALIGALAVARLGAIHAAVFGGFAAKSLAQRIEAARPRAILTASCGIEGAKGPIAYRPLVEGAIEASSFKPEKVLIWQRDQLRWNNPDKLGGQRNWNRLVKSARMRGIRAEPVPVRSTDGLYIIYTSGTTGLPKGVVREAGGHAVGLSLSIKYLFDIHGPGDTMFCASDIGWVVGHSYILYAPLLVGATTVLFEGKPVGTPDAGTFWRVVAEHKANVLFTAPTALRAIRKEDPDNKHFEKVAGDNNLRHLRALFLAGERSEPSIVRAYQDLLTKHAARGALVVDNWWSSESGSPISGLALRSAVGRVPPRSDEYDVAPLAIRPGSAGLPMPGFDVRVVDDEGNEVAQGTMGNIVMATPLAPTAFTRLFNDDERFYKGYLKRFGGRWLDTGDAGMIDQDGYIHVMSRSDDIINVAAHRFSTGQGSIEQAILSHPAIGEASVVGIPDALKGHLPFAFITLKQSGGNSPARPSAELFNSVNRLVREQIGAIASLGGMIQGQGMIPKTRSGKTLRRVLRELVENGARGEFEKEVAVPPTVEDRGVVEVAREKVREYFESQSGSPKAKL

SEQ ID NO: 121992 - DNA, 2016 bp, Candida albicans SC5314; identical to SEQ ID NO: 28222
  CDS (1)..(2016): transl_table=12

SEQ ID NO: 121993 - protein, 671 aa, Candida albicans SC5314; identical to SEQ ID NO: 28223

SEQ ID NO: 121994 - DNA, 2028 bp, Candida albicans SC5314; identical to SEQ ID NO: 28224
  CDS (1)..(2028): transl_table=12

SEQ ID NO: 121995 - protein, 675 aa, Candida albicans SC5314; identical to SEQ ID NO: 28225

SEQ ID NO: 121996 - DNA, 3489 bp, Ustilago maydis 521
  CDS (1)..(3489)
atggtgcacccacaggttgaaattcagcgtcagtcgatcgagaacagggacgatttctggctcaaagctgcacgctccgtccactggcacaagcctcccaccgtggcgtatggccctacgtcgaaccgcaatgccgcctatctcgaccctcaaggccagacctggttcccagatgcacagctcaacacctgttacagtgctgtggacagacacgtctacgcacccgctcatgctgctgctgcccccatcaccgtttcgccagacacgccgcatctcgcactggcgccaaccgctcacaaagttgccttccatcacgtgtctcctctttctttccaaacccaccagtcccgctccgtcacctactatgagcttctccagcaggtgcaaatcgtagcgggcatcctgagacacaagggtgtgagcaaaggagatgcagtggtcatctacatgcccatggtccccgaaacgtccattgctatgctggcatgtgcgaggatcggagcggtccactcggttgtgttcggtggattcgcgcccaaggaactggcaaaacgtgttgaggactcgcgctgcaaaatcatcattgccgctagttgcggcttggagcccaagggacctgtcgactacaagccgctggtggatgaagcgctcaaggtgtcggatcacaagccacagtcaggactgttgttccttcgacgacacacaatcagcggacacagtccggctcaatgcgcaaacggcggcgctaacggccccgccggtctaccagagtgggactgggaggtggagagcaagctcacttccgagagagtcggaggcaggtcgccctgctgggaatgtgttcctgtcgcaagcgaagatcccatctacaccatctataccagcggcaccacaggtgcgcccaagggtgtctgtcgtctttctggtggtcacattgttcaactccgctactcaatcgaacacatgtttggcatgacgcccaacgatgtcatgttttgcgcttcagatctcggatgggttgttggccactcttacatccactacggcccgctgctcctgggcgcgacttcaatcatattcgaaggcaagcctgtgatccccgacgcgggcatctggtggcgaatctgctcgcagtacaaggtgacacagatgttctgtgctcctacggcgctgagggcgattgtgggtcaagatgcggatgctacgctcatgcgtgctcctggagtggatctgaggagcttgagggcactcttcttggctggagagagaagtgagccgcagatcgtggccaagttcgagaggttgttaaaagaattggctgcaccaggcgcacagacaaacgacaacttctggtcgagcgaatctggttcgcccatcacaggattgatgctgtcttccgccttcggtccactacctgcacgccctggtagtgccggtctccccatgccaggaatggatgtccgtatcgtcgatgataacggccgcgaactacctcggggtcagatgggcaacctcgtcctagctccccctctcgccccgtccttcctcggcgggctctggcgcaatccagaccgattcttcaagtcttacttttccacatttgcttccaaaggtggctggttcgagaccggagatcaaggcatcatcgacgatcatggctacgtctccatccttgcgcgttcggacgacatcatcaatgtttcagctcatcgcctcggtacgggtctcatcgaacaagttgtaacgtcgcatcccgatgtcattgagtgtgccgtcgtcggggctcccgacaagctcaaaggtcaatctccctttgcgatcgttgtagctcacagtcgggtggcagcggcagcggggggagagtcgcataattcggcacagagtgattcggcaaagcagatgctcaagaacatcaacgatcatgtaaggaaagagatgggtccaatcgctcagctgagtggcctgatcgaggctcagaaactgccaaagacgagaagcggcaagacgctgaggagaagcctcaggcaggcagtggaaaacgctgctgctggtaagaggagtttagcaaatgctgacccacacgttcattcttctggatcgtctgactctcgatttcatcgcattgccgttcttgtagatgcacctgttgacttcccacctactatcgaggacaaggaggtcatcgatattgtgcgcaaagccatcgaacagtactttgacgccatcgacggaacgtcgtcaagcaacactgcagcgtcaagcgcttcgtctagcaacacttactgtactccacagtcgaattcagccacacgtgtgtctgctggtctgcccaccagcgtcaagcacagcatgaaggctttgcagctcgagcgtcctcagggagagcccaagaagggacagcgaaacatcgctgttgtgcgccaagtgcctatgcccaaacccaactcgaaccaagttctggtaaagatgctcgcagccggattcaaccgtcgtgacgaatggtcaatggtgggtgcctatccgggactgatgtacgaaaatgcaactatgggatgtgacggtgcaggccaagtggtctctccggacggattcagattgccaaacgagcatcccgatcaagtagtgctcctcacccctactcgtggttgggacactgacaaagacggacccgaagccgagcttgctggcatctcggacgaacagcggaccaatggtctcggcggtcgaggattcggcatcctcggtgcgaccaagcctaccaacggtgtgggaacttttgccgaattcgttgcggtcgaaaaagaccagatcgtcgctgcaccgaaacatcttactcctgaacaggccgccgtgctcccctgtgcttctgttaccgcgtaccgcgcgctgtttaccaaagcacaggttagcaagggtcaaaatgtgcttttgaccggcgttggagggggcgtagccatgctagcacttcaaatggcggttgctgccggcgcaaatgtatacgtcaccggagggtcggccgaaaaaatctcgcgcgctgtcaagatgggtgcaaaagcaggtactgaatacaaggatgcttcatgggcgtccaagatcctgaagctgctgcctcagtcgcggccgtatctggactgcgtgattgacagcgctggcggcgagatcgcagtgcaagcgcagaaggctgggctgaaagccggtggcaaagtagtcatctttggcatgacggcggcgcccaagttgacattcacaatgcgcgaggtgttgaagaacatcgaagtgctaggttccactatgggaagtgctcgcgagtttgcagacagcatcaggttcattgaaaagcacagaatcgtgccggtcgtcgataccgtgttggacggattggagcacgcgcacaggggcttccagttgctggcagacgccgataagaggagtggaggaaaagtggtcatcagactcgcaaacgtagatccatcaaaatgcaagttgtag

SEQ ID NO: 121997 - protein, 1162 aa, Ustilago maydis 521
MVHPQVEIQRQSIENRDDFWLKAARSVHWHKPPTVAYGPTSNRNAAYLDPQGQTWFPDAQLNTCYSAVDRHVYAPAHAAAAPITVSPDTPHLALAPTAHKVAFHHVSPLSFQTHQSRSVTYYELLQQVQIVAGILRHKGVSKGDAVVIYMPMVPETSIAMLACARIGAVHSVVFGGFAPKELAKRVEDSRCKIIIAASCGLEPKGPVDYKPLVDEALKVSDHKPQSGLLFLRRHTISGHSPAQCANGGANGPAGLPEWDWEVESKLTSERVGGRSPCWECVPVASEDPIYTIYTSGTTGAPKGVCRLSGGHIVQLRYSIEHMFGMTPNDVMFCASDLGWVVGHSYIHYGPLLLGATSIIFEGKPVIPDAGIWWRICSQYKVTQMFCAPTALRAIVGQDADATLMRAPGVDLRSLRALFLAGERSEPQIVAKFERLLKELAAPGAQTNDNFWSSESGSPITGLMLSSAFGPLPARPGSAGLPMPGMDVRIVDDNGRELPRGQMGNLVLAPPLAPSFLGGLWRNPDRFFKSYFSTFASKGGWFETGDQGIIDDHGYVSILARSDDIINVSAHRLGTGLIEQVVTSHPDVIECAVVGAPDKLKGQSPFAIVVAHSRVAAAAGGESHNSAQSDSAKQMLKNINDHVRKEMGPIAQLSGLIEAQKLPKTRSGKTLRRSLRQAVENAAAGKRSLANADPHVHSSGSSDSRFHRIAVLVDAPVDFPPTIEDKEVIDIVRKAIEQYFDAIDGTSSSNTAASSASSSNTYCTPQSNSATRVSAGLPTSVKHSMKALQLERPQGEPKKGQRNIAVVRQVPMPKPNSNQVLVKMLAAGFNRRDEWSMVGAYPGLMYENATMGCDGAGQVVSPDGFRLPNEHPDQVVLLTPTRGWDTDKDGPEAELAGISDEQRTNGLGGRGFGILGATKPTNGVGTFAEFVAVEKDQIVAAPKHLTPEQAAVLPCASVTAYRALFTKAQVSKGQNVLLTGVGGGVAMLALQMAVAAGANVYVTGGSAEKISRAVKMGAKAGTEYKDASWASKILKLLPQSRPYLDCVIDSAGGEIAVQAQKAGLKAGGKVVIFGMTAAPKLTFTMREVLKNIEVLGSTMGSAREFADSIRFIEKHRIVPVVDTVLDGLEHAHRGFQLLADADKRSGGKVVIRLANVDPSKCKL

SEQ ID NO: 121998 - DNA, 1995 bp, Ustilago maydis 521; identical to SEQ ID NO: 28230
  CDS (1)..(1995)

SEQ ID NO: 121999 - protein, 664 aa, Ustilago maydis 521; identical to SEQ ID NO: 28231

SEQ ID NO: 122000 - DNA, 2037 bp, Tribolium castaneum
  CDS (1)..(2037)
atgccgtctgaaaagtccgtttacctgcccaacccttccgtggcgaaaaatgcgttcgtctcgtccttcgcacaataccaggaaatgtaccagaaatcgatagacaaccctgaggagttctggggtgaaatcgccaagcaattctactgggagaccccgatcgacattaactcgttttttcgctacaattttgacatcagaaaggggcccatttacaccaaatggctggacggggcgaccacgaatatcgcctataatttgctggatcgaaatgtgaaaaatgggttcggggacaaagttgcgttttattgggaggggaaccacccggacgattacagccgcctaacgtataaaaaattactggaggaagtttgcagatttgcgaatgttttgcgaagtaaaggagtgaaaaaaggcgacagggttgctgtttacatgcctatgatccttgaagctgtgataaccttactaggatgtgcacggattggagcagttcattcccttgtgtttgcaggattttcggccgattctttcgccgaacgcatcctcgactgtgaagcccgcgttctcgtaacagcagacggcgtctggcgaggagaaaaactcctctccttgaaaaatatctgtgatcaatcgatgaataaatgtgcacagaaaggccacaatgtgaaaacttgcatagtggtgtcgcacttgggccgcgttacttcgccatctggggttcaaaagaatcggaacaataaaacgcctatgcaagaaggtcgcgatgtttggtggcacgatattgttcctcaagcgtcaactgattgtgtgccagagtgggttcaagctgaagatcccttgtttatgttgtacacgagtggttcaactgggaagcccaaaggtgtggtacacacaacagcggggtatttgttgtacgctgccaccacgtttaaatacgtgtttgattacaagcccaatgatgtttattggtgtactgctgatattggctggatcactggacacacgtatgtggtgtatgggccgttggcgaattgtgcaacttcggttctgtatgaaggaactccattttatccaaataatgacagattctggctagtcgttaaaaagtataaggttaatcagttttacactgcccctactgccattagagctttaatgaaatttgaagatgatcttgttaaaagagtcgacctatcctctttaaaagtattaggctcagttggtgagccaataaaccctgaagcttggatgtggtattacaaactagtcggaagagaaaaatgttcaattgttgacaccttctggcagactgaaacagggggtcatgttttgacaccgcttcctggggcaactcctatgaaaccaggcgctgctgcattccccttctttggcgtccaaccagccctcttggacgagtccggcaacgagataaagggcgaaggtgaaggttacctcgttttcgctcgcccttggcccggcataatgcgcaccctttacaacaaccacccccgatacgaaaccacctacttctccaaattccctggctattactgcactggagacggtgctcgaagagacgccgacggctatctctgggtcacaggacgtgttgatgacatgttgaacgtctccggacatttaatgtcaaccgctgaagtcgaatcggttctaaccgaacacccgaatgttgccgaggctgcagttgttgcaaaaccacacccagtcaaaggcgaatgcctttattgtttcatcacaacgacggacacgactcgctttgacgacaagttgttgactgagttgaagcagcttgtcagagagaggataggaccttttgcacagcctgatgttgtgcaaaatgcgccagctttgcctaagacaaggtccgggaaaataatgcggaggattttgcggaaggtggctgttaatgaccgagatacgcgcgctgcgctttgccacgaagaggacgcccagagcgacgcagttttcgtctgttgttcaatctgtgctgatccgacgcgctcgcaattatgctaa

SEQ ID NO: 122001 - protein, 678 aa, Tribolium castaneum
MPSEKSVYLPNPSVAKNAFVSSFAQYQEMYQKSIDNPEEFWGEIAKQFYWETPIDINSFFRYNFDIRKGPIYTKWLDGATTNIAYNLLDRNVKNGFGDKVAFYWEGNHPDDYSRLTYKKLLEEVCRFANVLRSKGVKKGDRVAVYMPMILEAVITLLGCARIGAVHSLVFAGFSADSFAERILDCEARVLVTADGVWRGEKLLSLKNICDQSMNKCAQKGHNVKTCIVVSHLGRVTSPSGVQKNRNNKTPMQEGRDVWWHDIVPQASTDCVPEWVQAEDPLFMLYTSGSTGKPKGVVHTTAGYLLYAATTFKYVFDYKPNDVYWCTADIGWITGHTYVVYGPLANCATSVLYEGTPFYPNNDRFWLVVKKYKVNQFYTAPTAIRALMKFEDDLVKRVDLSSLKVLGSVGEPINPEAWMWYYKLVGREKCSIVDTFWQTETGGHVLTPLPGATPMKPGAAAFPFFGVQPALLDESGNEIKGEGEGYLVFARPWPGIMRTLYNNHPRYETTYFSKFPGYYCTGDGARRDADGYLWVTGRVDDMLNVSGHLMSTAEVESVLTEHPNVAEAAVVAKPHPVKGECLYCFITTTDTTRFDDKLLTELKQLVRERIGPFAQPDVVQNAPALPKTRSGKIMRRILRKVAVNDRDTRAALCHEEDAQSDAVFVCCSICADPTRSQLC

SEQ ID NO: 122002 - DNA, 2025 bp, Tribolium castaneum
  CDS (1)..(2025)
atgtgtgaatcaagagtcaacgaagttagcaccattgtgaggaatatcaaatacgaccggcacgtgtacgactccgaaaacgtaatcgagaaggaaaacccttactatagcaaaaagtacgaagaggcctacaagaagtccatcaccaaccccgaggagttctggcccgaggtgggcaagctggtcacatggaccaagccctgggacaaggtgatggaccactcccatcccccgttcaccaaatggttcgcagggggcgaactcaacgcctgctacaacgccgtggaccggcacgtggaggcgggccggggctccaaggtggccctcatccacgacagccccctgaccaaaaccgtgcggaaaatcacctacgccgagctgctcgaccaagtctcgcatctggcgggcgcgctggccaagctgggggtgtccaagggggaccgcgtgctcatttacatgccgctcatccccgaagcggtcatcgcgatgctggcgacggcacggctcgggggagtgcactcggtggttttcggaggttttgcggcgagagagctttgcgctcggattgtgcacgcggagcccaaagtgataatcgctgcgagttgtgggatagaaccgcataaaatcgtacgatataaggatatcctgaacgatgcaattgagtggtcgtcccacaagcccaacaagtgtattatcttccaaagacggaacgtggagtgtgcccccatagacgtcgaaatggatattctgtgggaggatgcgctgaaaatggccggacctcacgagtgcatcccggttgaggccaacgatccgctctatattctctatacgtctggaaccacagaccagccgaagggcatccagaggccggtcggcggccacatcgcaaccctcacttggagtatgagcgtgatctacggaatgggcccgaacgacgtttggtgggcggccagcgatctgggctgggttgttggtcattcgtacatttgttacgcgccgcttttgtatggaataacaagcgtaatgtacgagggaaaacccgaccggacgccagacccaggccaatactttaggataattaacgagcacaaagttaatgcaatctttactgttcctactgctttccgggtgatacatcgcgaggaccccgatattgagttcgggcgaaaatattcgattaggagtttacggacgattttcgtggctggggagcactgcgactatgaaacgaaaatgtgggccgaaaagacgttcaatgtgcccgttttgaaccactggtggcagacggagactgggcatgccatcactgccacatgtctggggtatgggcataatctgagtccgccgaagtacacggcagggatgccttttccgggatacgatattaagattttgcggtcggacggcatggaagcgtcaaataacgaattgggccgaattgtgataaagctgccgctgccgccggggaccatgtccacgttgtaccaagcgcccgaacggttttgccaagtctatttcagccgatacccaggctattatgacaccatggacgcggggtacaaggacgagtacggttacatttatgtgacggcccgtgacgacgatgtgattaatgtcgctgggcacagaatatccacttcggcgttggaggacgtggttttggcccacccagacattgccgacgcgacggtggtcggagttccggagcatacgaaaggggaggttccgctctgtttatatgtcataaagagaaatgccaaaaagagtgaagtcgcaataagtcgcgatttattaaggatggttagggaattggtcggaccaatcgcagcgtttcgcatggcggtggcagtgcgaggtttgccgcgaactcgctcgggtaaaacgtgcaggaaatctatatcggatttagcccgaaataaggaagttaggatttcgggcactgtagaagatccaacagtttacaaagatattaaggctgctctccaaaaactggggttcgcacatactgcgccggatccccagtga

SEQ ID NO: 122003 - protein, 674 aa, Tribolium castaneum
MCESRVNEVSTIVRNIKYDRHVYDSENVIEKENPYYSKKYEEAYKKSITNPEEFWPEVGKLVTWTKPWDKVMDHSHPPFTKWFAGGELNACYNAVDRHVEAGRGSKVALIHDSPLTKTVRKITYAELLDQVSHLAGALAKLGVSKGDRVLIYMPLIPEAVIAMLATARLGGVHSVVFGGFAARELCARIVHAEPKVIIAASCGIEPHKIVRYKDILNDAIEWSSHKPNKCIIFQRRNVECAPIDVEMDILWEDALKMAGPHECIPVEANDPLYILYTSGTTDQPKGIQRPVGGHIATLTWSMSVIYGMGPNDVWWAASDLGWVVGHSYICYAPLLYGITSVMYEGKPDRTPDPGQYFRIINEHKVNAIFTVPTAFRVIHREDPDIEFGRKYSIRSLRTIFVAGEHCDYETKMWAEKTFNVPVLNHWWQTETGHAITATCLGYGHNLSPPKYTAGMPFPGYDIKILRSDGMEASNNELGRIVIKLPLPPGTMSTLYQAPERFCQVYFSRYPGYYDTMDAGYKDEYGYIYVTARDDDVINVAGHRISTSALEDVVLAHPDIADATVVGVPEHTKGEVPLCLYVIKRNAKKSEVAISRDLLRMVRELVGPIAAFRMAVAVRGLPRTRSGKTCRKSISDLARNKEVRISGTVEDPTVYKDIKAALQKLGFAHTAPDPQ

SEQ ID NO: 122004 - DNA, 1977 bp, Prochlorococcus marinus str. MIT 9303
  CDS (1)..(1977): transl_table=11
atgtcccctgatccatccggcaccattaagtcagtgctgcaggagcagcgcgtctttcatccctcagcagagctggcctcacagtcgatggttggcagcctggaagcctatcgtcggatggcagagcaagccaaaactgatcctgacagtttctggggtgaagccgcccgcactgagctggaatggtttgaaccctttgatagcgttctcgattggtcgaatcctccctttgcgcgttggtttgaaggaggcacgacaaatctttccttcaactgtcttgatcgccatctcaatggcccgaaggcagacaaaacagccctgatctgggagggagagccaggtgatgtgcggcgcttcacctatcgagaacttcatgctgaagtgtgcagggctgccaatgcgctgaaagctcttggcattggcaaaggtgacctggttgccctttatatgccaatggtcccagaagcggccattgccatgttggcttgcgcccgtatcggagccccacattctgttgtctttggtggcttttccgctgaagcccttagagatcgtttggtggatggtgaagccaaagccgtgatcactgctgatggtggttttcgtaaagacaaggccgttgccttgaagccggcagtggatgctgcattagccgagggtgcctgccccagcgtgacgtcggtgctggtggtgcaacgcacgaaagaaagcgtggtgatggaacctggtcgagatcagtggtggcacgagcttgtgtcagctcaatctcaagagtgcgcggcggaacccatggcgagtgaagatcgcctgtttgtgctctacacctctggctccactggaaagccaaagggcgttgtgcacagcacggcaggctataacctctgggctcacctcactttcaagtggatcttcgacattcgcgacgaagacgtctactggtgcacagccgatgtgggctggattactggccatagctacattgtttatgggcctctttccaatggggcgacaactgtgatgtatgagggggcaccacgcccatccaagcctggagccttttgggagttaattcaaaagcacgggatcacgattttttacaccgcacctacggcaattcgggcattcatgaaaagtggtcgggctgtacccgatcaatacgacatgagcagtctgcggttgctaggtaccgtcggagaacccatcaatcctgaggcctggatgtggtatcgcgaggtgatcggtggtgatcgttgcccaattgtcgacacttggtggcaaacggagacaggtggggtgatgatcagcccattgcctggtgccacgccaacaaaaccaggatctgcgacccttcccctaccaggcattgaggctgatgtagttgacgcacaaggcgagccggtagacgttgacgaaggtggatatctgatcgtgcgacgtccttggccaggaatgatgcgcaccgtgcacggaaatcctcaacgctttagggagagctattgggaatacctacgccctaaggatggcagtttcatctatttcgcaggcgatggagctcgtcgagatagtgatggttatttctgggtgatgggcagggtggatgatgtgattaacgtttcaggccatcgtcttggcacgatggaaatcgaatcggcattggtgagtcacccggcagtgtctgaagcggcagtggttggaaggcctgatgaccttaaaggtgaagcgatcgtggccttcgtcaccttggagggaagcagggaagtgagtgatgctttgattcaggagcttcgtgttcatgtgggcaaggaaatcggccccattgctcgacctgatgagatccgttgcagtgatgccttacccaagacccgcagcggcaaaattatgcgccgtatcttgcgggctttggccgctggagaggaggtcaagggtgataccagcaccctggaagatcgctccgtgctggatcggcttagagcctga

SEQ ID NO: 122005 - protein, 658 aa, Prochlorococcus marinus str. MIT 9303
MSPDPSGTIKSVLQEQRVFHPSAELASQSMVGSLEAYRRMAEQAKTDPDSFWGEAARTELEWFEPFDSVLDWSNPPFARWFEGGTTNLSFNCLDRHLNGPKADKTALIWEGEPGDVRRFTYRELHAEVCRAANALKALGIGKGDLVALYMPMVPEAAIAMLACARIGAPHSVVFGGFSAEALRDRLVDGEAKAVITADGGFRKDKAVALKPAVDAALAEGACPSVTSVLVVQRTKESVVMEPGRDQWWHELVSAQSQECAAEPMASEDRLFVLYTSGSTGKPKGVVHSTAGYNLWAHLTFKWIFDIRDEDVYWCTADVGWITGHSYIVYGPLSNGATTVMYEGAPRPSKPGAFWELIQKHGITIFYTAPTAIRAFMKSGRAVPDQYDMSSLRLLGTVGEPINPEAWMWYREVIGGDRCPIVDTWWQTETGGVMISPLPGATPTKPGSATLPLPGIEADVVDAQGEPVDVDEGGYLIVRRPWPGMMRTVHGNPQRFRESYWEYLRPKDGSFIYFAGDGARRDSDGYFWVMGRVDDVINVSGHRLGTMEIESALVSHPAVSEAAVVGRPDDLKGEAIVAFVTLEGSREVSDALIQELRVHVGKEIGPIARPDEIRCSDALPKTRSGKIMRRILRALAAGEEVKGDTSTLEDRSVLDRLRA

SEQ ID NO: 122006 - DNA, 1947 bp, Thermus thermophilus HB27
  CDS (1)..(1947): transl_table=11
atggacaggctggagtcggtgctcaaggaggagcgggtcttttaccccagcgaggagttccgcaagcaggcccacatcaagagcgaggaggagtaccagcgcctctacgaggagagcgtccgtgaccccgaggggttctggggacgggtggcctcggagctccactggtttgaaccctggcggaaggtcctggaaggggacctgccccaccccaagtggttcgtgggggggaagaccaacctctcctacaacgccctggaccggcacgtgaagacctggcggcgcaacaaggcggccatcgtttgggagggggagccgggggaggagagggtcctcacctaccacgacctctggcgcgaggtgcagaggttcgccaacgtcctcaagcgcctgggggtgaagaagggcgacagggtcaccatctacctccccatgatccccgaggcggccatcgccatgctcgcctgcacccggatcggggccgtccactccgtggtcttcggcggcttctccgccggggcgctggcggaccggatcaaggacgccgaggccaaggtcctcatcaccgccgacgggggcttccgccggggcgggatcgtccccctcaagcagaacgccgacgaggccctaaaggacgccacgagcgtggagcacgtggtggtggtgcgccgcaccggggaggaggtgccctggaccccgggccgggaccactggtggcacgagctcatggaggccgcccccgaccggtgcgatcccgaatccatggaggcggaggagcccctcttcatcctctacacctccggctccaccgggaagcccaagggggtgttgcacaccacgggcggctacatgacctacgtctactacaccaccaagctggtctttgacctcaaggacgaggacgtctactggtgcaccgccgacgtgggctggatcacggggcactcctacgtggtctacgggcccctcctcaacggggccaccacggtgatgtacgagggggcccccaactggcccgagcccgaccgcttctggcggatcgtggacaagtacggggtgaccgtcttctacaccgcccccaccgccatccgcagcttcatgaagtggggcgagggctggccgggcaagcaccgcctggactccttaaggctcctcggcaccgtgggcgagcccatcaaccccgaggcctggctctggtactaccacgtgatcggcaagggccgctgccccatcgtggacacctggtggcagacggagacgggcggcatcatgatcaccaccctccccggggcccacgccatgaagccggggcacgcggggaagcccttcttcggcgtggtgcccgagattttggacggcgagcaccgccccgtggagaaccccgacgaggggggccacctctgcatcacccgtccctggcccagcatgctccgcaccgtctggggcgacccggagcgcttcctgcagcagtacttcagccagcaccccggggtctacttcagcggcgacggggccaagcgggacaaggacgggtactacatgatcctgggccgggtggacgacgttctgaacgtggccgggcaccgcctgggcaccatggagatcgagtccgccctggtggcccaccccgccgtggccgaggcggcggtggtgggcaggcccgatcccgtgaagggggaggccatcgtggccttcgtgaccctgaaggaggggcacaccccctcggacgccctcaaggaggagctcagggcccacgtggccaaggtcatcggccccatcgcccgcccggacgagatccgcttcaccgacgccctgcccaagacccgctcgggcaagatcatgcgccgcctcctccggcagatcgccgccggggagaaggagatcaagggggacacctccaccctcgaggaccgctccgtggtggagcggctgaaggagggcgcctaa

SEQ ID NO: 122007 - protein, 648 aa, Thermus thermophilus HB27
MDRLESVLKEERVFYPSEEFRKQAHIKSEEEYQRLYEESVRDPEGFWGRVASELHWFEPWRKVLEGDLPHPKWFVGGKTNLSYNALDRHVKTWRRNKAAIVWEGEPGEERVLTYHDLWREVQRFANVLKRLGVKKGDRVTIYLPMIPEAAIAMLACTRIGAVHSVVFGGFSAGALADRIKDAEAKVLITADGGFRRGGIVPLKQNADEALKDATSVEHVVVVRRTGEEVPWTPGRDHWWHELMEAAPDRCDPESMEAEEPLFILYTSGSTGKPKGVLHTTGGYMTYVYYTTKLVFDLKDEDVYWCTADVGWITGHSYVVYGPLLNGATTVMYEGAPNWPEPDRFWRIVDKYGVTVFYTAPTAIRSFMKWGEGWPGKHRLDSLRLLGTVGEPINPEAWLWYYHVIGKGRCPIVDTWWQTETGGIMITTLPGAHAMKPGHAGKPFFGVVPEILDGEHRPVENPDEGGHLCITRPWPSMLRTVWGDPERFLQQYFSQHPGVYFSGDGAKRDKDGYYMILGRVDDVLNVAGHRLGTMEIESALVAHPAVAEAAVVGRPDPVKGEAIVAFVTLKEGHTPSDALKEELRAHVAKVIGPIARPDEIRFTDALPKTRSGKIMRRLLRQIAAGEKEIKGDTSTLEDRSVVERLKEGA

SEQ ID NO: 122008 - DNA, 1962 bp, Acinetobacter sp. ADP1
  CDS (1)..(1962): transl_table=11
atgaatgaaatctatccagtacctgaagagtttaaaaaaacagcccgtaccgtagaagcggattattttacccgctatcaaaaatcaatcgaagatccagatgctttttgggcagatgaagcccgcaatgtagactggataaaaccatttacccaagtcaaaaacagcaactatgatgcagagcaattcaaaattgaatggtttgcagatggtcagctcaatgtctgcgcaaattgtctggatcgacatttaaaagaacatccgcacaaacccgcaattatctgggaaggtgatcatccttcacgacataaaattatttcctttaaagagctatacgaagaagtttgtcggtttgccaatgtattaaaaaaatatggtatttccaaaggcgaccgtgttgtactttatatgccaatggtgtctgaagcagcgattgccatgttggcatgcgcgcgaattggtgcggtgcactgtgtggtgtttggtggcttttcgccagactcattggcaagtcggattgaagactgtcaggccaaactggtgattaccgccgatgcaggtatgcgaggaggtaaattacttccactcaaggacagtgtagatgaagcacttaagcttgaaggaactgagtcgattgagcatgtgattgtggtgcatcggacaggtaatccgatccattttcaggaaggacgtgatctctggtatcacgtggtgattactgaggtgaatgaaatttgcccaccagaacaaatgaatgctgaagatccactatttatcctgtatacctcaggctcgactggaaagccaaaaggggtgctgcataccacaggcggttatctggtctatgccaccacaacattcagagaagtctttgacattaaacaagatgatgtgtactggtgtacggctgatgtgggctggattacaggtcatagttatctgatttatggtccactttccaatggcacaaccaccctgatgtttgaaggcattccgcaatatccgacatgggcacgaattggacatattgtcgataaacataacgtcacgattctctataccgcaccgactgccattcgttccatgatgcgtgaaggagatgcgtttgtacgtgaaagtgaccgtagtagcttgcgcttattgggtacagtcggtgagccaatcaatccagaagcctggtcatggtattataacgtggtaggtgaaggccgttgtcctgtggtcgatacatggtggcaaacagaaacgggcggtatcctgattgcacctttacctggtgcaacagcattaaaaccaggatcggcgacacgcccattttttggtgttcaaccagggcttgtcgatggcgatggtcatgagattgaaggtgccgcagaaggaaacctcgtgattaaggattcttggccaggtcagatgcgtggtatttggggagatcctaaacgctttattgaagcttatttttcaactttccctggtcgttattttactggtgacggtgcgcgccgcgatgaagatggttattactggattacagggcgtgtcgatgatgttttaaacatttcagggcatcgtcttggaacagcagaaattgaaagtgctttggtggcacatccgcatgtggctgaggctgccgtggtaggcatgccacatgaaatcaaaggtcaaggcatttgtacctttgtgacccttcaggctggtgtggatgaatcggaagagttacgtaaagaattggtacagtgggttcgtaagattttagggccgattgcaacgcctgatgcattacattgggcacccgctttgcctaaaacccgttctggtaaaatcatgcgtcgtatattacgtaaaattgcggccaatgagcttgatagtttgggggacacctcgactctggccgatccaagtgtggttgagtatctgattaacacggtctatccagaaaaaacgcaaaattccacatcatag

SEQ ID NO: 122009 - protein, 653 aa, Acinetobacter sp. ADP1
MNEIYPVPEEFKKTARTVEADYFTRYQKSIEDPDAFWADEARNVDWIKPFTQVKNSNYDAEQFKIEWFADGQLNVCANCLDRHLKEHPHKPAIIWEGDHPSRHKIISFKELYEEVCRFANVLKKYGISKGDRVVLYMPMVSEAAIAMLACARIGAVHCVVFGGFSPDSLASRIEDCQAKLVITADAGMRGGKLLPLKDSVDEALKLEGTESIEHVIVVHRTGNPIHFQEGRDLWYHVVITEVNEICPPEQMNAEDPLFILYTSGSTGKPKGVLHTTGGYLVYATTTFREVFDIKQDDVYWCTADVGWITGHSYLIYGPLSNGTTTLMFEGIPQYPTWARIGHIVDKHNVTILYTAPTAIRSMMREGDAFVRESDRSSLRLLGTVGEPINPEAWSWYYNVVGEGRCPVVDTWWQTETGGILIAPLPGATALKPGSATRPFFGVQPGLVDGDGHEIEGAAEGNLVIKDSWPGQMRGIWGDPKRFIEAYFSTFPGRYFTGDGARRDEDGYYWITGRVDDVLNISGHRLGTAEIESALVAHPHVAEAAVVGMPHEIKGQGICTFVTLQAGVDESEELRKELVQWVRKILGPIATPDALHWAPALPKTRSGKIMRRILRKIAANELDSLGDTSTLADPSVVEYLINTVYPEKTQNSTS

SEQ ID NO: 122010 - DNA, 1983 bp, Burkholderia pseudomallei K96243
  CDS (1)..(1983): transl_table=11
atgtctgcgattgaatcggttctgcacgaacgccgccagttcgcgccgcccgccgccgtggagaaggcggcagccatttccgggatggcggcttatcgggcgctcgccgaagaggctgagcgcgattacgaaggattctgggcgcgtctcgcgcgcgagacgctcgaatggcgcaagccgttcggcaaggtgctcgacgagacgaacgcgccgttctacaagtggttcgaggacggcgagctgaacgcgtcgtacaactgcctcgaccgccacgtcgccgcgggcttgggcgagcgcgtcgcggtgatcttcgaggccgacgacggcaccgtcacgcgcgtcacctacgccgatctgctcgcgcgcgtgtcgcgcttcgcgaacgcgctgaagaagcgcggcgtcggccgcggcgaccgcgtcgtcatctacattccgatgtcggtcgaaggcatcgtcgcgatgcaggcgtgcgcgcggatcggcgcgacgcactcggtggtgttcggcggcttctcgtcgaagtcgctgcacgagcgcatcgtcgacgtcggcgcgaccgcgctcgtcaccgccgacgagcagatgcgcggcggcaagacgctgccgctcaagagcatcgccgacgaggcgctcgcgatgggcggctgcgacgcggtgaagaccgtcgtcgtgtatcgccgcacgggcggcaatgtcgactggcacgcgggccgcgacgtctggatgcacgagatggtcgcaaacgagtccgacgcgtgcgagcccgaatgggtcggcgccgagcatccgctgttcatcctgtacacgtccggctcgaccggcaagccgaagggcgtccagcacagcacggccggctatctgctgtgggtcgcgcagacgatgaagtggacgttcgactggaagcccgacgacgtgttctggtgcacggccgacatcggctgggtcacgggccactcgtatatcacgtatgggccgctcgccgtcggcgcgacgcaggtggtgttcgagggcgtgccgacctatccgaacgcgggccgcttctggaagatgatcggcgaccacaaggtcaccgtgttctacaccgcgccgaccgcgatccgctcgctgatcaaggcggccgaggccgacgaccgcgtgcatccgaggagctacgatctgtcgagcctgcggatcatcggcacggtcggcgagccgatcaatccggaagcgtggatctggtatcacaagaacgtcgggcaggcgcgctgcccgatcgtcgacacctggtggcagaccgaaacgggcggccacatgatcacgccgctaccgggcgcgacgccgacggtgccgggctcgtgcacgctgccgctgccgggcatcatggccgcggtcgtcgacgagacgggccaggacgtgccgaacgggcagggcggcattctcgtcgtcaagcgcccgtggccggcgatggcgcgcacgatctggggcgacccggagcgcttcaagaagagctatttccccgaggagctcggcggccgcctgtatctggcgggcgacggcaccgtgcgggacaaggaaaccggctacttcacgatcatgggccgcatcgacgacgtgctgaacgtatcggggcaccggctcggcacgatggagatcgaatcggcgctcgtgtcgcacgagctcgtcgccgaggcggccgtcgtcggacggccggacgacacgacgggcgaggcggtcgtcgcgttcgtcgtgctcaagcgctcgcggccggaaggcgaggaggcggccgcgctcgcgaagacgctgcgcgactgggtcggcaaggagatcgggccgatcgcgaagccgaaggacatccgtttcggcgataacctgccgaagacgcgttcgggcaagatcatgcggcgcctgttgcgctcgctcgcgaagggcgaggcgatcacgcaggatacgtcgacgctcgagaaccccgcgatcctcgaacagctcgccgaagtgcgctga

SEQ ID NO: 122011 - protein, 660 aa, Burkholderia pseudomallei K96243
MSAIESVLHERRQFAPPAAVEKAAAISGMAAYRALAEEAERDYEGFWARLARETLEWRKPFGKVLDETNAPFYKWFEDGELNASYNCLDRHVAAGLGERVAVIFEADDGTVTRVTYADLLARVSRFANALKKRGVGRGDRVVIYIPMSVEGIVAMQACARIGATHSVVFGGFSSKSLHERIVDVGATALVTADEQMRGGKTLPLKSIADEALAMGGCDAVKTVVVYRRTGGNVDWHAGRDVWMHEMVANESDACEPEWVGAEHPLFILYTSGSTGKPKGVQHSTAGYLLWVAQTMKWTFDWKPDDVFWCTADIGWVTGHSYITYGPLAVGATQVVFEGVPTYPNAGRFWKMIGDHKVTVFYTAPTAIRSLIKAAEADDRVHPRSYDLSSLRIIGTVGEPINPEAWIWYHKNVGQARCPIVDTWWQTETGGHMITPLPGATPTVPGSCTLPLPGIMAAVVDETGQDVPNGQGGILVVKRPWPAMARTIWGDPERFKKSYFPEELGGRLYLAGDGTVRDKETGYFTIMGRIDDVLNVSGHRLGTMEIESALVSHELVAEAAVVGRPDDTTGEAVVAFVVLKRSRPEGEEAAALAKTLRDWVGKEIGPIAKPKDIRFGDNLPKTRSGKIMRRLLRSLAKGEAITQDTSTLENPAILEQLAEVR

SEQ ID NO: 122012 - DNA, 1989 bp, Methylococcus capsulatus str. Bath
  CDS (1)..(1989): transl_table=11
gtgcttcctgagtataattcccggtccgcagccgaccggacgagcgacaatcgaatgaaaacagaacatgtctaccccgtgccctccgatattgcgacgtccgccagaataaccgacgaaatctatcgggaaatgtatgaccggtccatcagggacccggaaggattctgggccgagctggctcaggagttcatcagctggaacaccccctggcagcgggtggcgcgctggaatttccataccccatccatcgaatggttctccggtgcccgccttaacgtgtcttacaattgtctggaccgccatctggctgaccggcgcgatcaaacggccattctgtgggagggcgacgagcccggcgaccagcgcgccctgacctacggcgagctgcacgaccgggtctgccggtttgccaatgtgctcaaatcccatggcgtaggcaagggtgaccgggtgtgcatctatttgccgatgatcccggaagccgccgtagccatgctggcctgtgcccgtataggcgccatccactcgatcgtgttcggcgggttctcgtccgaggcattgaaagaccggattctggatgccgattgccgcgtcctgatctgcgccgacgaaggccgacggggcggcaaattcgtcccgctcaaacgtaacgtcgacgccgcgctgagccagtgtccgcatgtcgaaaccgtgctggtggtccgccatacgggccgtccggtggactggaccgcggggcgcgaccactggtttcacgaggccgtgcaatccgcatcggccgactgcccccccgaggacatggatgcggaagacccgctgttcatcctctacacttccggctcgaccggcaagccgaaaggggtggtccatacgaccggcggctacctgctgtttgccgccgttacgcacaaatacgtgttcgattaccgcgacggcgaagtgtactggtgcaccgcggacatcggctggatcaccggccacagctacgtggtcttcggccccttgtgcaacggggcgaccacactgatgttcgagggcgtgccgacctaccccacaccggcacggctatggcagatcatcgacaaatatcaggtcagcattttctacacggcgccgacggtcatccgggcactgatgggactgggcgcggactgggtgaagcaggccgaccgccacagcctgcgaatactgggctcggtcggcgaacccatcaatccggaagcctgggaatggtattaccaggaagtcggcgagaaacgctgccccgtgctcgacacctggtggcagaccgaaaccggcggcatcatgatcaccccactgcccggcgccacaccgctcaaacccggctccgccacccgccccttcttcggcgtcgtccccgtcatcctggatccccagggcaacgagctgacgggcccggcagagggcgtcctggcgatcgccgcatcctggccaggccaggcgcgtaccgtattccgcaatcacgatcgtttccgtgaaacgtatttcgccctctatccggggaagtacttcactggcgatggcgcgcgccgggatgccgacggttattactggatcaccggacgggtggacgacgtgatcaacgtctcggggcaccgcatgggaaccgccgaaatcgagagcgccctggtactgcacgacagcgtcgccgaagccgcggtggtcggttacccgcacaacatcaagggccagggcatctacgcctatgtcaccctggtcgccgacgcggtcccgagcgaggacctgaaacggcaactgatcgaactggtccgggaggaaatcggcgcgatcgcgacccctgacatcatccagtggacgccggccctgccgaagacgagatcgggtaaaatcatgcggcgcatcctgcgaaagatcgccgccaacgagctggatcaactgggagatacgtcgacactggccgacccggcggtcgtcgaagacatcatccggaacaaaccagcctag

SEQ ID NO: 122013 - protein, 662 aa, Methylococcus capsulatus str. Bath
MLPEYNSRSAADRTSDNRMKTEHVYPVPSDIATSARITDEIYREMYDRSIRDPEGFWAELAQEFISWNTPWQRVARWNFHTPSIEWFSGARLNVSYNCLDRHLADRRDQTAILWEGDEPGDQRALTYGELHDRVCRFANVLKSHGVGKGDRVCIYLPMIPEAAVAMLACARIGAIHSIVFGGFSSEALKDRILDADCRVLICADEGRRGGKFVPLKRNVDAALSQCPHVETVLVVRHTGRPVDWTAGRDHWFHEAVQSASADCPPEDMDAEDPLFILYTSGSTGKPKGVVHTTGGYLLFAAVTHKYVFDYRDGEVYWCTADIGWITGHSYVVFGPLCNGATTLMFEGVPTYPTPARLWQIIDKYQVSIFYTAPTVIRALMGLGADWVKQADRHSLRILGSVGEPINPEAWEWYYQEVGEKRCPVLDTWWQTETGGIMITPLPGATPLKPGSATRPFFGVVPVILDPQGNELTGPAEGVLAIAASWPGQARTVFRNHDRFRETYFALYPGKYFTGDGARRDADGYYWITGRVDDVINVSGHRMGTAEIESALVLHDSVAEAAVVGYPHNIKGQGIYAYVTLVADAVPSEDLKRQLIELVREEIGAIATPDIIQWTPALPKTRSGKIMRRILRKIAANELDQLGDTSTLADPAVVEDIIRNKPA

SEQ ID NO: 122014 - DNA, 1989 bp, Azoarcus sp. EbN1
  CDS (1)..(1989): transl_table=11
gtgaatatgtcgaacgagcaacagcagacccgggcgcgcatctacaagccttcggaagagatggtcaagaacgcggcggtttccggcatggaaggctaccttgcgttgtgcaaggaggcggaagacaactacgaaggattctgggcgcgccacgcccgcgaactggtcgagtggaagaagcccttcacccaggtcctcgacgagagcgacgcgccgttcttcaagtggttcgccgacggccagctgaacgtctcgtacaactgcctcgaccgcaacgtcaataacggtctcggtgacaaggtcgcgatcatcttcgaagccgacagcggggaagttacgcgcgtcacctacaaggatctgctcgtccgtgtcagcaggttcgcgaacgcgctgcgcggcatgggcgtcaaaaaaggcgatcgcgtcgtcatctacctgccgatgtcgatcgaaggcgtcgtcgcgatgcaggcctgcgcccgcatcggcgcgacccactcgatcgtgttcggcggcttctcggcccaggcgctgcgcgaccgcatcaacgacgccggcgccgtcgccctgatcacgtccgacggtcagcaccgcggcggcaaggcgctgccgctgaagccgatcgcggacgaggcgctggcgatgggcggctgcgaatcgatcaggaacgtcatcgtcgtcaagcgcaccggcgcggaagtcgcgatggacaagggccgtgaccagtggttcgacgacgtctgcgcaacccagtccgagacctgcgagcccgaatgggtcgacgccgaacatccgctgttcctgctctacacgtcgggctcgaccggcaagccgaaaggcgtccagcactcgaccggcggctacctgctgcacgcgatcatgtcgatgaagtacaccttcgacatcaagccggacgacgtcttctggtgcaccgccgacatcggctgggtcaccggccacactttcatcacctacggcccgctcgcctgcggcacgaccgagatcgtcttcgaaggggtgccgacctacccggacgcggggcgtttctggaaaatgatccaggaccacaaggtcactgtgttctacactgcgccgaccgcgatccgctcgctgatcaaggctgcggacaacaaccctgcggtgcacccgaagaaatacgacctgtcgagcctgcgcatcctcggctcggtcggcgagccgatcaacccggcggcgtgggagtggtactacgagaacgtcggcgcgagccgctgcccgatcgtcgatactttctggcagaccgagaccggtgcgcacatgatcacaccgatgccgggcgcgaccccgctcgtgccgggctcctgcacgctgccgttcccgggcatccaggcggcggtcgtcgatgagaccggaaccgagttgccgaatgggcagggcggaatcctcgtcgtcaagcgtccctggccgtcgatgatccgtgccgtctggggcgacccggagcgctacaagaagtcctactacccggacgacttcaagggccagctgtatcttgccggcgacggcgcgatccgcgacaaggacaccggctacttcacgatcaccggccgcatcgacgacgtgctgaacgtctcgggccaccgtatggggacgatggagatcgagtccgcactggtcgcacacgagaaagtcgccgaagcggcagtcgtcggccgccccgacgacgtgaccggcgaagcggtcgtggcattcgtcgtgttgaagggcgagcgcccgaccggcgagcaggccaaggcggtcatcaaggagctgcagaactgggtcggccacgagatcgggccgatcgcgaagccgaaggacatccgtttcggcgagaacctgcccaagacccgttcgggcaagatcatgcgtcggctgctgcgtcagctggcgaagggggaggagatcacccaggatacgtcgaccctcgagaatccggcgatcctggatcagcttggccagccgctgagctga

SEQ ID NO: 122015 - protein, 662 aa, Azoarcus sp. EbN1
MNMSNEQQQTRARIYKPSEEMVKNAAVSGMEGYLALCKEAEDNYEGFWARHARELVEWKKPFTQVLDESDAPFFKWFADGQLNVSYNCLDRNVNNGLGDKVAIIFEADSGEVTRVTYKDLLVRVSRFANALRGMGVKKGDRVVIYLPMSIEGVVAMQACARIGATHSIVFGGFSAQALRDRINDAGAVALITSDGQHRGGKALPLKPIADEALAMGGCESIRNVIVVKRTGAEVAMDKGRDQWFDDVCATQSETCEPEWVDAEHPLFLLYTSGSTGKPKGVQHSTGGYLLHAIMSMKYTFDIKPDDVFWCTADIGWVTGHTFITYGPLACGTTEIVFEGVPTYPDAGRFWKMIQDHKVTVFYTAPTAIRSLIKAADNNPAVHPKKYDLSSLRILGSVGEPINPAAWEWYYENVGASRCPIVDTFWQTETGAHMITPMPGATPLVPGSCTLPFPGIQAAVVDETGTELPNGQGGILVVKRPWPSMIRAVWGDPERYKKSYYPDDFKGQLYLAGDGAIRDKDTGYFTITGRIDDVLNVSGHRMGTMEIESALVAHEKVAEAAVVGRPDDVTGEAVVAFVVLKGERPTGEQAKAVIKELQNWVGHEIGPIAKPKDIRFGENLPKTRSGKIMRRLLRQLAKGEEITQDTSTLENPAILDQLGQPLS

SEQ ID NO: 122016 - DNA, 1965 bp, Silicibacter pomeroyi DSS-3
  CDS (1)..(1965): transl_table=11
atgtcaccagcagctcagaccgagaccaagctctatgcgccatccgccgacaccgtggcacgtgcgcatgtgaatgcggacacctatgaccggatgtatgccgcctcgatggccgatcccgaggggttctgggccgagcagggcaagcgggtcgactggatcaagccctttacccaggtcaaggacgtcaactacaacttcggcgaggtctcgatcaactggtatgccgatggcaccctgaacgtcgcggccaactgcatcgaccgtcacctggccacccggggtgatcagaccgcgatcatctgggaaccggactcccccaccgaagcggccaagcacatcacctataaggagctgcacggctcggtctgccggatggccaacatcctggagagcctgggcgtgcgcaagggtgaccgcgtcgtcatctacctgccgatgatccccgaggcggcctatgccatgctggcctgcgcccgtatcggcgccatccattccatcgtcttcgccggcttctcgcccgacgcgctggccgcccgggtcaacggctgcgacgccaaggtggtgatcaccgccgacgaggcgccgcgcggtggccgcaagacgccgctgaaatccaatgccgacgccgccctgctgcattgcaaggacacggtcaaatgcctggtcgtcaagcgcaccggtggccagaccacctggatcgccgaccgcgactttgactataacgagatggcgctcgaggcgtcggattactgcgcccccgccgagatgggcgccgaggatccgctgttcatcctctacacctccggctcgaccggccaacccaagggcgtggtgcacaccaccggcggctatctggtctatgccgcgatgacgcatgagatcaccttcgactaccacgacggcgacatctactggtgtactgccgatgtgggctgggtcaccggccacagctatatcgtctatggtccgctggccaatggcgccaccacgctgatgttcgagggcgtgccgacctatcccgacgcgggccgtttctgggaggtctgcgccaagcacaaggtcaaccagttctataccgcccccaccgccatccgcgcgctgatgggtcagggcaccagctttgtcgaaaagcacgacctgagcgatctgcgccttctgggcaccgtgggcgagccgatcaaccccgaggcctggaactggtacaacgaggtggtgggcaagggcaaatgcccgatcgtcgacacctggtggcagaccgagaccggcggccacctgatgacgccgctgccgggcgcccacgcgaccaagccgggggcggcgatgaagcccttctttggtgtggtgccggtggtgctcgacccgcaatcgggcgtcgagatcagcggcaacggggtcgagggcgtgctgtgcatcaaggacagctggccgggccagatgcgcaccgtctggggcgatcacgagcgcttccagaagacctatttcgccgattacaagggctattacttcaccggtgacggctgccgtcgcgatgcggaaggcgattactggattaccggccgcgtcgatgacgtgatcaacgtctcgggtcaccgcatgggtaccgccgaggtcgaaagcgcgctggtcgcccatgccgccgtggccgaggccgccgtggtgggctacccgcacgagatcaagggccagggcatctattgctacgtgaccctgatgaacgaccgcgagccgtcggacgagctgatgaaggagctgcgcagctgggtgcgcaccgagatcggcccgatcgccagcccggacgtcatccagtgggcgcccggcctgccgaaaacccgttcgggcaagatcatgcgccgtatcctgcgcaagatcgccgagaacgacttcggctcgctgggtgacacctcgaccctggccgatccctcggtggtcgatgacctgatcgccaatcgcgccggcaagtaa

SEQ ID NO: 122017 - protein, 654 aa, Silicibacter pomeroyi DSS-3
MSPAAQTETKLYAPSADTVARAHVNADTYDRMYAASMADPEGFWAEQGKRVDWIKPFTQVKDVNYNFGEVSINWYADGTLNVAANCIDRHLATRGDQTAIIWEPDSPTEAAKHITYKELHGSVCRMANILESLGVRKGDRVVIYLPMIPEAAYAMLACARIGAIHSIVFAGFSPDALAARVNGCDAKVVITADEAPRGGRKTPLKSNADAALLHCKDTVKCLVVKRTGGQTTWIADRDFDYNEMALEASDYCAPAEMGAEDPLFILYTSGSTGQPKGVVHTTGGYLVYAAMTHEITFDYHDGDIYWCTADVGWVTGHSYIVYGPLANGATTLMFEGVPTYPDAGRFWEVCAKHKVNQFYTAPTAIRALMGQGTSFVEKHDLSDLRLLGTVGEPINPEAWNWYNEVVGKGKCPIVDTWWQTETGGHLMTPLPGAHATKPGAAMKPFFGVVPVVLDPQSGVEISGNGVEGVLCIKDSWPGQMRTVWGDHERFQKTYFADYKGYYFTGDGCRRDAEGDYWITGRVDDVINVSGHRMGTAEVESALVAHAAVAEAAVVGYPHEIKGQGIYCYVTLMNDREPSDELMKELRSWVRTEIGPIASPDVIQWAPGLPKTRSGKIMRRILRKIAENDFGSLGDTSTLADPSVVDDLIANRAGK

SEQ ID NO: 122018 - DNA, 1956 bp, Pseudomonas syringae pv. syringae B728a
  CDS (1)..(1956): transl_table=11
atgagtgcagcttccctgtaccccgtccgcccagaagtcgcagcgactacgctgacggatgaagcgacctacaaggccatgtaccagcagtcggtggtcaaccctgatggtttctggcgtgaacaggctcagcgcctcgactggatcaaacctttcagtgtggtcaaacagacctcgttcgatgatcaccgtgtcgatatcaaatggttcgccgacggcacgctgaacgttgcctacaactgcctggatcgccatctggaagaacgcggcgacagcatcgccatcatctgggagggcgacgacccttccgagcaccgggaaatcacctaccgcgaactgcacgccgaagtgtgcaagttcgccaacgccctgcgtggccaggatgtgcaccgtggcgacgtcgtgacgatctacatgccgatgatccccgaagctgtggtcgccatgctggcatgcgcccggatcggtgcgattcactcggtggtgttcggcggtttctcgcccgaagcgctggctggccggatcatcgattgcagttccaaagtggtcatcactgctgacgaaggtctgcgtggcggcaagaagactgcactcaaggccaacgtcgaccgcgccctgaccaacccggaaaccagcagcgtgcagaaggttatcgtctgcaagcgcaccggtggcgagatcgaatggaaccgtcaccgtgatatctggtaccactcgcttctggaagtggcgtccagcacctgcgcgccgaaagagatgggcgccgaagagtcgctgttcattctctacacctcgggctcgaccggtaaacccaagggcgtgttgcacaccaccgcaggttacttgctgtatgccgcgctgacccacgaacgcgtgttcgactaccggccgggtgaagtttactggtgcaccgccgacgtcggctgggtcaccgggcacagttacattgtctacgggcctctggccaacggtgcgaccacgctgctgttcgaaggcgtgccgaactatccggacatcacccgcgtgtcgaagatcatcgacaagcacaaggtcaatatcctctacaccgcgccgaccgcgattcgcgccatgatggctgaaggcaccaagtccgttgaaggtgccgacggttcaagcctgcgcctgctgggttcggtgggcgagccgatcaacccggaagcctgggcctggtactacaacacggtcggcaagcagaactgcccgattgtcgatacctggtggcagaccgaaaccggtggcattctgatcagcccgttgccaggtgcgaccgccctgaagccgggctcggcgacacgtccgttcttcggcgtgatcccggcgctggtggacaacctgggcaacctcatcgagggcgctgccgagggcaacctggtgatcctcgattcgtggccgggccagtcgcgctctctgtacggcgatcacgaccgtttcgtcgacacctacttcaagacgttccgcggcatgtacttcaccggtgacggcgcccgtcgtgacgaggacggctatttctggatcaccgggcgtgtggacgacgtgctcaacgtttccggccaccgcatgggcacggctgaaatcgaaagcgcgatggttgcgcacccgaaagtcgccgaggctgctgtggtcggtgtgccgcatgacctgaaggggcagggcatctacgtctatgtgaccctcaacggcggtgaagagccgagtgacgcgctgcgcaccgaattgcgcaactgggtacgcaaggagatcggcccgattgcctcgcctgacttcattcagtgggcgcccggcctgccgaagacccgttcgggcaagatcatgcgccgtatcctgcgcaagattgcgactgccgagtacgatgcgctgggtgacatctccaccctggccgacccgggcgtggtgcagcatctgatcgatacgcacaagaccatgaacgctgcctga

SEQ ID NO: 122019 - protein, 651 aa, Pseudomonas syringae pv. syringae B728a
MSAASLYPVRPEVAATTLTDEATYKAMYQQSVVNPDGFWREQAQRLDWIKPFSVVKQTSFDDHRVDIKWFADGTLNVAYNCLDRHLEERGDSIAIIWEGDDPSEHREITYRELHAEVCKFANALRGQDVHRGDVVTIYMPMIPEAVVAMLACARIGAIHSVVFGGFSPEALAGRIIDCSSKVVITADEGLRGGKKTALKANVDRALTNPETSSVQKVIVCKRTGGEIEWNRHRDIWYHSLLEVASSTCAPKEMGAEESLFILYTSGSTGKPKGVLHTTAGYLLYAALTHERVFDYRPGEVYWCTADVGWVTGHSYIVYGPLANGATTLLFEGVPNYPDITRVSKIIDKHKVNILYTAPTAIRAMMAEGTKSVEGADGSSLRLLGSVGEPINPEAWAWYYNTVGKQNCPIVDTWWQTETGGILISPLPGATALKPGSATRPFFGVIPALVDNLGNLIEGAAEGNLVILDSWPGQSRSLYGDHDRFVDTYFKTFRGMYFTGDGARRDEDGYFWITGRVDDVLNVSGHRMGTAEIESAMVAHPKVAEAAVVGVPHDLKGQGIYVYVTLNGGEEPSDALRTELRNWVRKEIGPIASPDFIQWAPGLPKTRSGKIMRRILRKIATAEYDALGDISTLADPGVVQHLIDTHKTMNAA

SEQ ID NO: 122020 - DNA, 1956 bp, Pseudomonas fluorescens Pf-5
  CDS (1)..(1956): transl_table=11
atgagtgcggcttctctgtatcccgttcgtcccgaggttttggccaatacgctgactgacgaggcgacctacaaggccatgtaccagcagtcggtcgtgaacccggacggtttctggcgcgaacaggccaagcgtctcgactggatcaagccttttaccacggtgaagcagacctccttcgacgatcaccatgtcgatatcaagtggttcgccgacggcaccctgaacgtctcctacaactgcctggatcgccatctcgccgagcgcggtgatcagatcgcgatcatctgggaaggcgacgatccttccgaaagccgcaacatcacctaccgcgaactgcatgaggaagtctgcaagttcgccaacgccctgcgtggccaggacgtgcaccgcggcgacgtggtgactatctatatgccgatgattcccgaggcggtggtggccatgctggcctgtacccgcattggcgcgatccactcggtggtgttcggcggcttctcccctgaagccttggccgggcgcatcatcgactgccgctccaaggtggtgatcactgccgacgaaggtatccgtgccggcaagaaagtgccgctcaaggccaatgtcgacgatgccctgaccaacccggaaaccagcagcattcagaaggtcatcgtgtgcaagcgcaccggtggcaacatcaagtggaaccagcaccgcgacatctggtacgaagacttgatgaaagtcgccggcagcgtctgcgcgccgaaagagatgggcgccgaagaagcgctgttcatcctctatacctccggttccaccggcaagcccaagggcgtgcagcacaccaccggcggctacctgctgtatgcgtcgctgacccatgagcgggtgttcgactaccgcccgggcgaagtctactggtgcaccgccgacgtcggctgggtcaccggccacacctatattgtctacggcccgctggccaacggcgccaccaccgtgctgttcgagggtgtgccgaactacccggatgtcactcgggtggcgaagatcgtcgacaagcacaaggtcaacatcctctacacggcaccgaccgcaatccgcgccatgatggcttcgggcaccgctgcctgcgaaggcgccgatggcagcagcctgcgcctgctgggctcggtgggcgagccgatcaacccggaagcctgggactggtactacaagaacgtcggtcagtcccgctgcccgatcgtcgacacctggtggcagaccgaaaccggcgccaccctcatgagcccgctgccgggggcgcatgccttgaagccgggttccgcagcgcgtccgttcttcggcgtggtgccggccctggtggataacctgggcaacatcatcgagggcgcggccgagggcaacctggtgattctcgactcgtggccaggccaggcacggaccctgtaccgcgaccacgatcgtttcgtcgatacctacttcaagactttccgtggcatgtacttcaccggtgacggcgcccgtcgcgacgaagatggctactactggatcaccggtcgggtggacgatgtgctcaacgtttccgggcaccgcatgggtaccgccgaaatcgaaagcgccatggttgcgcacccgaaggtcgccgaagcggcggtggtgggcgtgcctcacgacatcaaggggcagggcatctacgtctatgtgaccctcaatggtggcgaagagccgaacgaagccctgcgcctggaattgaagaactgggtgcgcaaggaaatcgggccgatcgcctcgccggacgtcatccaatgggcgccgggcctgccgaaaactcgttccgggaagatcatgcggcggattctgcgcaagatcgccacggcggagtacgacggtctgggcgatatctcgaccctggctgacccgagtgtggtgcagcacctgatcgatacccacaagaccatgaacgtcgcctga

SEQ ID NO: 122021 - protein, 651 aa, Pseudomonas fluorescens Pf-5
MSAASLYPVRPEVLANTLTDEATYKAMYQQSVVNPDGFWREQAKRLDWIKPFTTVKQTSFDDHHVDIKWFADGTLNVSYNCLDRHLAERGDQIAIIWEGDDPSESRNITYRELHEEVCKFANALRGQDVHRGDVVTIYMPMIPEAVVAMLACTRIGAIHSVVFGGFSPEALAGRIIDCRSKVVITADEGIRAGKKVPLKANVDDALTNPETSSIQKVIVCKRTGGNIKWNQHRDIWYEDLMKVAGSVCAPKEMGAEEALFILYTSGSTGKPKGVQHTTGGYLLYASLTHERVFDYRPGEVYWCTADVGWVTGHTYIVYGPLANGATTVLFEGVPNYPDVTRVAKIVDKHKVNILYTAPTAIRAMMASGTAACEGADGSSLRLLGSVGEPINPEAWDWYYKNVGQSRCPIVDTWWQTETGATLMSPLPGAHALKPGSAARPFFGVVPALVDNLGNIIEGAAEGNLVILDSWPGQARTLYRDHDRFVDTYFKTFRGMYFTGDGARRDEDGYYWITGRVDDVLNVSGHRMGTAEIESAMVAHPKVAEAAVVGVPHDIKGQGIYVYVTLNGGEEPNEALRLELKNWVRKEIGPIASPDVIQWAPGLPKTRSGKIMRRILRKIATAEYDGLGDISTLADPSVVQHLIDTHKTMNVA

SEQ ID NO: 122022 - DNA, 1938 bp, Pseudomonas fluorescens Pf-5
  CDS (1)..(1938): transl_table=11
atgttcgatatcagcacttttccgaaagccgatgccgtccgccgggcggcacaaatgagccaggacgactaccaccacctctaccgccagtccattgagcagccggaccagttctgggccgagcaggccaggcgcttcctgcactggagcagcccctgggacagcgtccacagccacgacatgcgcaccggcgaggccaactggtttcgcggtggccaactcaacgtcagctacaactgcatcgaccgtcatctggaaaaacgcggcaatcaggcggcgatcatctgggaaggtgacaacccggcagactcccagcgcatcacttaccaggaactccacgaccgggtctgccgcctggccaacgtgctgaaaagccgtggcgtgaagaagggcgaccgggtgtgcatctacatgccgatgattcccgaagtggcctacgccatgctcgcctgcacccggatcggtgcggtgcattcggtggtgttcggcggtttttcgccggaggccctgcgcgaccgcattctcaacgccgactgccgcaccgtgatcaccgccgacgaaggcgtgcgcggcggcaaactgattccgctgaagagcaacgtcgacaaggccctgctcagttgcccggatgtcagcagcgtgctggtggtcgaacgcacccgcaacccggtgaactgggtgccagatcgcgacatttcctatgaacaggccgtggctggcgccagcaaccaatgcgcccccgagccgatggacgccgaagacccgctgttcatcctctacacctccggcagcaccggcaaacccaagggcgtgctgcacaccaccggcggctacctgctacaggccgccatgaccttcaagtacgtgctggactaccgcgacggcgaagtcttctggtgcaccgccgacgtcggctgggtcaccggccacagctacatcctttacggccccctggccaacggcgcgaccacgctgatcttcgaaggtgtgcccaactaccccagcacctcgcgtttctgggaggtggtggacaagcatcaggtgaacatcttctacaccgcgcccaccgctctgcgtgccctgatgcgcgaaggcagcgccccactacagaacacctcccgcgccagcctgcgcttgctcggcagcgtcggcgagccgatcaacccggaagcctgggagtggtatttcaacgtggtcggcgaacaacgctgcccgattgtcgatacctggtggcagaccgaaaccggcggcatcatgctcagccccctggtcagcgcccggcagatcaagcccggatgcgcctcgaccccgatgttcggcgtacaaccggtgctgctggacgaccagggcaaggaaatccatggggcaggcagcggcatcctggcaatcaaggccagttggccggcgcagatacgtagcgtctatggcgatcccaagcgcatggtcgaaacctatttcgctccctaccccggctattacttcaccggtgatggtgcccggcgcgacgaggatggtagctactggatcaccgggcgcatcgacgacgtgatcaacgtttccgggcaccgcatcggcaccgccgaagtggaaagcgccctggtgctgcacgacagcatcgccgaagcggcggtggtcggttacccccatgatctcaagggccagggaatctatgccttcgtcacaccgatgcagggcgtcgagcccgacgaggcactgaagaaggaactgctggccctggtcagccgcgagatcggcagtttcgccaagccggagctgatccagtgggctccggccctgccgaaaactcgctcgggcaagatcatgcggcgtatcctgcgcaagatcgcctgcaacgaactggataccctgggtgacacttcgaccctggcggaccccagcgtggtggacggcctgatcgacaaacgcctgaacgtttga

SEQ ID NO: 122023 - protein, 645 aa, Pseudomonas fluorescens Pf-5
MFDISTFPKADAVRRAAQMSQDDYHHLYRQSIEQPDQFWAEQARRFLHWSSPWDSVHSHDMRTGEANWFRGGQLNVSYNCIDRHLEKRGNQAAIIWEGDNPADSQRITYQELHDRVCRLANVLKSRGVKKGDRVCIYMPMIPEVAYAMLACTRIGAVHSVVFGGFSPEALRDRILNADCRTVITADEGVRGGKLIPLKSNVDKALLSCPDVSSVLVVERTRNPVNWVPDRDISYEQAVAGASNQCAPEPMDAEDPLFILYTSGSTGKPKGVLHTTGGYLLQAAMTFKYVLDYRDGEVFWCTADVGWVTGHSYILYGPLANGATTLIFEGVPNYPSTSRFWEVVDKHQVNIFYTAPTALRALMREGSAPLQNTSRASLRLLGSVGEPINPEAWEWYFNVVGEQRCPIVDTWWQTETGGIMLSPLVSARQIKPGCASTPMFGVQPVLLDDQGKEIHGAGSGILAIKASWPAQIRSVYGDPKRMVETYFAPYPGYYFTGDGARRDEDGSYWITGRIDDVINVSGHRIGTAEVESALVLHDSIAEAAVVGYPHDLKGQGIYAFVTPMQGVEPDEALKKELLALVSREIGSFAKPELIQWAPALPKTRSGKIMRRILRKIACNELDTLGDTSTLADPSVVDGLIDKRLNV

SEQ ID NO: 122024 - DNA, 1962 bp, Psychrobacter arcticus 273-4
  CDS (1)..(1962): transl_table=11
atgactcaaaaatcatttccaattacgcctgaattcctcgccgctgccaatgttactgccgagcagtatgttgaacaataccaacaatccattgcgtcacctgaagcgacagatgccttttgggcgaagcaggccgagctgattgattggataaaaaagcccaccaaaatcagtgatgtcagctacgacttagaggattttcgcattaagtggttcgaagatggcgagctgaatatttcagtcaactgtcttgatcgtcatgtcaaaaacaacccctacaagcctgccatcatttgggaaggggatcatccctccctacataaaataatctcatttaaagagctgcatgaagcagtttgtcgcttaggtaatgccatgcgcaagcttggggttaaaaagggcgaccgcgtcaccttatatatgccgatgatacctgaagcagtggtcgcaatgctggcgtgtacgcgtattggagcagtacactcggtggtgtttggcggcttttctacgcaaagcttgggtaaccgtattattgatagccagtccaagctggtcatcaccgctgatgaaggtatccgtggtaacaagcgtacgccactcaaagccaatgtcgatcgtgctctagatatggatggcacagacagcgttagcaatgtcatcgtcgtccatcgtaccggcaattcagtgccgatgagtggtcgccgtgatatctggtatcacagcttggtcgatggtgaatcgcagtactgtgaacctgaagtgatgaatgcagaagacccgctgtttttattatatacctctggttcaacaggtaagcccaaaggcgtgttgcacaccacaggcggctatatcacttatgcgctgtccacgtttcgtgatgtttttgatgttaaggatgatgatgtgtactggtgtactgcggacgtcggttgggtgacgggtcatacctacgccacttacgcaccgcttgccaatggcacgacgacagtcatgtttgagggcgtgccagagtatccgacatgggcacgcattgggcatatcattgataagcatcaaataaccgttttatataccgcaccgaccgctattcgcgccatgatgaaagagggcgatacctttgtacgtgagtcggaccgctcaagtctgcgcttactcggcacggttggtgaacctatcaatcctgaagcgtgggactggtactatcatatcgtcggtggcggtaagtgtccggtcgtcgatacctggtggcagaccgaaaccggcggtattatgctagcaccaataccggggacggttgcgatgaagccaggcgcggtgatgaatccgctatatggcatcataccagaggtcattgataccgatggcgttgcgcttgaaggtgctgctgaaggtaatttggtaattaatggtagctggcctggtcaaatgcgcaccatttataaagaccacgcgcggtttttagagacttattttaccgaatatcccggctattatttcacgggcgatggggtacagcgtgatgaagatggtcactactggattaccggtcgtgttgacgacgtgcttaatgtgtcagggcatagactgggcacagcagagattgaaagtgcgatagtcgcccacccagcgacggcagaggcggcagtggtaggaatgccacacgatatacgcggtataggtatttgtgcttttgttatcttaaagtcgagtgaaacggcaactgagtcactaaaagcagaattaaaccgccatgtacgcaccgagattggtccgattgccaatttagatgccatctatatggtcaatgtgttacccaaaacgcgctctggtaaaatcatgcgccgcatattgcgtagtctagcggcagggcagtatgttggtcttggtgatttatctaccctagctgatagctcagttatcaatgagctggtcgaagtggtcaagacagaacgtgcaaaatag

SEQ ID NO: 122025 - protein, 653 aa, Psychrobacter arcticus 273-4
MTQKSFPITPEFLAAANVTAEQYVEQYQQSIASPEATDAFWAKQAELIDWIKKPTKISDVSYDLEDFRIKWFEDGELNISVNCLDRHVKNNPYKPAIIWEGDHPSLHKIISFKELHEAVCRLGNAMRKLGVKKGDRVTLYMPMIPEAVVAMLACTRIGAVHSVVFGGFSTQSLGNRIIDSQSKLVITADEGIRGNKRTPLKANVDRALDMDGTDSVSNVIVVHRTGNSVPMSGRRDIWYHSLVDGESQYCEPEVMNAEDPLFLLYTSGSTGKPKGVLHTTGGYITYALSTFRDVFDVKDDDVYWCTADVGWVTGHTYATYAPLANGTTTVMFEGVPEYPTWARIGHIIDKHQITVLYTAPTAIRAMMKEGDTFVRESDRSSLRLLGTVGEPINPEAWDWYYHIVGGGKCPVVDTWWQTETGGIMLAPIPGTVAMKPGAVMNPLYGIIPEVIDTDGVALEGAAEGNLVINGSWPGQMRTIYKDHARFLETYFTEYPGYYFTGDGVQRDEDGHYWITGRVDDVLNVSGHRLGTAEIESAIVAHPATAEAAVVGMPHDIRGIGICAFVILKSSETATESLKAELNRHVRTEIGPIANLDAIYMVNVLPKTRSGKIMRRILRSLAAGQYVGLGDLSTLADSSVINELVEVVKTERAK

SEQ ID NO: 122026 - DNA, 1947 bp, Colwellia psychrerythraea 34H
  CDS (1)..(1947): transl_table=11
atgaaagaattaaaatcttgttatccagtttcagagaaagctaaagcgcatacccacattgatgcggctacatacgatgctatgtacaaaaaatcaattgagcaacctgatgaattttggggcgagcaagcgaaagagtttattgactggtacaaaccttgggacagcgtaagtaaagttgatcttaaaaactctgaaattaactggttctctggcggtaaacttaacgtaagttataactgtattgatcgccacttagcgactaaagcaaatgatacagctattatttttgaaggtgatgatccaaatgatgactcaaaagtaacgtatcaagaattacacgaccatgtttgtcgttttgctaatttattaaaagaacgcggcgttaaaaagggcgaccgagtatgtatctacatgccaatgatccctgaagtaggttacgcgatgttagcgtgtgcacgtatcggtgccattcactctgttgtatttggtggtttctctactgaatcaattaaagcgcgcgtacttgatgcagactgtaaagtggtaatcactgcggatcaatcattacgtggtggtaaacgtattccacttaaatcaaatgttgatgctgcggttattgattgtcctaacgttcactcagtaattgttgttgctcgtaccggtggtgatgttgcttggaatgataaagtagatatcaactacgaagaagccgttgcgaaacaatcagcaatctgtgaaccagaagtaatggatgctgaagatcctttatttgttctttatacttcaggttcaacgggcacacccaaaggtgtagtacacacttgtggtggttacattctttatgctgcgatgacacacaagtatgtgtttgattataaagaaggcgaagtttactggtgtacagccgatgctggttggattactggtcactcttatatcttctacggcccgttagcaaacggtgcaactactctagtatttgagggtgtaccaacttacccagatgctggtcgtttttggcaagtctgtgaaaaacataaagttaacgtattctacacagcacctactgccattcgtgcattaatgagtattggtgatgatttagttaatcaagctgatttatcctctttacgcttgttaggtacggtaggtgagccaattaaccctgaagcatggcattggtattatgaagttgttggcaagagtaattgcccaattgttgatacgtggtggcagacagaaacaggtggtattttaattacttcactacctggtgcagtcgatatgaaaccaggttgtgcgggtaagccattctttggtgtacaaccggcactatttgataaagacggcaataccttagaaggtgaaaatgcaggtctgttagtaatgacggcaagttggccaggacaattacgtaccgtttatggtgatcataatcgtttctatcaaacttatttaggtcaataccctggtaattactttactggtgacggcgctaaacgtgatgaagatggttattactggataacaggtcgtgttgatgatgtgcttaacgtctcaggacacagattaggtactgctgaaattgaaagtgcattagtacttcatccagctgttgctgaagcggctgttgttggttacccacatgaaattaaaggccaaggcgtttattgttacgtgaccttaatgggcaacgcgactgaatcagacgagttaaatgtagagctacgtgaatttgtggcgaaagagttaggtcgctttgcaaaacctgattacattcaatggtcaccgggcttaccgaaaacacgttcaggtaaaatcatgcgtcgtattttacgtaagattgctgagaatgatgtagatagtttaggagatacttcaacattggcagatccaagtgttgttgaaaacctgattgataaacgtatcattcacggtgcataa

SEQ ID NO: 122027 - protein, 648 aa, Colwellia psychrerythraea 34H
MKELKSCYPVSEKAKAHTHIDAATYDAMYKKSIEQPDEFWGEQAKEFIDWYKPWDSVSKVDLKNSEINWFSGGKLNVSYNCIDRHLATKANDTAIIFEGDDPNDDSKVTYQELHDHVCRFANLLKERGVKKGDRVCIYMPMIPEVGYAMLACARIGAIHSVVFGGFSTESIKARVLDADCKVVITADQSLRGGKRIPLKSNVDAAVIDCPNVHSVIVVARTGGDVAWNDKVDINYEEAVAKQSAICEPEVMDAEDPLFVLYTSGSTGTPKGVVHTCGGYILYAAMTHKYVFDYKEGEVYWCTADAGWITGHSYIFYGPLANGATTLVFEGVPTYPDAGRFWQVCEKHKVNVFYTAPTAIRALMSIGDDLVNQADLSSLRLLGTVGEPINPEAWHWYYEVVGKSNCPIVDTWWQTETGGILITSLPGAVDMKPGCAGKPFFGVQPALFDKDGNTLEGENAGLLVMTASWPGQLRTVYGDHNRFYQTYLGQYPGNYFTGDGAKRDEDGYYWITGRVDDVLNVSGHRLGTAEIESALVLHPAVAEAAVVGYPHEIKGQGVYCYVTLMGNATESDELNVELREFVAKELGRFAKPDYIQWSPGLPKTRSGKIMRRILRKIAENDVDSLGDTSTLADPSVVENLIDKRIIHGA

SEQ ID NO: 122028 - DNA, 1956 bp, Pseudomonas syringae pv. phaseolicola 1448A
  CDS (1)..(1956): transl_table=11
atgagtgcagcttccctgtaccccgtccgcccagaagtcgcagcgactacgctgacggatgaagcgacctacaaggccatgtaccagcagtcggtggtcaaccctgatggtttctggcgtgaacaggctcagcgcctcgactggatcaaacctttcagtgtggtcaagcaaacctcgttcgacgaccatcgggtcgatatcaaatggttcgccgacggtacgctgaacgttgcctataactgcctggatcgccatctggcagagcgcggcgacacgattgcgatcatctgggaaggcgataacccttccgagcaccgcgaaatcacctaccgcgagctacacgccgaagtctgcaagtttgccaacgcactgcgcggccaggacgtgcaccgtggtgacgtcgtcactatctatatgccgatgatccccgaggctgtggtcgccatgctggcgtgcgcccggatcggtgcgattcactcggtggtattcggcggtttctcgccggaagcactggctggccggatcatcgattgcagctccaaagtggtcattactgcggatgaaggcctgcgcggtggcaagaagactgcgctcaaggcgaatgtcgaccgtgcgctgaccaatccggaaaccagcagcgtgcagaaggtcatcgtctgcaaacgtaccggtggcgaaatcgagtggaaccgtcatcgtgacatctggtaccactcgcttctggaagtggcctccagcacctgcgcgccaaaagagatgggggccgaagagtcgctgttcatcctctacacttcgggctcgaccggcaaacccaagggtgtgttgcacaccaccgcaggttatctgctttatgcggcgctgacccacgagcgtgtgtttgactacaagccgggcgaaatctactggtgcaccgccgacgtcggctgggtcaccgggcacagctacattgtctatggccccttggccaatggtgcaaccacgctgctgtttgaaggtgtgccgaactacccggacatcacgcgtgtgtcgaaaatcatcgacaagcacaaggtcaatatcctctacaccgcgccgaccgcgatccgcgccatgatggccgagggcaccaagtccgttgaaggtgccgacgggtccagtctgcgtctgttgggttcggtgggcgagccgatcaaccctgaagcctggggctggtactacaacacggtcggcaagcagaactgcccgattgtcgatacctggtggcagaccgaaaccggcggcatcctgatcagcccgttgccaggcgcgaccgccctgaagccgggctcggcgacacgtccattcttcggcgtgattccggcgctggtggacaacctgggcaacctcatcgagggcgcggccgaaggcaatctggtgattctcgattcctggccgggtcagtcacgctcgctgtatggcgatcacgaccgtttcgtcgacacctacttcaagaccttccgtggcatgtacttcaccggtgacggtgcccgtcgcgatgaggacggctattactggatcaccgggcgcgtagatgatgtgctcaacgtttccggccatcgcatgggcaccgcagagattgaaagcgcgatggttgcgcacccgaaagtcgccgaagccgcagtggtcggtgtgccgcatgacttgaaagggcagggcatctacgtctacgtgaccctcaacggtggcgaagaaccgagcgatgctctgcgcactgagttgcgcaactgggtgcgcaaggaaatcggtccgattgcttcgcctgatttcatccagtgggcgcctggattgccgaagactcgttcggggaagatcatgcgccgtatcctgcgcaagattgccaccgctgagtacgatgcgctgggtgacatctcgacgctggccgatccgggtgtggtgcagcacctgattgacacgcacaagaccatgaacgctgcctga

SEQ ID NO: 122029 - protein, 651 aa, Pseudomonas syringae pv. phaseolicola 1448A
MSAASLYPVRPEVAATTLTDEATYKAMYQQSVVNPDGFWREQAQRLDWIKPFSVVKQTSFDDHRVDIKWFADGTLNVAYNCLDRHLAERGDTIAIIWEGDNPSEHREITYRELHAEVCKFANALRGQDVHRGDVVTIYMPMIPEAVVAMLACARIGAIHSVVFGGFSPEALAGRIIDCSSKVVITADEGLRGGKKTALKANVDRALTNPETSSVQKVIVCKRTGGEIEWNRHRDIWYHSLLEVASSTCAPKEMGAEESLFILYTSGSTGKPKGVLHTTAGYLLYAALTHERVFDYKPGEIYWCTADVGWVTGHSYIVYGPLANGATTLLFEGVPNYPDITRVSKIIDKHKVNILYTAPTAIRAMMAEGTKSVEGADGSSLRLLGSVGEPINPEAWGWYYNTVGKQNCPIVDTWWQTETGGILISPLPGATALKPGSATRPFFGVIPALVDNLGNLIEGAAEGNLVILDSWPGQSRSLYGDHDRFVDTYFKTFRGMYFTGDGARRDEDGYYWITGRVDDVLNVSGHRMGTAEIESAMVAHPKVAEAAVVGVPHDLKGQGIYVYVTLNGGEEPSDALRTELRNWVRKEIGPIASPDFIQWAPGLPKTRSGKIMRRILRKIATAEYDALGDISTLADPGVVQHLIDTHKTMNAA

SEQ ID NO: 122030 - DNA, 1965 bp, Dechloromonas aromatica RCB
  CDS (1)..(1965): transl_table=11
atgtcgaatgagtccgtgcagctaatttatccgtctgacgaaatggtcaagaacgcggcggtttcggggatggacgcctaccgggcgctgtgcgcggaagcggatgccgactaccctgaattctgggcaaagcgcgcccgtgaaatgatcacgtggaagcagccgtttacccaggcgcttgacgagtctaatgcccccttcttcaaatggtttgccgacggcaagctgaatgtttcctacaactgcctcgaccgtcaggttgaagctggtctgggcgaaaaagtcgccatcattttcgaagccgacaacggcgaagtaaccaaggttagttacaaggaactgctctccaaggttgccaagttcgccaacgccctgcgtggcatgggtgtcaagaagggtgatcgcgtcgtcatctacatgccgatgaccatcgaaggcatctgcgcgatgcaggcctgtgcccgtatcggcgccatccactccatcgttttcggcggcttctccgctcaatccctgcgcgatcgtatcaacgacgccggcgctgttgccctgatcacctccgacggccagttccgcggcggcaaggccatcccgctcaagccgatcgctgacgaagccttcgccatgggtggttgcgagtccgtcaagaacgtcatcgtcttcaagcgcaccggtgccgaagtcaatatggttgccggtcgcgacacctggctgcacgatgcggttgccaaccagtccgacgtttgcgaaccggaatgggtcgaagccgaacatccgctattcctgctctacacgtccggctccaccggcaagccgaagggcgtccagcactccaccggtggctacctgctgcacgccatcatgaccatgaagtggaccttcgacatcaagccgaacgatgtcttctggtgtacggccgacatcggctgggtcacgggtcacacctatatcacctacggcccgctggcctgcggcgcgaccgaagtagtcttcgaaggcgtcccgacctatccggatgccggccgtttctggaagatgatccaggatcacaaggtctccatcttctacactgcaccgaccgccatccgttcgctgatcaagtcttccgacaccaatgcggctgtgcatccaaagagctacgacctgtcttcgctgcgcatccttggttccgtcggtgagccgatcaacccggctgcctggacgtggtactacgaaaacgttggcggcggccgttgcccgatcgtcgataccttctggcaaaccgaaaccggtggtcacatgatcaccccgttgccgggcgctaccccgctggttccgggttcctgcaccctgccgttcccgggcattcagttcgccgtggtcgatgagaccggcgccgatctgccgtggggccagggtggtatcctggtttgcaagaagccgtggccgtcgatgatccgcacgatctggaacgacgacgagcgcttcgtcaagtcctactatccgcaagacttccagggtaaatactacctggctggcgacggcgcgatccgcgacaaggacaccggttacttcaccatcaccggccgtatcgacgatgtgctgaacgtttccggtcaccgcatgggcacgatggaaatcgaatccgccctggtcgccaacccgctggttgccgaagctgccgtggtcggccgtccggatgacctgaccggtgaagccattgtggccttcgtggttctgaagggcgctcgcccgaccgatccggaagttgccaagaagctgatcaaggaactggctgactgggtgggcaaggaaatcggtccgatcgccaagccgaaggacatccgtttcggtgacaacctgccgaagacccgttcgggcaagatcatgcgtcgtctgctgcgtggcctggccaagggcgaggaactgacgcaagacacgtctacgctggaaaatccggccattctggaacagttgaagggctaa

SEQ ID NO: 122031 - protein, 654 aa, Dechloromonas aromatica RCB
MSNESVQLIYPSDEMVKNAAVSGMDAYRALCAEADADYPEFWAKRAREMITWKQPFTQALDESNAPFFKWFADGKLNVSYNCLDRQVEAGLGEKVAIIFEADNGEVTKVSYKELLSKVAKFANALRGMGVKKGDRVVIYMPMTIEGICAMQACARIGAIHSIVFGGFSAQSLRDRINDAGAVALITSDGQFRGGKAIPLKPIADEAFAMGGCESVKNVIVFKRTGAEVNMVAGRDTWLHDAVANQSDVCEPEWVEAEHPLFLLYTSGSTGKPKGVQHSTGGYLLHAIMTMKWTFDIKPNDVFWCTADIGWVTGHTYITYGPLACGATEVVFEGVPTYPDAGRFWKMIQDHKVSIFYTAPTAIRSLIKSSDTNAAVHPKSYDLSSLRILGSVGEPINPAAWTWYYENVGGGRCPIVDTFWQTETGGHMITPLPGATPLVPGSCTLPFPGIQFAVVDETGADLPWGQGGILVCKKPWPSMIRTIWNDDERFVKSYYPQDFQGKYYLAGDGAIRDKDTGYFTITGRIDDVLNVSGHRMGTMEIESALVANPLVAEAAVVGRPDDLTGEAIVAFVVLKGARPTDPEVAKKLIKELADWVGKEIGPIAKPKDIRFGDNLPKTRSGKIMRRLLRGLAKGEELTQDTSTLENPAILEQLKG

SEQ ID NO: 122032 - DNA, 1968 bp, Thiobacillus denitrificans ATCC 25259
  CDS (1)..(1968): transl_table=11
atggcagccatcgagtcggtactgaccgaaacccgtgtattcccgcctgccgaggctttcgtcacgcaggccaacgtcgccgggatggaggcctaccaggcgctgtgccgccgcgccgaagcggactacgaggggttctgggccgagctcgcccgccagcacatcgactggaagacgccgttcacgcgcacgctcgacgaaagcgacgcaccgttctatcgctggttcgacgacggcgagctgaacgtttcctacaactgcctcgatcgccatctggcgacccggggcgacaagaccgcgctgatcttcgaggccgacgacggcagcgtccgcacggtcacctacaaggaactgcacgcgcgcgtctgccagttcgccaacggcctgaaatcgctcggcgtcggcaagggcgaccgcgtgatcgtctacatgccgatgagcatcgaagcggtcgtcgcgatgcaggcctgtgcgcgcatcggcgcgatccattcggtcgtgttcggcggcttctcggcgaagagcctgttcgagcggatcgaggacgcgcaggccaagctcatcgtcacggccgacgaatcgctgcgcggcggcaaggccgtgccgctcaagcgggcggccgacgaggcgctggccatgggcgacacctcctgcgtcgagcgcgtcgtcgtctaccgccgttccggcggggaggtgaactggtcggcgcgcgacctctggtggcacgaactgacccagacccaggccgagacctgcgagccggtctgggtgtcggccgagcacccgctcttcatcctctacacttcggggtcgaccggcaagccgaagggggtgcagcattcgaccggcggctacctgctcggcgcgctgctgtcgatgctttgggtattcgacgccaaggccgacaacgacgtgtactggtgcacggccgacgtcggctggatcaccgggcacacctacgtcgcctacggcccactcgcgctcggcatgaccgaggtcatcttcgagggcatcccgacctatccgcacgccgggcgcttctgggaaaccatcgccaaacataaggtcacgaccttctacacggcgccgaccgcgatccgcagcctgatcaagctcggttccgaactgcccgcgcaatacgatctgtcgtcgctgcgtctgctcggaacggtcggcgagccgatcaatccggaggcctggatgtggtaccacgaggtcatcggcggtggccgctgtccgatcgtcgatacctggtggcagaccgagaccggtgcccacatgatcgcgcccttgccgggcgcggtgccgaccaagccgggctcgtgcacgctgccgctgcccggcatcatggccgcggtcaccgacgagcacggcgggccggtcgcgaagggtcagggcggctatctcgtgatcaagcggcccttcccgtcgcagctgcgcacgctgtggggcgacccggaacgtttcaagaagacctattttcccgaggagatgggcggcaagacctacctcgcaggcgattcggcgcaccgcgacgacgacggctatttctggatcatgggtcgcatcgacgacgtgctgaacgtctcgggccatcgcctcggcacgatggagatcgaatcggcgctggtgtccaatccgcgcgtcgccgaagcggcggtcgtcgggcgcccgcacgaggtcaagggcgaggcggtcgtcgcctacgtcgtgctcaagggcgcgcgtgcggtcggcgacgaagcgaaggacatcgcgcgcgaactgcgcgactgggtcggcaaggagatcggcccgatcgccaagcccgacgagatccgtttcggcgaaaacctgccgaagacgcgctcaggcaagatcatgcgccggctgctccgggcgatcgccaagggcgaggaaatcacccaggacgtctcgaccctcgaaaacccggcgatcctcgatcagctcaaggaagccgtgaaataa

SEQ ID NO: 122033 - protein, 655 aa, Thiobacillus denitrificans ATCC 25259
MAAIESVLTETRVFPPAEAFVTQANVAGMEAYQALCRRAEADYEGFWAELARQHIDWKTPFTRTLDESDAPFYRWFDDGELNVSYNCLDRHLATRGDKTALIFEADDGSVRTVTYKELHARVCQFANGLKSLGVGKGDRVIVYMPMSIEAVVAMQACARIGAIHSVVFGGFSAKSLFERIEDAQAKLIVTADESLRGGKAVPLKRAADEALAMGDTSCVERVVVYRRSGGEVNWSARDLWWHELTQTQAETCEPVWVSAEHPLFILYTSGSTGKPKGVQHSTGGYLLGALLSMLWVFDAKADNDVYWCTADVGWITGHTYVAYGPLALGMTEVIFEGIPTYPHAGRFWETIAKHKVTTFYTAPTAIRSLIKLGSELPAQYDLSSLRLLGTVGEPINPEAWMWYHEVIGGGRCPIVDTWWQTETGAHMIAPLPGAVPTKPGSCTLPLPGIMAAVTDEHGGPVAKGQGGYLVIKRPFPSQLRTLWGDPERFKKTYFPEEMGGKTYLAGDSAHRDDDGYFWIMGRIDDVLNVSGHRLGTMEIESALVSNPRVAEAAVVGRPHEVKGEAVVAYVVLKGARAVGDEAKDIARELRDWVGKEIGPIAKPDEIRFGENLPKTRSGKIMRRLLRAIAKGEEITQDVSTLENPAILDQLKEAVK

SEQ ID NO: 122034 - DNA, 1956 bp, Pseudomonas fluorescens PfO-1
  CDS (1)..(1956): transl_table=11
atgagtgcggcttccctgtatcccgttcgtcccgaggttctggccaatacgctgaccgatgaggcgacctacaaagccatgtaccaacagtcggtcgtcaaccctgacggcttctggcgcgaacaagccaagcgcctcgactggatcaagcctttcaccacggtgaaacagacttcgttcgacgatcaccatgtcgacatcaagtggtttgcagacggcaccctgaacgtttcctacaactgcctcgaccgccatctggccgagcgcggcgatcaggtcgccatcatctgggaaggcgacgacccttccgaaagccgcaacatcacctaccgcgagctgcacgaacaagtgtgcaagctcgccaacgccctgcgtggccaggacgtacaccgcggcgacgtggtgaccatttatatgccgatgatccccgaagccgtggtcgccatgctggcctgcacccggatcggcgcgattcactcggtggtgttcggcggcttctcgccggaagccctggccggtcgcatcatcgactgccgctcgaaagtggtgatcaccgctgacgaaggcatccgtgccggcaagaagatttccctcaaggccaacgtcgacgacgccctgaccaacccggaaaccagcagcatccagaaagtcatcgtgtgcaagcgcaccggcggcgacatcaagtggaaccagcatcgtgacatctggtacgaagacctgatgaaagtggcgggcaccgtttgcgcgccgaaagagatgggcgccgaagaagcactgttcatcctttatacctccggctccaccggcaagccgaagggcgtgcagcacaccaccggcggctatctgttgtacgcggccatgactcacgagcgcgtgttcgactaccgtccgggtgaaatctactggtgcaccgccgacgtcggctgggtcaccggtcactcctacatcgtctacggcccgctggccaacggcgcgaccacgctgctcttcgaaggcgtgccgaactatccggacatcacccgggtggcgaagatcgtcgacaagcacaaggtcaacatcctctacaccgcgccgaccgcgatccgcgcgatgatggcttccggcaccgccgctgttgaaggcgcggacggcagcagcctgcgtctgctcggttcggtgggcgagccgatcaacccggaagcctgggactggtactacaagaatgtcggcaagtcccgttgcccgatcgtcgatacctggtggcagaccgaaaccggcggcaacatgatgagcccgctgccgggcgctcacgcgctgaagccgggttcggccgcacgtccgttcttcggtgtggtgccggcgctggtggacaacctcggcaacatcatcgagggcgaggccgaaggcaatctggtgattctcgattcgtggccgggtcaggcgcgcaccctgtacggcgaccacgaccgtttcgtcgacacctacttcaagaccttccgtggcatgtacttcaccggtgacggcgcccgtcgcgatgccgacggttactactggatcaccggtcgcgtggacgacgtgctcaacgtttccggccaccgcatgggtactgccgagatcgaaagcgcgatggtcgctcacccgaaagtcgccgaagcggcggtggtcggtgtgccgcacgacatcaaggggcagggcatttatgtctatgtcaccctgaaaaatggcgaagagccgagcgagcaactgcgcctggaactgaaaaactgggtgcgcaaggagatcgggccgatcgcttcgccggacgtgatccagtgggcgccggggctgccgaagactcgttcgggcaagatcatgcgccgcatcctgcgcaagatcgctaccgccgaatacgaagggttgggcgacatctccaccctggcggatccgggtgtggtgcagcatctgatcgatacgcacaagaccatgaacgtcgcgtaa

SEQ ID NO: 122035 - protein, 651 aa, Pseudomonas fluorescens PfO-1
MSAASLYPVRPEVLANTLTDEATYKAMYQQSVVNPDGFWREQAKRLDWIKPFTTVKQTSFDDHHVDIKWFADGTLNVSYNCLDRHLAERGDQVAIIWEGDDPSESRNITYRELHEQVCKLANALRGQDVHRGDVVTIYMPMIPEAVVAMLACTRIGAIHSVVFGGFSPEALAGRIIDCRSKVVITADEGIRAGKKISLKANVDDALTNPETSSIQKVIVCKRTGGDIKWNQHRDIWYEDLMKVAGTVCAPKEMGAEEALFILYTSGSTGKPKGVQHTTGGYLLYAAMTHERVFDYRPGEIYWCTADVGWVTGHSYIVYGPLANGATTLLFEGVPNYPDITRVAKIVDKHKVNILYTAPTAIRAMMASGTAAVEGADGSSLRLLGSVGEPINPEAWDWYYKNVGKSRCPIVDTWWQTETGGNMMSPLPGAHALKPGSAARPFFGVVPALVDNLGNIIEGEAEGNLVILDSWPGQARTLYGDHDRFVDTYFKTFRGMYFTGDGARRDADGYYWITGRVDDVLNVSGHRMGTAEIESAMVAHPKVAEAAVVGVPHDIKGQGIYVYVTLKNGEEPSEQLRLELKNWVRKEIGPIASPDVIQWAPGLPKTRSGKIMRRILRKIATAEYEGLGDISTLADPGVVQHLIDTHKTMNVA

SEQ ID NO: 122036 - DNA, 1938 bp, Pseudomonas fluorescens PfO-1
  CDS (1)..(1938): transl_table=11
atgttcgatatcagcacgttccccaaagccgatgccgtccgccgggctgcacagttgagtcaggacgactaccagcgcctgtaccgcgaatccattgaacaccccagcaccttctgggccgaacaggccacccgcttcctcgactggagcacgccgtggcagaccgtccagcgctatgacctgaagaccggcgacgccgcctggtttgccggtggcaagctgaacgtcagctacaactgcatcgaccgccatctggaaacgcgcggcgatcagactgccatcctctgggaaggcgacgaccctgccgaatcgacgcaaatcacctacagcaaactccatcaccacgtctgccgcctggccaacgtgctgaaaagccgtggcgtaaaaaaaggcgaccgggtgtgcatctacatgccgatgatccccgaagcggcctacgccatgctcgcctgcgcacggatcggcgcgattcactcggtagtgtttggcggtttctccccggactcattgcgcgaccgcattctcgacgccgactgccgcaccgtgatcaccgccgacgagggcgtgcgcggtggcaaattcgtgccgctgaaacagaacgtcgacaaagccctgcagagttgtccgaatgtcagcaccgtcgtggtggtcgagcgcacccagaacaaagtcgactgggtcgaaggccgcgacctctggtatcaccaggccgtgcgcgacgtcagcgacgaatgcccgccggaaccgatggacgcagaagacccgctgttcatcctctacacctccggcagcaccggcaaacccaaaggcgtgctgcacaccaccggcggttacctgctgcaagcggcgatgaccttcaagtacgtcctcgactaccgcgatggcgaagtgttctggtgcaccgccgacgtcggctgggttaccggccacagctatatcgtctacggcccgctggccaacggcgccaccacactgatcttcgaaggcgtgccgagctacccgagcacttcgcggttctggcaggtgatcgacaaacacaaggtcaacatcttctacaccgcccccaccgccctgcgcgcattgatgcgtgaaggcgccgggcccttgcaggaaacgtcgcgacaaagcctcaaattgctcggcagtgtcggtgagccgatcaacccggaagcgtgggaatggtatttcaacgtcgtaggcgaacagcgctgcccgattgtcgatacgtggtggcagaccgaaaccggcggcatcatgctcagcccgttggtcagcgctcagcagatcaaaccaggctgcgccacccggccgatgttcggcgtgcaaccggtgctgctcgatgagcacggcaaggaaatcaagggcgccggcagtggcgtactggcgatcaagtcgagctggccggcgcagatccgcagcgtttacggcgatccgcagcgcatggtcgacacctacttcaagccctaccccggttactacttcaccggcgacggtgcccgtcgtgacgaggacggcgattactggatcaccgggcgcatcgatgacgtgatcaatgtctccggccatcgcatcggcaccgccgaggtggaaagtgcgttggtgctgcacgacagcattgcagaggccgccgtggtcggttatccccacgacgtcaaaggtcaggggatttatgcgttcgtcacaccgatgaatggcaccgaacccaacgatgagctgaagaaagaactgctggcccacgtcagcaaggaaatcggcagcttcgccaaaccggacctgatccagtgggccccggccctgccgaagacccgctcgggcaagatcatgcggcggatcctgcgcaagatcgcctgcaacgagctcgacagccttggcgacacctcgacgctggcggatccgagcgtggtgcagggtttgatcgataaacgcttgaaccagtaa

SEQ ID NO: 122037 - protein, 645 aa, Pseudomonas fluorescens PfO-1
MFDISTFPKADAVRRAAQLSQDDYQRLYRESIEHPSTFWAEQATRFLDWSTPWQTVQRYDLKTGDAAWFAGGKLNVSYNCIDRHLETRGDQTAILWEGDDPAESTQITYSKLHHHVCRLANVLKSRGVKKGDRVCIYMPMIPEAAYAMLACARIGAIHSVVFGGFSPDSLRDRILDADCRTVITADEGVRGGKFVPLKQNVDKALQSCPNVSTVVVVERTQNKVDWVEGRDLWYHQAVRDVSDECPPEPMDAEDPLFILYTSGSTGKPKGVLHTTGGYLLQAAMTFKYVLDYRDGEVFWCTADVGWVTGHSYIVYGPLANGATTLIFEGVPSYPSTSRFWQVIDKHKVNIFYTAPTALRALMREGAGPLQETSRQSLKLLGSVGEPINPEAWEWYFNVVGEQRCPIVDTWWQTETGGIMLSPLVSAQQIKPGCATRPMFGVQPVLLDEHGKEIKGAGSGVLAIKSSWPAQIRSVYGDPQRMVDTYFKPYPGYYFTGDGARRDEDGDYWITGRIDDVINVSGHRIGTAEVESALVLHDSIAEAAVVGYPHDVKGQGIYAFVTPMNGTEPNDELKKELLAHVSKEIGSFAKPDLIQWAPALPKTRSGKIMRRILRKIACNELDSLGDTSTLADPSVVQGLIDKRLNQ

SEQ ID NO: 122038 - DNA, 1962 bp, Rhodobacter sphaeroides 2.4.1
  CDS (1)..(1962): transl_table=11
atggatcacgctcaggcgaatgcggtctataccgcgtcggcagatttcattgcgcaagcccatgtcgacgcggccggctacgagcggatgtatgctgcatccgtggccgacccggaggcgttctggggcgaacagggcaagcggctcgactggatcaagccctacaccaaggtcaagaacacgaacttccggccgggcgaggtctcgatcaagtggttcgaggacggcacgctgaacatcgcctggaactgcatcgaccggcatctggcgacgcgggccaagcagaccgcgatcatctgggagccggacgatccgaacgtgccggcccagcacatcagctatcaggagctgcacgacaacgtctgccgcatggccaacgtgctggtgagccagggcgtgcgcaagggcgaccgggtggtgatgtatctgccgatgatccccgaggccgcctatgcgatgctggcgtgcgcccggatcggcgccatccattccgtcgtcttcgcgggcttctcgcccgacgcgctggcgaaccggatcaacgactgtcaggccaaggtggtcatcaccgccgacacggctccgcgtggcggccggcgcacgcccttgaagtcgaacaccgacgcagcccttctccattgctcggaccgggtgcgctgcctcgtcgtcaagcacacgggcgaccagatccactggatggacggccgcgacgtggacgtgaaggagctgatgcgccacgcctcgcccgactgcccgatcgaggaggtgaatgccgaggatccgctcttcatcctctatacctcgggctcgaccggcaagccgaagggggtcgtgcacacctcgggcggctatctgacctatgccgccatgacccatcagatgaccttcgactaccatgacggcgacgtcttctggtgcaccgcggacgtgggctgggtcacgggccacagctacatcgtctacggcccgctggcgaacggcgcgaccacgctcatgttcgagggcgtgccgacctatcccgatgcgggccgcttctgggccgtctgcgagaagcacaaggtgaaccagttctacaccgcgcccacggcgatccgctcgctgatgggcctcgggccggaatgggtcgacaagtacgacctgtcgtcgctgaagctcttgggctcggtgggcgagccgatcaaccccgaggcctggagctggtacaacacccatgtcggcaagggccgctgcccgatcgtcgacaccttctggcagaccgagaccggcggccacatgatcacgccgctgccgggcgcgatcccggtgaagccgggcgcggcctcgaagcccttcttcggggtgaagccggtgatcctcgacccgaccgacgggcacgagctgcacgaaaccgcgaccgagggggtgctctgcatcgccgacagctggccggggcagatgcgcacgctctggggcgaccacgagcggttcgaagaggcctatttctcgcaatacaagggctattacttcaccggcgacggctgccgccgcgatgcggacggctattactgggtcacgggccgggtcgatgacgtcatcaacgtctcgggccaccggatgggcaccgccgaggtggaatccgcgctcgtcgcccatgcgcaggtcgccgaagccgcggtggtgggctatccgcacgacatcaaggggcagggcatctatgcctatgtcacgctgatgaacggggtccagccgaccgaggagctgcgcaaggatctggtgaaatgggtccgcaccgagatcggccccatcgcctcgccggacgtgatccagtgggcgccgggcctgcccaagacccgctcgggcaagatcatgcgccgcatcctgcgcaagatcgccgagaacgacttcggctcgctcggcgacaccacgacgctggccgatccgtcggtggtcgacgacctgatcgccaaccgcaagaaccggggctga

SEQ ID NO: 122039 - protein, 653 aa, Rhodobacter sphaeroides 2.4.1
MDHAQANAVYTASADFIAQAHVDAAGYERMYAASVADPEAFWGEQGKRLDWIKPYTKVKNTNFRPGEVSIKWFEDGTLNIAWNCIDRHLATRAKQTAIIWEPDDPNVPAQHISYQELHDNVCRMANVLVSQGVRKGDRVVMYLPMIPEAAYAMLACARIGAIHSVVFAGFSPDALANRINDCQAKVVITADTAPRGGRRTPLKSNTDAALLHCSDRVRCLVVKHTGDQIHWMDGRDVDVKELMRHASPDCPIEEVNAEDPLFILYTSGSTGKPKGVVHTSGGYLTYAAMTHQMTFDYHDGDVFWCTADVGWVTGHSYIVYGPLANGATTLMFEGVPTYPDAGRFWAVCEKHKVNQFYTAPTAIRSLMGLGPEWVDKYDLSSLKLLGSVGEPINPEAWSWYNTHVGKGRCPIVDTFWQTETGGHMITPLPGAIPVKPGAASKPFFGVKPVILDPTDGHELHETATEGVLCIADSWPGQMRTLWGDHERFEEAYFSQYKGYYFTGDGCRRDADGYYWVTGRVDDVINVSGHRMGTAEVESALVAHAQVAEAAVVGYPHDIKGQGIYAYVTLMNGVQPTEELRKDLVKWVRTEIGPIASPDVIQWAPGLPKTRSGKIMRRILRKIAENDFGSLGDTTTLADPSVVDDLIANRKNRG

SEQ ID NO: 122040 - DNA, 1983 bp, Burkholderia sp. 383
  CDS (1)..(1983): transl_table=11
atgtctgcgattgaatcggttcttcacgaaacccgtcagtttgcgccgcccgcggcgctcgaacaggcggcgaccatttccggcatgccggcctaccgtgcgctcgccgccgaggccgagaacgattacgaaggattctgggcgcgtctcgcgcgcgagggtcttgcgtggcacaagccgttcacgaaagtgctcgacgagtccaacgcgccgttctacaagtggttcgaggacggcgagctgaacgcgtcgtacaactgcctcgaccgtcacgtcgaagccggcaacggcgagcgcgtcgcggtgatcttcgaagccgacgacggtaccgtcacgcgcgtcacctatgcagatctcctcgcgcgcgtatcgcgtttcgcgaatgcattgaagaagcgcgggatcggcaagggcgaccgcgtcgtcatctatatcccgatgtcgatcgaaggcatcgtcgcgatgcaggcctgcgcgcgcatcggcgcgacgcactcggtcgtgttcggcggcttctccgcgaagtcgttgaacgagcggctcgtcgacgtcggcgcaacggcgctcatcacggccgacgaacaggcgcgcggcggcaagacgctgccgctgaagagcatcgcggatgaagcgatcgcgctgggcggctgcgaagccgtgaagagcgtgatcgtctatcgccgcaccggcggcaagatcgactggcacgccgagcgcgacctgtggatgcacgaactgacggccggcgaatcggaccagtgcgagccggaatgggtcggcgccgagcatccgctgttcatcctgtatacgtcgggctcgaccggcaagccgaagggcgtgcagcacagcacgggcggctacctgctgtgggccgcgcagacgatgaagtggaccttcgactggaagcccaccgacgtgttctggtgcacggccgacatcggctgggtcacgggccacacgtacatcacgtacggcccgctcgcatgcggcggcacgcaggtcgtgttcgaaggcgtgccgacctacccggacgccggccgcttctggaagatgatcggcgaccacaaggtcaccgtgttctacaccgcgccgaccgcgatccgttcgctgatcaaggcggccgaggccgacgacaaggtgcatccgaagagctacgacctgtcgagcctgcgcatcatcggcaccgtcggcgagccgatcaatccggaagcatggatgtggtatcacaagcacgtcggccaggagcgctgcccgatcgtcgacacgtggtggcagaccgagacgggcggccacatgatcacgccgctgccgggcgcgacgccgaccgtgcccggttcgtgcacgctgccgttgcccggcatcatggccgcggtggtcgatgaaaccggccaggacgtgccgaacgggcagggcggcatcctcgtcgtcaagcgtccgtggcccgcgatgatccgcacgatctggggcgacccggagcgtttcaagaagagttactaccccgaggaactcggcgggcggctgtatctggccggcgacggcaccgtgcgcgacaaggacaccggctacttcacgatcatgggccggatcgacgatgtgctgaacgtgtcgggccaccggctcggcacgatggaaatcgaatcggcgctggtctcgcacgaactcgtggccgaggcggctgtggtcggccgtccggacgatacgacgggcgaggcggtggtcgcgttcgtggtgctgaagcgttcgcgtccggaaggcgaggaagcagcggcgctggcgaagacgctgcgcgactgggtcggcaagcagatcgggccgatcgcgaagccgaaggacatccgcttcggcgacaacctgccgaagacccgctcgggcaagatcatgcggcgcctgctgcgttcgctcgcgaagggtgaagcgatcacgcaggacacgtccacgctcgagaacccggccatcctcgatcagctcgccgaagtgcgctga

SEQ ID NO: 122041 - protein, 660 aa, Burkholderia sp. 383
MSAIESVLHETRQFAPPAALEQAATISGMPAYRALAAEAENDYEGFWARLAREGLAWHKPFTKVLDESNAPFYKWFEDGELNASYNCLDRHVEAGNGERVAVIFEADDGTVTRVTYADLLARVSRFANALKKRGIGKGDRVVIYIPMSIEGIVAMQACARIGATHSVVFGGFSAKSLNERLVDVGATALITADEQARGGKTLPLKSIADEAIALGGCEAVKSVIVYRRTGGKIDWHAERDLWMHELTAGESDQCEPEWVGAEHPLFILYTSGSTGKPKGVQHSTGGYLLWAAQTMKWTFDWKPTDVFWCTADIGWVTGHTYITYGPLACGGTQVVFEGVPTYPDAGRFWKMIGDHKVTVFYTAPTAIRSLIKAAEADDKVHPKSYDLSSLRIIGTVGEPINPEAWMWYHKHVGQERCPIVDTWWQTETGGHMITPLPGATPTVPGSCTLPLPGIMAAVVDETGQDVPNGQGGILVVKRPWPAMIRTIWGDPERFKKSYYPEELGGRLYLAGDGTVRDKDTGYFTIMGRIDDVLNVSGHRLGTMEIESALVSHELVAEAAVVGRPDDTTGEAVVAFVVLKRSRPEGEEAAALAKTLRDWVGKQIGPIAKPKDIRFGDNLPKTRSGKIMRRLLRSLAKGEAITQDTSTLENPAILDQLAEVR

SEQ ID NO: 122042 - DNA, 1974 bp, Synechococcus sp. CC9605
  CDS (1)..(1974): transl_table=11
gtgaccgacgccaacaccaccatcgaaagcgtgctgcaggagcagcgggtgttcgagccgccagcagacaccgccgccaaagcccgcatcggcagcctcgaggcttacagggccatggccgatgccgccaaagccgatcctgatgcgttctggggtgaggccgcccggcgagaactgcattggttcgagcccttccacaccgtgctggattggtcgaaccccccgttcgcgcgctggtttgagggcggcaccactaacctttcctacaattgcctggaccgtcatctcgatgggccaacggcacagaaaacagcgttgatctgggaaggcgagccgggggatgtgcgccggttcacttaccaggaactgcatgctgaggtgtgcaaagccgccaatggcctcaaagccatgggcattggcaagggtcaccttgtggcgctctacatgccgatggtgccggaggcggcgatcgccatgctcgcttgtgctcgcatcggtgctccccattcagtggtgttcggtggcttttccgcagaagcactgagggaccgtctcaacgacggcgaagtgaaagcagtgatcaccgctgatggtggcttccgcaaggacaagcctgtgtcactcaagcccgcggtggatgcggcgctggccaatggagcctgcccctcggtgatgggcgtgcttgtggtgcagcgcaccaagcaggacgtggagatggtttctggtcgcgaccagtggtggcacgacttggtggagggtcagagtgccgactgccccgctgagccgatggccagcgaggaccgcctgttcgtgctttacacctccggttccaccggcaagcccaagggcgtggtgcacaccactgccggctacaacctttgggcccacctcaccttccagtggatctttgatattcagtatgaggatgtcttctggtgtacggctgatgtgggttggatcaccggccacagctatatcgtctacggccccttatcgaacggtgccacgaccgtgatgtacgagggtgcaccgcgcccgtccaagcccggtgccttctgggaattgattcagaagcacgggatcacgatcttctacacggctcccaccgccatccgggcgttcatgaagagcggccgctccgtgccggatcagttcgacatgagcagccttcgcctgctgggcaccgttggcgaaccgatcaatccggaggcctggatgtggtatcgcgacgtgattggaggcaaccgctgcccgatcgtcgacacctggtggcagaccgaaaccggcggggtgatgatcagccccctgccgggagcaacgcccaccaagccaggctccgccaccctgcccctgcccggcattcaggccgacgtcatcgatgcggaagggaacagctgtggtgccgatgaaggcgggtatctggcggtgcgtgccccctggcccggaatgatgcgcaccgtgcatggcaaccctcaacgcttccgcgagagctattgggagcacatccggcctgccgatgggtcttacctctatttcgcgggggacggtgcccggcgggatgccgatggctacttctgggtgatgggccgtgtcgatgacgtgatcaacgtctcgggtcaccgtctcggcacgatggagatcgaatcagccctcgtcagccaccccgcggtggcggaggcggccgtcgtgggtcgacccgacgacctcaagggcgaaggcatcgtggccttcgtcactctggaggcctgccgcgagggcgatgacgccctggtgaaggagctgcgagcccacgtgggaacggaaatcggtccgatcgcccggccggacgagatccgttgcagtgatgctctgcccaaaacccgcagcggcaagatcatgcgccggatcctgcgggcccttgcggcgggtcaggaggtgagtggcgacaccagcaccctggaggatcgctccgttctggaccgcctcagggcctga

SEQ ID NO: 122043 - protein, 657 aa, Synechococcus sp. CC9605
MTDANTTIESVLQEQRVFEPPADTAAKARIGSLEAYRAMADAAKADPDAFWGEAARRELHWFEPFHTVLDWSNPPFARWFEGGTTNLSYNCLDRHLDGPTAQKTALIWEGEPGDVRRFTYQELHAEVCKAANGLKAMGIGKGHLVALYMPMVPEAAIAMLACARIGAPHSVVFGGFSAEALRDRLNDGEVKAVITADGGFRKDKPVSLKPAVDAALANGACPSVMGVLVVQRTKQDVEMVSGRDQWWHDLVEGQSADCPAEPMASEDRLFVLYTSGSTGKPKGVVHTTAGYNLWAHLTFQWIFDIQYEDVFWCTADVGWITGHSYIVYGPLSNGATTVMYEGAPRPSKPGAFWELIQKHGITIFYTAPTAIRAFMKSGRSVPDQFDMSSLRLLGTVGEPINPEAWMWYRDVIGGNRCPIVDTWWQTETGGVMISPLPGATPTKPGSATLPLPGIQADVIDAEGNSCGADEGGYLAVRAPWPGMMRTVHGNPQRFRESYWEHIRPADGSYLYFAGDGARRDADGYFWVMGRVDDVINVSGHRLGTMEIESALVSHPAVAEAAVVGRPDDLKGEGIVAFVTLEACREGDDALVKELRAHVGTEIGPIARPDEIRCSDALPKTRSGKIMRRILRALAAGQEVSGDTSTLEDRSVLDRLRA

SEQ ID NO: 122044 - DNA, 1941 bp, Rhodospirillum rubrum ATCC 11170
  CDS (1)..(1941): transl_table=11
atgtctgagtccgttctggttccggtgcccgaagccatcgccaaagccgccttggtcaacgaggcgcaataccttgatctttacaagtcctccatcgccgaccccgacgccttttgggccgagcatggcaagcgcatcgactggatcaaaccctttaccgcggtgaaggatgtttcctttgatccccacgacgtgcatatccgctggttccacgacggcacgctcaacgtgtcggtcaactgcctggaccgtcacctggaaacccggggcgaccagaccgccatcctgtgggagggcgacgaccccaaggacgacgcccgcatcacctaccgcgatctttacgagcgggtgtgcaagctggccaacgccttccgcgagttgggcgtcaaaaagggcgaccgcgtctgcatttatctgccgatgatccccgaggcggcggtggcgatgctggcctgcgcccgcatcggcgccgttcattccatcgtgttcggcggtttctcgcccgatagcctggccaatcgcatccaggattccgaatgcaccctggtcatcacctccgacgagggtctgcgcggcggccgcaaggtggcgctgaaaaagaacgtcgacaccgccttggagcattgcccgagcgtcaagacggtggtggtggtcaagcgcaccggcggcgccattgacaccgtcgaaggccgcgatgtctggtaccacgagatcaccgccaaccagcccgccgaatgccagcccgaggaaatgaacgccgaggatccgctgttcatcctgtacacctcgggctcgaccggcaagcccaagggcgtgctgcatacctcaggcggctatctggtctatgtgtcgatgacccatgaatacgtcttcgactacaaggacggcgaggtttactggtgcacggccgatgtcggctgggtgaccggccacagctatatcgtttacgggccgctggccaatggcgccatcagcctgatgttcgaaggcgtgcccaattatcccgacgtgtcgcgtttctggcaggtggtggaaaagcacaaggtcaacatcttctacaccgcccccaccgccatccgcgccctgatgcgcgagggcgaggagccggtgaagaagcatgaccgctcgtcgctgcgcatccttggctcggtcggcgaaccgatcaatcccgaggcctggacctggtaccaccgggtggtgggcgaggatcggtgcccgatcgtcgatacttggtggcagaccgaaaccggcggcatcctgatcacgccgctgcccggggcgaccaagctcaagcccggatcggccaccttgccgttcttcggggtcgagccggtgctggtcgatgccgagggcaacgaactgagcggggcgaccgagggcaatctgtgcatcgcccgctcgtggccggggcagatgcgcacggtctatggcgatcacgagcgcttcgtgcagacctatttctccacctacaagggctattacttcaccggcgacggctgccgccgcgacgaggacggctattactggatcaccggccgcgtcgatgacgtcatcaacgtgtcgggccaccgcatgggaacggccgagatcgaatcggccctggtcgcccatcccaaggtggccgaagccgccgtcgtcggcttcccccacgacatcaagggccaaggcatctacgcctatgtcaccctggtggccggcgagaaggaaaccgacgccctgcgcaaggaactggtggcctgggtccgcaaggacatcggaccgatcgccagccccgatatcatccagtgggcgcccggcctgcccaagacgcgctcgggcaagatcatgcgccgcatcctgcgcaagatcgccgagaacgaattcggcgcccttggcgatacctcgaccctggccgatccgacggtggtggaagacctgatcgccaatcgtccccaggcgtaa

SEQ ID NO: 122045 - protein, 646 aa, Rhodospirillum rubrum ATCC 11170
MSESVLVPVPEAIAKAALVNEAQYLDLYKSSIADPDAFWAEHGKRIDWIKPFTAVKDVSFDPHDVHIRWFHDGTLNVSVNCLDRHLETRGDQTAILWEGDDPKDDARITYRDLYERVCKLANAFRELGVKKGDRVCIYLPMIPEAAVAMLACARIGAVHSIVFGGFSPDSLANRIQDSECTLVITSDEGLRGGRKVALKKNVDTALEHCPSVKTVVVVKRTGGAIDTVEGRDVWYHEITANQPAECQPEEMNAEDPLFILYTSGSTGKPKGVLHTSGGYLVYVSMTHEYVFDYKDGEVYWCTADVGWVTGHSYIVYGPLANGAISLMFEGVPNYPDVSRFWQVVEKHKVNIFYTAPTAIRALMREGEEPVKKHDRSSLRILGSVGEPINPEAWTWYHRVVGEDRCPIVDTWWQTETGGILITPLPGATKLKPGSATLPFFGVEPVLVDAEGNELSGATEGNLCIARSWPGQMRTVYGDHERFVQTYFSTYKGYYFTGDGCRRDEDGYYWITGRVDDVINVSGHRMGTAEIESALVAHPKVAEAAVVGFPHDIKGQGIYAYVTLVAGEKETDALRKELVAWVRKDIGPIASPDIIQWAPGLPKTRSGKIMRRILRKIAENEFGALGDTSTLADPTVVEDLIANRPQA

SEQ ID NO: 122046 - DNA, 1983 bp, Burkholderia thailandensis E264
  CDS (1)..(1983): transl_table=11
atgtctgcgattgaatcggttctgcacgaacgccgccagttcgcgccgcccgccgccgtggagaaggcggcagccatttccggcatggcggcttatcgggcgctcgccgaagaggctgagcgcgattacgaaggattctgggcgcgtctcgcgcgtgagacgctcgaatggcgcaagccgttcggcaaggcgctcgacgagacgaacgcgccgttctacaagtggttcgacgacggcgagttgaacgcgtcgtacaactgcctcgaccgccacgtcgccgccggcctcggcgagcgcatcgcggtgatcttcgaggccgacgacggcaccgtcgcgcgcgtgacctacgccgatctgctcgcgcgcgtgtcgcgcttcgcgaacgcgctgaagaaacgcggcatcggccgcggcgaccgcgtcgtcatctacattccgatgtcggtcgaaggcatcgtcgcgatgcaggcgtgcgcgcgcatcggcgcgacgcattcggtcgtgttcggcggcttttcgtcgaagtcgctgcacgagcgcatcgtcgacgtcggcgcgaccgcgctcgtcacggccgacgagcagatgcgcggcggcaagacgctgccgctcaagagcatcgccgacgaggcgctcgcgatgggcggctgcgacgcggtgaagaccgtcgtcgtctatcggcgcacgggcggcaacgtcgactggcacgcgggccgcgacgtctggatgcacgagatcgtcgcgaacgagtccgacgcgtgcgagcccgagtgggtcggcgccgaacatccgctgttcatcctgtatacgtcgggctcgaccggcaagccgaagggcgtccagcacagcacggccggctatctgctgtgggtcgcgcagacgatgaagtggacgttcgactggaagcctgacgacgtgttctggtgcacggccgacatcggctgggtcacggggcactcgtacatcacgtacgggccgctcgccgtcggcgcgacgcaggtcgtgttcgagggcgtgccgacctatccgaacgcgggccgcttctggaagatgatcggcgaccacaaggtttccgtgttctacaccgcgccgacggcgatccgctcgctgatcaaggcggccgaggccgacgagcacgtgcatccgaagagctacgatctgtcgagcctgcggatcatcggcacggtcggcgagccgatcaatccggaagcgtggatctggtatcacaagaacgtcgggcaggagcgctgcccgatcgtcgacacgtggtggcagaccgaaacgggcggccacatgatcacgccgctgccgggcgcgacgccgacggtgccgggctcgtgcacgttgccgctgccgggcatcatggccgccgtcgtcgacgagaccggccaggacgtgccgaacgggcagggcggcattctcgtcgtcaagcgtccgtggccggcgatggcgcgcacgatctggggcgacccggagcgcttcaagaagagctatttccccgacgagctcggcggccgcctctatctggcgggcgacggcaccgtgcgggacaaggaaaccggctacttcacgatcatgggccgcatcgacgacgtgctgaacgtatcggggcaccggctcggcacgatggagatcgaatcggcgctcgtgtcgcacgagctcgtcgcggaggcggccgtcgtcggacggccggacgacacgacgggcgaggcggtcgtcgcgttcgtcgtgttgaagcgctcgcggccggaaggcgaagaggcggccgcgctcgcgaagacgctgcgcgactgggtcggcaaggaaatcgggccgatcgcgaagccgaaggacatccgtttcggcgacaacctgccgaagacgcgttcgggcaagatcatgcggcgcctgctgcgctcgctcgcgaagggcgaggcgatcacgcaggatacgtcgacgctcgagaaccccgcgatcctcgagcagctcgccgaagtgcgctga

SEQ ID NO: 122047 - protein, 660 aa, Burkholderia thailandensis E264
MSAIESVLHERRQFAPPAAVEKAAAISGMAAYRALAEEAERDYEGFWARLARETLEWRKPFGKALDETNAPFYKWFDDGELNASYNCLDRHVAAGLGERIAVIFEADDGTVARVTYADLLARVSRFANALKKRGIGRGDRVVIYIPMSVEGIVAMQACARIGATHSVVFGGFSSKSLHERIVDVGATALVTADEQMRGGKTLPLKSIADEALAMGGCDAVKTVVVYRRTGGNVDWHAGRDVWMHEIVANESDACEPEWVGAEHPLFILYTSGSTGKPKGVQHSTAGYLLWVAQTMKWTFDWKPDDVFWCTADIGWVTGHSYITYGPLAVGATQVVFEGVPTYPNAGRFWKMIGDHKVSVFYTAPTAIRSLIKAAEADEHVHPKSYDLSSLRIIGTVGEPINPEAWIWYHKNVGQERCPIVDTWWQTETGGHMITPLPGATPTVPGSCTLPLPGIMAAVVDETGQDVPNGQGGILVVKRPWPAMARTIWGDPERFKKSYFPDELGGRLYLAGDGTVRDKETGYFTIMGRIDDVLNVSGHRLGTMEIESALVSHELVAEAAVVGRPDDTTGEAVVAFVVLKRSRPEGEEAAALAKTLRDWVGKEIGPIAKPKDIRFGDNLPKTRSGKIMRRLLRSLAKGEAITQDTSTLENPAILEQLAEVR

SEQ ID NO: 122048 - DNA, 1938 bp, Saccharophagus degradans 2-40
  CDS (1)..(1938): transl_table=11
atgtctacgccccatctatacccagtgcccgaggcattggctgctaacgcacacatcaacaacgagaaataccataccgattacgctcgctctattaacgagcccgatgttttttgggcagaaaaagcccgcgaatttttaacctgggataaaccttggcaatctgtacgcagcttcgacttccacaaaggtgaagcaacgtggtttgaaggtggcaagctaaacgtaacggtaaactgtattgatcgccatttacctacaaaagcaaacgacgttgctattatttgggaaggggacgacccttcggtagatgcgagtattacttatcagcaattgcacgatgcagtatgtaaatttgcaaatgtattaaaagcgcgcggcgtagctaaaggcgatagagtttgtatctatatgccgatgattcccgaggcggcctacgccatgttggcctgtgcccgtattggtgcagtgcactctattgtatttggtggcttttctcccgaggcgctcaaagatcgtattgttgactccgactgtaaagtacttatcaccgccgatgaaggcttgcgaggcggccgtgcggttgcgttaaaagccaatgccgacaaagctgtcgcccactgcccacaggttcattcggttattgtggttaagcgcacaggcgcagatgtagcgtggaacaccgagcgcgatatttggttgcacgaagcccagcagtctgtggatacggtttgcgagccagagtctatggactctgaagacccgctgtttattttgtatacctcgggctctacgggtaagcctaagggtgtattgcacacaaccggtggttacctcttacaagctgccatgacccacaaatacgtgttcgattaccagcctggcgaagtgtattggtgtaccgcagacgtaggttgggtaaccgggcacacctatattgtgtacggcccattaaccaatggtgccaccacccttatgttcgaaggggtacccacctacccaacggctgcgcgctgctgggaggtgtgcgataaacacaatgtaaatatcttttacaccgcccccacggccattcgcgcgcttatgggccaaggtgatgagtttgtagcgtcaacccagcgcaagagtttacgaatattgggtacggtaggcgagcccattaaccctgaggcgtgggagtggtactacaacgttgtaggtgaccgacgctgcccaattatggatacctggtggcaaacagagacgggcggccacatgcttacgccgttgccgggtgcaattgacttaaaaccaggctcggccactttgccattttttggtgtagagccagtactgcttgatggtgaaggcaatatcattgagggcgaaggtgaaggcagcttggccattaaatccagctggcctgggcaaattcgcacagtgtacggcgatcacgaccgattgattcaaacctacttcagtacctaccctggttattactttactggtgatggcgcgcgcagagacgccgacggctattactggattaccggccgcgtagacgacgtgctgaacgtatctggccatcgcatggggacagcagaggtggaaagcgccttggtattacaccccaaagttgcagaggcggcagtggtaggttacccgcacgatgtaaaagggcagggcatatatgcctacgtaacacttatgaccggggttgagcctgacgacggtttacgcaaagagctggttgcaatgtgcacccaagaaatagggccaattgctaagccagaccttattcaatgggcgccagggctgcctaaaacgcgctcaggtaagataatgcgccgtattttgcgtaaagttgccgctaacgagttggatacgctcggtgatacgtctacactagcagacccaagcgtagtagacgatttaatagaaaatcgtatgaatcgctaa

SEQ ID NO: 122049 - protein, 645 aa, Saccharophagus degradans 2-40
MSTPHLYPVPEALAANAHINNEKYHTDYARSINEPDVFWAEKAREFLTWDKPWQSVRSFDFHKGEATWFEGGKLNVTVNCIDRHLPTKANDVAIIWEGDDPSVDASITYQQLHDAVCKFANVLKARGVAKGDRVCIYMPMIPEAAYAMLACARIGAVHSIVFGGFSPEALKDRIVDSDCKVLITADEGLRGGRAVALKANADKAVAHCPQVHSVIVVKRTGADVAWNTERDIWLHEAQQSVDTVCEPESMDSEDPLFILYTSGSTGKPKGVLHTTGGYLLQAAMTHKYVFDYQPGEVYWCTADVGWVTGHTYIVYGPLTNGATTLMFEGVPTYPTAARCWEVCDKHNVNIFYTAPTAIRALMGQGDEFVASTQRKSLRILGTVGEPINPEAWEWYYNVVGDRRCPIMDTWWQTETGGHMLTPLPGAIDLKPGSATLPFFGVEPVLLDGEGNIIEGEGEGSLAIKSSWPGQIRTVYGDHDRLIQTYFSTYPGYYFTGDGARRDADGYYWITGRVDDVLNVSGHRMGTAEVESALVLHPKVAEAAVVGYPHDVKGQGIYAYVTLMTGVEPDDGLRKELVAMCTQEIGPIAKPDLIQWAPGLPKTRSGKIMRRILRKVAANELDTLGDTSTLADPSVVDDLIENRMNR

SEQ ID NO: 122050 - DNA, 1983 bp, Burkholderia xenovorans LB400
  CDS (1)..(1983): transl_table=11
atgtctgcgattgaatcggttcttcaggaacgccgtgttttcccgccctccgctgaaacagtagcggccgcgacgatctccggcatggacgcgtaccgggcgctcgccgccgaagcggaacgcgattacgaaggtttctgggggcgcctcgctcgcgagacgctaagctggaatacgcccttcaccaaggtactcgacgaatcgaaggcgccgttctacacgtggttcgaagacggccggctgaacgcgtcgtataacagcatcgaccgtcacgtcgaagccggcaacggcgcgcgcgtcgcgatcattttcgaagccgacgacggcaccgtcaccaacgtcacctaccaggatctgctgcaacgcgtgtcgcgctttgcgaacgcgttgaagaagcgcggcgtgaaaaagggcgaccgcgtggtgatctatatgccaatgtcgatcgaaggcattgtcgcgatgcaggcttgcgcgcggatcggcgccacgcactcggtcgtgttcggcggcttctcgtcgaagtcgctcaacgagcggctggtggacgtgggcgcggtcgcgctcatcacgtcggacgaacagatgcgcggcggcaaggcgctgccgctgaagaacatcgccgacgaagcgctcgcgatgggcggctgcgaagcggtcaggagcgtgattgtgttccagcgcaccggcggcaagatcgcctggaacgcagaccgcgatctgtggatgcacgaactcacgcaggccgaaccggatcaatgcgcgccggagtgggtcggcgccgagcatcctctgttcattctgtacacgtccgggtcgaccggcaagccgaagggcgtgcagcacagtaccggcggctatctgctgtgggccgcgcagaccatgaagtggaccttcgactggaagcccaccgacgtgttctggtgtaccgccgacatcggctggatcaccggccatagctacatcacgtatggtccgctgacgctcggcggcacccaggtcgtgttcgaaggcgtgccgacctatccgaacgccggccgcttctgggacatgatcgcgcggcacaaggtgtcgctgttctataccgcgcccactgcgatccgctcgctgatcaaggccgccgacgcggacgcgaaggtgcatccgaagagctacgacctgtccacgctgcgcatcatcggcacggtcggcgagccgatcaatccggaagcgtgggtctggtattacgagaacgtcggcggcagccattgcccgatcgtcgatacgtggtggcagaccgaaaccggcggtcacatgatcacgccgctgccgggcgccacgccgctcgtgccgggttcgtgcacgttgccgctgccgggcatcatggcggcggtggtcgatgaaaccggccaggacgtgccgaacgggcagggcggcattctggtggtgaagcgcccgtggccgtccatgctgcgcaacgtgtggggcgatccggaccgctacaggaagagctactttcccgaagaactcggcggcaagctgtatctcgccggcgacggcgcggtgcgcgacaaggagaccggctacttcacgatcatgggccgtatcgacgacgtgctcaacgtgtcgggccaccgcctcggcacgatggagatcgagtcggcgctggtgtcgaacccgctggttgccgaagcggccgtggtggggcgccccgatgcgaccaccggcgaagccgtgtgcgcgttcgtggtgctcaagcgttcgcgtccggaaggcgaggaagcggtgaagctcgccaacgaactgcgcaactgggtcggcaaggagatcggtccgattgccaagccgaaggacatccgtttcggcgaaaatctgcccaagacgcgttcgggcaagatcatgcgccgcctgctgcgctcgctggcgaaaggcgaggaaatcacccaggacgtgtccacgctggagaaccccgcgattctcgaccagctcggcgagtcgctctga

SEQ ID NO: 122051 - protein, 660 aa, Burkholderia xenovorans LB400
MSAIESVLQERRVFPPSAETVAAATISGMDAYRALAAEAERDYEGFWGRLARETLSWNTPFTKVLDESKAPFYTWFEDGRLNASYNSIDRHVEAGNGARVAIIFEADDGTVTNVTYQDLLQRVSRFANALKKRGVKKGDRVVIYMPMSIEGIVAMQACARIGATHSVVFGGFSSKSLNERLVDVGAVALITSDEQMRGGKALPLKNIADEALAMGGCEAVRSVIVFQRTGGKIAWNADRDLWMHELTQAEPDQCAPEWVGAEHPLFILYTSGSTGKPKGVQHSTGGYLLWAAQTMKWTFDWKPTDVFWCTADIGWITGHSYITYGPLTLGGTQVVFEGVPTYPNAGRFWDMIARHKVSLFYTAPTAIRSLIKAADADAKVHPKSYDLSTLRIIGTVGEPINPEAWVWYYENVGGSHCPIVDTWWQTETGGHMITPLPGATPLVPGSCTLPLPGIMAAVVDETGQDVPNGQGGILVVKRPWPSMLRNVWGDPDRYRKSYFPEELGGKLYLAGDGAVRDKETGYFTIMGRIDDVLNVSGHRLGTMEIESALVSNPLVAEAAVVGRPDATTGEAVCAFVVLKRSRPEGEEAVKLANELRNWVGKEIGPIAKPKDIRFGENLPKTRSGKIMRRLLRSLAKGEEITQDVSTLENPAILDQLGESL

SEQ ID NO: 122052 - DNA, 1977 bp, Burkholderia xenovorans LB400
  CDS (1)..(1977): transl_table=11
atgtctaccatcgataccgccccgcccaactccaccgcgttgcagatcccgcttgcccgggacgccagcatcgacggcatggaggcttatcgcgccctcgttgccgaagcgagccaggatcacgaagcgttctgggcacgtcttgcccgcgaacacctgacgtggcgccgcccattcacgaaagtactgaacgacgcagacgcgccgttctatcgctggttcgaagacggcgaactgaacgcctcgtacaactgcctcgatcgcaatctcgccaacgggctcgcggagaaaaccgcgatcgtgttcgagtcggacgacggcaacgtcacgcatgtcacctatcaggcgctgtatcaccgcgtatgccggctcgccaatgcactgcgtgcccgcggcgtgaagaaaggcgaccgcgtggcgatctatatgccgatgtccgtggaaggcgtagtcgcgatgctcgcgtgcgcacgcatcggcgcgccgcactcggtggtgttcggcggcttttccgccaagtcgctgcatgagcgcatcgtcgatatcggcgcgtgcgcgatcattaccgcggacgagcaggttcgcggcggcaagaccctgccgctcaaaacgatcgtcgacgaagcgctcgcaatggccggcacggccggcatcaggacggtggccatctaccggcgcacgggcggccagattccgtggattgccggccgcgatacatggctgcacgaactcgaagcggcgcagccggacacctgtgagcctgagtgggtcggtgcggagcacccgttgttcgtgctctacacgtccggctcgacgggcacgcccaaaggcgtccagcacagcaccggcggttacctgctgtgggctgccgtgacgatgaagtggaccttcgacatcaaaccggcggatgtgttctggtgcacggcggacatcggctggatcacgggtcacacctatatctgctatgggccgaccgcggtcggcgcgacgcaggtgatcttcgaaggcgtgcctacctatccgaacgcgggacgcttctgggacatgatccagcgccacaaggtcagcatcttctacacggcgccgaccgccatccgctcgctcatcaagtccgccgacgccgatcattcggtgcatccggacagcttcgacctgagcagtctgcgcctgctcggcacggtcggcgagccgatcaatccgagcgcctggacgtggtatgcccagcatgtcggcggtggacggtgtcccgtgctcgacactttctggcagacggaaacgggcggacacatgatttctccgttgccgggcgtcactccgctcgtgccgggttcgtgcacattgccgttgccgggcatcgacgcggcgatcgtcgacgaaaccggtcaggaagtgccgaacggaaacggtggcgtgctggtcattcgcaagccctggccttccatgatcagaaccatctggggtaatccggaacgcttccggcaggggtatttccccgaagagctcggcggcaagctgtatctcgccggcgacggcgccatccgtgatcgcgacaccggctacttcaccatcaccggccgtatcgacgacgtgctgaacgtttccggccaccggctcgggacgatggaaatcgagtcggcgctcgccgcgcatccgctggtggccgaagccgcggtggtcgggcgtcccgatgaaaccgccggcgaggcgatcgtggcgttcgtggtgctcaaggcagagcggccgtccggagccgacgcaaagcgcgtggccgacgaactgcgcgcgtgggtcggcaaggagatcggcccgatcgccaaaccgaaggacatccgcttcggcgacgccatgccgaaaacgcgctccggcaaggtggtgcgccggctgttgcgctcggtggccaaaggggaagtcatcgtgcaggacacgtcgacggtggaaaaccccgcggtcatttcacagttcgccgacgccgcctga

SEQ ID NO: 122053 - protein, 658 aa, Burkholderia xenovorans LB400
MSTIDTAPPNSTALQIPLARDASIDGMEAYRALVAEASQDHEAFWARLAREHLTWRRPFTKVLNDADAPFYRWFEDGELNASYNCLDRNLANGLAEKTAIVFESDDGNVTHVTYQALYHRVCRLANALRARGVKKGDRVAIYMPMSVEGVVAMLACARIGAPHSVVFGGFSAKSLHERIVDIGACAIITADEQVRGGKTLPLKTIVDEALAMAGTAGIRTVAIYRRTGGQIPWIAGRDTWLHELEAAQPDTCEPEWVGAEHPLFVLYTSGSTGTPKGVQHSTGGYLLWAAVTMKWTFDIKPADVFWCTADIGWITGHTYICYGPTAVGATQVIFEGVPTYPNAGRFWDMIQRHKVSIFYTAPTAIRSLIKSADADHSVHPDSFDLSSLRLLGTVGEPINPSAWTWYAQHVGGGRCPVLDTFWQTETGGHMISPLPGVTPLVPGSCTLPLPGIDAAIVDETGQEVPNGNGGVLVIRKPWPSMIRTIWGNPERFRQGYFPEELGGKLYLAGDGAIRDRDTGYFTITGRIDDVLNVSGHRLGTMEIESALAAHPLVAEAAVVGRPDETAGEAIVAFVVLKAERPSGADAKRVADELRAWVGKEIGPIAKPKDIRFGDAMPKTRSGKVVRRLLRSVAKGEVIVQDTSTVENPAVISQFADAA

SEQ ID NO: 122054 - DNA, 1983 bp, Ralstonia metallidurans CH34
  CDS (1)..(1983): transl_table=11
atgtccgccatcgagtcggtgatgcaggagcatcgcgttttcaatccccctgcgtcgttcgccaagaccgccgcgatccccagcatggaggcctaccaggccctgtgcgacgaggctgcaaaggattacgagggcttctgggcccgccacgcacgcgagctgctgcattggcacaagccgttcacgaaggtgctcgacgagagcaacgcgccgttctacaagtggttcgaggatggcgagatcaatgcctcgtacaactgcctcgaccgcaatgtcgagaagggcctcggcgacaagacggccatcgtcttcgaggccgacgacggcacggtgacgcgcgtcagctaccaggaattgctggcgaaggtcagccgcttcgccaacggcatgaaggcccttggcatcaagaagggcgaccgcgtcgtgatctacatgccaatgtctgtcgaaggcgtcgtggccatgcaggcctgcgcgcgcatcggcgccacgcactcggtggtgttcggcggcttctcggcgaagtccctgcaggaacgtctggtggacgtgggcgccgtggcgctgatcacggccgatgagcagatgcgtggtggcaaggcgctgccgctgaaggccatcgctgacgaggcgctgacgctgggcggctgcgaggccgtcaagaacgtgatcgtctatcgccgcacgggcggcaacgttgcctggaccgaaggccgtgatcgttcgatggaagacgtcgccgccggtcagtccgataactgccccgccgagcccgttggcgccgagcacccgctgttcgtgctctacacgtcgggctccaccggcaagccgaagggcgtgcagcacagcacgggcggttacctgctgtgggcgctgatgacgatgcgctggaccttcgatatcaagcccgatgacatgttctggtgcacggccgatatcggctgggtcaccggccacacctatatcacctacggcccgctggccgcaggcgccacgcagatcgtgttcgaaggcgtgccgacgttcccgaacgccggccggttctgggacatgatccagcgccacaaggtctcgatcttctacaccgcgccgacggcgatccgctcgctgatcaaggccgccgaggccgacgagaagatccatccgaagcagtacgacctctcgagcctgcgcctgctgggcaccgtgggcgagccgatcaatccagaggcatggatgtggtactacaagaatatcggccgcgagcgttgcccgatcgtcgatacgttctggcagaccgaaactggcggccacatgatcacgccgctgccgggcgccacgccgctggtgccgggctcgtgcacgctgccgctgccgggcatcatggcggccatcgtcgacgaaaccgggcaggacgtgccgaacggcaatggtggcatcctggtcgtcaagcgtccgtggccgtcgatgatccgcacgatctggggcgacccggagcgcttcaagaagagctactaccccgaggaactcggcggcaaactgtacctggctggcgacggttcgatccgtgacaaggaaaccgggtacttcacgatcatgggccgtatcgatgacgtgctgaacgtgtcgggccatcgcatgggcacgatggaaatcgagtcagcgctggtctcgaacccgatcgtggccgaggccgccgtggtgggtcgtcccgatgacaccaccggcgaggcgatctgcgcgttcgtggtgctcaagcgttcgcggccgacggctgaagaagccgtgaagatcgcggccgagctgcgcaactgggtgggcaaggaaatcggcccgatcgccaagccgaaggacatccgcttcggcgacaatctgcccaagacgcgttcgggcaagatcatgcgccgcctgctgcgttcgctggccaagggcgaggacatcacgcaggacacctcgacgctggagaacccggccattctcgatcagctcaagcaagcccagtaa

SEQ ID NO: 122055 - protein, 660 aa, Ralstonia metallidurans CH34
MSAIESVMQEHRVFNPPASFAKTAAIPSMEAYQALCDEAAKDYEGFWARHARELLHWHKPFTKVLDESNAPFYKWFEDGEINASYNCLDRNVEKGLGDKTAIVFEADDGTVTRVSYQELLAKVSRFANGMKALGIKKGDRVVIYMPMSVEGVVAMQACARIGATHSVVFGGFSAKSLQERLVDVGAVALITADEQMRGGKALPLKAIADEALTLGGCEAVKNVIVYRRTGGNVAWTEGRDRSMEDVAAGQSDNCPAEPVGAEHPLFVLYTSGSTGKPKGVQHSTGGYLLWALMTMRWTFDIKPDDMFWCTADIGWVTGHTYITYGPLAAGATQIVFEGVPTFPNAGRFWDMIQRHKVSIFYTAPTAIRSLIKAAEADEKIHPKQYDLSSLRLLGTVGEPINPEAWMWYYKNIGRERCPIVDTFWQTETGGHMITPLPGATPLVPGSCTLPLPGIMAAIVDETGQDVPNGNGGILVVKRPWPSMIRTIWGDPERFKKSYYPEELGGKLYLAGDGSIRDKETGYFTIMGRIDDVLNVSGHRMGTMEIESALVSNPIVAEAAVVGRPDDTTGEAICAFVVLKRSRPTAEEAVKIAAELRNWVGKEIGPIAKPKDIRFGDNLPKTRSGKIMRRLLRSLAKGEDITQDTSTLENPAILDQLKQAQ

SEQ ID NO: 122056 - DNA, 1977 bp, Myxococcus xanthus DK 1622
  CDS (1)..(1977): transl_table=11
ttgtccacgctggaggaacgcatggcggcttcgaagcatgagattcactcggtcctgacagaagcacgcgtctttccgccgccagaggcgttcgcccggcgcgcgcacatccggagcatggagcagtaccagcagctctgggacgaagccgcgaaggaccctgacaagtattggggcgaccgcgcccgcgaggagctgtactggaaggcgcccttccagacggtgctcgactggaagccgccgcacgcgcggtggttcgtcgagggcaagacgaacctagcctacaactgtctggaccggcacctggccacccgcaaggacaagcccgccatcctcttcgagggggagcccggcgaccgccgcagcctcacgtacggcgagctgtccaccgaggtgaacaagctggccaacgcgctcaagtcgctgggcgttcggaagggtgaccgggtgggaatctacctgcccatggtgcccgaggccgcggtggccatgctggcgtgcgctcgcattggcgcggtgcactcggtggtgttcggcggcttctccgcggaggcgctccacgagcgcatgaacgacgcgggcgcgaaggtgctgctcaccgcggacggcggttggcgcaagggcgcggtggtgccgctcctgaagaacgtggaggcggcgctgccgcacatgcccaccatggagaaggtggtggtgctccgccgcacgggcagcacgctggcgctgtccgggcccaagctggtggcgtgggacacgctggtgagcgggcagtccgcggaatgtgaaccggagtgggtggagagcgagcacccgctgttcatcctctacacgtcgggctccactggaaagcccaagggcgtgctgcacaccacgggcggctacgcggtgaatacgtcgctcaccacgcgctgggtgttcgacctgcgcgaagacgacgtctactggtgcaccgccgacgtgggctgggtgacgggccactcctacgtcgtctacggcccgttgatgaacggcgtcaccaccatcctctacgaaggcgcgcccacccagccggggccggaccgcttctgggacatcatcgagcggtacaaggccaccatcctctacaccgcgcccaccgccatccgcgccttcatgcggctgggcgaggagcccgtgcgcaagcacgacttgtcctcgctgcgtctgttgggcagcgtgggcgagcccatcaaccccgaggcgtggatgtggtaccgcgacgtcatcggcggggggcgctgccccgtggtggacacgtggtggcagacagagacgggctgcatcatggtgtcgccgctcccgggcgccacgccgacgaagcccggctcggccacgctgccgctgcccggcatccacgcggagattctggaccgcgagggcaacacggttccgcgagggcagggcggactgctcttcgtcacgcgtccctggccctccatgttgcgcacggtgtacggcgacccggaccgctacgtgcgcacgtacttcaacgagctgcccggcatgtacttcaccggcgacggcgcgcgcacggatgcggaggggtacatctggctgatgggccgcgtggatgacgtggtcaacgtcgccggccaccgtctgggcaccgcggaggtggagagcgcgctggtggcgcatgaaaccgtcgcggaggccgccgtggtgggccgtccggacgacttgaagggcaccgcgctggtggccttcgtcaccctgaagcagggccacacgccgtccgacgcgctgaagaagacgctggccgcccacgtgggccgcgagattggcgccatcgcccgcccggatgaaatccgcttcgcggaggcgctgccgaagacgcgctcggggaagatcatgcgccggctgctgcgcgacgtggccgcgggcaatcaggcctccggggacaccaccaccctggaggacctcaacgtcctggccgcgctgaggcagaacgacgactga

SEQ ID NO: 122057 - protein, 658 aa, Myxococcus xanthus DK 1622
MSTLEERMAASKHEIHSVLTEARVFPPPEAFARRAHIRSMEQYQQLWDEAAKDPDKYWGDRAREELYWKAPFQTVLDWKPPHARWFVEGKTNLAYNCLDRHLATRKDKPAILFEGEPGDRRSLTYGELSTEVNKLANALKSLGVRKGDRVGIYLPMVPEAAVAMLACARIGAVHSVVFGGFSAEALHERMNDAGAKVLLTADGGWRKGAVVPLLKNVEAALPHMPTMEKVVVLRRTGSTLALSGPKLVAWDTLVSGQSAECEPEWVESEHPLFILYTSGSTGKPKGVLHTTGGYAVNTSLTTRWVFDLREDDVYWCTADVGWVTGHSYVVYGPLMNGVTTILYEGAPTQPGPDRFWDIIERYKATILYTAPTAIRAFMRLGEEPVRKHDLSSLRLLGSVGEPINPEAWMWYRDVIGGGRCPVVDTWWQTETGCIMVSPLPGATPTKPGSATLPLPGIHAEILDREGNTVPRGQGGLLFVTRPWPSMLRTVYGDPDRYVRTYFNELPGMYFTGDGARTDAEGYIWLMGRVDDVVNVAGHRLGTAEVESALVAHETVAEAAVVGRPDDLKGTALVAFVTLKQGHTPSDALKKTLAAHVGREIGAIARPDEIRFAEALPKTRSGKIMRRLLRDVAAGNQASGDTTTLEDLNVLAALRQNDD

SEQ ID NO: 122058 - DNA, 1965 bp, Myxococcus xanthus DK 1622
  CDS (1)..(1965): transl_table=11
atggcccagacgcaggaagcgctcattcccacgaaggacgccttcagccgcaaagcccacgtgaagagcctggaggactaccagcgcctctaccagcgcagcatccagcagcccgaggccttctggagtgagatggctgaacagctcacctggttccacaagccagacgccatcatggacctggacgccgaacaggtggacttctcctggttcggcggcggcaagctcaacgcggcctacaactgcatcgaccggcacgccacggagcgccccggcaaggtcgccatcatctgggcgaagaacgagccgggcgagtacgaatccatcacctaccgcgacctccagcaccacgtgggccgcgtggccaacgtgctgaaggcgcacggcgtgcgcaagggcgaccgcgtctgtatctacctgcccatggtgccggagctggcctacaccatgctcgcgtgcgcgcgcatcggcgcggtgcactccgtggtgttcgccggcttctcatcggaggccctgcgcgagcggattctcgactccggcgccaaggtgctcatcaccgccaacgaagggccgcgcggcccgaagttcgtgcccaccaaggccatcgcggacgaggccgtggagggcctgtccctggtggagtccatcctcgtggtgcgccgcacgggcaaggaagtgcccatgctcgccggccgcgactactggctggacgcggagatggcgaagcaccgcggcgtctgtcccgcggagtggatggactccgaggatccgctcttcatcctctacacctccggctccacggggaagcccaagggcgtgctgcacaccaccggcggctatctcgtctacgcggccaccacgttccgctacgtcttcgacatccagccggaggacgtctacttctgtgcggcggacctgggctgggtcaccggacacagctacatcctctacgggccgctgatgaacggcaccaccacggtgatgttcgagtccacgcccaccttcccggacgcagggcggctgtggcgcgtggtggacgacctcaaggccaccatcctctacaccgcgcccaccgcgctgcgctcgctcatcaaggagggtgacgcgtgggtgaagaagtcctcgcgccagtcgctgcgcctcctgggcagcgtgggcgagcccatcaacccggaggtgtggcgctggtaccacgacgtcgtgggcgaaggccgctgcccggtggtggacacgtggtggcagacggagacgggcggcatcctgattgccccgctgccgggggccacgcccaccaagccgggctccgccaccctgcccttcttcggcgtggagccggtgctggtggacgacgagggccgcgtcatcgaaggcaacggcgtcagcggcaacctgtgtctggcgcgctcgtggccgggacaggctcgcacgctgtatggccaccaccagcgcttcaaggagacgtactacgcgcgcttccccaacctgtacttcaccggtgacgggtgccgccgcgacgaggatgggtactactggattaccggccgcgtggacgacgtgctcaacgtctccgggcaccgcctgggcaccgccgaggtggagagcgcgctggtggcccatgaggccgtcgccgaggccgcggtggtgggcttcccgcacgacctcaagggcacgggcgtatgcgcgttcgtcacggtgaagccggactggcaggagtccgcctccgagcagatggtgggcgcgctcaaggagcaggttcggcatgtcattggccccatcgccacgccggaccgggtggtgctggtcaacggcctgccgaagacgcgctccgggaagattctgcgccgcatgctccgcaagattgcctcgggcgaggtggagaacctgggtgacgccagcaccctggcggacccgtcggtgctcgacgaactcctcgcgaaggccacacccccacaggcgaagcgctga

SEQ ID NO: 122059 - protein, 654 aa, Myxococcus xanthus DK 1622
MAQTQEALIPTKDAFSRKAHVKSLEDYQRLYQRSIQQPEAFWSEMAEQLTWFHKPDAIMDLDAEQVDFSWFGGGKLNAAYNCIDRHATERPGKVAIIWAKNEPGEYESITYRDLQHHVGRVANVLKAHGVRKGDRVCIYLPMVPELAYTMLACARIGAVHSVVFAGFSSEALRERILDSGAKVLITANEGPRGPKFVPTKAIADEAVEGLSLVESILVVRRTGKEVPMLAGRDYWLDAEMAKHRGVCPAEWMDSEDPLFILYTSGSTGKPKGVLHTTGGYLVYAATTFRYVFDIQPEDVYFCAADLGWVTGHSYILYGPLMNGTTTVMFESTPTFPDAGRLWRVVDDLKATILYTAPTALRSLIKEGDAWVKKSSRQSLRLLGSVGEPINPEVWRWYHDVVGEGRCPVVDTWWQTETGGILIAPLPGATPTKPGSATLPFFGVEPVLVDDEGRVIEGNGVSGNLCLARSWPGQARTLYGHHQRFKETYYARFPNLYFTGDGCRRDEDGYYWITGRVDDVLNVSGHRLGTAEVESALVAHEAVAEAAVVGFPHDLKGTGVCAFVTVKPDWQESASEQMVGALKEQVRHVIGPIATPDRVVLVNGLPKTRSGKILRRMLRKIASGEVENLGDASTLADPSVLDELLAKATPPQAKR

SEQ ID NO: 122060 - DNA, 1965 bp, Mesorhizobium sp. BNC1
  CDS (1)..(1965): transl_table=11
atgtccgatgtgcatattcaccgtgtgaaagcggcgtggaagaagcgcgcgctgatcgacggcgaaacctataggaagtggtaccgggacagcatcaaggatccagataagttctggggcaagcacggcaagcgtatcgactggttcaagccttacaccaaggtgaagaacgcttccttcgggggcaaggtgtcgatcaaatggttcgaggatggcctcaccaatgtcgcccataattgtattgatcggcacctgaagaaacgcggagaccaggtggccatcatctgggaaggcgataacccgtacgacgaccggaagatcacctatcggcaactttatgagcatgtctgccggcttgccaatgtgctgaaggagcgcggcgtcaagaagggtgaccgcgtgaccatctatatgccgatgatcccggaggcagcctatgccatgctcgcctgcgcacgcatcggcgcagtccactcggtcgtcttcggcggcttctcgcccgattcgcttgccggccgcattgaggacggcaaatcggatttcgtcatcaccgcggatcagggcctgcgcggcggcaagacgatcccgctcaaggaaaacacggacaaggcgatcgccatcgccgagaaggcaggcgccaaggtgcgccacgtgctggtggtgcggcgcacgggcggaaagatcaattgggtcgaaggccgcgacctctggtaccatgaggaaattcgcgacgcgaagacccagtgcaagccagaaccgatgaatgctgaagacccgctcttcattctctacacttcgggctccacgggaaaacccaaaggcgtgctccacacgacgggcgggtacctcgtctttgcgtccatgacgcaccaatacgtgttcgactatcaggatggcgacatttattggtgcacggccgatgtgggctgggtgaccggccatagctacatcgtctacggtccgcttgccaacggtgccacgacactgatgttcgagggtgtgccgaactatccggatgcttcccgcttatgggaggtggtggacaagcaccaggtcaacatcttttacaccgcgccgaccgcaatccgcgcactcatgggcgccggcgatcatttcgtcaccagaacttcgcgcaaatccttgcgcttgctcggctccgttggagagccgatcaatccggaagcctgggaatggtattacaacgtggtgggggagaaacgctctcctgtggtggacacctggtggcaaaccgaaacgggcggcataatgatcacgccgttgccaggagcgatcgacctcaaagcaggctccgcgacgcttccctttttcggcgtccagccgcagcttgtcgacggcgacgggaagccgatcgaaggtgccggttccggcaatctctgtatcgccgaatcctggccggggcagatgcgcacggtctatggcgatcatgagcgcttcgtgcagacctatttttccacctataaggggaaatactttacgggagacggctgccggcgcgatgaggacgggtattactggatcaccggccgagtcgacgacgttctcaacgtctccggccacaggctggggacagccgaggtggaatcggcccttgtctcacatcagaaagtgtcagaggcggcggtcgtgggctatccgcatgacatcaaggggcagggcatctactgctatgtcacgctgatggcaggcgagaaggggtccgacgcgctcaagaaagagctggtcgaacacgtgcgtcgtgagatcggacccatcgccaccccggacaagattcagtttgcgcccggcctgcccaagacgcgctccggcaagatcatgcgccgcatcctgcgcaagattgccgaagacgatttcggcgctctgggcgatacctcgacgctcgccgatccggctgtggtagaagatctcgtcgagaaccggcaaaacaagagaacggtggaagcctag

SEQ ID NO: 122061 - protein, 654 aa, Mesorhizobium sp. BNC1
MSDVHIHRVKAAWKKRALIDGETYRKWYRDSIKDPDKFWGKHGKRIDWFKPYTKVKNASFGGKVSIKWFEDGLTNVAHNCIDRHLKKRGDQVAIIWEGDNPYDDRKITYRQLYEHVCRLANVLKERGVKKGDRVTIYMPMIPEAAYAMLACARIGAVHSVVFGGFSPDSLAGRIEDGKSDFVITADQGLRGGKTIPLKENTDKAIAIAEKAGAKVRHVLVVRRTGGKINWVEGRDLWYHEEIRDAKTQCKPEPMNAEDPLFILYTSGSTGKPKGVLHTTGGYLVFASMTHQYVFDYQDGDIYWCTADVGWVTGHSYIVYGPLANGATTLMFEGVPNYPDASRLWEVVDKHQVNIFYTAPTAIRALMGAGDHFVTRTSRKSLRLLGSVGEPINPEAWEWYYNVVGEKRSPVVDTWWQTETGGIMITPLPGAIDLKAGSATLPFFGVQPQLVDGDGKPIEGAGSGNLCIAESWPGQMRTVYGDHERFVQTYFSTYKGKYFTGDGCRRDEDGYYWITGRVDDVLNVSGHRLGTAEVESALVSHQKVSEAAVVGYPHDIKGQGIYCYVTLMAGEKGSDALKKELVEHVRREIGPIATPDKIQFAPGLPKTRSGKIMRRILRKIAEDDFGALGDTSTLADPAVVEDLVENRQNKRTVEA

SEQ ID NO: 122062 - DNA, 1938 bp, Alkalilimnicola ehrlichei MLHE-1
  CDS (1)..(1938): transl_table=11
atgtccgacacgaaggtctaccccgtacccgactatatccgcgagaaggcgcacatcaccaaggacacctatgaggagatgtatcgccggtccctggatgacccggaggggttttggggcgaacaggctgagaaattcctcgactggttcagcaagtgggacaaggtctaccactccgacctgaagaacggcgagatccgcttcttcgagggcggtaagctcaacgtcgcccacaactgcctggaccgccacctggagcagcggggcgatcagaccgccatcatctgggaaggtgacgaccccaacaactccgagcacatcacctacaaggacctgcacgagcgcgtctgccgcctggctaacgccatgaaggcccgcggcgtcaagaagggtgaccgcgtctgcatctatctgccgatgatccccgaggcggccgtggccatgctggcctgcgcccgcatcggcgccatccactccatcgtcttcggcggcttctccccggacgccctgaaggaccgcatccagaacgccgactgcgagaccgtcatcaccgccgacgagggcgtccgtggtggccgcaacgtggccctgaagtccaacgccgacaaggcccttgagagctgccccgacgtcaagaacgtcttcgtggtcaagcgcaccgggggcgacatcgactggaaggaagggcgtgacatctggtaccacgaggccgtggccgatgtctctgccgactgccccgctgaggaactggacgccgaggacccgctgttcatcctctacacctccggctccaccggcaagcccaagggcgtgcagcactgctccgccggctacctgctgggcgcagccatgacccacaagtacgtcttcgactaccaggagggcgaggtctactggtgcaccgccgacgtgggctgggttaccggtcacagctacatcgtctatggtccgctggccaacggcgccaccaccctgatgttcgagggtgtgcccacctaccccagcgccgcccgctgctgggaagtggtcgacaagcacaacgtctccatcttctacaccgccccgaccgccatccgcgccctgatgggccagggcaacgagcacgtcaccaagaccagccgcaagagcctgcgcatcctgggcacggtgggtgagcccatcaacccggaggcctgggagtggtactacaacgtggtgggcgacggccgctgcccgatcgtggacacctggtggcagactgagaccggctccatcctgatcgccccgctgccgggcgcgaccgacctgaagccgggttccgccaccctgcccttcttcggcgtggagccggccctggtggaccccgaaggcaaggagctggaaggtgccgccagcggcaacctggtgatcaagcgggcctggccgagcatgatgcgtacggtctatggcgaccacaagcgcttcatggagacctacctggcggcctacccggggatgtacttcaccggtgacggggcccgtcgggacgaggacggttactattggatcaccggccgcgtcgatgacgtgatcaacgtctccggccaccgtatgggcaccgccgaggtggagagtgccctggtgctgcacgatgccgtcgccgaagccgcggtggtgggctacccgcacgacatcaagggccagggcatctacgcctacgtcactctaatggccggtgtggagcccagcgatgagctgaagaaggagttggtgaagctggtctccaacgagatcgggcccatcgccaagcccgatgtcatccagtgggccccgggcctgcccaagacccgctccggcaagatcatgcgccgcatcctgcgcaaggtcgccgccaacgagctggacagcctgggcgacaccagcaccctggccgatccgacggtcgtggacaatctgatcgaggatcgtcccaacaagtaa

SEQ ID NO: 122063 - protein, 645 aa, Alkalilimnicola ehrlichei MLHE-1
MSDTKVYPVPDYIREKAHITKDTYEEMYRRSLDDPEGFWGEQAEKFLDWFSKWDKVYHSDLKNGEIRFFEGGKLNVAHNCLDRHLEQRGDQTAIIWEGDDPNNSEHITYKDLHERVCRLANAMKARGVKKGDRVCIYLPMIPEAAVAMLACARIGAIHSIVFGGFSPDALKDRIQNADCETVITADEGVRGGRNVALKSNADKALESCPDVKNVFVVKRTGGDIDWKEGRDIWYHEAVADVSADCPAEELDAEDPLFILYTSGSTGKPKGVQHCSAGYLLGAAMTHKYVFDYQEGEVYWCTADVGWVTGHSYIVYGPLANGATTLMFEGVPTYPSAARCWEVVDKHNVSIFYTAPTAIRALMGQGNEHVTKTSRKSLRILGTVGEPINPEAWEWYYNVVGDGRCPIVDTWWQTETGSILIAPLPGATDLKPGSATLPFFGVEPALVDPEGKELEGAASGNLVIKRAWPSMMRTVYGDHKRFMETYLAAYPGMYFTGDGARRDEDGYYWITGRVDDVINVSGHRMGTAEVESALVLHDAVAEAAVVGYPHDIKGQGIYAYVTLMAGVEPSDELKKELVKLVSNEIGPIAKPDVIQWAPGLPKTRSGKIMRRILRKVAANELDSLGDTSTLADPTVVDNLIEDRPNK

SEQ ID NO: 122064 - DNA, 1956 bp, Rhizobium leguminosarum bv. viciae 3841
  CDS (1)..(1956): transl_table=11
atgtcggagaagatctatccggtcacgaagccggtgaaggcgcgcgccctgatcgataaggaaaagtacctgaaatggtacgaggaaagcgtcgagaacccggacaagttctggggcaagcacggcaagcggatcgactggttcaagccctataccaaggttaagaacacttcctttaccggcaaggtttcgatcaagtggttcgaggacggtcagacaaacgtctcctataattgcatcgaccgccatctgaaaacgaatggcgaccaggtggcgatcatctgggagggcgacaacccctatgtcgataagaaggtcacctataacgagctctacgagtatgtctgccggatggcgaacgtcttgaagaagcacggcgtcaagaagggcgatcgcgtcaccatctacatgccgatgattcccgaagccgcctatgcgatgctcgcctgcgcccgcatcggcgcggtgcattcggtcgtcttcggcggtttctcgccggaggccttggcggggcgtatcgtcgactgcgaatccaccttcgtcattacctgtgacgaaggcgtgcgcggcggcaagccggtgccgctgaaggacaataccgatacggcgatccatatcgccgctcgccagtatgtcaatgtcaccaaggtgctggtcgttcgccgcaccggcggcaagaccggctgggctcccggccgcgatctctggtatcaccaagaaattgccacggtgaaggcggaatgcccgccggtgaagatgaaggcggaagatccgctcttcattctttatacgtcaggctcgaccggcaaaccgaagggcgtgctgcacacgaccgccggttatctcgtctatgcagcgatgacgcatgaatatgtcttcgattatcacgacggcgatgtctactggtgtacggccgatgtcggctgggtgaccggccattcctatatcgtctacgggccgcttgcgaactgcgcgacgacgctgatgttcgagggcgtgccgaatttcccggatcagggccgtttctgggaagtcatcgacaagcacaaggtcaacatcttctataccgcgccgacggcgatccgctcgctgatgggtgccggtgacgacttcgtcactcgctcctcgcgctcgtcgctgcgcctgctcggcacggtcggcgagccgatcaatccagaggcctgggaatggtattacaatgtcgtcggtgacaagcgctgccccgtcattgatacgtggtggcagacggaaaccggcggccatatgatcacgccgctgcctggcgccaccgatctgaaacccggttcggcgacgaccccgttcttcggcatcaagccgcagctggtcgacaatgagggcaaggtgctggaaggcgcggccgatggcaatctctgcatcaccgacagctggccgggccagatgcgcacggtctatggcgatcacgagcgcttcatccagacctatttctccacatacaagggcaagtatttcaccggcgatggctgccggcgcgatgctgacgggtactactggatcaccggccgcgtcgacgacgtgctgaacgtctccggccaccggctgggcacggcggaggtggaatccgccctcgtctcgcacaatctggtttcggaagccgcagtcgtcggttacccgcatccgatcaagggccagggcatttattgctatgtgacgctgatgtccggccacgagggatcggacacgcttcgccaggaactggtgaaacatgtgcgggccgaaatcggcccgatcgccgcgcccgacaagatccagtttgcgcccggcctaccgaagacccgctccggcaagatcatgcgccgcatcctgcgcaagatcgccgaagacgatttcggtgctctcggtgacacttcgacccttgccgatccggcagtcgtcgacgatcttatcgccaaccggcagaacaaggcgaccgcctga

SEQ ID NO: 122065 - protein, 651 aa, Rhizobium leguminosarum bv. viciae 3841
MSEKIYPVTKPVKARALIDKEKYLKWYEESVENPDKFWGKHGKRIDWFKPYTKVKNTSFTGKVSIKWFEDGQTNVSYNCIDRHLKTNGDQVAIIWEGDNPYVDKKVTYNELYEYVCRMANVLKKHGVKKGDRVTIYMPMIPEAAYAMLACARIGAVHSVVFGGFSPEALAGRIVDCESTFVITCDEGVRGGKPVPLKDNTDTAIHIAARQYVNVTKVLVVRRTGGKTGWAPGRDLWYHQEIATVKAECPPVKMKAEDPLFILYTSGSTGKPKGVLHTTAGYLVYAAMTHEYVFDYHDGDVYWCTADVGWVTGHSYIVYGPLANCATTLMFEGVPNFPDQGRFWEVIDKHKVNIFYTAPTAIRSLMGAGDDFVTRSSRSSLRLLGTVGEPINPEAWEWYYNVVGDKRCPVIDTWWQTETGGHMITPLPGATDLKPGSATTPFFGIKPQLVDNEGKVLEGAADGNLCITDSWPGQMRTVYGDHERFIQTYFSTYKGKYFTGDGCRRDADGYYWITGRVDDVLNVSGHRLGTAEVESALVSHNLVSEAAVVGYPHPIKGQGIYCYVTLMSGHEGSDTLRQELVKHVRAEIGPIAAPDKIQFAPGLPKTRSGKIMRRILRKIAEDDFGALGDTSTLADPAVVDDLIANRQNKATA

SEQ ID NO: 122066 - DNA, 1941 bp, Rhizobium leguminosarum bv. viciae 3841
  CDS (1)..(1941): transl_table=11
atgtctgacatcgtccgttatccaccagcgaaatcaaccgttgcgcgcgccctgatcgataaggagaagtacctcaaatggtacgaggaaagcgtcgagaacccggacaaattctggggcaagcacggtaggcggatcgactggttcaagccctataccaaggttaagaacacttcctttaccggcaaggtttcgatcaagtggttcgaggacggtcagacaaacgtctcctacaattgcatcgaccgtcatctgaaaacgaatggcgaccaggtggcgatcatctgggagggcgacaacccctatatcgacaagaaggtcacctataacgaactctacgagcatgtctgccggatggcgaacgtgttgaagaagcacggcgtcaagaagggtgatcgcgtcaccatctacatgccgatgatcccggaagccgcctatgcgatgctcgcctgcgcccgcatcggcgcggtgcattcggtcgtcttcggcggtttctcgcccgaggcgctggcggggcgcattgtcgactgcgaatccaccttcgtcatcacctgcgacgaaggcgtgcgcggcggcaagccggtgccgctgaaggacaataccgatacggcgatcgatatcgccgctcgacagcatgtcagggtcagcaaggtgctggtcgttcgccgcaccggcggcaagaccggctgggcgccgggccgcgatctctggcatcaccaggaaatcgccacggtgaagccggaatgcccgccggtgaagatgaaggcggaagacccgctcttcattctttatacgtcaggctcgaccggcaaaccgaagggcgtgctgcacacgacgggcggttatctcgtctatgcggcgatgacgcatgaatatgtcttcgactatcatgacggcgacgtctattggtgcaccgccgatgtcggctgggtcaccggccactcctatatcgtctacgggccgctcgccaactgcgcaacgacgctgatgttcgagggtgttccgaatttccccgatcagggccgcttctgggaagtcatcgacaaacataaggtcaacatcttctatacggcgccaacggcgatccgctcgctgatgggcgccggtgacgacttcgtgacgcgctcgtcggtgcgcctgctcggcacggtgggcgagccgatcaatcccgaggcctgggaatggtattacaatgtcgtcggcgacaagcgctgccctgtcatcgatacgtggtggcagacggaaaccggcggccatatgatcacgccgctgcccggcgccatcgatctgaaacccggttctgcgacagtgccgttctttggcatcaagccgcagctggtcgacaatgaaggcaaggtgctggaaggggccgccgacggcaatctctgcatcaccgacagctggccgggccagatgcgcacggtctatggcgatcacgaccgtttcatccagacgtatttctccacctacaagggcaagtatttcaccggcgacggctgccggcgcgatgcggacggctattactggatcaccggccgtgtcgacgacgtgctcaacgtctccggccaccggctcggcaccgcggaggtggaatccgcactcgtctcgcacaatctggtctcggaagccgcggttgtcggttatccgcatccgatcaagggccagggcatctattgctatgtgacgctgatggccggtcacgaaggaacggacacgctccgccaggaactggtgaaacatgtgcgtgccgaaatcggcccgatcgccgcacccgacaagatccagtttgcgcccggcctgccgaagacccgttccggcaagatcatgcgccggatcctgcgcaagatcgccgaagacgatttcggcgcgcttggcgatacctcgacgctcgccgatccggccgtcgtcgacgatctgatcgccaaccggcagaacaggtga

SEQ ID NO: 122067 - protein, 646 aa, Rhizobium leguminosarum bv. viciae 3841
MSDIVRYPPAKSTVARALIDKEKYLKWYEESVENPDKFWGKHGRRIDWFKPYTKVKNTSFTGKVSIKWFEDGQTNVSYNCIDRHLKTNGDQVAIIWEGDNPYIDKKVTYNELYEHVCRMANVLKKHGVKKGDRVTIYMPMIPEAAYAMLACARIGAVHSVVFGGFSPEALAGRIVDCESTFVITCDEGVRGGKPVPLKDNTDTAIDIAARQHVRVSKVLVVRRTGGKTGWAPGRDLWHHQEIATVKPECPPVKMKAEDPLFILYTSGSTGKPKGVLHTTGGYLVYAAMTHEYVFDYHDGDVYWCTADVGWVTGHSYIVYGPLANCATTLMFEGVPNFPDQGRFWEVIDKHKVNIFYTAPTAIRSLMGAGDDFVTRSSVRLLGTVGEPINPEAWEWYYNVVGDKRCPVIDTWWQTETGGHMITPLPGAIDLKPGSATVPFFGIKPQLVDNEGKVLEGAADGNLCITDSWPGQMRTVYGDHDRFIQTYFSTYKGKYFTGDGCRRDADGYYWITGRVDDVLNVSGHRLGTAEVESALVSHNLVSEAAVVGYPHPIKGQGIYCYVTLMAGHEGTDTLRQELVKHVRAEIGPIAAPDKIQFAPGLPKTRSGKIMRRILRKIAEDDFGALGDTSTLADPAVVDDLIANRQNR

SEQ ID NO: 122068 - DNA, 1938 bp, Pseudomonas aeruginosa UCBPP-PA14
  CDS (1)..(1938): transl_table=11
atgttcgagatcagcgtccacccggtgccggacgccgtccgccagcgtgcctacctgaacgacgacgactaccagcgcctgtaccgccaatccgtcgagaaccccgacgagttctggagcgagcaggccaaggccttcctcgattggttcaagccctggcacagcgtccaccacggcgacctgaggaaaggccaggccacctggttcaagggcggccagttgaacgtcgcctacaactgcatcgaccgccacctggaacgccgcggcgaacagatcgcgatcgtctgggaaggcgacaaccccagcgaatccgcgcacatcacctaccgcaagctgcaccacaacgtctgccgcctggctaacgtgctgaagagccgcggcgtggaaaagggcgaccgggtctgcatctacatgccgatgattcccgaggccgcctacgccatgctcgcctgcgcccgcatcggggcggtgcactcggtggtgttcggcggcttctcgccggactcgctgcgcgaccgcattctcgatgccgactgccgcaccgtgatcaccgccgacgagggcgtgcgcggcggcaagtacatcccgctgaagcagaatgtggaaaaggcgctgaaggactgcccggacgtctccaccgtggtggtagtcgagcgcacccagggcgacataccctgggtcgaaggccgcgacatctggtaccacgaggcgctccacgcggcctcagccgactgcccggcggaagcgatggacgccgaggacccgctgttcatcctctatacctccggcagcaccggcaagccgaagggcgtattgcacaccaccgggggctacctgctcggcgcggcgatgacccacaagtacgtgttcgactaccacgatggcgacgtctactggtgcaccgccgacgtcggctgggtcaccggacacagctatatcgtctacggcccgctggccaacggcgccaccaccctcatgttcgagggcgtgcccaactacccggacgcctcgcgcttctggcaggtgatcgacaagcaccaggtgaatatcttctacaccgcgccgaccgcgatccgcgcgctgatgcgcgaaggcgacgccccggtccgccagacctcgcgcagcagcctgcgcctgctcggctcggtgggcgagccgatcaacccggaggcctgggagtggtactaccaggtggtcggcgagaagcgctgccccatcgtcgatacctggtggcagactgagaccggcagcatcctgatcaccccgttgcccggcgccactgcgctaaagccaggctcggcgacccgcccgttcttcggcgtgcaacccgtgctgctcgacgagaaaggcaaggaaatcgacggcgcgggcagcggcgtactggcgatcaaggccagttggccgagtcagatccgcagcgtctacggcgaccaccagcggatgatcgacacctacttcaagccctaccccgggtattacttcagcggcgacggcgcgcgccgcgacgaggacggctactactggatcaccggccgggtcgacgacgtgatcaatgtctccggacaccggatcggcaccgccgaggtcgagagcgcgctggtcctgcacgatgcggtggccgaggcggcagtggtcggctgcccgcatgacgtgaagggccaggccatctacgcgttcgtcaccctgatggccggcagtcagcccagcgaggcgctacaacaggaattgctggccctggtcggcaaggagatcggcagcttcgccaagccggatcacctgcaatgggcgcccagcctgccgaagacccgctccggcaagatcatgcggcgtatcctgcgcaagatcgcctgcaacgagctggacagtctcggcgatacctcgaccctggccgatccgggagtggtgcaggggttgatcgacaaccgcctcaaccgctga

SEQ ID NO: 122069 - protein, 645 aa, Pseudomonas aeruginosa UCBPP-PA14
MFEISVHPVPDAVRQRAYLNDDDYQRLYRQSVENPDEFWSEQAKAFLDWFKPWHSVHHGDLRKGQATWFKGGQLNVAYNCIDRHLERRGEQIAIVWEGDNPSESAHITYRKLHHNVCRLANVLKSRGVEKGDRVCIYMPMIPEAAYAMLACARIGAVHSVVFGGFSPDSLRDRILDADCRTVITADEGVRGGKYIPLKQNVEKALKDCPDVSTVVVVERTQGDIPWVEGRDIWYHEALHAASADCPAEAMDAEDPLFILYTSGSTGKPKGVLHTTGGYLLGAAMTHKYVFDYHDGDVYWCTADVGWVTGHSYIVYGPLANGATTLMFEGVPNYPDASRFWQVIDKHQVNIFYTAPTAIRALMREGDAPVRQTSRSSLRLLGSVGEPINPEAWEWYYQVVGEKRCPIVDTWWQTETGSILITPLPGATALKPGSATRPFFGVQPVLLDEKGKEIDGAGSGVLAIKASWPSQIRSVYGDHQRMIDTYFKPYPGYYFSGDGARRDEDGYYWITGRVDDVINVSGHRIGTAEVESALVLHDAVAEAAVVGCPHDVKGQAIYAFVTLMAGSQPSEALQQELLALVGKEIGSFAKPDHLQWAPSLPKTRSGKIMRRILRKIACNELDSLGDTSTLADPGVVQGLIDNRLNR

SEQ ID NO: 122070 - DNA, 1932 bp, Solibacter usitatus Ellin6076
  CDS (1)..(1932): transl_table=11
atggccgatgcgaatgtttatccgccctccgcggagttcgtcagcaccgcgaacgtgaagggcatggcgggctaccgggcgctctatcagagagccgcggaaaagccggaggagttctggggggagctcgcggaccaggaactgcactggtttcggaaatggacccatgtgttcgagtgggatccgccctttgcgaaatggttcgccggcgggaagatcaacgccagctataactgcatcgaccggcatctctccacaccgcgcaagaataaagtcgccatcctctgggaaggcgaacccggcgatcagcgcatgatcacctaccaggagcttcatcgcctggtctgccgcttcgccaacgtgctcaaggcgcgcggcctcaaagccggcgaccgcgccatcatctacatggggatggtgcccgagctgccggtggcggtgctggcctgcgcccggctcggtatcatccatagcgtggtcttcggcggcttcagcgcggaagctctcaaggcgcgcattcaggacctggaagcgcaggtggtgattacgtgcgacggcgcatggcgccgcggcaaggaagtccgcctcaaggacgcggtggatgaatcgctcgccggctgcgacaccgtcaaagatgtcatcgtctatcgccgcacgggcggcagcatcccgatgcaggaaggccgcgatcattggtggcacgatctggatacggaagcgagtgaagtctgcccggcagaggagctggacagcgagcatccactctatgtgctctacacctccggcaccacgggcaagcccaagggcatcgtgcacaccaccggcggatatctgctgcaggcgcacatgactatgaaatgggtcttcgacctgcacgaagaagacacctactggtgcacggccgatatcggctgggtgaccgggcacagctacatcgtttacggcccgctttccgccggcgccaccagcgtgatgtacgaaggcgcgcccgatttcccgcaacccgaccgcttctggcggctgatcgagaagtacaaggtcaacatcttctacacgtcgccgacagcgattcgttcgttcgtacggcaaggcgaccagtggccgaatgcgcacgatatgtcgagcctgcgcctgctcgggtcggtgggcgagcccatcaatcccgcggcgtgggagtggtattacaaggtgatcggcaaagagcgctgccccatcgtggacacctggtggcagaccgaaaccggcgctatcatgatcgcgccgatgccgggcgctgtgccgctgaaaccgggctcgggcacgctcccgctgcccggcgtgatcgccgatatcgtggacctgcagggcaatccggtcgaggccaatcgcgaaggcttcctcatcgtccgccgcccatggcccagcatcgcgcgcacgctgtggcgcgagccggaccgctacaagcaggcctattgggagcgcgtgccgggagtctaccttgcaggtgacgcggcgcgccgcgacgaggacggctatttctggattctgggccgcgtcgatgacgtgatgaacgtcagcggccaccgcctcagcaccatggaattggaatcggctctggtgcgccatcccgccgtggccgaggccgcggtggtcggcaagccgcacgagatcaccggccaagccgtggcctgtttcgtgacgttgaagaagggaacctgggatcacaccgcgctggccgaggaattgcgcaaatgggtagcgcacgaaatcggcagcttcgccaagccggagcagatccgcttcaccgattcgctccccaaaacgcgcagcggcaaaatcatgcgccgcctgctgcgcgaaatcgtgacctcgaattccgtcaccggcgacgtcacgacgttggaagacctgagcgtggtaacgcgcctctccgcccagcacgacgaagactga

SEQ ID NO: 122071 - protein, 643 aa, Solibacter usitatus Ellin6076
MADANVYPPSAEFVSTANVKGMAGYRALYQRAAEKPEEFWGELADQELHWFRKWTHVFEWDPPFAKWFAGGKINASYNCIDRHLSTPRKNKVAILWEGEPGDQRMITYQELHRLVCRFANVLKARGLKAGDRAIIYMGMVPELPVAVLACARLGIIHSVVFGGFSAEALKARIQDLEAQVVITCDGAWRRGKEVRLKDAVDESLAGCDTVKDVIVYRRTGGSIPMQEGRDHWWHDLDTEASEVCPAEELDSEHPLYVLYTSGTTGKPKGIVHTTGGYLLQAHMTMKWVFDLHEEDTYWCTADIGWVTGHSYIVYGPLSAGATSVMYEGAPDFPQPDRFWRLIEKYKVNIFYTSPTAIRSFVRQGDQWPNAHDMSSLRLLGSVGEPINPAAWEWYYKVIGKERCPIVDTWWQTETGAIMIAPMPGAVPLKPGSGTLPLPGVIADIVDLQGNPVEANREGFLIVRRPWPSIARTLWREPDRYKQAYWERVPGVYLAGDAARRDEDGYFWILGRVDDVMNVSGHRLSTMELESALVRHPAVAEAAVVGKPHEITGQAVACFVTLKKGTWDHTALAEELRKWVAHEIGSFAKPEQIRFTDSLPKTRSGKIMRRLLREIVTSNSVTGDVTTLEDLSVVTRLSAQHDED

SEQ ID NO: 122072 - DNA, 1935 bp, Magnetococcus sp. MC-1
  CDS (1)..(1935): transl_table=11
atgagcgacgttaaagtctaccccgttgatcccaatgttgcggccaacgcgctgatcaacgaggaacagtaccaagaaatgtataaacgttccatcgacgacccggcggccttttgggctgaacaggccgaggcgcgcattgattggtttaaaaaatgggacaacgttctggattttgatctgcgtaaaggtcatatcaaatggtttgagggggccaaactcaacgtctcctacaactgtattgaccgccacctggaaaaacgcggggataaagtggccatcctctgggaaggggataatcccgctgccgaccgtaaaatcacctaccgtgaactctctgcgttggtcaataagtttgccaacgctttaaaagcacggggcgttaaaaaaggggatcgggtttgcatctacatgcccatgattcccgaagccgctgtggccatgctcgcttgtacccgcattggcgcggtgcactccatcgtctttgggggtttctctcccgatgcactgcgggaccgcattattgatgccgagtgtcgcgtggtgatcaccgccgatggcggcatgcgtggttctaaaaagatccccctgcgtaaaaatgtcgagaccgcgctggcccagtgccccaacgtacacacctgttttgtggtgcaagatacccaattagagattgagtggaccgaagggcgcgatgtttggtatcacgaagccattgcagccgccagtgccgactgcccccccgaggagatggatgccgaagatccgctgtttgtgctctacacctcgggctccaccggcaagcccaagggggttctgcacaccaccggtggttatctgctgtatgcctctatcacccaccaatatatcttcgattatcatgaggatgacatctactggtgtaccgcagacgtaggctgggtaacgggccacacctacattgtttatggacccttagccaatggggccaccaccttgatgttcgaaggggtgcccacctacccggacgcttcccgcttttggcaggtggtggataaacatcaggtgagcattttctacaccgctcccaccgccattcgctccatcatgagccagggggacgcactggttaaggccacctcgcgtcaatcgctgcgcatccttggcagcgtgggtgagcccatcaaccccgaggcgtgggagtggtactaccatgtagtgggtgaagggcgctgccccattgtggacacttggtggcagaccgaaaccgggggaattttgattaccccactgcctggggcaacccccttaaaacccggttcagcaacccgtcccttctttggggtcaaccccaaagtgctctccaacgagggcaaagagatggagggcccctgtgaaggcatcctggttttggatcatccctggccgggcatgatgcgtaccgtgtatggcgaccatgatcgttttatcaacacctattttgccaactatcccggctactatttctgtggggatggctgccgccgtgatgaagatggctactattggatcacggggcgggtggatgatgtgatcaacgtctccggccaccgtttgggtaccgctgaagtagagagcgccttggtgctgcacgatcaagttgccgaagcggcggtggtgggcatgccccatgagatcaagggtcagggcatctacgcctatgtgacccttatgagcggggttgagccctctgacgcactcaaaaccgagttggtcaagctggtccgcaaggagattggccccattgcctcattggatgtgatccagtttgcccccggcctgcccaagacccgttccggcaagatcatgcgccgcattctccgcaagattgctgcccatgaagtggacaccctaggggatacctcaaccctggccgatccatcggtggtgcaaaacctcatcgacaacatgcccaaatag

SEQ ID NO: 122073 - protein, 644 aa, Magnetococcus sp. MC-1
MSDVKVYPVDPNVAANALINEEQYQEMYKRSIDDPAAFWAEQAEARIDWFKKWDNVLDFDLRKGHIKWFEGAKLNVSYNCIDRHLEKRGDKVAILWEGDNPAADRKITYRELSALVNKFANALKARGVKKGDRVCIYMPMIPEAAVAMLACTRIGAVHSIVFGGFSPDALRDRIIDAECRVVITADGGMRGSKKIPLRKNVETALAQCPNVHTCFVVQDTQLEIEWTEGRDVWYHEAIAAASADCPPEEMDAEDPLFVLYTSGSTGKPKGVLHTTGGYLLYASITHQYIFDYHEDDIYWCTADVGWVTGHTYIVYGPLANGATTLMFEGVPTYPDASRFWQVVDKHQVSIFYTAPTAIRSIMSQGDALVKATSRQSLRILGSVGEPINPEAWEWYYHVVGEGRCPIVDTWWQTETGGILITPLPGATPLKPGSATRPFFGVNPKVLSNEGKEMEGPCEGILVLDHPWPGMMRTVYGDHDRFINTYFANYPGYYFCGDGCRRDEDGYYWITGRVDDVINVSGHRLGTAEVESALVLHDQVAEAAVVGMPHEIKGQGIYAYVTLMSGVEPSDALKTELVKLVRKEIGPIASLDVIQFAPGLPKTRSGKIMRRILRKIAAHEVDTLGDTSTLADPSVVQNLIDNMPK

SEQ ID NO: 122074 - DNA, 1965 bp, Azoarcus sp. BH72
  CDS (1)..(1965): transl_table=11
atgtccaacgaacaacaggtccgcatttacaacccctcggaagaagtggtgaagaatgctgccgtatccggcatggaggcctactgggcactgtgcaaggaagcggaacaagactacgagggctactgggcgcgcaacgcccgtgagctgatcgactggaagaagcccttcacgcaggttctggacgagagcaacgcgccgttcttcaagtggttcgccgacggccagctgaacgtgtcctacaactgcctcgaccgcaacgtcgagaagggcctgggcgacaaggtcgcgctgatcttcgaagccgacagcggcgaagtcacccgcgtcacctacaaggacctgctgggccgcgtctgcaagttcgccaatgcgctgcgcgcctccggcatcaagaagggcgaccgcgtcgtcatctacctgccgatgtcgatcgaaggcgtcgtcgcgatgcaggcctgcgcccgtatcggcgccacccactccatcgtgttcggcggcttctccgcccaggccctgcgcgaccgcatcaacgatgccggcgccgtggcgctgatcacctccgacggccagttccgcggcggcaaggccctgccgctgaagccgatcgccgacgaggcgctgtcgctgggcggctgcgaaaccatcaagaacgtgttcgtggtcaagcgcaccggggccgacgtggccttcgtcgccggccgcgacgtctggtaccacgacgtggtggccagccagtccgacgtttgcgagccggaatgggtcgatgccgagcatccgctgttcctgctctacacctcgggctccaccggcaagccgaagggcgtccagcactccaccggcggctacctgctgcacgcgatcctgaccatgaagtacacgttcgacatcaagccgagcgacgtcttctggtgcaccgcggacatcggctgggtcaccggccacacctacatcacctacggcccgctcgcgtgcggcagcaccgaaatcgtgttcgaaggcgtgccgacctacccggacgccggccgcttctggaagatgatccaggaccacaaggtcaacatcttctacaccgcgccgaccgccatccgttcgctgatcaaggccgcggacaacaatccgacggtgcatccgaagaactacgacctgtcctcgctgcgcatcctgggttcggtcggtgagccgatcaacccggcggcgtgggagtggtactacgagaacgtcggcggcggccgctgcccgatcgtcgataccttctggcagaccgaaaccggcggccacatgatcaccccgctgccgggcgcaaccccgctggtgccgggttcgtgcacgctgcccttcccgggcatccaggctgccgtggtcgatgaaaccggcaccgaagtgcccaacggccagggcggcatcctggtggtcaagcgtccgtggccgtcgatgatccgcaccatctggggcgacccggagcgcttcaagaagtcctactacccggacgacttcaagggcaagctctacctcgccggcgacggtgcgatccgcgacaaggaaaccggctacttcaccatcaccggccgtatcgacgatgtgctgaacgtttccggccaccgcatgggcacgatggaaatcgaatccgcgctggtcgcccacgagaaggttgccgaagctgcggtcgtcggccgtccggatgacctgaccggtgaagccatcgtcgctttcgtggtgctgaagggcgcccgtccgaccggcgaagccgctgccgccgtggtcaaggaactgcagaactgggttggccacgaaatcgggccgatcgccaagccgaaggacatccgcttcggtgagaacctgcccaagacccgctccggcaagatcatgcgccgcctgctgcgccaactggccaagggcgaagagatcacccaggacacctcgacgctcgagaatccggcgatcctggagcagctgaagggctaa

SEQ ID NO: 122075 - protein, 654 aa, Azoarcus sp. BH72
MSNEQQVRIYNPSEEVVKNAAVSGMEAYWALCKEAEQDYEGYWARNARELIDWKKPFTQVLDESNAPFFKWFADGQLNVSYNCLDRNVEKGLGDKVALIFEADSGEVTRVTYKDLLGRVCKFANALRASGIKKGDRVVIYLPMSIEGVVAMQACARIGATHSIVFGGFSAQALRDRINDAGAVALITSDGQFRGGKALPLKPIADEALSLGGCETIKNVFVVKRTGADVAFVAGRDVWYHDVVASQSDVCEPEWVDAEHPLFLLYTSGSTGKPKGVQHSTGGYLLHAILTMKYTFDIKPSDVFWCTADIGWVTGHTYITYGPLACGSTEIVFEGVPTYPDAGRFWKMIQDHKVNIFYTAPTAIRSLIKAADNNPTVHPKNYDLSSLRILGSVGEPINPAAWEWYYENVGGGRCPIVDTFWQTETGGHMITPLPGATPLVPGSCTLPFPGIQAAVVDETGTEVPNGQGGILVVKRPWPSMIRTIWGDPERFKKSYYPDDFKGKLYLAGDGAIRDKETGYFTITGRIDDVLNVSGHRMGTMEIESALVAHEKVAEAAVVGRPDDLTGEAIVAFVVLKGARPTGEAAAAVVKELQNWVGHEIGPIAKPKDIRFGENLPKTRSGKIMRRLLRQLAKGEEITQDTSTLENPAILEQLKG

SEQ ID NO: 122076 - DNA, 1953 bp, Magnetospirillum magnetotacticum MS-1
  CDS (1)..(1953): transl_table=11
atgtccgatctttttccggttcccccggatttcgccgcccgcgcccatgtggatgcggcggcctatgaaaatctctatgggcgatccctggacgacaaccaggggttctggcgcgaacaagcgggcttcctcgactggatcaagccgtttacgaaggtcagcgacaccagattcgatcccgatgatctgcgcatccgctggttcgccgacggcacattgaacgcctcggtcaattgcatcgaccgccaccttcccgccaaggccgacctgcccgccattctgtgggaaggtgacgcgtcggatgagcgccgcaccgtcacctggggccaattgtccgaccgggtcaaccggctggccaatgtgctgaagagcctgggcgtggccaagggcgacgtggtcaccatctatctgccggtgatccccgaggccttcgtcgccatgatggcctgcgtgcgcatcggcgccgtccattcggtggtgttttccggtttttccgccgaggccctggccaaccgcatcgccgatgccggtgccaaagtgctgatcaccgccgacgagggcaagcgcggcgggcgggctgtgcccttgaagcgcaatgccgatgaggctctgacctctcagcccggtgtcgcccatgtggtggtggtgcgccgcaccggcgcccccgtgcccttctcgccgggccgcgatctttggtacgaggacgccctggccgccgcccagccctggtgcgagccggtggaggtgggagcggaggacccgctgttcatcctttacacctccggctccaccggcaaacccaagggccttgtccacaccaccggcggctatctggttcatgcgggcaccagttggaagaccatcttcgactggcatccgggcgatgtgttctggtgcaccgccgatgtaggctgggtcacggcccacacctataagatctacggaccgctgctgaacggtgccaccagcgtgttgttcgagggcgtgcccacatggccggattcctcgcgctggtggtcgatcatcgagcgctaccgggtcgccatcttctacaccgcgcccaccgcgctgcgctccctgatgcgcgagggcgaagggcccgtgcggcgccacgacctctccagcctgcgggtcctgggttcggtgggcgagcccatcaacccggaagcctggcgttggtaccattcggtgatcggcgccgggcgctgccccatcgtcgacacctattggcagaccgagaccggagcggtgctgctggtgcccattcccggcgccattcccaacaagccgggcatggcggccaagccctatttcggcatccgccccgtggtggtcgatgcgcaaggcaaccgcctggacggcgtggccgagggcaatatgtgcttcgaaggctcgtggccgggacaggcgcgcactattctccacgaccacgaacgcttcatccggacctatttcgccccctatccgggcctgttcttcaccggcgacggggtgcgccgtgacgaggacggctattaccgcatcagcggccgggtggacgacgtcatcaacgtctcgggccaccggctgggtacggtggagctggaaagcgccatctcgtcgcaccgggccgtggcggaatcggcggtggtcggttttccccacgacttgaaaggccagggcgtgttcgcctatgtcacactcaaggacggcatcaccgagtccgaggaattgcgcaaggaactggtggcctgggtccgcgcccgtatcggccccatcgccagccccgatgtgatccaatgggccccagccctgcccaagaaccgggcgggcaagattttgcgccgcatcctggccaaggtggccgccaacgatttcgagaatttcggtgacacctccaccgttgccgaccccgccgtcgtcggcgacattgttcaaagccgtaaggacactcttgaaagggaacaggtatga

SEQ ID NO: 122077 - protein, 650 aa, Magnetospirillum magnetotacticum MS-1
MSDLFPVPPDFAARAHVDAAAYENLYGRSLDDNQGFWREQAGFLDWIKPFTKVSDTRFDPDDLRIRWFADGTLNASVNCIDRHLPAKADLPAILWEGDASDERRTVTWGQLSDRVNRLANVLKSLGVAKGDVVTIYLPVIPEAFVAMMACVRIGAVHSVVFSGFSAEALANRIADAGAKVLITADEGKRGGRAVPLKRNADEALTSQPGVAHVVVVRRTGAPVPFSPGRDLWYEDALAAAQPWCEPVEVGAEDPLFILYTSGSTGKPKGLVHTTGGYLVHAGTSWKTIFDWHPGDVFWCTADVGWVTAHTYKIYGPLLNGATSVLFEGVPTWPDSSRWWSIIERYRVAIFYTAPTALRSLMREGEGPVRRHDLSSLRVLGSVGEPINPEAWRWYHSVIGAGRCPIVDTYWQTETGAVLLVPIPGAIPNKPGMAAKPYFGIRPVVVDAQGNRLDGVAEGNMCFEGSWPGQARTILHDHERFIRTYFAPYPGLFFTGDGVRRDEDGYYRISGRVDDVINVSGHRLGTVELESAISSHRAVAESAVVGFPHDLKGQGVFAYVTLKDGITESEELRKELVAWVRARIGPIASPDVIQWAPALPKNRAGKILRRILAKVAANDFENFGDTSTVADPAVVGDIVQSRKDTLEREQV

SEQ ID NO: 122078 - DNA, 1995 bp, Burkholderia vietnamiensis G4
  CDS (1)..(1995): transl_table=11
atggagaacaccttgaccgccctcgtatcgatccttcaggaaagccgaatcttcgaaccgacggccgacacgcgcgcacgcgcgaccatttccggcatgccggcctaccgtgcgctcgtcgccgaggccgagcaggactacgagggcttctgggcgcgtctcgcgcgcgagaacctgagctggcacaagccgttcaccaaggtgctcgacgagagcaacgcgccgttctgcacgtggttcgacgacggcgagctcaacgcgtcgtacaactgcctcgaccgtcacgtcgaagccggcaacggccagcgcgtcgccgtgatcttcgaggccgacgacggcaccgtcacgcgcgtcacctacgccgagctgctcgcgcgcgtgtcgcgcttcgccaatgcgctgaaaaaacgcggcatcggcaagggcgatcgcgtcgtcatctacatcccgatgtcgatcgaaggcatcgtcgcgatgcaggcctgcgcgcgcatcggcgccacgcactcggtcgtgttcggcggcttctccgccaaatcgctgaacgaacggctcgtcgacgtcggcgcggtcgcgctgatcaccgccgacgagcaggcgcgcggcggcaagacgctgccgctcaagagcatcgccgacgaagcgatcgcgatgggcggctgcgacgcggtcaagagcgtgatcgtctatcgccgcaccggcggcaagatcgactggcatgccgggcgcgatctgtggatgcacgagctcgccgacgccgagtccgaccactgcccgccagaatgggtcggcgccgagcatccgctgttcattctctacacctccggctcgaccgggaagcccaagggtgtgcagcacagcaccggcggctacctgctgtgggccgcgcagacgatgaagtggaccttcgactggaagcccgacgacgtgttctggtgtacggccgacatcggctgggtcaccggccacacgtacatcacctacgggccgctcgcatgcggcggcacgcaggtcgtgttcgagggcgtgccgacctacccggacgccgggcgcttctggaagatgatcgccgaccacaaggtcagcgtgttctataccgcgccgaccgcgatccgttcgctgatcaaggccgccgacgccgacgacaaggtccacccgaagagctacgacctgtcgagcctgcgcatcatcggcacggtcggcgagccgatcaatccggacgcgtggatgtggtatcacaagcacgtgggcggcgagcgctgcccgatcgtcgacacctggtggcaaaccgaaaccggcggccacatgatcacgccgctgccgggcgcgacgccgacggtgcccggttcgtgcacgctgccgctgccggggatcatggccgcggtggtcgacgagacgggccaggacgtgcccaacgggcaaggcgggatcctggtggtcaagcgtccgtggccgtcgatgatccgcacgatctggggcgacccggagcgcttcaagaagagctactaccctgaggagctcggcggcgggctgtatctggcgggcgacggcacggtgcgcgacaaggacaccggttacttcacgatcatggggcgcatcgacgacgtgctgaacgtgtcgggccaccggctcggcacgatggagatcgagtcggcgctggtgtcgcacgagctggtggcggaagcggccgtggtcggccggccggacgacacgacgggcgaggcagtggtcgcgttcgtggtgctcaagcgctcgcgccctgaaggtgacgaggccgcggcgctggccaaggcgctgcgcgactgggtcggcaagcagatcgggccgatcgcgaagccgaaggacatccgcttcggcgacaacctgccgaagacgcgctcgggcaagatcatgcggcgcctgctgcgctcgctcgcgaagggcgaggcgatcacgcaggacacctccacgctcgagaatccggcgattctggagcagctcaccgaggtgcggtaa

SEQ ID NO: 122079 - protein, 664 aa, Burkholderia vietnamiensis G4
MENTLTALVSILQESRIFEPTADTRARATISGMPAYRALVAEAEQDYEGFWARLARENLSWHKPFTKVLDESNAPFCTWFDDGELNASYNCLDRHVEAGNGQRVAVIFEADDGTVTRVTYAELLARVSRFANALKKRGIGKGDRVVIYIPMSIEGIVAMQACARIGATHSVVFGGFSAKSLNERLVDVGAVALITADEQARGGKTLPLKSIADEAIAMGGCDAVKSVIVYRRTGGKIDWHAGRDLWMHELADAESDHCPPEWVGAEHPLFILYTSGSTGKPKGVQHSTGGYLLWAAQTMKWTFDWKPDDVFWCTADIGWVTGHTYITYGPLACGGTQVVFEGVPTYPDAGRFWKMIADHKVSVFYTAPTAIRSLIKAADADDKVHPKSYDLSSLRIIGTVGEPINPDAWMWYHKHVGGERCPIVDTWWQTETGGHMITPLPGATPTVPGSCTLPLPGIMAAVVDETGQDVPNGQGGILVVKRPWPSMIRTIWGDPERFKKSYYPEELGGGLYLAGDGTVRDKDTGYFTIMGRIDDVLNVSGHRLGTMEIESALVSHELVAEAAVVGRPDDTTGEAVVAFVVLKRSRPEGDEAAALAKALRDWVGKQIGPIAKPKDIRFGDNLPKTRSGKIMRRLLRSLAKGEAITQDTSTLENPAILEQLTEVR

SEQ ID NO: 122080 - DNA, 1944 bp, Xylella fastidiosa Dixon
  CDS (1)..(1944): transl_table=11
atgtctgacctgtacaccattgatccgatgttggccaaagatgcgcacgtagaccgtgctcactacaaaacgctttaccacgaatccatcgaacaaccagaagcattctggagcaaagtcgcacagcggctggagtggttcaaagtgccaaccaaaatcaaaaatgtcagctaccaactggaagatgttcacatccgttggttcgaagacggtgaactcaatgccagcgtcaactgcctggaccgccatctcaccttacgtggcgacaaaacagcactcctgtttgaacctgacgccccagacgccccatcctcacgcatcacctaccgtgaactatacgagcgcgtctgccaactcggtaacgcactgcgccacctcggcatcgaaaagggcgaccgcgtcaccatctacttaccaatgattccagatgcagtcgtcgccatcctcgcttgcgcacgcattggagcaatccactccgtcgtcttcggcggctttgcagcaaactccattgccgaccgagtgaatgactgcggtagcaaactcatcatcaccgcagatgaagggctgcgtggcggcagaaaaattccattgaaagccaacgtcgatgccgcattaaaaatccacggaacccagtccgtcgaaaccgtactcgtcgtgcgtcacaccggcggtacgatcaacatgcataccccgcgcgaccgctggttccatgacctcgtcgacatccaagcaaccgaatgcgccccagaacgcatgaacgctgaagacccccttttcatcctctatacctccggctccacaggcaaacccaaaggagtcctgcacaccaccggcggctacctggtgtacaccagctacactcatgaaaccgtgtttgacctacgcgaaaacgacatctactggtgcactgccgacatcggctggattactggtcacagctacatcgtttacggccccctagccaatggcgccaccgtcttgctgtttgaaggcaccccccactacccgaccgtgtcgcgcttctgggaagtgatcgacaaacatcacgtcaccctcttctacaccgcgccgaccgcaatccgtgccttgatgcgcgaaggcgacactcctgtaaaaaaaacctcccgcaaaagcttgcggttacttggcagcgttggcgaacccatcaaccccgaagcctggcactggtactacaccatcgttggcaacggacgctgccccattgtcgacacctggtggcaaaccgagacaggaggaatcctcatcaccccactgatcggtgcaaccgaccttaaaccaggctcagtcaccctccccttcttcggcatacgccccgccctagtggataccaacggacaaacactggatggccccgcagcaggtaacctagtcctgctcgattcctggccgggtcaaatgcgtaccctctacggtgaccaccaacgttttatagacacttactttcgcacctaccccaatacttacttcaccggcgacggctgccgccgcgatgccgacggctattactggatcactggacgtgtggatgacgtcatcaacatctccggccatcgcatcggcaccgccgaaatcgaaagcacactcgtcgctcaccccaaagtggctgaagccgcggtcgtcggcttccctcacccgatcaaaggccagggcatctacgcatacgtgacattaattaccggcgagacacccagcgaagcactgcaccaagaactgctcacccgggtacgcaaagaaatcggagcaatcgccatacccgatcacgtgcaatggacacccaacctccccaaaacccgctccggaaagatcatgcgccgcatcctgcgcaaaattgcagaaaacgcaccagaccaactcggtgacacctccacactggctgatccgtctatcgtcgacttattgctcaacgaacgactgaaacactga

SEQ ID NO: 122081 - protein, 647 aa, Xylella fastidiosa Dixon
MSDLYTIDPMLAKDAHVDRAHYKTLYHESIEQPEAFWSKVAQRLEWFKVPTKIKNVSYQLEDVHIRWFEDGELNASVNCLDRHLTLRGDKTALLFEPDAPDAPSSRITYRELYERVCQLGNALRHLGIEKGDRVTIYLPMIPDAVVAILACARIGAIHSVVFGGFAANSIADRVNDCGSKLIITADEGLRGGRKIPLKANVDAALKIHGTQSVETVLVVRHTGGTINMHTPRDRWFHDLVDIQATECAPERMNAEDPLFILYTSGSTGKPKGVLHTTGGYLVYTSYTHETVFDLRENDIYWCTADIGWITGHSYIVYGPLANGATVLLFEGTPHYPTVSRFWEVIDKHHVTLFYTAPTAIRALMREGDTPVKKTSRKSLRLLGSVGEPINPEAWHWYYTIVGNGRCPIVDTWWQTETGGILITPLIGATDLKPGSVTLPFFGIRPALVDTNGQTLDGPAAGNLVLLDSWPGQMRTLYGDHQRFIDTYFRTYPNTYFTGDGCRRDADGYYWITGRVDDVINISGHRIGTAEIESTLVAHPKVAEAAVVGFPHPIKGQGIYAYVTLITGETPSEALHQELLTRVRKEIGAIAIPDHVQWTPNLPKTRSGKIMRRILRKIAENAPDQLGDTSTLADPSIVDLLLNERLKH

SEQ ID NO: 122082 - DNA, 1944 bp, Xylella fastidiosa Ann-1
  CDS (1)..(1944): transl_table=11
atgtctgacctgtacaccattgatccgatgttggccaaagatgcgcacgtagaccgtgctcactacaaaacgctttaccacgaatccatcgaacaaccagaagcattctggagcaaagtcgcacagcggctggagtggttcaaagtgccaaccaaaatcaaaaatgtcagctaccaactggaagatgttcacatccgttggttcgaagacggtgaactcaatgccagcgtcaactgcctggaccgccatctcaccttacgtggcgacaaaacagcactcctgtttgaacctgacgccccagacgccccatcctcacgcatcacctaccgtgaactatacgagcgcgtctgccaactcggtaacgcactgcgccacctcggcatcgaaaagggcgaccgcgtcaccatctacttaccaatgattccagatgcagtcgtcgccatcctcgcttgcgcacgcattggagcaatccactccgtcgtcttcggcggctttgcagcaaactccattgccgaccgagtgaatgactgcggtagcaaactcatcatcaccgcagatgaagggctgcgtggcggcagaaaaattccattgaaagccaacgtcgatgccgcattaaaaatccacggaacccagtccgtcgaaaccgtactcgtcgtgcgtcacaccggcggtacgatcaacatgcataccccgcgcgaccgctggttccatgacctcgtcgacatccaagcaaccgaatgcgccccagaacgcatgaacgctgaagacccccttttcatcctctatacctccggctccacaggcaaacccaaaggagtcctgcacaccaccggcggctacctggtgtacaccagctacactcatgaaaccgtgtttgacctacgcgaaaacgacatctactggtgcactgccgacatcggctggattactggtcacagctacatcgtttacggccccctagccaatggcgccaccgtcttgctgtttgaaggcaccccccactacccgaccgtgtcgcgcttctgggaagtgatcgacaaacatcacgtcaccctcttctacaccgcgccgaccgcaatccgtgccttgatgcgcgaaggcgacactcctgtaaaaaaaacctcccgcaaaagcttgcggttacttggcagcgttggcgaacccatcaaccccgaagcctggcactggtactacaccatcgttggcaacggacgctgccccattgtcgacacctggtggcaaaccgagacaggaggaatcctcatcaccccactgatcggtgcaaccgaccttaaaccaggctcagtcaccctccccttcttcggcatacgccccgccctagtggataccaacggacaaacactggatggccccgcagcaggtaacctagtcctgctcgattcctggccgggtcaaatgcgtaccctctacggtgaccaccaacgttttatagacacttactttcgcacctaccccaatacttacttcaccggcgacggctgccgccgcgatgccgacggctattactggatcactggacgtgtggatgacgtcatcaacatctccggccatcgcatcggcaccgccgaaatcgaaagcacactcgtcgctcaccccaaagtggctgaagccgcggtcgtcggcttccctcacccgatcaaaggccagggcatctacgcatacgtgacattaattaccggcgagacacccagcgaagcactgcaccaagaactgctcacctgggtacgcaaagaaatcggagcaatcgccatacccgatcacgtgcaatgggcacccaacctccccaaaacccgctccggaaagatcatgcgccgcatcctgcgcaaaattgcagaaaacgcaccagaccaactcggtgacacctccacactggctgatccgtctatcgtcgacttattgctcaacgaacgactgaaacactga

SEQ ID NO: 122083 - protein, 647 aa, Xylella fastidiosa Ann-1
MSDLYTIDPMLAKDAHVDRAHYKTLYHESIEQPEAFWSKVAQRLEWFKVPTKIKNVSYQLEDVHIRWFEDGELNASVNCLDRHLTLRGDKTALLFEPDAPDAPSSRITYRELYERVCQLGNALRHLGIEKGDRVTIYLPMIPDAVVAILACARIGAIHSVVFGGFAANSIADRVNDCGSKLIITADEGLRGGRKIPLKANVDAALKIHGTQSVETVLVVRHTGGTINMHTPRDRWFHDLVDIQATECAPERMNAEDPLFILYTSGSTGKPKGVLHTTGGYLVYTSYTHETVFDLRENDIYWCTADIGWITGHSYIVYGPLANGATVLLFEGTPHYPTVSRFWEVIDKHHVTLFYTAPTAIRALMREGDTPVKKTSRKSLRLLGSVGEPINPEAWHWYYTIVGNGRCPIVDTWWQTETGGILITPLIGATDLKPGSVTLPFFGIRPALVDTNGQTLDGPAAGNLVLLDSWPGQMRTLYGDHQRFIDTYFRTYPNTYFTGDGCRRDADGYYWITGRVDDVINISGHRIGTAEIESTLVAHPKVAEAAVVGFPHPIKGQGIYAYVTLITGETPSEALHQELLTWVRKEIGAIAIPDHVQWAPNLPKTRSGKIMRRILRKIAENAPDQLGDTSTLADPSIVDLLLNERLKH

SEQ ID NO: 122084 - DNA, 1956 bp, Sulfitobacter sp. EE-36
  CDS (1)..(1956): transl_table=11
atgtccaacgtcgccacacagacctatccgccatccgacgacatggcggccaatgcccatgtgaacgccgcaaaatacgatgcgatgtatcatgcctctatcgcggaccccgaagggttctggctggagcaggcgcagcgcatcgactggatgaagccatttaccaaggtcaaggacgtcgatttcactttcggtcaggtcaagatcaactggtttgccgacggtgcgctgaacgtcagcgccaattgcatcgaccgtcatcttgaaacgcgcggcgaccagaccgcgatcatctgggagccggacagcccggacgaagaggcgcagcacatcagctatcgcgccctgcatgcccagacttgtaaaatggccaatatcctgcgcgatatcggcgtcggcaaaggcgaccgggttatcatctacatgccgatgatccccgaagccgcctatgccatgctggcctgcgcgcgcatcggtgcgatccattcgatcgtcttcgccggcttctctccggatgcgctggcggcacgggttcaggggtcggacgccaaggttgtgattaccgcagattatgcgccccgcggaggcaaagcgacgccgctgaaggccaacgcagacaaggctttggcaggctgcgacccattggtcaaatgtctggtggtgcggcgcactggcggtgatgtggcgtggaatgatgcgcgcgacgtggattataccgcgcttgaaaaagaggcttctgacacttgcgcgccggaagagatgaacgccgaggatccgctgttcatcctatatacctctggctcgaccggtcagcccaaaggggtcgtgcatacgacgggtggctatctggtctatgccgcgctgacccacgaggtcacgtttgattaccacgatggcgatgtctattggtgcacggccgatgtgggttgggtgacgggccacagctatatcgtctacggtccgcttgccaacggggcgacgacgctcatgttcgaaggcgtgcccacctaccccgacgccagtcgcttttggcagatatgtgaaaaacacaaggtaaatcagttctacaccgccccgaccgccattcgcgcgctgatgggcaaagggcgggcctttgttgacggttgcgatctgagcagcctgaaactgcttggcaccgtgggcgagccgatcaaccccgaagcctggaactggtacaatgacgttgtgggcaaagggaactgccccatcgtggacacatggtggcagacggaaaccggcggtcacctgatgacgccgctgcccggtgcccacgccaccaaacccggcgccgcgatgaagcccttctttgggatcaaaccggtcgtacttgaacccaccaccggtgccgagatcgagggcaatgacgtcgagggggttctatgtatcgctgacagttggccaggccagatgcgcacggtctggggcgatcacgagcggttcgagcagacctatttcagcgactacaagggctattacttcaccggggacgggtgccgccgggacgcggatggcgattattggatcacggggcgcgtggatgacgtgatcaacgtctccggtcaccggatgggcacggccgaagtcgaaagcgctttggtcgcccaccctaaggtggcagaggctgcggtcgtcgggtttccccatgatatcaagggacagggcatctattgctatgtctctttgatgagcggtgaaagcccgagcgaggacctgcgggccgagctacgcaactgggtccgctcggagattggtccgatcgcctcgcccgatatgatccaatgggcccccggcttgcccaaaacccgttcaggcaagatcatgcgccgcatcctgcgcaagatcgcagagaacgactatagcacgcttggtgatacatctaccctggcagagcccgaggttgtcgacgatctgatcgcgaaccggatgaaccgctga

SEQ ID NO: 122085 - protein, 651 aa, Sulfitobacter sp. EE-36
MSNVATQTYPPSDDMAANAHVNAAKYDAMYHASIADPEGFWLEQAQRIDWMKPFTKVKDVDFTFGQVKINWFADGALNVSANCIDRHLETRGDQTAIIWEPDSPDEEAQHISYRALHAQTCKMANILRDIGVGKGDRVIIYMPMIPEAAYAMLACARIGAIHSIVFAGFSPDALAARVQGSDAKVVITADYAPRGGKATPLKANADKALAGCDPLVKCLVVRRTGGDVAWNDARDVDYTALEKEASDTCAPEEMNAEDPLFILYTSGSTGQPKGVVHTTGGYLVYAALTHEVTFDYHDGDVYWCTADVGWVTGHSYIVYGPLANGATTLMFEGVPTYPDASRFWQICEKHKVNQFYTAPTAIRALMGKGRAFVDGCDLSSLKLLGTVGEPINPEAWNWYNDVVGKGNCPIVDTWWQTETGGHLMTPLPGAHATKPGAAMKPFFGIKPVVLEPTTGAEIEGNDVEGVLCIADSWPGQMRTVWGDHERFEQTYFSDYKGYYFTGDGCRRDADGDYWITGRVDDVINVSGHRMGTAEVESALVAHPKVAEAAVVGFPHDIKGQGIYCYVSLMSGESPSEDLRAELRNWVRSEIGPIASPDMIQWAPGLPKTRSGKIMRRILRKIAENDYSTLGDTSTLAEPEVVDDLIANRMNR

SEQ ID NO: 122086 - DNA, 1950 bp, Roseovarius nubinhibens ISM
  CDS (1)..(1950): transl_table=11
atgtccgacaccattcacccgccatccgccgaattcgcggaaaatgcccatatcgacgccgcgagataccgggcgctctatgacgcctcgctgcgcgatccagaggcattctggcaggaacacggacagcgtatcgactggatcaaacccttcaccaaggtgaaggacgtcaatttcgatctcggcaatgtctcgatcaaatggttcgaggatggcacgctcaacgttgccgccaattgtatcgaccgccatctcgccagccgcggcgatcagaccgcgatcatctgggaacccgacagcccggatgaagaggcgctgcatatctcctaccgtgaactccacgcgcgcacctgcaaaatggccaatgcgctcaaggagttgggcgtcacccgtggcgaccgtgtggtgctctatatgccgatgatccccgaagccgcctatgcgatgctcgcctgtgcgcggatcggggccattcattcggtggtcttcggcgggttttcctccgacgcgctcgcggcgcgggtcaacggatcggaggccaaggtcgtggtcaccgccgacgaagccccgcgcggcggccgcaacacgccgctcaagaccaatgccgacaaggcgctcgacggggtttcgcatgactgcaagctgctcgtggtacagcgcaccggcggcgacattccgatgcaagagggccgcgaccactggctgcatgatctcgaggccaaggtggccgacgactgcccgcccgaggaaatgaacgccgaggacccgcttttcatcctctacacctccggctcgaccggcgcgcccaagggtgtggtgcatacctccggcggctatctcacctgggcgtcgatgacccatgagctggtgttcgattaccacgatggcgacatctactggtgcacggcggatgtcggctgggtcaccggtcacagctatatcgtctatggcccgctggccaatggcgcgacgacgctgatgttcgaaggcgtgccgacctacccggatgcctcgcgcttctggcaggtctgcgaaaagcacaaggtcaaccagttctacaccgcccccaccgcgatccgcgccctgatgggcaaggggcgagagttcgtcgacagatgcgatctctcgtcgctcaagctcttgggcacggtgggcgagccgatcaaccccgaggcctggaactggtataatgatgtggtgggccaaggccgctgccccatcgtcgacacttggtggcagaccgaaaccggcggtcacctgatgacccccctgcccggcgccaccgccaccaaaccggggtcctgcaccacgcccttcttcggggtcgaaccggtcgtgctcgacgcgcaatcgggcgaggaaatcaccagcaccgaggccgagggcgtgctctgcatcaagtcgagctggccgggtcagatgcgcagtgtctggggcgatcacgagcggtttgagaagacctacttctctgattacaaaggctattacttcaccggcgatggctgccgccgcgacaaggatggctattactggatcaccggccgggtcgatgacgtgatcaacgtctcgggccaccgcatgggcaccgccgaggtcgagagcgcgctcgtggcccatcccaaggtctcggaggcggcggtcgtcggctatccgcatgacgtcaagggacagggcatctattgctatgtcacgctgatggcgggcgaggaatataccgacgatctgcgcaaggagctgcgcgactgggtgcgcaaggaaatcgggcccatcgcgtcgccggatctcatccaatgggcgccgggcctgcccaagacccgctcgggcaagatcatgcgccgcattctgcgcaagatcgccgaggatgatttcggcagtcttggcgacacctcgaccctggccgagcccgccgtggtcgacgatctcatcgaaaaccggatgaatcgcagctaa

SEQ ID NO: 122087 - protein, 649 aa, Roseovarius nubinhibens ISM
MSDTIHPPSAEFAENAHIDAARYRALYDASLRDPEAFWQEHGQRIDWIKPFTKVKDVNFDLGNVSIKWFEDGTLNVAANCIDRHLASRGDQTAIIWEPDSPDEEALHISYRELHARTCKMANALKELGVTRGDRVVLYMPMIPEAAYAMLACARIGAIHSVVFGGFSSDALAARVNGSEAKVVVTADEAPRGGRNTPLKTNADKALDGVSHDCKLLVVQRTGGDIPMQEGRDHWLHDLEAKVADDCPPEEMNAEDPLFILYTSGSTGAPKGVVHTSGGYLTWASMTHELVFDYHDGDIYWCTADVGWVTGHSYIVYGPLANGATTLMFEGVPTYPDASRFWQVCEKHKVNQFYTAPTAIRALMGKGREFVDRCDLSSLKLLGTVGEPINPEAWNWYNDVVGQGRCPIVDTWWQTETGGHLMTPLPGATATKPGSCTTPFFGVEPVVLDAQSGEEITSTEAEGVLCIKSSWPGQMRSVWGDHERFEKTYFSDYKGYYFTGDGCRRDKDGYYWITGRVDDVINVSGHRMGTAEVESALVAHPKVSEAAVVGYPHDVKGQGIYCYVTLMAGEEYTDDLRKELRDWVRKEIGPIASPDLIQWAPGLPKTRSGKIMRRILRKIAEDDFGSLGDTSTLAEPAVVDDLIENRMNRS

SEQ ID NO: 122088 - DNA, 1950 bp, Oceanicola batsensis HTCC2597
  CDS (1)..(1950): transl_table=11
atgaccgatcagacctacccgccctcggccgaactcgtgaagaacgcccatgtcgacatcgccgggtacgagaagatgtacaaggcctcgatcagcgaccccgagacgttctgggccgaagaggcccgcaagcgcctcgactggatcgagcccttctcgacggtcaagaacaccgacttcaccctcggcaacgtctcgatcaaatggttcgaggacggcgtcctgaacgtcgcgcacaactgcatcgaccgccatctcgacacccggggcgaccagaccgccatcatcttcgaaccggacgagccgggcgacgaggcgcagcacatcacctacaaccagctgcacgaaaaggtctgccgttttgccaacgtgctgctggcccagggcgtgatgcgcggcgaccgcgtcgtgatctacctgccgatgatccccgaggccgcctatgccatgctggcctgcgcccgcatcggcgcgatccattcggtcgtcttcgcgggcttcagccccgacgcgctggccaaccggatcaacgactgcgaggccaaggtcgtcatcaccgccgataccgccccgcggggcggcaagcggaccgcactgaagtcgaacaccgatgccgcgctcctgcattgttcggacaaggtgcgctgcctcgtcgtcaagcataccggcgaccagaccacctggatcgaaggccgcgacgtcgacgtgaaggcgatgatggaggacgtggctccggactgccccgcccggccgatgaacgccgaggatccgctcttcatcctctacacctccggctcgaccggcaaacccaagggcgtggtccattcctcgggcggatacctgctctacgccggaatgacgcagcagctgaccttcgactaccatgacggcgatgtcttctggtgcggcgcggacgtgggctgggtcaccgggcacacatacatcctctacggccccctggtgaacggcgcgacgacgctgatgttcgagggcgtgccgacctatcccgacgcctcccgcttctggcaggtgatcgagaaacacggcgtcaaccagttctacaccgcgccgaccgcgatccgcgccctgatgggggccggcgacacattcgtcgacggcttcgagatgccctcgctgaaggtgctgggcaccgtcggcgaaccgatcaaccccgaggcatggaactggtacaacgacaagatcggcaagggccgactgccgatcgtcgatacctggtggcagaccgaaaccggcggccacatgatcacccccctgcccggggccacgccgaccaagcccggctcggccaccctgcccttcttcggcgtccaacccgtcgtgctggaaccgaccagcggcgaggaaatcgaggaaaccaagtgcgagggggttctggccatcaaggacagctggccgggacagatgcgcaccgtctggggcgatcatgaacggttcgagaagacctatttctccgactacaagggctattacttcgccggcgacggctgccgccgggacgaggacggctattactggatcaccggccgggtcgacgacgtcatcaacgtctcgggccaccggatgggcacggccgaggtggaatccgcccttgtcgcgcattccaaggtcgccgaggccgcggtggtcggctatccccacgacgtgaagggccagggcatctactgctacgtcaccttgatgaacagcgaagagccctcggacgagttgaagaaggaactgcgggactgggtccgcaccgagatcggccccatcgcctcgccggacctgatccagtgggccccgggcctgcccaagacgcgctcgggcaagatcatgcgccggatcctgcgcaagatcgccgagaacgactatggcgcgcttggcgacacctcgacgctggccgacccctcggtggtcgacgacctgatcgagaaccgcatgaaccgctga

SEQ ID NO: 122089 - protein, 649 aa, Oceanicola batsensis HTCC2597
MTDQTYPPSAELVKNAHVDIAGYEKMYKASISDPETFWAEEARKRLDWIEPFSTVKNTDFTLGNVSIKWFEDGVLNVAHNCIDRHLDTRGDQTAIIFEPDEPGDEAQHITYNQLHEKVCRFANVLLAQGVMRGDRVVIYLPMIPEAAYAMLACARIGAIHSVVFAGFSPDALANRINDCEAKVVITADTAPRGGKRTALKSNTDAALLHCSDKVRCLVVKHTGDQTTWIEGRDVDVKAMMEDVAPDCPARPMNAEDPLFILYTSGSTGKPKGVVHSSGGYLLYAGMTQQLTFDYHDGDVFWCGADVGWVTGHTYILYGPLVNGATTLMFEGVPTYPDASRFWQVIEKHGVNQFYTAPTAIRALMGAGDTFVDGFEMPSLKVLGTVGEPINPEAWNWYNDKIGKGRLPIVDTWWQTETGGHMITPLPGATPTKPGSATLPFFGVQPVVLEPTSGEEIEETKCEGVLAIKDSWPGQMRTVWGDHERFEKTYFSDYKGYYFAGDGCRRDEDGYYWITGRVDDVINVSGHRMGTAEVESALVAHSKVAEAAVVGYPHDVKGQGIYCYVTLMNSEEPSDELKKELRDWVRTEIGPIASPDLIQWAPGLPKTRSGKIMRRILRKIAENDYGALGDTSTLADPSVVDDLIENRMNR

SEQ ID NO: 122090 - DNA, 1977 bp, Prochlorococcus marinus str. MIT 9211
  CDS (1)..(1977): transl_table=11
atgtcttccgatccgtccgaatcaattgagtcggtccttaatgaagagagagtatttgacccatcacctgacgttgcagatgaggcaagaataagcagtttgtctcagtacaagatgatggtagatcaagctagagaagaccctgaaaaattttggggggaagctgctcgtaaggagttgcattggttcgaaccatttaatcaagtccttgattggtctaatccaccttttgcaaaatggttttctggtggcaaaacaaatatttcttttaattgcttagatcgtcagattcagaatggtaatggagataaagaagcgattatttgggagggagagcctggagaaataagacgctttacttataaacaactacatcaagaggtttgtcgagccgcaaatgcattaaaagatcttggtttagggaaaggagacttggttgctctttatatgccaatggttcctgaagcggctatcgctatgttggcttgtgctcgtattggagcacctcactcagttgtttttggtggattttcttctgaagcattacgtgatcgcttgattgatggtgaagctaaagctgtcattacagcagatgggggatacagaaaagacaaggttatcgagcttaaatctgctgttgatttggccttagctaataacgcatgcccaagtgttaaatctgttttagtcgttcaacgtacgaatgaatcaatagacatgcaaacgggaagagatcattggtggcatgatcttgtaccttcccaaagcgatttttgctctgcggaacatatggatagtgaagataggctttttgttttatatacatcaggatcaacgggaaaacctaaaggagttgttcataccacagctggctataacttatgggctcaccttacttttcaatggatctttgatatacgagatgatgatatttattggtgtacagcagacgttggttggataacaggccatagctatatcgtttatggaccactttccaatggggctacaagtgttatgtatgagggtgttccacgtccttcaaatcctggagcattttgggaagtaatagaaaaacataaggtttcgatcttttatacagctccaactgctattagagcatttatgaagaatgggcgttctcttcctgataagtacaatatgaatagtttgaggttgttaggaactgtaggcgaacctattaaccctgaagcttggatgtggtatcgcgaagttattggaggtaaccgttgcccggttatagatacttggtggcaaacggaaactggaggtgtaatgataagtcctttgcctggagccacccctacaaagccaggctcagcaacttttccattacctggtatcgaagcagatgttgttaatgcaaatggtgagactgttccaaccggagagggaggatatttagtaataagaaagccttggcctggaatgatgagaacagttcacggaaatgaaaaacgatttagagaaagttattgggaatatttaagacctaccggcggcaatctcatctactttgcaggcgatggagcgagaagggattcggatggatatttttgggtaatgggaagagttgatgatgtaataaatgtttctgggcataggcttggaactatggaaatagaatctgctttggttagtcacccagctgtttctgaagctgctgttgttggaaggccggatgatcttaagggggagtccgttgtggcttttgttactcttgagggtacttcttctgcaagtgaccatctcattaatgacttgcggaatcatgtaggcaatgaaattggagctatagctaaacctgatgaaattcgttttagtgacgccttaccaaagactagaagcggtaaaattatgagacgaatacttagatctttagcagcaggcaatgacattagtggtgatactagtactcttgaagaccgaagtgttctagataaattaaggaactaa

SEQ ID NO: 122091 - protein, 658 aa, Prochlorococcus marinus str. MIT 9211
MSSDPSESIESVLNEERVFDPSPDVADEARISSLSQYKMMVDQAREDPEKFWGEAARKELHWFEPFNQVLDWSNPPFAKWFSGGKTNISFNCLDRQIQNGNGDKEAIIWEGEPGEIRRFTYKQLHQEVCRAANALKDLGLGKGDLVALYMPMVPEAAIAMLACARIGAPHSVVFGGFSSEALRDRLIDGEAKAVITADGGYRKDKVIELKSAVDLALANNACPSVKSVLVVQRTNESIDMQTGRDHWWHDLVPSQSDFCSAEHMDSEDRLFVLYTSGSTGKPKGVVHTTAGYNLWAHLTFQWIFDIRDDDIYWCTADVGWITGHSYIVYGPLSNGATSVMYEGVPRPSNPGAFWEVIEKHKVSIFYTAPTAIRAFMKNGRSLPDKYNMNSLRLLGTVGEPINPEAWMWYREVIGGNRCPVIDTWWQTETGGVMISPLPGATPTKPGSATFPLPGIEADVVNANGETVPTGEGGYLVIRKPWPGMMRTVHGNEKRFRESYWEYLRPTGGNLIYFAGDGARRDSDGYFWVMGRVDDVINVSGHRLGTMEIESALVSHPAVSEAAVVGRPDDLKGESVVAFVTLEGTSSASDHLINDLRNHVGNEIGAIAKPDEIRFSDALPKTRSGKIMRRILRSLAAGNDISGDTSTLEDRSVLDKLRN

SEQ ID NO: 122092 - DNA, 1977 bp, Synechococcus sp. RS9917
  CDS (1)..(1977): transl_table=11
atggcttccgatccctccaccacgatcgaatcggtactgcatgagcagcgggtgttcgagccaccggcggcgctggcggctggggcccggatcgacagcctggagtcgtatcgcaccatggccgaggcagccttggcggatcccgatcgcttctggggtgaggcagcccggcgggaactgcattggttcgagccctttcacaccgtgctcgattggcgggatcctccctttgcccgctggttcgaaggcggcaccaccaacctcgcttacaactgcctggatcgccatctggaggggcctacagcggagaaaacggccctgatctgggagggcgaaccgggtgatgtgcgtcgtttcagctaccgggagctccatgccgaggtgtgcaaggccgccaatgccctgaaggccatgggcatcggcaagggggatctggtggcgctctatatgccgatggtgccggaggcggcgatcgcgatgctggcctgcgcccgcatcggcgccccccattcggtggtgttcggcggcttttcggccgaggccctgcgcgatcgtctcattgatggggaggcgaaggcggtgatcaccgccgatggcgggttccgcaaggacaagccggtgtcgctgaagcctgccgtcgatgcggccctcgacgacggcgcctgccccagcgtcacgtcagttctggtggtgcgccgcaccgagcaaccggtggcgatggtggagggtcgcgatcgctggtggcacgagctggtggagggccagagccccgagtgcccggcggagccgatggccagcgaagatcgcctctttgtgctctacacctccggttccaccggcaaacccaagggtgtggtgcacaccaccgccggttacaacctctgggcccatctcaccttccagtggatcttcgacatcaaggacgacgacatctactggtgcaccgccgatgtgggctggatcaccggccacagctacatcgtttacggcccgctctccaacggggccaccaccgtgatgtatgagggggcgccccggccgagcaagcccggtgccttctgggagctgatccagaagcacggcgtcacgatcttctacacggcccccacggcgatccgcgccttcatgaagagcggtcgcgccgtgcccgatcaatacgacatgagcagcctgcgtctgctcggcacggtcggtgagccgatcaaccccgaggcctggatgtggtaccgcgaggtgatcggtggcaaccgctgcccgatcgtggacacctggtggcagaccgaaaccggtggcgtgatgatcagcccgctgccgggcgccacccccaccaagcccggttccgccaccctgccattgccggggatcgctgccgatgtggtggatgctgagggccgcagtgtcggcgccgatgaaggcggctacctggtggtgcgtcgcccctggcccgggatgatgcgcactgtgcacggcaacccccagcgcttccgcgagagctactgggagcacatccgccccgccgatggctcctgcatttacttcgccggtgatggcgcccgccgcgatgccgatggttatttctgggtgatgggacgggtcgatgacgtgatcaatgtctccggtcaccgtctcggcaccatggagatcgagtcagcgctcgtcagccaccccgccgttgctgaagcggcggtggtcgggcgtcccgatccgctcaagggggagggcatcgtcgccttcgtcaccctggaggccgatcgcgaccccagcgaggccttggtggctgagttgcgtgcccatgtgggccaggagatcggtccgatcgccaagcccgatgagatccgctgcagcgatgccctgcccaagacccgcagtggcaagatcatgcggcgcatccttcgctcgcttgcggcaggtcaggaggtgagcggtgacacaagcaccctggaggatcgctccgtgctggatcggctgcgggcctga

SEQ ID NO: 122093 - protein, 658 aa, Synechococcus sp. RS9917
MASDPSTTIESVLHEQRVFEPPAALAAGARIDSLESYRTMAEAALADPDRFWGEAARRELHWFEPFHTVLDWRDPPFARWFEGGTTNLAYNCLDRHLEGPTAEKTALIWEGEPGDVRRFSYRELHAEVCKAANALKAMGIGKGDLVALYMPMVPEAAIAMLACARIGAPHSVVFGGFSAEALRDRLIDGEAKAVITADGGFRKDKPVSLKPAVDAALDDGACPSVTSVLVVRRTEQPVAMVEGRDRWWHELVEGQSPECPAEPMASEDRLFVLYTSGSTGKPKGVVHTTAGYNLWAHLTFQWIFDIKDDDIYWCTADVGWITGHSYIVYGPLSNGATTVMYEGAPRPSKPGAFWELIQKHGVTIFYTAPTAIRAFMKSGRAVPDQYDMSSLRLLGTVGEPINPEAWMWYREVIGGNRCPIVDTWWQTETGGVMISPLPGATPTKPGSATLPLPGIAADVVDAEGRSVGADEGGYLVVRRPWPGMMRTVHGNPQRFRESYWEHIRPADGSCIYFAGDGARRDADGYFWVMGRVDDVINVSGHRLGTMEIESALVSHPAVAEAAVVGRPDPLKGEGIVAFVTLEADRDPSEALVAELRAHVGQEIGPIAKPDEIRCSDALPKTRSGKIMRRILRSLAAGQEVSGDTSTLEDRSVLDRLRA

SEQ ID NO: 122094 - DNA, 1971 bp, Synechococcus sp. WH 7805
  CDS (1)..(1971): transl_table=11
atgagcgaaggttccacgatcgaaagcgtgctcaaggaacagcgcgtttttgctccgcccattgagctcactcagtcagcacggattggtggcatggatgcctatcaagccatggccgatgcagccaggaacgatccggaaacgttctggggcaatgcggctcgccaggaacttgattggtttacaccgtttgagcaggtgctcgactggaccaaccctcccttcgctcgctggttccagggaggcaccaccaacctctcccacaattgtcttgaccggcatcttcacggtgaaacggccgacaagacggctctgatctgggaaggggaacccggcgatgtccgccgtttcacttacagagaactgcatgccgaggtgtgcaaggcagccaatgcgctgaagtccatgggcattggcaagggggatctggtggccctctacatgccgatggttccggaagcggccatcgccatgctggcctgcgcccgagtcggtgctccccattcagtggtgttcggaggcttctctgcagaagcgcttcgggaccggttgatcgatggtgaggccaaagctgtgattaccgccgacggtggctttcgcaaggacaagcccgtttctctgaaacctgccgttgatgctgctctcgctgatggtgcctgtccatcggtgacctccgtgctggtggtgcagcgcaccgagcagccggtggacatggtgcagggccgtgatcagtggtggcatgagctggtggatggtcagtccagcgactgcccggctgagcccatggagagtgaagaccggctcttcgtgctttacacctctggatccaccggcaaacccaaaggtgtggtgcacaccacggcgggttacaacctctgggctcatctcacgtttcagtggatctttgatctccgtgatgacgacgtgttctggtgcacagcggatgtgggctggatcaccggtcacagctacatcgtgtatggcccgctgtcgaatggggccaccacggtgatgtatgagggagcgccacgaccttccaacccgggagctttctgggagttgatccagaagcacagggtgacgattttctacaccgctcccaccgcgatccgggccttcatgaagaacggtcggaccgtgcctgaccagttcgatatgagtagcttgcgactgctcggaaccgttggcgaacccatcaatcccgaagcctggatctggtatcaagatgtgattggtggtggtcgctgcccgatcatcgacacctggtggcagaccgaaacaggcggcgtgatgatcagcccgctccctggggccacacccaccaagccgggttcagccaccctgccgctgcccgggatcgaggccgatgtggtggacgccgatggcaacagtgtgggggccaatgaagggggatatctggtcgtgcgtcgtccctggccggggatgatgcgaacggtgcatggcaatccggagcgcttccgccagagctattgggagtacatccgtcctgaggatggcagctacatctacttcgccggtgatggtgctcgacgggatgcggatggttacttctgggtgatgggacgcgtggacgatgtcatcaacgtgtctggccatcgccttggcaccatggaaatcgaatcagccctggttagtcaccctgcggtggcggaggccgctgtggtcggtcgtcctgatgagctgaaaggcgagggcatcgtggcgttcgtcacccttgaggccgatcgcgaatccaatgacgccctgatcgctgagttgcgggctcatgtgggcaccgaaatcggtccgatcgctcgccctgatgaaatccgctgcagcgatgcccttcctaaaacgcgcagcggcaagatcatgcgccggattctcagggcactggctgccggagaggatgtgacaggtgacaccagcaccctggaagatcgctccgtgctggatcgtttgcgggcctga

SEQ ID NO: 122095 - protein, 656 aa, Synechococcus sp. WH 7805
MSEGSTIESVLKEQRVFAPPIELTQSARIGGMDAYQAMADAARNDPETFWGNAARQELDWFTPFEQVLDWTNPPFARWFQGGTTNLSHNCLDRHLHGETADKTALIWEGEPGDVRRFTYRELHAEVCKAANALKSMGIGKGDLVALYMPMVPEAAIAMLACARVGAPHSVVFGGFSAEALRDRLIDGEAKAVITADGGFRKDKPVSLKPAVDAALADGACPSVTSVLVVQRTEQPVDMVQGRDQWWHELVDGQSSDCPAEPMESEDRLFVLYTSGSTGKPKGVVHTTAGYNLWAHLTFQWIFDLRDDDVFWCTADVGWITGHSYIVYGPLSNGATTVMYEGAPRPSNPGAFWELIQKHRVTIFYTAPTAIRAFMKNGRTVPDQFDMSSLRLLGTVGEPINPEAWIWYQDVIGGGRCPIIDTWWQTETGGVMISPLPGATPTKPGSATLPLPGIEADVVDADGNSVGANEGGYLVVRRPWPGMMRTVHGNPERFRQSYWEYIRPEDGSYIYFAGDGARRDADGYFWVMGRVDDVINVSGHRLGTMEIESALVSHPAVAEAAVVGRPDELKGEGIVAFVTLEADRESNDALIAELRAHVGTEIGPIARPDEIRCSDALPKTRSGKIMRRILRALAAGEDVTGDTSTLEDRSVLDRLRA

SEQ ID NO: 122096 - DNA, 1941 bp, Pseudoalteromonas tunicata D2
  CDS (1)..(1941): transl_table=11
atgtcacaaagtgtttatccagtaccagagtcagttaaagcaaatgcattaattgatgaagcgaaatatcaagaactttaccaatggtctattgatgatcccgcagcgttttggcaagagcaaggcaaacgtttagattggatcactcctttttctaaagtaaaaaatacttcttttgatactggtcatgttgatattcgttggtatgaagatggccaattaaatgtttcctataactgtattgatcgccatttaaaagataaggcagataaagtcgctcttatttgggaaggtgataatccagagcacgtcgcccatattacttatcaagaattacacgatgaagtctgtaaactggccaatggtctgaaaaaattaggcgttaaaaaaggtgatcgcgtagcgatttatatgccgatgaccccgcaagctgtgtatgcaatgcaagcctgtgcacgtattggtgcaattcattctgttgtttttggtggtttctcaccttcagcaattgccgatcgtattcgcgattcaggtgcaaaagtggtgattacttctgatcaaggtcgtcgtggtggcaatgctgtgccacttaaagcgaatgtagatgaagcggtatcacaagctacggtgaccagtgttgaacacgttattgtgcatcagcttaccggtggcgaagttgaatggtttgagcatgatatctattggcatgatttagtggcagaccaagccacaagctgtgagccagaagtgatggatgcagaagacccattatttatcttatatacctcaggttcaacaggccaaccaaaaggggttgttcataccaccgctggttatttagtgtatacctcgttaactcatgaatatgtttttgatttaaaagataatgatgtttattggtgtagtgccgatgtgggttgggttacaggccatagttacattgtgtatggcccacttgctaacggttgtactcaattattatttgaaggtgtgccaacttatccaaccgcggggcgaatgggtgagattgttgataagcaccaagtcactattttatacacagcaccaaccgcaatacgtgcattgatggccaaaggggatgagccaactgcaagctcaacacgtactagtttacgtattttaggttctgtgggtgagccaatcaatcctgaagcgtggacttggtatcacgataaaattggtaatggtcaatgcccaatcgtcgatacttggtggcaaacagaaactggcggcatgatgatcacgccattgcctggtgcaactgcgatgaaacccggctctgctacacgtccattttttggcatcgtaccggcgttattcgacgctgaaggtaatacattatcaggcgctacagaaggcaaccttgttattttagatagctggcctgcgcaagcgcgaactgtttatggcgatcacgaacgttttgagcaaacgtatttttctgcatatccaggtgtttatttcacaggtgatggttgtcgtcgtgatgaagatgattattactggatcactggtcgtgttgatgatgtattaaacgtatcaggccaccgcttaggcactgcagagattgaaagtgcactagtagcacatcctgcggttgcagaagcggctgtcgtaggttatccgcacgatattaaaggtcagggtatctatgtttacattacgcctaacgatggcgtacaagtcactgaagagctaacgaaagaagtgcgtaactgggttcgtaaagagctgagcccaattgcatcacctgacatgatccaatggtcaccagggttgccaaaaacacgttcaggtaaaatcatgcgccgtattcttcgtaagattgctgcaaatgaataccaacaattaggcgatacttctacacttgcagatccgagtgtggttgaagagctgattgagaatcgcctcaatcgctaa

SEQ ID NO: 122097 - protein, 646 aa, Pseudoalteromonas tunicata D2
MSQSVYPVPESVKANALIDEAKYQELYQWSIDDPAAFWQEQGKRLDWITPFSKVKNTSFDTGHVDIRWYEDGQLNVSYNCIDRHLKDKADKVALIWEGDNPEHVAHITYQELHDEVCKLANGLKKLGVKKGDRVAIYMPMTPQAVYAMQACARIGAIHSVVFGGFSPSAIADRIRDSGAKVVITSDQGRRGGNAVPLKANVDEAVSQATVTSVEHVIVHQLTGGEVEWFEHDIYWHDLVADQATSCEPEVMDAEDPLFILYTSGSTGQPKGVVHTTAGYLVYTSLTHEYVFDLKDNDVYWCSADVGWVTGHSYIVYGPLANGCTQLLFEGVPTYPTAGRMGEIVDKHQVTILYTAPTAIRALMAKGDEPTASSTRTSLRILGSVGEPINPEAWTWYHDKIGNGQCPIVDTWWQTETGGMMITPLPGATAMKPGSATRPFFGIVPALFDAEGNTLSGATEGNLVILDSWPAQARTVYGDHERFEQTYFSAYPGVYFTGDGCRRDEDDYYWITGRVDDVLNVSGHRLGTAEIESALVAHPAVAEAAVVGYPHDIKGQGIYVYITPNDGVQVTEELTKEVRNWVRKELSPIASPDMIQWSPGLPKTRSGKIMRRILRKIAANEYQQLGDTSTLADPSVVEELIENRLNR

SEQ ID NO: 122098 - DNA, 1956 bp, Xanthobacter autotrophicus Py2
  CDS (1)..(1956): transl_table=11
atgtccgacaagatctactacgttccctccgaatgggcccaaaaggcctatgtggacgatgcgcattatcagtccatgtacgccgcctcggtgaacgacccccatgcattctggggcgagcacggcaagcgcatcgactggttcacgccctataccaaggtgaagaacacctcgtttgatcccggccacgtctccatcaagtggttcgaggacggcatcaccaacgtcgcctacaattgcgtggaccgtcaccttgagacccgcggcgaccaggtggccatcatctgggaaggcgacagcccggacgagagccgcaacatcacctatcgcgaactctccagcgaggtgaacaagctcgccaacgtgctgcgcaaccgcggcgtggagaagggcgaccgcgtcaccatctatctgccgatgatccccgaggcggccttcgcgatgctcgcctgcgcgcggctcggcgcgatccattccatcgtcttcggcggtttctcgccggacagcctggccggccgcgtggccgactgcggctccaagtgcatcatcaccgccgacgaaggcctgcgcggcggccgcaaggtgccgctgaaggccaacgtggacgcggccatcgcccagatcaacggcggcgtggaccatgtgatcgtggtgcgccgcaccggcggcaaggtggatatgctgccgggccgcgacgtctattacgacgaagccaccgccatggtcaccgacgagtgtccggccgagcatgtgaacgcggaagatccgctgttcatcctctacacctccggctccaccggcaagccgaagggcgtgctgcacaccaccggcggctatctcgtctatgcgtccatgacgcatcagtacatcttcgactaccaccccggcgacatctactggtgcaccgccgacgtgggctgggtgacgggccactcctacatcgtctatggcccgctcgcgaacggcgccaccacgctgatgttcgagggcatccccaactatcccagcgtgtcgcgcttctgggatgtgatcgacaagcacaaggtcaacatcttctacaccgcccccaccgccatccgctcgctgatgcaggcgggcgaggagccggtgaagcgcacctcgcgctcgtcgctgcgcctgctcggctcggtgggcgagcccatcaatccggaagcctgggagtggtactaccgcgtcgtcggcgaggagcgctgccccatcgtcgacacctggtggcagaccgagaccggcggcatcctcatcacccccctgcccggcgccaccaagctgaagcccggctccgccacccgccccttcttcggcgtgatgcccgaggtggtggacgcggaaggcaaggtgcttgagggcgcctgcgagggcaacctcgtgatcgccgacagctggccgggccagatgcgcacggtctatggcgaccatgagcgcttcgagcagacctacttctccacctatcccggcaagtacttcaccggcgacggctgccgccgcgacgcggacggcttctactggatcaccggccgcgtggacgacgtgatcaacgtgtccggccaccgcatgggcacggcggaggtggaaagcgccctcgtcgcccatcccaaggtgtcggaagccgccgtggtgggcttccctcacgacatcaagggccagggcatctacgcctatgtcaccctgatggacggcgaggagcccaccgaggaactgcgcaaggaactggtgggctgggtgcgccgcgagatcggccccatcgcctccccggacctgatccagttcgcgccgggcctgcccaagacccgctcgggcaagatcatgcgccgcatcctgcgcaagatcgccgaggaccagttcgagagcctgggcgacacctcgaccctcgccgatcccggcgtggtggaggacctcatccacaaccgccagaacaagcgcgacgcagccgcctga

SEQ ID NO: 122099 - protein, 651 aa, Xanthobacter autotrophicus Py2
MSDKIYYVPSEWAQKAYVDDAHYQSMYAASVNDPHAFWGEHGKRIDWFTPYTKVKNTSFDPGHVSIKWFEDGITNVAYNCVDRHLETRGDQVAIIWEGDSPDESRNITYRELSSEVNKLANVLRNRGVEKGDRVTIYLPMIPEAAFAMLACARLGAIHSIVFGGFSPDSLAGRVADCGSKCIITADEGLRGGRKVPLKANVDAAIAQINGGVDHVIVVRRTGGKVDMLPGRDVYYDEATAMVTDECPAEHVNAEDPLFILYTSGSTGKPKGVLHTTGGYLVYASMTHQYIFDYHPGDIYWCTADVGWVTGHSYIVYGPLANGATTLMFEGIPNYPSVSRFWDVIDKHKVNIFYTAPTAIRSLMQAGEEPVKRTSRSSLRLLGSVGEPINPEAWEWYYRVVGEERCPIVDTWWQTETGGILITPLPGATKLKPGSATRPFFGVMPEVVDAEGKVLEGACEGNLVIADSWPGQMRTVYGDHERFEQTYFSTYPGKYFTGDGCRRDADGFYWITGRVDDVINVSGHRMGTAEVESALVAHPKVSEAAVVGFPHDIKGQGIYAYVTLMDGEEPTEELRKELVGWVRREIGPIASPDLIQFAPGLPKTRSGKIMRRILRKIAEDQFESLGDTSTLADPGVVEDLIHNRQNKRDAAA

SEQ ID NO: 122100 - DNA, 1938 bp, marine gamma proteobacterium HTCC2207
  CDS (1)..(1938): transl_table=11
atgtcagattttccaacccatccagttcctcagcaatggtccgattcagcttggattgacgatgctacttatcaggctatgtatcgtcagtcggtggataatcctgatcagttttggggtgaccaagcggcgcaatttctgacttgggataaaccttggaaaacagtttgccgcagcgaaattgagcagggccaggcagcttggtttgagggtggtaagctcaacgtggcagttaactgtattgatcgacacttagttgatagagccgatcaaacagcgattatttgggagggtgatgagcccacagatgatgcccatattagttatgctcaactccatgagcaggtctctaaattaggtaacgtgctgcgtcagcgcggtgttaagaaaggcgatcgagtgtgtatttatatgccaatgattcccgaggcggcctatgcgatgctcgcctgtgcgaggattggtgctgtgcactcagtggtcttcggtggtttttcgccggatgcactaaaggaccgaattctcgattccgactgtcaggtggtgattactgccgatgagggtatgcgggcaggaaaacctattcctctgaaagccaacactgacaaagcgttggcaaactgccctgatgttcatacctgccttgttgtacgtcgcactggcggcagcatagattggcaggacagccgagatatctggtatcaagagtcgattgagtctgtcactcaagactgcgagccagaaataatggatgccgaagatccgctgtttattctctacacttcaggctcgaccggtaagccgaaaggcgttgtgcacacaaccggcggctacctgttgatggcggctatgacccacaaatacaccttcgattataaaaatggcgatgtcttttggtgcactgctgatgttggctgggttactggccacagttatattctctatggcccgctttgtaatggtgctatcacgctgatgtttgagggcgtaccgacttacccagatgcctcacgattctggcaggtcatcgacaagcatcaggtcaatcagttttatactgcaccgacggcgattaggtcgctgatggcctatggtgatagctttgtgagtaatacctcgcgcagctcactcaagttgcttggcaccgtaggagagcctatcaatcctgaggcctgggactggtatcaccgagtggtgggggagtcccgctgcccgatcgtggatacctggtggcaaaccgaaaccggtgcccatatgttgacgccactgccaggcgctacagcgctaaaaccgggctctgcaacacggccgttttttggtgtgcagccggtactgctagatgctgaaaatcgggaaatcgacggggcaggagagggtctgttgatgattaaagcgtcttggccaagccagatccgcactatttatggtgatcatcaacgctttgtcgagacctactttaagccctatgcgggttattattttactggtgacggtgcgcgacgggatttggatggttattactggattaccggtcgtgtcgatgatgtgctaaatatctcgggtcatcgcatgggaactgccgaggttgagagtgctttggtgctccatgaaaagatagcggaggccgcagtggtcggctatccccatgatatcaaagggcagggcatctactgttatgtcacgccaatgaatggcgttgagcccgatgaagcgcttctgttagagctgattgccctctgtgttaaagagattggtccaatcgctaaaccagacattattcagtgggcgccaggcctacctaaaacccgttcgggaaaaattatgcgccgcatactgcgtaaagtcgccgctaacgagctcgacagtctaggtgatacctctacgttggctgatcctgccgtggtcgatgagctgattgccagtcgaaaaaatacctga

SEQ ID NO: 122101 - protein, 645 aa, marine gamma proteobacterium HTCC2207
MSDFPTHPVPQQWSDSAWIDDATYQAMYRQSVDNPDQFWGDQAAQFLTWDKPWKTVCRSEIEQGQAAWFEGGKLNVAVNCIDRHLVDRADQTAIIWEGDEPTDDAHISYAQLHEQVSKLGNVLRQRGVKKGDRVCIYMPMIPEAAYAMLACARIGAVHSVVFGGFSPDALKDRILDSDCQVVITADEGMRAGKPIPLKANTDKALANCPDVHTCLVVRRTGGSIDWQDSRDIWYQESIESVTQDCEPEIMDAEDPLFILYTSGSTGKPKGVVHTTGGYLLMAAMTHKYTFDYKNGDVFWCTADVGWVTGHSYILYGPLCNGAITLMFEGVPTYPDASRFWQVIDKHQVNQFYTAPTAIRSLMAYGDSFVSNTSRSSLKLLGTVGEPINPEAWDWYHRVVGESRCPIVDTWWQTETGAHMLTPLPGATALKPGSATRPFFGVQPVLLDAENREIDGAGEGLLMIKASWPSQIRTIYGDHQRFVETYFKPYAGYYFTGDGARRDLDGYYWITGRVDDVLNISGHRMGTAEVESALVLHEKIAEAAVVGYPHDIKGQGIYCYVTPMNGVEPDEALLLELIALCVKEIGPIAKPDIIQWAPGLPKTRSGKIMRRILRKVAANELDSLGDTSTLADPAVVDELIASRKNT

SEQ ID NO: 122102 - DNA, 1983 bp, Synechococcus sp. RS9916
  CDS (1)..(1983): transl_table=11
atgaccggcgtgaccagcgagacttccacgatcgaatcggtgttgcacgaacagcgcgtgttcgagcctccggctgccctggctgccgacgccaagatcggcagccttcaggcttatcaggccttggcggatgcggctgccaaggatcccgatcagttctggggggaggccgccaagcgcgagctgcattggttccaaccgttcaacacggtgctcgactggagtgatgctccgttcgcgaagtggtttgacggtggcaaaaccaacctttcctacaactgcctcgatcgccatctcgagggtcctcgcgcagagaaaaccgcgctgatctgggaaggcgagcccggtgatgtgcgtcgcttcacctaccgggagcttcacgccgaggtgtgtcgggctgccaacgccttgaaagcgatgggcattggcaagggtgatctggtggccctctacatgccgatgatccctgaggcagccattgcgatgctcgcctgtgcccggatcggcgctccccactcggtggtgtttggaggcttttctgccgaagcgctgcgggatcgtctgatcgacggtgaggccaaagccgtcatcaccgctgatggcgggttccgcaaggacaagccggtgtcgttgaagccagctgtcgatgccgccctggctgaaggggcctgccccagtgttcagtctgtgcttgtggtgcagcgcaccaagcagccgacagagatggctgagggccgtgatgtgtggtggcatgacaccgtgcccgctcagtcggcggactgccctgcagaggccatggacagcgaagatcgcctgttcgtgctctacacctcaggctccacgggaaaacccaagggtgttgtgcacacaacagccgggtacaacctctgggcccatctcaccttccagtggatcttcgacatcaaagaggacgacgtctactggtgcaccgctgatgtgggctggatcaccggtcacagctacatcgtctacggcccactgtccaacggcgccacgtcggtgatgtacgagggcgcaccccgtccttccaagccgggggcgttctgggagttgatccagaagcacgggatcacgatcttctacacggcacctacagcgattcgtgccttcatgaagagcggtcgtgaggtgcctgatcagttcgatatgagcacccttcgcttgctgggcaccgtcggtgaaccgatcaaccccgaggcatggatgtggtaccgcgaggtgattggtggcaatcgctgtcccatcgtcgacacctggtggcagaccgagacgggtggcgtgatgatcagtcctcttcctggagcgacccccaccaagccaggatctgccaccctgcccttgcctgggattcaggctgatgtggtggatgccgaaggcaacagctgcaaggccgatgagggtggttacctcgtggtgcgccgtccctggccggggatgatgcgcactgtgcacggcaacccgcagcgtttccgggagagctactgggagcacatccgtcctgccgatggcagcactatctatttcgccggtgatggagcccgtcgcgatagtgacggctacgtctgggtgatggggcgtgtggatgacgtgatcaacgtgtccggtcaccgtctcggcaccatggaaattgagtcggccctagtcagccatccggctgtggctgaggctgccgtcgtgggccgccccgacgacctcaagggcgaaggcatcgtggccttcgtgacccttgaatccggacgggacgccaatgatgcgcttgtggctgaactgcgggcacacgtgggtcaggagatcggtccaattgcccgccccgatgaaatccgctgcagtgatgccctgcccaaaacccgcagcggcaagatcatgcgccggattctgcgggccctggctgctggtcaggaggtgagtggcgacaccagcaccctggaagatcgctcagttctcgacaagctgcgcgcctga

SEQ ID NO: 122103 - protein, 660 aa, Synechococcus sp. RS9916
MTGVTSETSTIESVLHEQRVFEPPAALAADAKIGSLQAYQALADAAAKDPDQFWGEAAKRELHWFQPFNTVLDWSDAPFAKWFDGGKTNLSYNCLDRHLEGPRAEKTALIWEGEPGDVRRFTYRELHAEVCRAANALKAMGIGKGDLVALYMPMIPEAAIAMLACARIGAPHSVVFGGFSAEALRDRLIDGEAKAVITADGGFRKDKPVSLKPAVDAALAEGACPSVQSVLVVQRTKQPTEMAEGRDVWWHDTVPAQSADCPAEAMDSEDRLFVLYTSGSTGKPKGVVHTTAGYNLWAHLTFQWIFDIKEDDVYWCTADVGWITGHSYIVYGPLSNGATSVMYEGAPRPSKPGAFWELIQKHGITIFYTAPTAIRAFMKSGREVPDQFDMSTLRLLGTVGEPINPEAWMWYREVIGGNRCPIVDTWWQTETGGVMISPLPGATPTKPGSATLPLPGIQADVVDAEGNSCKADEGGYLVVRRPWPGMMRTVHGNPQRFRESYWEHIRPADGSTIYFAGDGARRDSDGYVWVMGRVDDVINVSGHRLGTMEIESALVSHPAVAEAAVVGRPDDLKGEGIVAFVTLESGRDANDALVAELRAHVGQEIGPIARPDEIRCSDALPKTRSGKIMRRILRALAAGQEVSGDTSTLEDRSVLDKLRA

SEQ ID NO: 122104 - DNA, 1953 bp, Vibrio sp. Ex25
  CDS (1)..(1953): transl_table=11
atgagcgaagcccacgtttatccggtaaaagaaaatattaaaactcatacacacgcggataatgatacttacttagccatgtatcagcagtcggtaaccgatccagagggcttctggaacgagcacggcaaaatcgttgattggatcaaacctttcaccaaagtaaaaagcacttctttcgacactggccatgttgatattcgctggtttgaagatggcacactgaacgtctcggctaactgtattgaccgtcatctcgcagaacacggggacgacgtcgccatcatttgggaaggcgatgatccagccgacgacaaaacactcactttcaacgaactacacaaagaagtgtgtaagttctccaacgcattgaaagagcaaggcgtacgcaagggcgacgtggtgtgtctatacatgccaatggtgccagaagccgcagtggctatgctcgcttgtacccgtattggtgcggttcacaccgtagtatttggcggtttctcaccagaagcactctctggccgtatcatcgactctgacgcgaaagtcgtgatcaccgctgatgaaggcgtacgcggcgggcgtgccgttcctctgaaaaagaacgtggacgaagcactaactaacccagacgtaaaaaccatcaataaagtgttggtgcttaaacgcacaggtggtgatgtcgaatggcatgaacaccgtgatgtttggtggcacgaagcaacagctaacgtttctgacgtttgcccaccagaagagatgaaagccgaagatccgctcttcatcctttacacttcaggttcaacaggcaaacctaaaggtgtactacacacgaccggtggttacctcgtctacgcggcgatgacctttaaatatgtcttcgattatcaaccaggtgaaaccttctggtgtaccgcggatgtgggttggattaccggtcacacttacctaatctacggtccacttgcaaatggggcgaagaccatcttattcgaaggtgtaccaaactacccaagcacaagccgaatgagtgaagtggttgataaacaccaagtcaacattctatacaccgccccaaccgcgattcgtgcgctaatggcaaaaggtgatgaagcggttgcaggcacatctcgttcaagcctgcgcatcatgggctcagtgggcgaaccaatcaacccagaggcgtgggagtggtactacaaaacgattggtaacgagaactcacctatcgtcgatacttggtggcaaacggaaactggcggcatcttgattgcgccactaccaggggcaaccgatctaaaaccaggctctgcgactcgcccattcttcggcgtccagcctgctcttgtcgataatatgggcaacattcttgaagataccgttgctgaaggtaacttggttatccttgattcttggccaggccagatgcgcacggtttacggcgaccatgagcgctttgaacagacctacttctcaacctttaaggggatgtacttcaccagtgatggtgcgcgtcgtgacgaagacggctactactggatcacaggccgtgttgatgacgtactaaacgtgtcgggtcaccgtatgggtaccgctgaaattgaatcagcgctagtggcgcaccacaagattgcagaagcggcgattgttggtattccacatgacatcaaaggccaagctatctacgcttacattacattgaacgatggtgaattcccgtcagctgagctgcacaaagaagttaaagattgggtgcgtaaagagattggtccaatcgcgacaccagatgtactgcactggacggattccttaccgaagactcgctctggtaagataatgcgtcgaatcctgcgtaagattgcaacgggcgatacaagcaacctcggagacacgtcaacgcttgccgatccgagcgtggtagacaaactcatcgcagagaaagcagaattggcataa

SEQ ID NO: 122105 - protein, 650 aa, Vibrio sp. Ex25
MSEAHVYPVKENIKTHTHADNDTYLAMYQQSVTDPEGFWNEHGKIVDWIKPFTKVKSTSFDTGHVDIRWFEDGTLNVSANCIDRHLAEHGDDVAIIWEGDDPADDKTLTFNELHKEVCKFSNALKEQGVRKGDVVCLYMPMVPEAAVAMLACTRIGAVHTVVFGGFSPEALSGRIIDSDAKVVITADEGVRGGRAVPLKKNVDEALTNPDVKTINKVLVLKRTGGDVEWHEHRDVWWHEATANVSDVCPPEEMKAEDPLFILYTSGSTGKPKGVLHTTGGYLVYAAMTFKYVFDYQPGETFWCTADVGWITGHTYLIYGPLANGAKTILFEGVPNYPSTSRMSEVVDKHQVNILYTAPTAIRALMAKGDEAVAGTSRSSLRIMGSVGEPINPEAWEWYYKTIGNENSPIVDTWWQTETGGILIAPLPGATDLKPGSATRPFFGVQPALVDNMGNILEDTVAEGNLVILDSWPGQMRTVYGDHERFEQTYFSTFKGMYFTSDGARRDEDGYYWITGRVDDVLNVSGHRMGTAEIESALVAHHKIAEAAIVGIPHDIKGQAIYAYITLNDGEFPSAELHKEVKDWVRKEIGPIATPDVLHWTDSLPKTRSGKIMRRILRKIATGDTSNLGDTSTLADPSVVDKLIAEKAELA

SEQ ID NO: 122106 - DNA, 1938 bp, marine gamma proteobacterium HTCC2143
  CDS (1)..(1938): transl_table=11
atgagcaacacaacaacttacccggttcccgccgactatgccgctaaagctcatctcaatgaagaacaatacaaaacgatgtatcaggcgtcgatcaatgatcccgatgccttctgggcggaacaggccgcggagtttttaagctgggataaaccttggactaaggtacgggaatatgactttaccaaaggggaagcagcttggtttattgacggaaaactcaatattacctacaactgtattgatcgccacctagaaactcgagccaaccagacggcgatcatttgggagggagacagcccggacgaatgcactaacatcagctatcaacagctgcatagcgaggtctgtaaacttgctaatgctttaaaacagcgtggtataaagaaaggcgatcgtgtttgtatctatatgccgatgatcgttgaagcatcctatgcgatgctagcgtgcgctcgaattggtgctgtacattcggtggtattcggcggtttctcccccgacgcattaagagatcgaatcctgaactctgattgccagattgtcattaccgccgatgaaggactgagaggcggcaaaaagatcccgctaaaagctaacgttgacgccgctctgatagattgccctaacgtacatactgtcgttacggtaaaacgaaccggcagtgatattgactggactgaacagcgtgacgtctggtatcacgaagccattaacaacgcatctgatcaatgtccacccgagccgatggacagtgaagaccccctttttattctctacacgtctgggtctacaggaaaacccaaaggggttctgcacacaacagcaggctatttgttgcaagtagctatgaccttcaaatatacctttgattatcatgagggtgatattttttggtgtactgctgacgtcggctggattacaggccatagctattgtgtttatggcccattagctaatggcgcgaccactctgttatttgaaggtgtgccaacctaccccgacgcctctcgttgctggcaggtgtgcgacaaacaccaagtcactattttttataccgcacctacggctatccgagcactaatggcggtcggtgatgactatgtcacagccacctcacgaagctccatcaacttgctgggaaccgtcggtgaaccgataaatcctgaagcttgggagtggtactatcgggtagtgggtgaatcacgctgtcctattgtagatacctggtggcaaactgaaaccggtgcacatatgctaacgcccctccccggtgctaccccattgaagcctggatcagctacacggccttttttcggcgtggagcctgtattacttgataatgacggcaaaattattgacggcgccggcgaaggtaatctagcaatcaagtcttcatggcccagtcaaatacgcagtgtttacggcgatcatcagcgattgatagacacctatttcagcacctatcccggctattactttaccagtgatggtgcccgccgggacgaggacggttattactggataaccggccgggttgatgatgtattaaatgtttccggacaccgactggggaccgctgagattgaaagtgctcttgtccatcatgaagccgttgctgaagcggctgttgttggatatccgcacgatgttaaaggtgagggcatttatgcctacgttactttgatgagtggagagcagccttctaacgccctgaaagccgaacttattgctatgtgcaccaaagaaattggcccaatcgccaagcctgacctgattcaatgggccccgggcttaccgaaaactcgatctgggaaaattatgcgacgaattctaagaaaagttgccgccaatgaactagaaaatcttggcgatacatcaacactggcagatccatcagtggttgatcaactcattgagcaccgattaaatcagtag

SEQ ID NO: 122107 - protein, 645 aa, marine gamma proteobacterium HTCC2143
MSNTTTYPVPADYAAKAHLNEEQYKTMYQASINDPDAFWAEQAAEFLSWDKPWTKVREYDFTKGEAAWFIDGKLNITYNCIDRHLETRANQTAIIWEGDSPDECTNISYQQLHSEVCKLANALKQRGIKKGDRVCIYMPMIVEASYAMLACARIGAVHSVVFGGFSPDALRDRILNSDCQIVITADEGLRGGKKIPLKANVDAALIDCPNVHTVVTVKRTGSDIDWTEQRDVWYHEAINNASDQCPPEPMDSEDPLFILYTSGSTGKPKGVLHTTAGYLLQVAMTFKYTFDYHEGDIFWCTADVGWITGHSYCVYGPLANGATTLLFEGVPTYPDASRCWQVCDKHQVTIFYTAPTAIRALMAVGDDYVTATSRSSINLLGTVGEPINPEAWEWYYRVVGESRCPIVDTWWQTETGAHMLTPLPGATPLKPGSATRPFFGVEPVLLDNDGKIIDGAGEGNLAIKSSWPSQIRSVYGDHQRLIDTYFSTYPGYYFTSDGARRDEDGYYWITGRVDDVLNVSGHRLGTAEIESALVHHEAVAEAAVVGYPHDVKGEGIYAYVTLMSGEQPSNALKAELIAMCTKEIGPIAKPDLIQWAPGLPKTRSGKIMRRILRKVAANELENLGDTSTLADPSVVDQLIEHRLNQ

SEQ ID NO: 122108 - DNA, 2034 bp, marine gamma proteobacterium HTCC2080
  CDS (1)..(2034): transl_table=11
atgaactcggtcagcttcagcattgaacttaataatagtaagctggggcccatagtttatggttgtctgccacaagagcgatacagcatgtctgagaaccccctctaccccgtacctaccaatttttcccaggcgcatatcagccccgaaacctacgaacagtggtatctcgaatccctagacgatccctctgcattttgggcggctcgcgctaaagaattcctcgattgggagacaccctggactcaggttgtagacgcagatttaagctcaggaaaagcccaatggttcatcggtggcaaacttaatgtttcgattaactgcatcgataggcacctcccagaacgcgctcaacagacggcttttatatgggagggcgatgacccggacaccagcaggcatatcagttacggggaattaaaggacgctgtttgccgcctagctaatgtcctcaagtcacaaggcattgggcgcggcgaccgcgtctgcatatacatgcccatgattcccgaagcgacctatgccatgctggcatgcgcgcgcattggcgcgatccactcagtggtattcggtggcttctcacccgaggcgcttcaaaatcgaattaatgatgccgagtgcgccatggtcattactgcagacgagggcattcgtggcgggcgtaaagtccctctcaaggccaacgttgatatcgcactgaaaagctgtagctgcgtaacctccgtcattgtggtcgcgcataccggagctgatgtcgaatggcaggataaccgggatgtggactacacgtctgcttgcctagccgctgacattgagtgcgtgcccgaagcaatggatgcagaggatccactctttattttgtatacatcaggctccaccggaaagcctaaaggagtactccacaccacgggtggttacctgcttcaagcagcaatgacttttcgctatgtgttcgattatcaatctagcgatatttggtggtgtaccgccgacgtaggctgggtgaccggacatacctacatcgtgtacgggcccctcgccaacggcgcaacatcggtcatttttgagggcattcctacctatcccgacgcaggccgtttttgggaggtcattgataaacattctgtgactctttttttcacggctcccaccgcgattcgcgcgctaatgggaatgggagatgagtgggtcaaaaaccactcgagaaaaacgttgcgagtgcttggctcggtgggtgagcctatcaaccccgaagcctgggagtggtatcacaagattgtgggcaatgcccgctgcccgatcgttgatacctggtggcaaactgaaaccgggggcatcatgattacaccgttgcctggcgcccacgccctcaaacccggatttgccagcttcccattttttggtgtcgagcccgtgctactcgatgaaaatggcatagagcttgagggcgaggctgcgggctacctagccataaaacgctcatggccgggacaaatacgctcggtatacaacgatcatcagcgcatgctggatacctatttcagtacctatgaaggctattacttcactggcgatggcgcgcttagggacgcagagggctattatcgaatcacgggcagggttgatgacgttctcaatgtatcagggcaccgtatgggaacagcagaggtggaagccgcactaggagaacacccagatattgcagaatctgcagttgttggattcccccacgatattaaggggcagggtatttatgcctatgtcacaccaaaagcaggcgtaacggctagcgatgagctaaaggcacagctcattcaactttgcgtcaaagagataggacccattgccaagcccgatatcatccagtgggcccccgggctgcccaagacccgctcaggaaagattatgcggcgaattctcagaaaaattgcagagcgcgattttgataacctcggcgatatctcaacattagcagacccttcggtggtcaaagatctagtaacccatagaagcaccggctcagaacctagttga

SEQ ID NO: 122109 - protein, 677 aa, marine gamma proteobacterium HTCC2080
MNSVSFSIELNNSKLGPIVYGCLPQERYSMSENPLYPVPTNFSQAHISPETYEQWYLESLDDPSAFWAARAKEFLDWETPWTQVVDADLSSGKAQWFIGGKLNVSINCIDRHLPERAQQTAFIWEGDDPDTSRHISYGELKDAVCRLANVLKSQGIGRGDRVCIYMPMIPEATYAMLACARIGAIHSVVFGGFSPEALQNRINDAECAMVITADEGIRGGRKVPLKANVDIALKSCSCVTSVIVVAHTGADVEWQDNRDVDYTSACLAADIECVPEAMDAEDPLFILYTSGSTGKPKGVLHTTGGYLLQAAMTFRYVFDYQSSDIWWCTADVGWVTGHTYIVYGPLANGATSVIFEGIPTYPDAGRFWEVIDKHSVTLFFTAPTAIRALMGMGDEWVKNHSRKTLRVLGSVGEPINPEAWEWYHKIVGNARCPIVDTWWQTETGGIMITPLPGAHALKPGFASFPFFGVEPVLLDENGIELEGEAAGYLAIKRSWPGQIRSVYNDHQRMLDTYFSTYEGYYFTGDGALRDAEGYYRITGRVDDVLNVSGHRMGTAEVEAALGEHPDIAESAVVGFPHDIKGQGIYAYVTPKAGVTASDELKAQLIQLCVKEIGPIAKPDIIQWAPGLPKTRSGKIMRRILRKIAERDFDNLGDISTLADPSVVKDLVTHRSTGSEPS

SEQ ID NO: 122110 - DNA, 2013 bp, Aspergillus niger
  CDS (1)..(2013)
atggccgacggcagtgttatgccccccaagtcctccgtggtggtcgaggcccacgaagtcgacaccttccatgtccccgaagcattccaccagaagcacccgacaggtacccacttgaaagaccttgacgagtacaagaagctctatgaggagtccatccgcagcccagacactttttgggctcgcatggcccgcgaacttcttcacttcgaccaagacttccagaccacccacagtgggtcgctggagaatggcgacaatgcctggtttgtcgagggtcgtctgaacgcctcctacaactgcgtcgatcgccatgccttcaagaaccccgacaaggtcgccattatctacgaggccgatgagcccagcgagggccgcacaatcacctacggtgagctcctgcgcgaggtgtctcgtgtggcctgggttctccgccagcagggtgtgaagaagggtgacaccgttgctatctaccttcccatgattccggaggccattgtcgctttcttggcttgctctcgtatcggtgccgtccactccgttgttttcgccggtttctcgtccgactctctccgggaccgtgtcctggacgctggctccaaggtcgtcatcacgaccgatgagggcaagcgtggaggaaaggtcattggcaccaagcgcattgtcgatgaagccctgaagcagtgccccgatgtcactagcgtcctggtctacaagcgcaccggcgcggaggtcccctggaccaagggccgtgatgtctggtggcacgaggaggtcgagaagtaccccaactaccttgctcctgagccggtgaactcggaagatcccctcttcctgctctacacctctggttctaccggaaagcccaagggtgtcatgcacaccacggctggttaccttttgggtgctgccatgaccggcaagtatgtctttgatatccacgacgatgaccgctacttctgtggtggtgatgttggctggatcaccggccacacgtacgtcgtatatgcacccttgctgctcggatgctctaccgtggtcttcgagagtaccccggcttaccccaacttctcccgttactgggacgtgatcgagaagcacaaggtgacccaattctacgtcgcccccactgccctgcgacttctgaagcgggctggcgacgagcacattcaccacaagatggcacacctgcgtgtcctgggctctgtcggtgagcctattgctgccgaggtctggaaatggtacttcgaggtggtcggaaaggaagaagcccacatctgcgatacctactggcagactgagacgggttcgaatgtcatcactcccctgggtggtattaccccgacgaaacccggaagcgcgtcgcttcccttctttggcattgagcccgccatcattgacccggtctctggtgaggagatcactggcaacgatgtggagggtgtgcttgccttcaagcaaccctggccgagcatggcccgtaccgtgtggggcgcccacaagcgctacatggatacctacttgaacgtttacaagggctactacttcactggagatggtgcaggccgcgatcacgacggatactactggatccggggtcgtgttgacgatgtggtcaacgtttccggacaccgtctgtccacggctgagattgaagccgccctcattgagcaccacatggtggctgaggctgctgtcgtcggtattgccgacgagcttaccggtcaggccgtcaacgcattcgtggccctgaaagagggcaacgagaccagcgaccaggtccgcaaggatctgatcatgcaggttcgtcggtccatcggacctttcgctgcccccaaggccgtctacgttgtcgaggatctccccaagacccgtagcggtaagatcatgcgccgtattctccggaagatcctgagcggcgaggaggacagcctgggtgacacttctactctgtcggacccttcggttgttgacaagatcattgccacggtgcacgctgcccgtggcaaataa

SEQ ID NO: 122111 - protein, 670 aa, Aspergillus niger
MADGSVMPPKSSVVVEAHEVDTFHVPEAFHQKHPTGTHLKDLDEYKKLYEESIRSPDTFWARMARELLHFDQDFQTTHSGSLENGDNAWFVEGRLNASYNCVDRHAFKNPDKVAIIYEADEPSEGRTITYGELLREVSRVAWVLRQQGVKKGDTVAIYLPMIPEAIVAFLACSRIGAVHSVVFAGFSSDSLRDRVLDAGSKVVITTDEGKRGGKVIGTKRIVDEALKQCPDVTSVLVYKRTGAEVPWTKGRDVWWHEEVEKYPNYLAPEPVNSEDPLFLLYTSGSTGKPKGVMHTTAGYLLGAAMTGKYVFDIHDDDRYFCGGDVGWITGHTYVVYAPLLLGCSTVVFESTPAYPNFSRYWDVIEKHKVTQFYVAPTALRLLKRAGDEHIHHKMAHLRVLGSVGEPIAAEVWKWYFEVVGKEEAHICDTYWQTETGSNVITPLGGITPTKPGSASLPFFGIEPAIIDPVSGEEITGNDVEGVLAFKQPWPSMARTVWGAHKRYMDTYLNVYKGYYFTGDGAGRDHDGYYWIRGRVDDVVNVSGHRLSTAEIEAALIEHHMVAEAAVVGIADELTGQAVNAFVALKEGNETSDQVRKDLIMQVRRSIGPFAAPKAVYVVEDLPKTRSGKIMRRILRKILSGEEDSLGDTSTLSDPSVVDKIIATVHAARGK

SEQ ID NO: 122112 - DNA, 2073 bp, Aspergillus niger
  CDS (1)..(2073)
atgtcacttcacccgcagcagttggtccacaacacctccctgcgcgacccagaaggcttctggtctcgccaggccgaacaactgcactggcacaaaaaaccatcgcgtgccatcgaccagcaattgaaaacaacccccagtggctccagctatactcattggagctggttcccggatggggagatctcgacgacctacaactgtgtcgatcggcatgtccattcaggcaagggagataatgttgctatcatctgggagtccccggtgacaggaacgaaggagaaatatacctataaacagctattggacgaagtcgaggttctagcaggcgtgctaagagaagaaggtgtgcgaaagggcgacgtggttattatttatatgcctatgattcctgcggcacttattgctgctttggcaattgcacgcctgggtgctattcattccgcagtctttggcgggttcgcagccaagtcgctcgcacaacgcattgaagcggccaagccacgcgtcctcatgacagcgtcgtgcggtatcgaaggctcaaaaggtcccatcgcctatcgaccgttagttgagggtgctatcgagctgagccacttcaagccagagaaagtgatcgtctggcagagggatcaactgcggtggaataaccccgataagttggctggacaacgtaactggcaacgactggtgaaaagcgcacgcatgcgtggcataagagccgagccggtacccgtgaagagcacggatggactatatatcatctatactagcggcactacgggctcgcccaaaggtgtgtttcgagaggccggtggacacgcagtgggactccagctgtcgatgaaacacctatttgatatacaagggcccggggacgtcatcttctgcgcctctgacattggatgggtggtcggtcattcgtacatcttgtatgggccactcctggttggagcaacgacaatccttttcgaaggaaagccggtggggacaccggacgcaggcaccttctggcggattatcgaggagcataaggcaaatgtgttgttcacggcgcccacggccatgcgggccatccgcaaggatgatcccaacaatcgcttctttgaagaggtggctcggcgtggcggcctccaacatttccgcgcactgtttcttgcgggagaaaggagcgaacccagtattgtgcaagcctaccaagaacttctgagccaatacgctgctcccggtgcagtggttgtggacaattggtggtcgtcagaatcagggtctcccatatctgggctggcacttagaagcgctgcggcaatggagtcgtcctcgcgtcagaatgatgcagtgaagccattgaccgttcgaccaggatcagcaggtctgcccatgcctggatttgacgtgcgcgtggtcgacgacgagggaaaggcactgcctccgggcacgatggggaacattgtcttaggcattcctttggcgcccactgcatttacccgtctcttcaacgatgacgagcggttctaccggagttatctgcgtagatttaatggacagtggattgacaccggagacgcggggttaatcgataaagacgggtatatccatatcatggctcgatccgacgacatcatcaatgtcgcggcgcatcgcttcagtacgggcgccattgagcaagcaatcctcttgcacccacaaattggcgaagccagcgtggtgggcgttccggacccgctgaagggacacctcccgtttgctttcattcagccacgaaccgcgaccgggcccatacccgcgaaacctacagcagaactgtttcaggaggtgaatgggctggtgcgcgagcagatcggggcaatcgcgtccctagggggcatgatacaaggccggggcatgatccccaagacgcgcagtgggaagacgctgcgccgagtgctgcgagagctggtggagcatgcagtgcgcggggagtacgaggcgccggtgaatgtgccgccgacggtggaagacgccgacgtcgtggatgaggcacgacgacgggtgcgtgagtactttgatcgacagggacgggcgaagctgtaa

SEQ ID NO: 122113 - protein, 690 aa, Aspergillus niger
MSLHPQQLVHNTSLRDPEGFWSRQAEQLHWHKKPSRAIDQQLKTTPSGSSYTHWSWFPDGEISTTYNCVDRHVHSGKGDNVAIIWESPVTGTKEKYTYKQLLDEVEVLAGVLREEGVRKGDVVIIYMPMIPAALIAALAIARLGAIHSAVFGGFAAKSLAQRIEAAKPRVLMTASCGIEGSKGPIAYRPLVEGAIELSHFKPEKVIVWQRDQLRWNNPDKLAGQRNWQRLVKSARMRGIRAEPVPVKSTDGLYIIYTSGTTGSPKGVFREAGGHAVGLQLSMKHLFDIQGPGDVIFCASDIGWVVGHSYILYGPLLVGATTILFEGKPVGTPDAGTFWRIIEEHKANVLFTAPTAMRAIRKDDPNNRFFEEVARRGGLQHFRALFLAGERSEPSIVQAYQELLSQYAAPGAVVVDNWWSSESGSPISGLALRSAAAMESSSRQNDAVKPLTVRPGSAGLPMPGFDVRVVDDEGKALPPGTMGNIVLGIPLAPTAFTRLFNDDERFYRSYLRRFNGQWIDTGDAGLIDKDGYIHIMARSDDIINVAAHRFSTGAIEQAILLHPQIGEASVVGVPDPLKGHLPFAFIQPRTATGPIPAKPTAELFQEVNGLVREQIGAIASLGGMIQGRGMIPKTRSGKTLRRVLRELVEHAVRGEYEAPVNVPPTVEDADVVDEARRRVREYFDRQGRAKL

SEQ ID NO: 122114 - DNA, 2382 bp, Arabidopsis thaliana
  CDS (44)..(2125)
  misc_feature (422)..(422): n is a, g, c or t
tcaaagatcatccccatcggagaatcttctcctccataggaaaatgtcgtctaattccctgaggcatgtcgagtccatgtcccagctaccctcaggtgccggaaagatctctcaattaaacgccgtcgtgttaggagaatcccttgcatcggaggagaatgatctcgtctttcccagcaaggaattctccggccaggctcttgtttcctcccctcaacagtacatggaaatgcataagaggtcgatggatgaccctgctgctttttggtctgatattgcgtctgagttttactggaagcagaaatggggtgaccaagtgttttccgagaatctcgatgtcaggaagggtcctattagcatcgagtggtttaaagggggaatcaccaatatttgctacaactgtttggacaaaaacgttgaanctggtttgggcgataagacagccatacactgggaaggaaatgaacttggggtagatgcttccttaacttattctgagttgctccaacgagtttgccagcttgctaattacttgaaagataatggagtgaagaagggtgatgctgttgtaatttatttacctatgttgatggaacttcccatcgctatgcttgcatgtgcaaggatcggagctgttcattcggtcgtatttgctggattttctgcggactctcttgcccaaagaatcgttgattgcaagccaaatgtaatactgacttgcaatgctgttaaaagaggccctaagaccataaaccttaaagctattgttgatgctgcacttgaccaatcttctaaagatggagtctctgtaggcatatgcttgacctatgacaactcattagcgacaacaagggaaaacactaaatggcagaatggaagagatgtgtggtggcaggatgttatttctcaatatccaacatcgtgtgaggtggaatgggttgatgcagaagatcccctgtttttgctctacaccagtggaagtactgggaagccaaagggtgtcctacacacaactggagggtatatgatctacactgctacaacgttcaaatatgcatttgactacaaatcaacagatgtatactggtgtacagcagattgtggttggataactggccatagctatgttacttatggaccaatgcttaatggagccactgttgttgtccttgagggggctccaaactaccctgaccctggacgctgtcgggatattgttgacaaatacaaggtttcaatattttatactgccccaacattggtgaggtctctcatgcgcgatgacgataagtttgtaacacgtcactcgcgcaaatcgctgcgggtccttggaagtgttggtgagcccatcaatcctagtgcctggagatggttcttcaatgtagtcggtgattcaaggtgtcccatttcagatacgtggtggcaaactgaaactggtggcttcatgataaccccattgccaggtgcttggccccagaaacctggttcagccactttccctttctttggtgttcagcctgtcatagttgatgaaaagggcaatgaaatcgaaggcgagtgtagtggttatctttgtgtcaaaggttcatggcccggggcgtttcgaactctgtttggggatcatgaaagatacgaaaccacatactttaaaccttttgccggatattatttcagtggtgatggttgcagcagagacaaggatggttactactggcttacagggagggttgatgatgttatcaacgtcagtggccatcgaatcggaactgctgaagtagaatctgctctggttttacaccctcaatgtgcagaagcagctgttgtaggcatagaacatgaggtaaaaggtcagggaatttatgcgtttgtcactcttctggaaggtgttccttacagcgaggagcttcgtaaaagcctagtactaatggtccgaaatcagattggggcttttgcagcaccggacagaatacattgggcaccagggttgccaaagacgagaagcggaaagataatgaggagaatcttgagaaagattgcttcgaggcaattagaagaactcggagatactagcacactcgcggatcctagtgtagttgatcagcttattgcacttgccgatgtgtgatgactaaccatagcatatgagccaatggagagtaatggagttttgtgcatctatatatgttttcaggtgtcttatagagggaatggtacaaaaatctgaaacaagattcaggtgttttggagggaataaagtaagcagactatattgttgtgtttttgaataaagaaatttcagtctcatgaatttggttttggataagatggtcataggattatcaaattaattaaaagttacaaaaatataaaaaaaaaaaaaaa

SEQ ID NO: 122115 - protein, 693 aa, Arabidopsis thaliana
  misc_feature (127)..(127): The Xaa at location 127 stands for Ala, Pro, Ser, or Thr.
MSSNSLRHVESMSQLPSGAGKISQLNAVVLGESLASEENDLVFPSKEFSGQALVSSPQQYMEMHKRSMDDPAAFWSDIASEFYWKQKWGDQVFSENLDVRKGPISIEWFKGGITNICYNCLDKNVEXGLGDKTAIHWEGNELGVDASLTYSELLQRVCQLANYLKDNGVKKGDAVVIYLPMLMELPIAMLACARIGAVHSVVFAGFSADSLAQRIVDCKPNVILTCNAVKRGPKTINLKAIVDAALDQSSKDGVSVGICLTYDNSLATTRENTKWQNGRDVWWQDVISQYPTSCEVEWVDAEDPLFLLYTSGSTGKPKGVLHTTGGYMIYTATTFKYAFDYKSTDVYWCTADCGWITGHSYVTYGPMLNGATVVVLEGAPNYPDPGRCRDIVDKYKVSIFYTAPTLVRSLMRDDDKFVTRHSRKSLRVLGSVGEPINPSAWRWFFNVVGDSRCPISDTWWQTETGGFMITPLPGAWPQKPGSATFPFFGVQPVIVDEKGNEIEGECSGYLCVKGSWPGAFRTLFGDHERYETTYFKPFAGYYFSGDGCSRDKDGYYWLTGRVDDVINVSGHRIGTAEVESALVLHPQCAEAAVVGIEHEVKGQGIYAFVTLLEGVPYSEELRKSLVLMVRNQIGAFAAPDRIHWAPGLPKTRSGKIMRRILRKIASRQLEELGDTSTLADPSVVDQLIALADV

SEQ ID NO: 122116 - DNA, 2244 bp, Oryza sativa
  CDS (1)..(2244)
atggcccagctgcatatatacgccagctgcggctgcgcacgcgcccgcgctgcgatcccgcttcccgcgcaggctcaggcatccgctgcggctctaccttgggtgatgtccgtgacttcgccgccgctgctccggcgaggagggtgggcgatgggcgcgagcgatcacgccgcggtggcggcggcggcgagcggtaacggcaagccgcgggcgaggaggccctccgccgccgcggcggccgtgctgggcgagccggtggcggcgtccgacgaccacggcctcgtccaccccagcgcggacttcgcctcccaggccctcgtctcctccacgcagcagtaccaagaaatgtaccgacgttcgatcgacgatccggccgggttctggtcggagatcgcggagacgttctactggaagcacaagtggaaccctgacgaggtctgcaccgagaatctggatgtcaccaaggggccgatcaagatcgaatggttcaaagggggcaagaccaacatatgctacaatgcggtggaccgcaacgtggaggctggcgacggcgagaagatagcgatgtactgggaagggaacgagcccggccaggacgcgaagctcacctactccgagctcctgaacaaggtttgccagctggcaaattacctgaagagcgtcggcgtcgggaagggtgatgccgtggtgatctacctgccgatgctgatggagctgcccattgcgatgctcgcgtgtgctcggattggcgctgttcattcggttgtgtttgctggcttctctgctgacgcactagcacaaagaatcattgactgcaagcctaaggttgtgattacgtgcaacgcggtgaaaaggggaaagaaactcatagctctcaaagatatagtagatgtgtcgctggctgacagtgcgaagaatggagtcgatgtaggcatttctttgacatacgaaaatcagtcggcaatgaagagagaagacacaaaatggacgtcaggcagagacgtttggtggcaggatgttgtgcccaattttccaacaaaatgtgatgtggaatgggtagatgcagaggatccattgtttcttctatatacaagtggtagcacaggaaagccaaagggtgtattgcatacaacaggaggctatatggtgtactctgcaacaacatttaagcacgcatttgattacaagccatcagatatatactggtgcactgcagactgtgggtggattactgggcatagttatgtgacatatggtcctctcctgaatggagccacagttcttgtttacgaaggggctccaaactatcctgatcctggtcgttgttgggacgttgttgacaaatacggggtgacgatattttatactgcaccaacacttattcgtgcactcatgcgtgatggtaccgagtatgttactcggtattctcgtaaatctcttcgagttctaggaagcgtaggcgagccaatcaatcccactgcttggagatggttctatgatattattggtgatgcaagatgcccaatatcagacacttggtggcagactgaaactggtggttttatgatcactcctttacctggcgcttggcctctgaaacccggatctgcgacatttcctttcttcggtgtacagccagtaatagtagatgagaaagggaaggaaatggaaggagaatgcagcggatacctttgcataaagaagtcatggcctggggctttccggacactttatggagacaaggacagatatgaaaccacatacttcaagccatttgctggctattacttctccggtgatggttgcagcagggacaaagatggataccattttctgactggacgggttgacgatgttatcaatgtcagcggccaccggattgggacagcagaggttgagtctgctctggtttcacatccaaaatgcgccgaggccgctgttgttggaattgaccatgaggttaaaggccagggaatttacgctttcgtgacattggtggacggtgttccttacagcgatgagctacggaaaagcctcgttatgactgttcgcaaccagattggggcgttcgcggcgccggacaagatccactgggcgccggggctcccgaagacgcggagcggcaagatcatgcggaggatcctgcggaagatcgcgtccaggcagctggacgagctcggcgacaccagcacgctcgccgaaccaggagtcgtcgaccagctcatcgcgctcgccgatagctag

SEQ ID NO: 122117 - protein, 747 aa, Oryza sativa
MAQLHIYASCGCARARAAIPLPAQAQASAAALPWVMSVTSPPLLRRGGWAMGASDHAAVAAAASGNGKPRARRPSAAAAAVLGEPVAASDDHGLVHPSADFASQALVSSTQQYQEMYRRSIDDPAGFWSEIAETFYWKHKWNPDEVCTENLDVTKGPIKIEWFKGGKTNICYNAVDRNVEAGDGEKIAMYWEGNEPGQDAKLTYSELLNKVCQLANYLKSVGVGKGDAVVIYLPMLMELPIAMLACARIGAVHSVVFAGFSADALAQRIIDCKPKVVITCNAVKRGKKLIALKDIVDVSLADSAKNGVDVGISLTYENQSAMKREDTKWTSGRDVWWQDVVPNFPTKCDVEWVDAEDPLFLLYTSGSTGKPKGVLHTTGGYMVYSATTFKHAFDYKPSDIYWCTADCGWITGHSYVTYGPLLNGATVLVYEGAPNYPDPGRCWDVVDKYGVTIFYTAPTLIRALMRDGTEYVTRYSRKSLRVLGSVGEPINPTAWRWFYDIIGDARCPISDTWWQTETGGFMITPLPGAWPLKPGSATFPFFGVQPVIVDEKGKEMEGECSGYLCIKKSWPGAFRTLYGDKDRYETTYFKPFAGYYFSGDGCSRDKDGYHFLTGRVDDVINVSGHRIGTAEVESALVSHPKCAEAAVVGIDHEVKGQGIYAFVTLVDGVPYSDELRKSLVMTVRNQIGAFAAPDKIHWAPGLPKTRSGKIMRRILRKIASRQLDELGDTSTLAEPGVVDQLIALADS

SEQ ID NO: 122118 - DNA, 2073 bp, Aspergillus oryzae
  CDS (1)..(2073)
atgtcacgtcatccacagcagctggtgcacggctcttctcttcgggacccggagagcttctggtctcatcatgcagagcagctttactggcaccggaaaccatcccatgtgattagccgacataccaaatctcttcccagcggtactagccacgaccattggtcctggttccccgacggcgagatctctacgacctacaactgcgtcgaccgtcacgtggagaatggtaacggtgacaatgttgctatcatttgggactccccggtaacggggacgaaagagaaatatacctaccgacagctgttagaggaggttgaggtcttggcgggtgtattacgagaagaaggagtgcgcaagggtgatgtagtcattatttacatgcccatgattccagccgcgctcattgcagcattggcgatttctcgactgggggcaatccatgcagccgtgtttggcgggtttgcggccaagtccctcgcacagcggattgaagctgccaggccacgagccatcatgacagcatcatgtggtatagaagggtctaagggccctgttgcctatagaccattagtcgagggggctattgaggcaagtagctttaagcctgaaaaggtcattgtttggcaaagagatcaactgcggtggaatcgacccgataagctgggtggacagcgcaactggcaacggttggtcaaaagcgcacgcatgcgtggcatcaaagccggaccggtacctgtggctagcacggatggattgtatattatatacaccagcggtaccaccgggctgccaaagggagttgtccgagaggctggcggacatgcagtcggattgcatctgtccattaggtatctatttggtattcagggcccaggggatgtaatgttctgcgcttctgatatcgggtgggtagtcggccactcctacatcttatacgcaccccttttggttggcgcaactacagtactcttcgaaggaaagcccgtgggaaccccagatgcgggaacattctggagggttatcgaggaacacagggccaacgtcctgttcacagcacctacggccatgcgtgccatccgaaaggatgatccagacaataagttcttcgaggaggtggcccgtcgaggtggcctgaagcatttcagagctctttttctcgccggtgagaggagcgagcccagtattgttcaggtgtatcaggatctattatcccgtcatgccgcccctggtgccattgtcgtagataattggtggtcatccgaatcaggttcacctatctctgggctggcactaagaagcacagctggaatgacgttgggtgatgacaaggaagtaatgccgctggctattcgaccggggtcggccggattgccaatgccggggtttgacgttcggattgttgatgatgaaggccgagaagttccccgagggacgatgggcaacatcgtcctaaatatgccattggctcccacagcttttacccgattgtttaatgatgacgagagattctacaagggatatctcaagcgcttttcgggtagatgggtggacacaggggacgcaggtatgatcgaccaggatgggtacattcatgtcatggcgcgaacggacgatatcatcaatgtggctgcgcatcggtttagtacaggcgcaattgaacaggccattctgtcacatccagaggtcggcgaggccagcgttgttggcataccggacacactgaagggacaccttccttttgcctttatacagccacggactgcatctgccgccctgccagcgacacctaccccagagctgttcaacgcgatcaatcaacgagtccgtgagcagatcggagcaatcgcatcgctcggaggcatgatacagggacgcgggatgatcccgaagacacgcagcggcaagacattgcggcgagtattgcgggagctgctcgaacacggggtgcgcggggattatggggccccggtgagcatcccgccgacagtggaggacgctgatgtagtggaaatagcgcgaagcaaagtgcgagagtactttgaagagaaacaacgaagccgagccaaattgtag

SEQ ID NO: 122119 - protein, 690 aa, Aspergillus oryzae
MSRHPQQLVHGSSLRDPESFWSHHAEQLYWHRKPSHVISRHTKSLPSGTSHDHWSWFPDGEISTTYNCVDRHVENGNGDNVAIIWDSPVTGTKEKYTYRQLLEEVEVLAGVLREEGVRKGDVVIIYMPMIPAALIAALAISRLGAIHAAVFGGFAAKSLAQRIEAARPRAIMTASCGIEGSKGPVAYRPLVEGAIEASSFKPEKVIVWQRDQLRWNRPDKLGGQRNWQRLVKSARMRGIKAGPVPVASTDGLYIIYTSGTTGLPKGVVREAGGHAVGLHLSIRYLFGIQGPGDVMFCASDIGWVVGHSYILYAPLLVGATTVLFEGKPVGTPDAGTFWRVIEEHRANVLFTAPTAMRAIRKDDPDNKFFEEVARRGGLKHFRALFLAGERSEPSIVQVYQDLLSRHAAPGAIVVDNWWSSESGSPISGLALRSTAGMTLGDDKEVMPLAIRPGSAGLPMPGFDVRIVDDEGREVPRGTMGNIVLNMPLAPTAFTRLFNDDERFYKGYLKRFSGRWVDTGDAGMIDQDGYIHVMARTDDIINVAAHRFSTGAIEQAILSHPEVGEASVVGIPDTLKGHLPFAFIQPRTASAALPATPTPELFNAINQRVREQIGAIASLGGMIQGRGMIPKTRSGKTLRRVLRELLEHGVRGDYGAPVSIPPTVEDADVVEIARSKVREYFEEKQRSRAKL

SEQ ID NO: 122120 - DNA, 2013 bp, Aspergillus oryzae
  CDS (1)..(2013)
atggctgacggcaacgtgatgccccctaagccctctgtggtgctggaagcccacgaggtcgatactttccatgtccccaaggctttctacgagaagcacccaactggcactcacttgaaagacctggatgaatataagaagctctatgacgaatcaattcgcagtcctcaaaccttctgggcccgcatggcccgtgaactcctttccttcgacaaagactttcaaactacccacactggttctctggagaacggcgacagtgcctggttcgtggaaggccgcttaaatgctgcctacaactgcgtggaccgtcatgctctcaagaaccccgacaaggttgcgatcatttacgaggctgatgagccgaatgagggccgtactattacctacggggagctgcttcgtgaagtatctcgagttgcctgggtgcttaaacagcaaggtgtcaagaaaggtgatactgtagctatctatcttcctatgattccggaggccgttgtagccttcttggcctgttcccgcattggtgccatccactccgtggtgtttgcaggattctcgtcagactcgctccgtgaccgtgttatcgacgccggatctaaagtggtcatcaccaccgacgagggcaagcgtggcggcaaggtgattggcaccaagcgtattgttgacgaggctttgaagcagtgccccgacgttacaagcgtgttggtctacaagcgcaccggtactgaggtcccctggacccaaggtcgtgatgtctggtggcacgaggaggtggagaagtaccccaattacttccctcccgagtccgtgagctccgaagaccccctgttcctgctttacacttctggttcgacaggaaagcccaagggtgttatgcacaccaccgctggatatctcctgggtgccgctatgaccggcaagtatgtctttgatatccacgacgacgatcgctttttctgtggtggtgacgtcggttggatcactggtcatacctatgttgtgtatgctcctttgctcctgggatgctccaccgtcgtctttgagagtaccccagcgtaccccaacttttctcgctactgggatgttattgagaaacaccaggtgactcagttctacgtcgctcctacagcattgcggttgttgaagcgcgctggagacgagcacattcaccacaagatggctcacctgcgtatcctgggctccgtcggtgagcctatcgctgcagaggtttggaagtggtatttcgagaaggtcggaaaggaagaggcacacatttgcgatacctactggcagaccgaaactggttcgaacgtcatcacacctttgggtggaattacccctacgaaacccggtagtgcctcgttgccgttcttcggtattgagcctgccatcattgaccctgtctccggagaggaaatctcgggcaatgacgtggaaggtgtgcttgccttcaagcagccctggcctagcatggcccgcactgtgtggggtgcccacaagcgttacatggatacctatctgaatgtttataagggctactacttcactggagatggagcaggacgtgaccacgacggatactactggatccgcggccgtgttgacgacgtagttaacgtatccggtcaccggctgtccaccgctgagattgaagctgccctgcttgaacaccatatggttgctgaagctgccgtggtcggtattgctgacgaactcactggccaagcggtcaatgcatttgtgtctctgaaggagggcaatgagacaaatgagcaggtccgtaaagaccttgtcatgcaggttcgcaagtcgattggaccattcgccgctcccaaggccgtctttgtcgttgatgacctccctaagactcgcagcggcaagatcatgcgacgtatcctgcggaagatcctgagcggtgaggaggacagtctgggtgatacttctaccctgtccgatccctcggtagtcgacaagatcatcgaaaccgttcacaccgcccggggcaaatag

SEQ ID NO: 122121 - protein, 670 aa, Aspergillus oryzae
MADGNVMPPKPSVVLEAHEVDTFHVPKAFYEKHPTGTHLKDLDEYKKLYDESIRSPQTFWARMARELLSFDKDFQTTHTGSLENGDSAWFVEGRLNAAYNCVDRHALKNPDKVAIIYEADEPNEGRTITYGELLREVSRVAWVLKQQGVKKGDTVAIYLPMIPEAVVAFLACSRIGAIHSVVFAGFSSDSLRDRVIDAGSKVVITTDEGKRGGKVIGTKRIVDEALKQCPDVTSVLVYKRTGTEVPWTQGRDVWWHEEVEKYPNYFPPESVSSEDPLFLLYTSGSTGKPKGVMHTTAGYLLGAAMTGKYVFDIHDDDRFFCGGDVGWITGHTYVVYAPLLLGCSTVVFESTPAYPNFSRYWDVIEKHQVTQFYVAPTALRLLKRAGDEHIHHKMAHLRILGSVGEPIAAEVWKWYFEKVGKEEAHICDTYWQTETGSNVITPLGGITPTKPGSASLPFFGIEPAIIDPVSGEEISGNDVEGVLAFKQPWPSMARTVWGAHKRYMDTYLNVYKGYYFTGDGAGRDHDGYYWIRGRVDDVVNVSGHRLSTAEIEAALLEHHMVAEAAVVGIADELTGQAVNAFVSLKEGNETNEQVRKDLVMQVRKSIGPFAAPKAVFVVDDLPKTRSGKIMRRILRKILSGEEDSLGDTSTLSDPSVVDKIIETVHTARGK

SEQ ID NO: 122122 - DNA, 1962 bp, Pseudomonas putida
  CDS (1)..(1962): transl_table=11
atgagtgcggctccactgtatcccgttcgtcccgaggttgcggccactaccctgaccgacgaggccacctacaaggccatgtaccagaaatcggtgatcaacccggacggcttctggcgcgagcaggcccagcgtatcgactggatcaaaccgttcaccaaggtcaagcaaacctcctttgacgaccaccacgtcgatatcaaatggttcgccgacggcactctgaacgtttcctccaactgcctggaccgccacctcgaagagcgcggtgatcagttggccatcatctgggaaggcgacgacccttccgaacaccgcaacatcacttaccgtgaactgcacgagcaggtctgcaagttcgccaacgccctgcgtggccaggacgtgcaccgtggtgacgtggtcaccatctacatgccgatgatccccgaggccgtggtggccatgctggcctgtgcccgtattggtgcgatccactcggtggtgttcggtggcttctcccctgaagcgctggccggccgcatcatcgattgcgagtccaaggtggtgatcaccgccgacgaaggcgtgcgtggcggccgtcgtaccccgctcaaggccaacgtcgacctggcgctgaccaaccctgaaaccaaaagcgtgcagaagatcatcgtgtgcaagcgcaccggtggtgatattgcctggcaccagcaccgcgacatctggtacgaagacctgatgaaagtggcctccagccactgcgcgccaaaggaaatgggtgctgaagaagcgctgttcatcctttatacctctggctccacgggcaagccgaagggtgtgctgcacaccaccggcggttacctggtgtatgccgcgctgacccatgagcgcgtgttcgactatcgcccgggcgaggtctactggtgcaccgccgacgtcggttgggtcactggccacagctacatcgtctacggcccgctggccaacggcgccactaccttgcttttcgaaggcgtgccgaactacccggacattacccgcgtctcgaagatcgtcgacaagcacaaggtcaacatcctctacaccgcgccaaccgccatccgcgcgatgatggccgaagggcaggccgctgttgaaggggccgatggttccagcctgcgtctgcttggctcggtgggcgagccgatcaaccctgaagcctggaactggtactacaagactgtaggcaaggagcgttgcccgatcgtcgacacctggtggcagaccgaaaccggcggcatcctgatcagcccgctgccgggcgctaccggcctcaagccgggctcggcaacccgcccgttctttggtgtggtgcccgccctggtggacaacctgggtaacctgatcgaaggtgcggccgaaggcaacctggtgatcctcgactcctggccaggccagtcgcgttcgctgtacggcgaccacgaccgctttgtcgacacctacttcaagaccttccgtggcatgtacttcaccggcgacggtgcgcgccgcgacgaagatggctactactggatcaccggtcgtgtggatgacgtgctcaacgtctccggtcaccgcatgggtactgccgaaatcgaaagcgccatggtcgcgcattcgaaagttgccgaggctgcagtggttggcgtgccgcacgacatcaagggccagggcatctatgtgtatgtcaccctcaattccggtatcgaggccagtgagcagttgcgcctggagctgaaaaactgggtgcgcaaggaaatcggcccgattgcctcgccggacgtgatccagtgggcgccgggcctgccgaagacccgttcgggcaagatcatgcgccgcatcctgcgcaagattgccaccggtgagtacgatgcgctgggcgatatctcgacactggctgacccgggtgtggtgcagcacctgatcgatacccacaaggccatgaacctggcttcggcctga

SEQ ID NO: 122123 - protein, 653 aa, Pseudomonas putida
MSAAPLYPVRPEVAATTLTDEATYKAMYQKSVINPDGFWREQAQRIDWIKPFTKVKQTSFDDHHVDIKWFADGTLNVSSNCLDRHLEERGDQLAIIWEGDDPSEHRNITYRELHEQVCKFANALRGQDVHRGDVVTIYMPMIPEAVVAMLACARIGAIHSVVFGGFSPEALAGRIIDCESKVVITADEGVRGGRRTPLKANVDLALTNPETKSVQKIIVCKRTGGDIAWHQHRDIWYEDLMKVASSHCAPKEMGAEEALFILYTSGSTGKPKGVLHTTGGYLVYAALTHERVFDYRPGEVYWCTADVGWVTGHSYIVYGPLANGATTLLFEGVPNYPDITRVSKIVDKHKVNILYTAPTAIRAMMAEGQAAVEGADGSSLRLLGSVGEPINPEAWNWYYKTVGKERCPIVDTWWQTETGGILISPLPGATGLKPGSATRPFFGVVPALVDNLGNLIEGAAEGNLVILDSWPGQSRSLYGDHDRFVDTYFKTFRGMYFTGDGARRDEDGYYWITGRVDDVLNVSGHRMGTAEIESAMVAHSKVAEAAVVGVPHDIKGQGIYVYVTLNSGIEASEQLRLELKNWVRKEIGPIASPDVIQWAPGLPKTRSGKIMRRILRKIATGEYDALGDISTLADPGVVQHLIDTHKAMNLASA

SEQ ID NO: 122124 - DNA, 1899 bp, Oryza sativa
  CDS (1)..(1899)
atgtaccgacgttcgatcgacgatccggccgggttctggtcggagatcgcggagacgttctactggaagcacaagtggaaccctgacgaggtctgcaccgagaatctggatgtcaccaaggggccgatcaagatcgaatggttcaaagggggcaagaccaatatatgctacaatgcggtggaccgcaacgtggaggctggcgacggcgagaagatagcgatgtactgggaagggaacgagcccggccaggacgcgaagctcacctactccgagctcctgaacaaggtttgccagctggcaaattacctgaagagcgtcggcgtcgggaagggtgatgccgtggtgatctacctgccgatgctgatggagctgcccattgcgatgctcgcgtgtgctcggattggcgctgttcattcggttgtgtttgctggcttctctgctgacgcactagcacaaagaatcattgactgcaagcctaaggttgtgattacgtgcaacgcggtgaaaaggggaaagaaactcatagctctcaaagatatagtagatgtgtcgctggctgacagtgcgaagaatggagtcgatgtaggcatttctttgacatacgaaaatcagtcggcaatgaagagagaagacacaaaatggacgtcaggcagagacgtttggtggcaggatgttgtgcccaattttccaacaaaatgtgatgtggaatgggtagatgcagaggatccattgtttcttctatatacaagtggtagcacaggaaagccaaagggtgtattgcatacaacgggaggctatatggtgtactctgcaacaacatttaagcacgcatttgattacaagccatcagatatatactggtgcactgcagactgtgggtggattactgggcatagttatgtgacatatggtcctctcctgaatggagccacagttcttgtttacgaaggggctccaaactatcctgatcctagtcgttgttgggacgttgttgacaaatacggggtgacgatattttatactgcaccaacacttattcgtgcactcatgcgtgatggtaccgagtatgttactcggtattctcgtaaatctcttcgagttctaggaagcgtaggcgagccaatcaatcccactgcttggagatggttctatgatattattggtgatgcaagatgcccaatatcagacacttggtggcagactgaaactggtggttttatgatcactcctttacctggcgcttggcctctgaaacccggatctgcgacatttcctttcttcggtgtacagccagtaatagtagatgagaaagggaaggaaatggaaggagaatgcagcggatacctttgcataaagaagtcatggcctggggctttccggacactttatggagacaaggacagatatgaaaccacatacttcaagccatttgctggctattacttctccggtgatggttgcagcagggacaaagatggataccattttctgactggacgggttgacgatgttatcaatgtcagcggccaccggattgggacagcagaggttgagtctgctctggtttcacatccaaaatgcgccgaggccgctgttgttggaattgaccatgaggttaaaggccagggaatttacgctttcgtgacattggtggacggtgttccttacagcgatgagctacggaaaagcctcgttatgactgttcgcagccagattggggcgttcgcggcgccggacaagatccactgggcgccggggctcccgaagacgcggagcggcaagatcatgcggaggatcctgcggaagatcgcgtccaggcagctggacgagctcggcgacaccagcacgctcgccgaaccaggcgtcgtcgaccagctcatcgcgctcgccgatagctag

SEQ ID NO: 122125 - protein, 632 aa, Oryza sativa
MYRRSIDDPAGFWSEIAETFYWKHKWNPDEVCTENLDVTKGPIKIEWFKGGKTNICYNAVDRNVEAGDGEKIAMYWEGNEPGQDAKLTYSELLNKVCQLANYLKSVGVGKGDAVVIYLPMLMELPIAMLACARIGAVHSVVFAGFSADALAQRIIDCKPKVVITCNAVKRGKKLIALKDIVDVSLADSAKNGVDVGISLTYENQSAMKREDTKWTSGRDVWWQDVVPNFPTKCDVEWVDAEDPLFLLYTSGSTGKPKGVLHTTGGYMVYSATTFKHAFDYKPSDIYWCTADCGWITGHSYVTYGPLLNGATVLVYEGAPNYPDPSRCWDVVDKYGVTIFYTAPTLIRALMRDGTEYVTRYSRKSLRVLGSVGEPINPTAWRWFYDIIGDARCPISDTWWQTETGGFMITPLPGAWPLKPGSATFPFFGVQPVIVDEKGKEMEGECSGYLCIKKSWPGAFRTLYGDKDRYETTYFKPFAGYYFSGDGCSRDKDGYHFLTGRVDDVINVSGHRIGTAEVESALVSHPKCAEAAVVGIDHEVKGQGIYAFVTLVDGVPYSDELRKSLVMTVRSQIGAFAAPDKIHWAPGLPKTRSGKIMRRILRKIASRQLDELGDTSTLAEPGVVDQLIALADS

SEQ ID NO: 122126 - DNA, 2085 bp, Neurospora crassa
  CDS (1)..(2085)
atgacccatcctcaagacgaggcccagcatctctctctcaccgatcccgaaggattctggggtcatcaagctgaacagcttcactggcacagaaagccttctgcggttctgaaacgcacgactaaagatctgaaattgggtacctctcacagtcattgggaatggttcccagacggcgagatatccacctgctataactgccttgaccgtcatgtcctagcggggcatggagatcagcccgccattctctacgacagttcggtcacgaacaccaagcagcggttgacttacaagcagcttcttgccgaggtcgaaacttttgccggggtccttcgagaggaaggcgttaagaagggagatgttgttttagtttacatgcccatggtgcccgccactttgatcggcattctcgccattaatcgcttgggtgccatccacgctgttgtctttggtggctttgcttccacagccctggctcagcgcattgaagcctcacgtccagtcgctatcttgacagcttcttgtggtatcgaaggtaacaaagggcctgtcagttaccgcgcctatatcgaagaagctatcagcatctcatccttcaaaccccccaagactatcatctggcagcgtgagcagctagtgtggcgtccgatcaagaaaaccgagggcgagcgggattggcagaagctggtcaagagcgcgcggttcagaaatatcaaggttgagtgtgttcctgtaaggtcggctgatcccatttacatcatctacaccagcggaaccacaggtcgaccgaaaggtgtcgttcgcgatagcggcggtcatgctgttgggctgcacatgtcgatttcgtatctgttcggtatacatggaccaggtgacgtgatgggctgtttcagcgacataggctgggtagtttcacacagctacacactttatggtcccctactgacaggcgccgccacggtcctctacgaaggtaagcctgttggaacacccgacgcctcggctttctggagactagccgaggaatataagatcaacaccttgtttaccgcaccaacggcactcagagccatccgaaaggaagaccctgacaatgtctttatcaccgagattggcagacgaggtgggctcaagagcctcaaagccctttttcttgctggagagcggtccgagccagctatcattaacatgtaccaggacttgctcaggcggtatggcgcggcaggctcccaggttgttgataactggtggtcgtcagaatctgggtcgccgatttcgggtgttgcgttggttccgcacgcaggcaagaacaggaagacgaatatgaaagatcatccgccattacctatcaagcccgggagtgctggaaaggccatgcctgggtttgatgtcagagttgtggatgacgaaggcaacgaggtgcccaggggcaacatgggaaacatcgttctgggccttccattggcacctactgcgtttcggacactttggggggatgaggaacgattctataagagttacatgattcgcttcaatggcaagtgggttgacactggcgatgccggctatgtcgaccaaacagggtacattcacattatggcacgcactgatgacattatcaacgttgccgcccatcgtcttagcacaggcacgctcgagcaagcagtcacaagccaccccctcgtcaccgaagcatgtgtggttagcgtccccgacgccctcaaaggccagcttcctttcgccttcgtcagcacctcggacggcggcgccgacgtcaagtcagacgagcagctgttccaggatatccagaagctcgtccgcgcccaggttggcgccatcgcctcgctgggcgggatgatccggggcaagggcatgattccgaagacgcgctcgggcaagaccttgaggagagtcctacgcgaactgctagaaaatgcggtccatgacgagttcgaaaagcccatcaatatcccctcgacggtggaggatccgagtgtagtggatgtggcgagggagaagattagggaatattggcatgcgaagagcgggttgcatgcggctatcgaggctagggcgaagctttga

SEQ ID NO: 122127 - protein, 694 aa, Neurospora crassa
MTHPQDEAQHLSLTDPEGFWGHQAEQLHWHRKPSAVLKRTTKDLKLGTSHSHWEWFPDGEISTCYNCLDRHVLAGHGDQPAILYDSSVTNTKQRLTYKQLLAEVETFAGVLREEGVKKGDVVLVYMPMVPATLIGILAINRLGAIHAVVFGGFASTALAQRIEASRPVAILTASCGIEGNKGPVSYRAYIEEAISISSFKPPKTIIWQREQLVWRPIKKTEGERDWQKLVKSARFRNIKVECVPVRSADPIYIIYTSGTTGRPKGVVRDSGGHAVGLHMSISYLFGIHGPGDVMGCFSDIGWVVSHSYTLYGPLLTGAATVLYEGKPVGTPDASAFWRLAEEYKINTLFTAPTALRAIRKEDPDNVFITEIGRRGGLKSLKALFLAGERSEPAIINMYQDLLRRYGAAGSQVVDNWWSSESGSPISGVALVPHAGKNRKTNMKDHPPLPIKPGSAGKAMPGFDVRVVDDEGNEVPRGNMGNIVLGLPLAPTAFRTLWGDEERFYKSYMIRFNGKWVDTGDAGYVDQTGYIHIMARTDDIINVAAHRLSTGTLEQAVTSHPLVTEACVVSVPDALKGQLPFAFVSTSDGGADVKSDEQLFQDIQKLVRAQVGAIASLGGMIRGKGMIPKTRSGKTLRRVLRELLENAVHDEFEKPINIPSTVEDPSVVDVAREKIREYWHAKSGLHAAIEARAKL

SEQ ID NO: 122128 - DNA, 2383 bp, Solanum tuberosum
  CDS (271)..(2166)
cgggggcagtcccttggtgaggatggaagacccgttcactgcttcattgtcgtcatcgattactgttagtccaaggaagaacttgacgacatccaatcacttgcgccatgtggaatccatggcccacttgccttccggagccggcagataaccagattgaatgctcttatcttaggcgaggcacttgcttccgaggaggatgatctcgtctttcccagcgaagatttctctagccagtctcatgtttcttctcctcagaagtatttggagatgtatcaaaggtcggtccacgatccctcaggattctggtctgacattgcatcagaattttactggagagagaaatggggccagcaggtttaccatgagaattttgatgttcgaaaggggaaaatcaagatcgagtggttcaagggtggaatgacaaatatctgctacaactgcttggatagaaacatcgagtctggaaagggtgacaaaacagcaatttactgggaaggaaatgaacctggtcttgatagttctatgacgtacaatcaactcttggctagagtttgccagctagcaaattatttgaaagatgttggagtccacaagggtgatgcagttgtcatctacttacccatgcttatggagctaccaattgcaatgcttgcttgtgctcgtattggtgccattcactcggttgtgtttgctggtttctcagctgaatctcttgctcaaaggatcatagattgcagaccgaaggttgtcataacatgcaatgctgttaggagggggtccaagattatttatctcaaagaaattgttgatagtgcccttctagaatctgctcagaagggcatcgttacagatgtgtgtttgacatatgaaaatgattcagcaatgaaaaaggaaatgactaaatggaccaaggggagagacatttggtggcaggatgttattctgaaatatccagtaacatgtgatgtggagtgggttgatgcagaagatccccttttcctgctttacactagtgggagtaccggaaagcctaagggtgtcttgcatacaacgggaggatatatggtgtacactgctactacattcaagtatgcatttgactacaagccgacagacatatattggtgtacagctgactgtggttggattactgggcatagttatgtaacctatggacctttgctaaatggagcaactgttgtggtttttgaaggggccccaaattatcccgatgtcgggcgttgttgggatattgttgataagtataaggtttcaatattttatacagctccaacactggtgagatctctgatgcgtgagggagacgagcatgtctctcgatattcacgcaaatctttacgggtgcttggaagtgtgggtgagcctatcaatccaagtgcatggaggtggtttttcaatgtgataggtgatgcaaggtgccccatatctgatacatggtggcaaacagaaaccggtggcttcatgattactcctttaccaggagcgtggccgcagaaacctggttctgctacttttcctttctttggagtccagccagtaatagtggatgagaaaggtgttgagattgaaggtgagtgcagtgggtatctgtgcgtgaaaagctcgtggcctggggcattccgaacacttcatggggatcatgagagatatgaaaccacatattttagtgccttcccgggctattatttcagtggtgatggctgcagcagggacaaagatggttactactggctcaccggaagagtagatgatgtgattaatgtgagtggacatcgtattggcacagctgaagtggaatctgctctagtttcacatcctcagtgtgctgaagcagctgtggttggtgtggagcatgaggttaaaggacaggggatatatgcatttgttactctagtcgaaggtgttccatacagcgatgacctgcgaaaaagtcttgtgatggttgttaggaatcagattggggcttttgcagcgccagacaagatacattgggcaccaggtcttccaaagacgagaagtgggaaaataatgagaagaattctgaggaaaatcgcttccaggcagttagatgagcttggggacactagtacccttgcagacccaactgtggttgatcagcttattgcacttgctgattgctaaagtaacaacttctaaatatagtgaagttagaggtttagctaactgtgttggtagagattggtattttgtttccgttttagtgtgagtacctttttcctccaaatttgaaacaacttatggttaacacacttttgaagatcaggttacatttaaaatcaagaaataaaataccaagatgtgattatcttttcaatgttaaaaaaaaaaaaaaaaaact

SEQ ID NO: 122129 - protein, 631 aa, Solanum tuberosum
MYQRSVHDPSGFWSDIASEFYWREKWGQQVYHENFDVRKGKIKIEWFKGGMTNICYNCLDRNIESGKGDKTAIYWEGNEPGLDSSMTYNQLLARVCQLANYLKDVGVHKGDAVVIYLPMLMELPIAMLACARIGAIHSVVFAGFSAESLAQRIIDCRPKVVITCNAVRRGSKIIYLKEIVDSALLESAQKGIVTDVCLTYENDSAMKKEMTKWTKGRDIWWQDVILKYPVTCDVEWVDAEDPLFLLYTSGSTGKPKGVLHTTGGYMVYTATTFKYAFDYKPTDIYWCTADCGWITGHSYVTYGPLLNGATVVVFEGAPNYPDVGRCWDIVDKYKVSIFYTAPTLVRSLMREGDEHVSRYSRKSLRVLGSVGEPINPSAWRWFFNVIGDARCPISDTWWQTETGGFMITPLPGAWPQKPGSATFPFFGVQPVIVDEKGVEIEGECSGYLCVKSSWPGAFRTLHGDHERYETTYFSAFPGYYFSGDGCSRDKDGYYWLTGRVDDVINVSGHRIGTAEVESALVSHPQCAEAAVVGVEHEVKGQGIYAFVTLVEGVPYSDDLRKSLVMVVRNQIGAFAAPDKIHWAPGLPKTRSGKIMRRILRKIASRQLDELGDTSTLADPTVVDQLIALADC

SEQ ID NO: 122130 - DNA, 2085 bp, Ashbya gossypii
  CDS (1)..(2085)
atggtgacctcagcaggtgtgggacatgcagaatataacaacggggccgacgtacagcacgcagactacgcgcatctgacgagcgttgggcaggtggaacagaaaccgcttggcgggcggttaggggcgctggcggagtactacaagcccaacgtggcgagcatggaggagtaccgggcgatgcacgcgcagtcgataacggacccggcggcgttctacggtgagcgggcgcgcacgtacgtggactggttccggccgttcgacgcggtgttcttgccggggccggacgggcggccgagcttcgataacaacgcatggttcgtgaacggacagttgaacgcgtgctacaacctggtggaccgacacgcagcgcgaacgccggacaaggtggcaatcatctacgaggcggacgagccaggcgaggggtacagcctcacgtaccgcgagctcttggcacaggtgtgcaaggtggcacaggtgcttcagtactcgatgggcgtgcggaagggagacacagtggcggtgtatatgcccatgataccccaggcgttggtgacgcttcttgcgatctcgcggattggggccatacactcggtggtgtttgcggggttctcgtccaactcgctccgcgacagaatcaacgacgcgcgtagcgaggtcgtggtaaccacggacgagtcgaagcgcgggggcaagatcatcgagacgaagcgcattgtggacgacgccatcaaggagaccccgcagctacgcaaggtgttggtgtacaagcgcacatgcaacccctccgtgtcttacgtcgccgaccgggacctggattgggacactgaggtcaagaagtacaagtcatactgtccatgcgagcccgtagactccgaacacccgttatttttgttgtacacctcggggtcgacgggcgctccgaagggtgtccagcattccactgcagggtatttactacaagcatatctaagtatgctttactcgttcgatgtgcacagcgatgacatcttctttactgcgggtgacattggatggataacggggcacacgtacgtcgtgtacggaccattgttttccggatgtacgactgtggtgttcgagggtacgccagcgtatccctcttattcgcgctactgggacattattgacaaatacagtgtgacacaattctatgttgcacccaccgctctccgcttattaaagcgcgcaggtgactcttacgtggatggatactcgttgcggacgctacggtcacttggcactgtaggcgagccgattgccgcagaggtgtgggagtggtactacactgtaattggcaaacgggaaatccccgttattgatacctactggcagactgaatctggagcccacttggtaactccgttagcaggcggctccacacctatgaagccggggtctgccagcttcccattcttcgggatagatttggccattttagatccacaaacaggtgaggaacttcttgggccgaatgtagagggtgttttagctgtgaagcagccttggccctccttcactcgcacaatctggaacaaccacgataggtaccttgacacctatctcaatccatacaagggctactactttgcaggcgatggagcggcccgcgactcacaaggcttcatatggatacttggccgcgtggacgatgttgtgaacgtgtctggacatcgcctctctactgcggaggtggaggctgctattatccaagagagcatggtagcagagtgcgccgttgttgggtttgcagatgagttgactggccaagcgattgccgcctttgtggtcttgaagcagaagagcagctggaacacagcgagcgagagggagctccaggagatcaaaaagcacctaattctgtctgtccgtcgcgatattgggccgtttgctgcccctaagcttatcgtgctcgtggatgacttgccaaagactcgctcaggcaaaattatgcgccgtatattgcgcaaaatccttgctggggaggcagatcagttaggggatgtctcgaccttgtccaacccaggtattgtgaaacatttgattgagtctgtgaaattttaa

SEQ ID NO: 122131 - protein, 694 aa, Ashbya gossypii
MVTSAGVGHAEYNNGADVQHADYAHLTSVGQVEQKPLGGRLGALAEYYKPNVASMEEYRAMHAQSITDPAAFYGERARTYVDWFRPFDAVFLPGPDGRPSFDNNAWFVNGQLNACYNLVDRHAARTPDKVAIIYEADEPGEGYSLTYRELLAQVCKVAQVLQYSMGVRKGDTVAVYMPMIPQALVTLLAISRIGAIHSVVFAGFSSNSLRDRINDARSEVVVTTDESKRGGKIIETKRIVDDAIKETPQLRKVLVYKRTCNPSVSYVADRDLDWDTEVKKYKSYCPCEPVDSEHPLFLLYTSGSTGAPKGVQHSTAGYLLQAYLSMLYSFDVHSDDIFFTAGDIGWITGHTYVVYGPLFSGCTTVVFEGTPAYPSYSRYWDIIDKYSVTQFYVAPTALRLLKRAGDSYVDGYSLRTLRSLGTVGEPIAAEVWEWYYTVIGKREIPVIDTYWQTESGAHLVTPLAGGSTPMKPGSASFPFFGIDLAILDPQTGEELLGPNVEGVLAVKQPWPSFTRTIWNNHDRYLDTYLNPYKGYYFAGDGAARDSQGFIWILGRVDDVVNVSGHRLSTAEVEAAIIQESMVAECAVVGFADELTGQAIAAFVVLKQKSSWNTASERELQEIKKHLILSVRRDIGPFAAPKLIVLVDDLPKTRSGKIMRRILRKILAGEADQLGDVSTLSNPGIVKHLIESVKF

SEQ ID NO: 122132 - DNA, 2028 bp, Candida albicans; identical to SEQ ID NO: 28600
  CDS (1)..(2028): transl_table=12

SEQ ID NO: 122133 - protein, 675 aa, Candida albicans [sequence omitted]

SEQ ID NO: 122134 - DNA, 2115 bp, Candida glabrata; identical to SEQ ID NO: 28602
  CDS (1)..(2115)

SEQ ID NO: 122135 - protein, 704 aa, Candida glabrata; identical to SEQ ID NO: 28603

SEQ ID NO: 122136 - DNA, 2016 bp, Debaryomyces hansenii
  CDS (1)..(2016)
atgacaccacactctacacacgtaacgttggaccatgagggtattatccaacccccagcggaatttaaggaaagatcgaagtccaaacccaacttggcagactttgagacctatagcaagatgtacaaggaatcgattgagaaccccagcaaattttttggcgaacaagcgttggaacacttgagttgggaccgtccttttgacgaagccagataccccgtgagtagcgagcaggactttgcagacggggacattgcgtcgtggtttgtgaacgggcaattgaacgcttcgtataacgcagttgacagatgggccatcaagaatcctaacaagccggcgataatctacgaggcagacgaggaaaacgaaggtcgtattatcacgtacggccagttgttgaaggacgtgtgtaagttggcacaatgcttgacgaaattgggcatcagaaagggagattctgtggcagtatacttgccaatgatccctgaggcgttagtgactttgttagcgattgtgagaattggggccgtccattcggttgtattcgccgggttttcatctagctcgttgaaggaccgtatcttggacgccagctcgaagattgttatcaccactgatgagtcgaagagaggtggtaagaccattgagaccaagaagattgtggatgatgcgttgaagaactgtcctgacgtgacaaacgtcttgcttttcaagagaaccggcaacgcccatattccgttcaccgaaggcagggacttgtggtggcacgaggaaatggccaagtacggaccatacttcccaccggtaccagtcaactcggaagacccattatttttattgtacacctcgggttcgacaggtaagccgaagggtatccagcactcgaccgcggggtacttgttgggggctgccatgacgtccaagtacacgttcgacgtgcacgaagacgacgtgttatttaccgcaggagatgtgggttggattactggacacacatatgtggtatacggtccgttattatgtggggccaccaccgtggtgtttgaaggtaccccagcccaccctaactactcgagatactgggaaattgtcgacaagtatcaggtcacccagttctacgttgctcctactgctttgagattattaaagagagccggcaccaagtatatagaaaactataagttggattccttgagagttttaggttctgttggtgaaccaattgcagccgaaatctggcactggtataacgacaacattggtagacgcaagtgtcacattgttgatacctactggcaaacagaatcggggtcacacatgttagcgccattagccggtattactccaactaaaccaggctctgcctcgttaccatgttttggtattgatgcgaaaatcttggacccagttagtggtaaggaattgaaggaaaatgatgtcgagggggtcctttgtgtcaaatcgtgctggccatcaattagtagaggtatttacaacgactatgccagatttattgaaacttacttgaagccatacccaaatcattatttctcaggtgatggggctgcaagagacgttgacggattctactggattttaggtagagtcgacgatgttgttaatgtctccggtcacaggttgtctacggcggaaattgaagctgccttgatcttacatgaatctgttgctgaatgtgcagttgttgggtacgcagacgagttgacgggtcaagcagttgccgcttatgtttcattgaaatctaacgtatctgaagacctagaagtgatcaagaaagaattgatcctaactgttcgtaaggaaatcggtccttttgcaactccaaagacaattttgttggtagatgatttacctaagactagatcaggtaagatcatgagaagaattttgagaaaagttttggctggtgaagaagaccaattgggtgatatttcaacattatcgaatcctggtgttgttgctcaaatcattgatgtagtcaaggctactcgtaagtaa

SEQ ID NO: 122137 - protein, 671 aa, Debaryomyces hansenii
MTPHSTHVTLDHEGIIQPPAEFKERSKSKPNLADFETYSKMYKESIENPSKFFGEQALEHLSWDRPFDEARYPVSSEQDFADGDIASWFVNGQLNASYNAVDRWAIKNPNKPAIIYEADEENEGRIITYGQLLKDVCKLAQCLTKLGIRKGDSVAVYLPMIPEALVTLLAIVRIGAVHSVVFAGFSSSSLKDRILDASSKIVITTDESKRGGKTIETKKIVDDALKNCPDVTNVLLFKRTGNAHIPFTEGRDLWWHEEMAKYGPYFPPVPVNSEDPLFLLYTSGSTGKPKGIQHSTAGYLLGAAMTSKYTFDVHEDDVLFTAGDVGWITGHTYVVYGPLLCGATTVVFEGTPAHPNYSRYWEIVDKYQVTQFYVAPTALRLLKRAGTKYIENYKLDSLRVLGSVGEPIAAEIWHWYNDNIGRRKCHIVDTYWQTESGSHMLAPLAGITPTKPGSASLPCFGIDAKILDPVSGKELKENDVEGVLCVKSCWPSISRGIYNDYARFIETYLKPYPNHYFSGDGAARDVDGFYWILGRVDDVVNVSGHRLSTAEIEAALILHESVAECAVVGYADELTGQAVAAYVSLKSNVSEDLEVIKKELILTVRKEIGPFATPKTILLVDDLPKTRSGKIMRRILRKVLAGEEDQLGDISTLSNPGVVAQIIDVVKATRK

SEQ ID NO: 122138 - DNA, 2124 bp, Kluyveromyces lactis
  CDS (1)..(2124)
atgtctcctgctgttgataccgcttccaccgccaaagatccaatctcagtcatgaaatctaacgcttcagctgccgctgcagaccaaattaagacccatgaatacgaacatttaacttctgtgcctatagtgcagcctctaccaattactgataggttgagcagcgaagcagctcaaaaatataaacctaatttgccaggtgggttcgaagagtacaagtctttgcacaaggaatcacttgaaaatccagccaagttttaccatgaacgtgctcagctgttgaattggttcaaaccatacgatcaagttttcatcccagataccgaaggtaaaccaacttttgagaacaacgcttggtttaccaacggtcaattgaacgcttgttacaatttggtagacagacatgccttcactcaaccaaacaaggttgccattctttatgaagctgatgaaccaggtcaaggttatagtctcacttatgcggaattgttagaacaagtctgtaaagttgctcaaatcttgcaatactcgatgaacgtcaagaaaggtgacacggtcgcagtttatatgccaatgatcccacaggctttgattaccttgttggcaattactcgtatcggtgccattcattccgttgtttttgctgggttctcttcgaattcattgcgtgatcgtattaacgatgcttactcaaagacagtcatcaccaccgatgaatctaagagaggtggtaagaccatcgaaaccaagcgtatcgtcgatgaagccttgaaggatacccctcaagtaacaaacgttttggtcttcaaacgtactcataacgaaaatatcaagtacattccaggtagggatttggactgggatgaggaagtcaagaagtacaaatcttacaccccatgcgaacctgttgactctgaacatcctttgttcttattgtatacttcgggttccaccggtgctccaaagggtgttcaacattctacagcaggttacttgctccaagcattattaagtatgaaatacacctttgacatccaaaacgatgacatcttcttcaccgcaggtgacattggttggatcactggtcacacatactgtgtttacggtccattgttacaaggttgtactactttggtgttcgaaggtacacctgcctatccaaacttttctcgttattgggaaattgttgacaagtaccaagtgactcaattctatgtagccccaactgcactacgtctattgaagagagctggtgattcctttactgaaggattctctctcaagtcattgcgctccttgggttccgttggtgaacctatcgctgctgaagtttgggaatggtactctgaaaagattggtaagaatgagctaccaatcgtagacacatactggcaaactgaatctggctcccacttggtcactccattggctggtggtgctactccaatgaaaccaggtgcagcggcattcccattctttggtattgatttggcagtgttggatccaaccacaggtatcgagcaaactggtgaacatgcagaaggtgttcttgccattaaaagaccttggccatctttcgcaagaaccatttggaagaataacgataggttcttagacacgtacttgaaaccatacccgggctattacttcactggtgatggtgttgcccgtgataaagatggattcttctggatcttgggtcgtgttgatgatgttgttaacgtctcaggtcacaggttgtctactgctgaaattgaagctgctatcattgaagatgatatggttgccgaatgtgcagttgttgggtttaacgacgaattgactggtcaagccgttgctgcctttgtagtattgaagaacaagtctagtttaactgctgcaagcgagtccgagttacaagacatcaaaaagcatttgatcatcaccgttagaaaggatattggtccattcgctgctcctaagttgatcgtcctagttgatgatctaccaaagactagatctggcaagattatgagacgtattttgagaaagatcctagccggtgaatctgatcaattgggcgacgtctccacattatccaaccctggtatcgttaagcacttgatcgattccgtgaaattataa

SEQ ID NO: 122139 - protein, 707 aa, Kluyveromyces lactis
MSPAVDTASTAKDPISVMKSNASAAAADQIKTHEYEHLTSVPIVQPLPITDRLSSEAAQKYKPNLPGGFEEYKSLHKESLENPAKFYHERAQLLNWFKPYDQVFIPDTEGKPTFENNAWFTNGQLNACYNLVDRHAFTQPNKVAILYEADEPGQGYSLTYAELLEQVCKVAQILQYSMNVKKGDTVAVYMPMIPQALITLLAITRIGAIHSVVFAGFSSNSLRDRINDAYSKTVITTDESKRGGKTIETKRIVDEALKDTPQVTNVLVFKRTHNENIKYIPGRDLDWDEEVKKYKSYTPCEPVDSEHPLFLLYTSGSTGAPKGVQHSTAGYLLQALLSMKYTFDIQNDDIFFTAGDIGWITGHTYCVYGPLLQGCTTLVFEGTPAYPNFSRYWEIVDKYQVTQFYVAPTALRLLKRAGDSFTEGFSLKSLRSLGSVGEPIAAEVWEWYSEKIGKNELPIVDTYWQTESGSHLVTPLAGGATPMKPGAAAFPFFGIDLAVLDPTTGIEQTGEHAEGVLAIKRPWPSFARTIWKNNDRFLDTYLKPYPGYYFTGDGVARDKDGFFWILGRVDDVVNVSGHRLSTAEIEAAIIEDDMVAECAVVGFNDELTGQAVAAFVVLKNKSSLTAASESELQDIKKHLIITVRKDIGPFAAPKLIVLVDDLPKTRSGKIMRRILRKILAGESDQLGDVSTLSNPGIVKHLIDSVKL

SEQ ID NO: 122140 - DNA, 2064 bp, Ashbya gossypii; identical to SEQ ID NO: 28604
  CDS (1)..(2064)

SEQ ID NO: 122141 - protein, 687 aa, Ashbya gossypii; identical to SEQ ID NO: 28605

SEQ ID NO: 122142 - DNA, 2052 bp, Candida glabrata
  CDS (1)..(2052)
atgacattaaaagaacataagactgtgcatgaagcacagaacgctgttgctcgccaagctccagagcatttctacaagagccagccaagcagaggtggtttcataaaggacatctccgaatatgaaagactttacaagcagtcgattgaggacccagagactttcttcagtgaaaaggctcgtgaactattgcactgggacgccccattctctaaagtatcgtacggttctctagagcaaggtgatgtcgcttggttcctaaacggtaaactaaacgcctcttacaactgtgtggacagacacgcctttgccaacccagacaagcctgccattatctatgaagcagacgacgagaaggacaactataccatcacttttggtgaattgctgagaagagtatctaaggttgctggtatcttgaagagctggggtgtcaagaaaggtgacactgttgccatttacttgccaatgatcccagaagctattattgctatgttggccgttgtgcgtcttggtgccatccactctgtcgtcttcgccggtttctcagctggttctttgaaagaccgtgtagtcgatgctggttccaaggttgtcatcacttgtgatgaaggccgtagaggtggtaagactgtccacttgaagaaaatcgttgatgaaggtttgaacggtgtcgatcaagtctctcgtattttggttttcaagagaacaggtactgaaggtattccaatgaaggctggtagagatttctggttgcacgaggaagctgacaagagaagatcatatctaccacctgttccatgtgatgccgaagatccactattcctactatatacatctggttctaccggctctccaaagggtatcgtgcacactactggtggttatttgctaggtgccgctatgactactaagtacgtcttcgatgttcatccagaggatgttttcttcactgctggtgatgtcggctggattacaggtcacacctacgctctatacggtccattgttgctaggtgtaccaactatctgcttcgaatctacaccagcttacccagattacggtagatactggagaattgtcgaacgtcacaaggccacccacttctacgttgcaccaactgctatgagattgattaagcgtgttggtgaagctgaaattagcaagtacgacttgtcctccctacgtgtcctaggttctgtcggtgaaccaatttctcctgaactatgggaatggtacaacgaaaagattggtaacaacaattgtgttgtttgtgacactttctggcaaactgaatccggttctcatttgattgccccaatggcgggtgccatcccaaccaaaccaggttctaccactcttccattcttcggtattgatgcttgtatcattgatccagtttctggtgttgaaattgaaggaaacgatgtcgaaggtgttttagctgttaaatcaccatggccatccatggctagatctgtctggaacgatcacgttcgttatgtcgacacttacatgaagccatacccaggttactactttacaggtgatggtgctggtagagaccacgatggttactactggatcagaggtagagttgacgatgttgttaacgtctctggtcataggttatctactgcagaaattgaagcctgtttggttaaccatgagaatatctctgagaccgctgtggttggtatcaatgacgaattgaccggtcaagctgttattgcattcgtatcattgaaggaaggctacctacaaaatgatgccccagaaggtgatgctgaacatattactcctagtaacttacgtagagagttgattctacaagtcagaggtgaaattggtccattcgcttctccaaagtgtattatcttggtcagagacctaccaaaaaccagatctggtaagatcatgagaagagttttaagaaagatcgcttccaatgaagcagaccaactaggtgatttgtctactttggctaatgctgatgttgttcctgccattatctctgcctgcgaaaaccaattcttcgcagaaaagaaataa

SEQ ID NO: 122143 - protein, 683 aa, Candida glabrata
MTLKEHKTVHEAQNAVARQAPEHFYKSQPSRGGFIKDISEYERLYKQSIEDPETFFSEKARELLHWDAPFSKVSYGSLEQGDVAWFLNGKLNASYNCVDRHAFANPDKPAIIYEADDEKDNYTITFGELLRRVSKVAGILKSWGVKKGDTVAIYLPMIPEAIIAMLAVVRLGAIHSVVFAGFSAGSLKDRVVDAGSKVVITCDEGRRGGKTVHLKKIVDEGLNGVDQVSRILVFKRTGTEGIPMKAGRDFWLHEEADKRRSYLPPVPCDAEDPLFLLYTSGSTGSPKGIVHTTGGYLLGAAMTTKYVFDVHPEDVFFTAGDVGWITGHTYALYGPLLLGVPTICFESTPAYPDYGRYWRIVERHKATHFYVAPTAMRLIKRVGEAEISKYDLSSLRVLGSVGEPISPELWEWYNEKIGNNNCVVCDTFWQTESGSHLIAPMAGAIPTKPGSTTLPFFGIDACIIDPVSGVEIEGNDVEGVLAVKSPWPSMARSVWNDHVRYVDTYMKPYPGYYFTGDGAGRDHDGYYWIRGRVDDVVNVSGHRLSTAEIEACLVNHENISETAVVGINDELTGQAVIAFVSLKEGYLQNDAPEGDAEHITPSNLRRELILQVRGEIGPFASPKCIILVRDLPKTRSGKIMRRVLRKIASNEADQLGDLSTLANADVVPAIISACENQFFAEKK

SEQ ID NO: 122144 - DNA, 2040 bp, Debaryomyces hansenii; identical to SEQ ID NO: 28606
  CDS (1)..(2040)

SEQ ID NO: 122145 - protein, 679 aa, Debaryomyces hansenii; identical to SEQ ID NO: 28607

SEQ ID NO: 122146 - DNA, 2055 bp, Kluyveromyces lactis; identical to SEQ ID NO: 28608
  CDS (1)..(2055)

SEQ ID NO: 122147 - protein, 684 aa, Kluyveromyces lactis; identical to SEQ ID NO: 28609

SEQ ID NO: 122148 - DNA, 2052 bp, Saccharomyces cerevisiae; identical to SEQ ID NO: 28610
  CDS (1)..(2052)

SEQ ID NO: 122149 - protein, 683 aa, Saccharomyces cerevisiae; identical to SEQ ID NO: 28611

SEQ ID NO: 122150 - DNA, 2028 bp, Zygosaccharomyces bailii; identical to SEQ ID NO: 28612
  CDS (1)..(2028)

SEQ ID NO: 122151 - protein, 675 aa, Zygosaccharomyces bailii; identical to SEQ ID NO: 28613

SEQ ID NO: 122152 - DNA, 1956 bp, Pseudomonas aeruginosa
  CDS (1)..(1956): transl_table=11
atgtctgcggcatccctgtaccccgtgcacccggaagcggtggcacggaccttcaccgacgaagccacctacaagacgatgtaccagcagtccgtcgtcaaccccgacggcttctggcgcgagcaggcccagcggatcgactggatcaagccgttcgagaaggtcaagcagacctccttcgacgaccatcacgtggacatcaagtggttcgccgacggcaccctcaacgtgtcgcacaactgcctcgaccgtcacctcgccgaacgcggcgaccaggtggcgatcatctgggaaggcgacgatcccgccgaccaccaggaaatcacctaccgccagctccacgagcaggtctgcaagttcgccaacgccctgcgcgggcaggacgtgcaccgcggcgacgtagtgaccatctacatgccgatgatccccgaggccgtggtcgccatgctcgcctgcacccgcatcggcgcgatccactcggtggtcttcggcggcttctcccccgaggccctggcaggacgcatcatcgattgcaagtcgaaggtggtgatcaccgccgacgaaggcgtgcgcggcggcaagcgcactccgctgaaggccaatgtcgacgacgccctgaccaacccggaaacctccagcgtgcagaagatcatcgtctgcaagcgtaccggtgcggagatcaagtggaaccagcaccgcgacgtctggtacgacgacctgatgaaggttgccggcagcacttgcgcacccaaggaaatgggcgccgaggacccgctgttcatcctctacacctccggctccaccggcaagccgaagggcgtgctgcataccaccggcggctacctggtgtacgcctcgctgacccacgagcgggtcttcgactaccgtccgggcgaagtctactggtgcaccgccgacatcggctgggtcaccggccacacctacatcgtctatggcccgttggccaacggcgccaccaccattctgttcgagggcgtgccgaactaccccgacgtgacccgcgtggcgaaaatcatcgacaagcacaaggtcaacatcctctacaccgcgccgaccgcgatccgcgcgatgatggccgaaggcaaggcggcggtggccggtgccgacggttccagcctgcgtctgctcggttcggtgggcgagccgatcaacccggaagcctggcagtggtactacgagaccgtcggccagtcgcgctgcccgatcgtcgacacctggtggcagaccgagaccggcgcctgcctgatgaccccgctgccgggcgcccacgcgatgaagccgggctctgcagccaagccgttcttcggcgtggtaccggcgctggtggacaacctcggcaacctgatcgagggcgccgccgagggcaacctggtgatcctcgactcctggccgggccaggcgcggaccctgttcggcgaccatgaccgcttcgtcgacacctacttcaagaccttcaagggcatgtacttcaccggcgacggcgcgcgccgcgacgaggacggctactactggatcaccgggcgggtcgacgacgtgctcaacgtctccggccaccgcatgggcaccgccgaggtggaaagcgcgatggtcgcccacccgaaggtcgccgaggcggcggtggtcggcatgcagcacgacatcaaggggcagggcatctatgtctacgtcaccctcaactccggggtcgagccgagcgaggcgctgcgccaggagctgaagcaatgggttcgccgcgagatcggtccgatcgccacgccggatgtgatccagtgggcgccgggactgccgaagacccgttcgggcaagatcatgcggcgcatcctgcgcaagatcgccgcggccgagtacgacaccctcggcgacatctccacccttgccgacccgggcgtggtccagcacctgatcgagacccatcgctcgatgcaggccgcctga

SEQ ID NO: 122153 - protein, 651 aa, Pseudomonas aeruginosa [sequence omitted]

SEQ ID NO: 122154 - DNA, 1962 bp, Pseudomonas putida
  CDS (1)..(1962): transl_table=11
atgagtgcggctccactgtatcccgttcgtcccgaggttgcggccactaccctgaccgacgaggccacctacaaggccatgtaccagcaatcggtgatcaacccggacggcttctggcgcgagcaggcccagcgtatcgactggatcaagccgttcaccaaggtcaagcagacctccttcgacgaccaccatgtcgatatcaaatggttcgccgacggcactctgaacgtttcctccaactgcctggaccgccaccttgaagagcgcggtgaccagttggccatcatctgggaaggtgacgacccttccgagcaccgcaacatcacttaccgcgagttgcacgagcaggtctgcaagttcgccaacgccctgcgtggccaggatgtgcaccgcggtgacgtggtcaccatctatatgccgatgatccccgaagcggtggtcgccatgctggcctgtgcacgcattggtgcgattcactcggtggtgttcggtggcttctcgcccgaggcgctggctggccgtatcatcgactgcaaatccaaggtggtgatcactgccgacgaaggcgtgcgtggtggccgccgtaccccgctcaaggccaacgtcgacctggcgctgaccaaccctgaaaccagcagcgtgcagaaaatcatcgtgtgcaagcgcaccggtggcgacattgcctggcaccagcaccgcgacatctggtacgaagacctgatgaaagtggcctccagccactgcgcccccaaagaaatgggtgctgaagaggcgctgttcatcctttatacctccggctccaccggcaagccgaagggcgtgctgcacaccacaggcggttacctggtttacgccgcgctgacccatgaacgggtgttcgattaccgtccgggcgaggtgtactggtgcaccgccgacgtcggttgggtcacaggccacagctatatcgtctacggcccgctggccaacggcgccaccaccttgctgttcgaaggcgtgcccaactacccggacattacccgcgtatcgaagatcgtcgacaagcacaaggtcaacatcctctacacagcgccaactgccattcgcgccatgatggccgaagggcaggcagctgttgaaggcgccgacggttccagcctgcgtctgctggggtcggtgggtgagccgatcaaccctgaggcctggaactggtactacaagaccgtcggcaaggagcgttgcccgatcgtcgacacctggtggcagaccgagaccggcggcattctgatcagcccgctgcctggtgccaccggcctcaagccgggttcggcaacccgcccgttcttcggtgtggtgcctgccctggtcgataacctgggcaacctgatcgacggtgctgccgaaggcaacctggtaatcctcgactcctggccgggtcagtcgcgttcgctgtacggcgaccatgaccgcttcgtcgacacctacttcaagaccttccgtggcatgtacttcactggcgacggtgcgcgccgcgacgaggacggttactactggatcaccggccgtgtggatgacgtgctcaacgtgtccggccaccgcatgggcactgccgaaatcgaaagcgccatggtcgcgcactcgaaggttgccgaggctgcagtggttggcgtgccgcatgacatcaaagggcagggcatttatgtgtatgtcaccctcaatgccggcatcgaggccagcgagcaattgcgcctggagctgaagaactgggtgcgcaaggagatcggcccgattgcttcgccggatgtgatccagtgggcgccggggctgccgaagacccgctcgggcaagatcatgcgccgcatcctgcgcaagatcgccaccggtgagtacgacgccctgggcgatatctcgaccttggctgacccgggtgtggtacagcacctgatcgatacccacaaggcgatgaacctggcttcggcgtaa

SEQ ID NO: 122155 - protein, 653 aa, Pseudomonas putida
MSAAPLYPVRPEVAATTLTDEATYKAMYQQSVINPDGFWREQAQRIDWIKPFTKVKQTSFDDHHVDIKWFADGTLNVSSNCLDRHLEERGDQLAIIWEGDDPSEHRNITYRELHEQVCKFANALRGQDVHRGDVVTIYMPMIPEAVVAMLACARIGAIHSVVFGGFSPEALAGRIIDCKSKVVITADEGVRGGRRTPLKANVDLALTNPETSSVQKIIVCKRTGGDIAWHQHRDIWYEDLMKVASSHCAPKEMGAEEALFILYTSGSTGKPKGVLHTTGGYLVYAALTHERVFDYRPGEVYWCTADVGWVTGHSYIVYGPLANGATTLLFEGVPNYPDITRVSKIVDKHKVNILYTAPTAIRAMMAEGQAAVEGADGSSLRLLGSVGEPINPEAWNWYYKTVGKERCPIVDTWWQTETGGILISPLPGATGLKPGSATRPFFGVVPALVDNLGNLIDGAAEGNLVILDSWPGQSRSLYGDHDRFVDTYFKTFRGMYFTGDGARRDEDGYYWITGRVDDVLNVSGHRMGTAEIESAMVAHSKVAEAAVVGVPHDIKGQGIYVYVTLNAGIEASEQLRLELKNWVRKEIGPIASPDVIQWAPGLPKTRSGKIMRRILRKIATGEYDALGDISTLADPGVVQHLIDTHKAMNLASA

SEQ ID NO: 122156 - DNA, 1938 bp, Pseudomonas aeruginosa
  CDS (1)..(1938): transl_table=11
atgttcgagatcagcgtccacccggtgccggacgccgtccgccagcgtgcctacctgaacgacgacgactaccagcgcctgtaccgccaatccgtcgagaaccccgacgagttctggggcgagcaggccaaggccttcctcgattggttcaagccctggcacagcgtccaccacggcgacctgaggaaaggccaggccacttggttcaagggcggccagttgaacgtcgcctacaactgcatcgatcgccacctggaacgccgcggcgaacagatcgcgatcgtctgggaaggcgacaaccccagcgaatccgcgcacatcacctaccgcaagctgcaccacaacgtctgccgcctggctaacgtgctgaagagccgcggcgtggaaaagggcgaccgggtctgcatctacatgccgatgattcccgaggccgcctacgccatgctcgcctgcgcccgtatcggggcggtgcactcggtggtgttcggcggcttctcgccggactcgctgcgcgaccgcatcctcgatgccgactgccgcaccgtgatcaccgccgacgagggcgtgcgcggcggcaagtacatcccgctgaagcagaatgtggaaaaggcactgaaggactgcccggacgtctctaccgtggtggtggtcgagcgcacccagggcgacataccctgggtcgaaggccgcgacatctggtaccacgaggcgctccacgcggcctcagccgactgcccggcggaagcgatggacgccgaggacccgctgttcatcctctatacctccggcagcaccggcaagccgaagggcgtgttgcacaccaccgggggctacctgctcggcgcggcgatgacccacaagtacgtgttcgactaccacgatggcgacgtctactggtgcaccgccgacgtcggctgggtcaccggacacagctatatcgtctacggcccgctggccaacggcgccaccaccctcatgttcgagggcgtgcccaactacccggacgcctcgcgcttctggcaggtgatcgacaagcaccaggtgaatatcttctacaccgcgccgaccgcgatccgcgcgctgatgcgcgaaggcgacgccccggtccgccagacctcgcgcagcagcctgcgcctgctcggctcggtgggcgagccgatcaacccggaggcttgggagtggtactaccaggtggtcggcgagaagcgctgccccatcctcgatacctggtggcagaccgagaccggcagcatcctgatcaccccgttgcccggcgccactgcgctaaagccaggctcggctacccgcccgttcttcggcgtgcaacccgtgctgctcgacgagaaaggcaaggaaatcgacggcgcgggcagcggcgtactggcgatcaaggccagttggccgagtcagatccgcagcgtctacggcgaccaccagcggatgatcgacacctacttcaagccctaccccgggtattacttcagcggcgacggcgcgcgccgcgacgaggacggctactactggatcaccggccgggtcgacgacgtgatcaatgtctccggacaccggatcggcaccgccgaggtcgagagcgcgctggtcctgcacgatgcggtggccgaggcggcagtggtcggctgcccgcatgacgtgaagggccaggccatctacgcgttcgtcaccctgatggccggcagtcagcccagcgaggcgctacaacaggaattgctggccctggtcggcaaggagatcggcagcttcgccaagccggatcacctgcaatgggcgcccagcctgccgaagacccgctccggcaagatcatgcggcgtatcctgcgcaagatcgcctgcaacgagctggacagtctcggcgatacctcgaccctggccgatccgggagtggtgcaggggttgatcgacaaccgcctcaaccgctga

SEQ ID NO: 122157 - protein, 645 aa, Pseudomonas aeruginosa [sequence omitted]

SEQ ID NO: 122158 - DNA, 1935 bp, Pseudomonas putida
  CDS (1)..(1935): transl_table=11
atgttcgatatccgcaaatacccccaggccctggccgtcagccagtccgccgccctcacccccgaagactaccgccgcctctaccgccagtcggtcgaagacccagacaccttctgggccgaacaggccaaacgcctggactggatcaaaccgtggtcaagcgtgcagcaatgcgacctgcataccggcaaggcccgctggttcgacggtgcgcaactcaacgtcagctacaactgcatcgaccgtcacctggcccagcgcggcgagcaaacggccctgctgtgggaaggcgacgatcccaaggactccaaggccatcacctaccgcgaactgcaccgtcaggtctgccgcctggccaatgcaatgaaagcgcgcggtgtgaagaaaggcgaccgggtaagcatctacatgccaatgattcccgaggccgccttcgccatgctcgcctgcacccgcatcggcgccatccactcggtggtgttcggcggtttctcccccgatgccttgcgagaccgcattctcgatgccgactgccgcaccgtgatcaccgccgatgaaggcgtgcgtggcggcaaacgcatcccgctgaaacagaacgtcgacaaggccctggccagctgcccagcggtcagtagcgtgttggtggtgcgccgcactggcggcgatgttgcctggaccgagggccgcgacctctggtatcacgaagcgacgaaggatgccggcgacgactgccccccagaaccgatggaggccgaagacccgctgttcatcctctacacctccggcagcaccggcaaacccaaaggggtgctgcataccaccggcggctacctgctgcaggcaacgatgaccttcaaggtggtgttcgattatcgtgacggcgaggtgttctggtgcaccgccgatgtcggctgggtgaccggccacagctacatcgtctatggcccgctggccaatggcgcaatctcgctgatgttcgaaggcgtgcccaactaccccgatacctcgcgcttctggcaggtggtggacaagcaccaggtgaacatcttctacaccgccccgaccgccctgcgcgcactgatgcgtgagggctccgcgccactgcagagcacctcacgcaaaagcctgcgtctgctgggcagcgtcggcgagccgatcaacccggaagcctgggaatggtacttcgaggaggtcgggcaaaagcgctgcccgattgtggatacctggtggcagaccgaaaccggcggcatcatgctcaccccactgcccggcacacagtcactcaaacccggctgcgccacccagccgatgttcggcgtgcaaccggtgctgctggacgaaaaaggcaaactgatcgaaggccccggcgccggcgtgctggcgatcaaagccagctggcccgggcagatccgcagcgtctacggcgaccaccagcggatggtcgacacctacttcaagcccctgcccggctactacttcactggcgacggtgcccgtcgcgatgccgacggcgactactggatcaccgggcgcatcgacgatgtgatcaacgtgtccgggcaccgcatcggcaccgctgaagtggaaagtgcactggtgctgcatgacagcgtggccgaagccgcggtggtcggctacccccacgacctcaagggccaaggcgtctacgccttcgtcacgaccatgaatggcgtgacaccagatgacacgctcaaggccgagctgctggccctggtcagcaaggaaatcggcagcttcgccaagcctgagctgattcagtgggcgccagcgctacccaagacgcgctcaggcaagatcatgcggcgtatactgcgcaaaatcgcctgcaatgagctggaaaacctgggcgatacctcgaccctggccgacccgagcgtggtacagggcctgatcgacaaacgcctcaaccagtaa

SEQ ID NO: 122159 - protein, 644 aa, Pseudomonas putida [sequence omitted]

SEQ ID NO: 122160 - DNA, 1959 bp, Agrobacterium rhizogenes
  CDS (1)..(1959): transl_table=11
atgtcggaaaagatttatccggtcgccaagccggtggagagccatgcgttgatcaacaaggccgagtaccaggaatggtacgcggaaagcgtcgccgaccccgagcagttctggggcaagcacggcaagcgcattgactggttcaagccctacaccagcgtaaaggacacctcctttaccggcgacgtctcgatcaaatggttcgaggacggtgagaccaatgtctcctacaactgcatcgaccggcacctcgcgacaaacggcgaccaggtcgccatcatctgggaaggcgacgatccgtcgctcgacaggaagatcacctaccgcgagctctacgagcacgtctgtcgtatggcgaacgtcctgaagaagcacggggtcaagaagggcgaccgcgtcaccatctacatgccgatggtgccggaagcggcctatgcgatgctcgcctgcgcccgtatcggcgcgatccattcggtggtgttcggcggcttttcacccgaggcgctgggtggccgtatcgtcgattgccagtcgaccttcgtcatcacttgcgacgaaggcctgcgcggcggcaagccggttccgttgaaagccaatgtcgacaaggcgatcgatatcgccgcgcgcggtcacgtcatggtcaagaacgttctggtgatccgccgcaccggcagcccgctcagttgggcgccgggccgcgacctctggcatcacgaggaagcagccactgtttcggcggactgcccgcccgagccgatgaaagccgaggatccgctgttcatcctctatacgtcaggctcgaccggcaaaccgaagggcgttctacacaccaccggcggctatctcgtttacgcctcgatgacgcatgaatatgtgttcgactaccagcacggtgatatctactggtgcacggccgatgtcggctgggtcaccggacattcctatatcgtctatgggccgctcgccaactgcgcgacgacgctgatgttcgaggggatcccgaccttccccgatgctggccgtttctgggatgtgatcgacaagcacaaggtcaacatcttctacaccgcgccgaccgcaatccgctcgctgatgggcgccggcgatgatttcgtcaaacgatccagccgatccagcctgcgattgcttggctcggtcggcgagccgatcaatccggaagcctgggaatggtactatcatacggtcggcgacgggcgctgccctgttgtcgatacctggtggcagacggaaaccggcggcatcatgatcacgccgctgcctggcgcgaccgacctgaagcccggctcggctacacggcccttcttcggcatcagaccggagctcgtcgatgccgaaggcaagctcatcgaaggggccgccgacggtaatctttgcatcgccgacagctggccgggtcaggcgcgttcggtctatggcgaccacgagcgcttcatccagacctacttctccacctacgaggggaaatatttcaccggcgacggctgtcgccgcgacgccgatggctactactggatcaccggccgtgttgacgacgtgctcaacgtctccggccaccggctcgggacggcggaagtcgaatccgccctggtatcgcatcacctcgtctccgaggcagccgtcgtcggctatccgcacaacatcaagggccagggcatctattgctatgtcacgctgatggcgggcagcgaagggtccgaagagctccgccagcagctggtgaaacatgtccgcgcggaaatcgggccgatcgcctcgcctgataagatccagttcgcgccgggcctgccgaagacccgctcgggaaagatcatgcgccgcatcctgcgcaagatcgccgaggacgatttcgggtcgctgggcgacacctcgacgcttgccgatcccgctgtcgtcgacgacctgatcgccaaccggcagaacagagccgaggcggcctag

SEQ ID NO: 122161 - protein, 652 aa, Agrobacterium rhizogenes
MSEKIYPVAKPVESHALINKAEYQEWYAESVADPEQFWGKHGKRIDWFKPYTSVKDTSFTGDVSIKWFEDGETNVSYNCIDRHLATNGDQVAIIWEGDDPSLDRKITYRELYEHVCRMANVLKKHGVKKGDRVTIYMPMVPEAAYAMLACARIGAIHSVVFGGFSPEALGGRIVDCQSTFVITCDEGLRGGKPVPLKANVDKAIDIAARGHVMVKNVLVIRRTGSPLSWAPGRDLWHHEEAATVSADCPPEPMKAEDPLFILYTSGSTGKPKGVLHTTGGYLVYASMTHEYVFDYQHGDIYWCTADVGWVTGHSYIVYGPLANCATTLMFEGIPTFPDAGRFWDVIDKHKVNIFYTAPTAIRSLMGAGDDFVKRSSRSSLRLLGSVGEPINPEAWEWYYHTVGDGRCPVVDTWWQTETGGIMITPLPGATDLKPGSATRPFFGIRPELVDAEGKLIEGAADGNLCIADSWPGQARSVYGDHERFIQTYFSTYEGKYFTGDGCRRDADGYYWITGRVDDVLNVSGHRLGTAEVESALVSHHLVSEAAVVGYPHNIKGQGIYCYVTLMAGSEGSEELRQQLVKHVRAEIGPIASPDKIQFAPGLPKTRSGKIMRRILRKIAEDDFGSLGDTSTLADPAVVDDLIANRQNRAEAA

SEQ ID NO: 122162 - DNA, 1956 bp, Agrobacterium tumefaciens
  CDS (1)..(1956): transl_table=11
atgtctgccaaaatctacccggtgctcaaatcggcgaaagcccgcacgctcatcgacaatgagcgttaccagaaatggtatcaggagagcgtcgaggatccggaaaaattctgggacaagcacggccggcggatcgactggttcaagccctataccaaggtcaagaacacctcattcaaggggcgtgtgccgatcaaatggttcgaagacggcctgacgaacgtctcctataactgtatcgaccggcatttgaagacgcatggcgagcgcacggcgatcatctgggaaggcgacaatccctatatcgacaagaagatcacctataaccagctctatgattatgtctgccgtctggccaatgtgctgaagaagcacggcgttaagaagggtgaccgcgtcaccatctacatgccgatgattcccgaggcggcctatgccatgcttgcctgcgcccgcatcggtgccgtgcattccgtcgtctttggcggcttctcgcccgaagcgctggccggtcgtatcgttgactgcgaatcgaccttcgtcatcacctgcgatgaaggcgttcgcggcggcaagccgatcccgctcaaggaaaataccgacaaggcgatcgatatcgccgccaagcaatatgtcatcgtcaacaaggttctggtcgtgcgccgcaccggcggcaagaccggctgggcgccgggccgcgacatctggtatcatcaggaaattgcgaccgtgaagccggattgcccgccggtgaagatgcgggcggaagatccgctgttcatcctctacacttcaggctccaccggcaagcccaagggtgtgttgcacaccacgggcggctatctcgtctatacgtcgatgacgcatgaatatgtgttcgattacaaggatggtgaagtcttctggtgtacggccgatgttggctgggttaccggccattcctacatcgtctacgggccactcgccaattgtgcgacaacgctgatgttcgagggtgttcccaacttcccggatcaggggcgtttctgggaggtcatcgacaagcacaaggtcaatatcttctataccgcgccgacggcgctccgatcgctgatgggggcgggcgaccagttcgttcagcgctcgtcgcgcgaaagcctgcggcttctcggaacggtgggtgagccgatcaatccggaagcgtgggagtggtattaccatgtggtcggcgaggacaagagcccgatcgtagacacctggtggcagacggaaacgggcggcattctcatctcgccgttgccgggtgcgaccgatctgaagccagggtcggcaacaaggccgttcttcggcgtgcagccgcagcttgtcgatgccgagggcaatgtgctggaagggccggcggacggcaatctctgcatcatcgacagctggccgggccagtcgcggtccgtttatggggatcaccagcgattcgtcgacacctacttctcgacctacaagggcaagtacttcaccggtgacggctgccggcgcgacgaggacggttattactggatcacaggtcgcgtcgatgacgtgctcaacgtctccggccaccgcctaggcacggccgaggtagaatcggcactggtctcgcatcatcaggtttcggaagcggcggtggtcggttatccgcaccccatcaaggggcagggcatttattgttatgtcacgctgatggcggggcagagtggcgattatgcgctgcgcgaggagctggtaaagcatgtgcgcaacgagatcggaccggttgcgacgcccgacaagatccagtttgcgcccggcctgccgaagacccgctcaggcaagatcatgcggcgcattctgcgcaaaatcgccgaggacgatttcggtgcgcttggggatacgtcgacgcttgccgatccggcggtggtggaagatctcatcgccaaccgccagaaccgcacggcgtcctga

SEQ ID NO: 122163 - protein, 651 aa, Agrobacterium tumefaciens
MSAKIYPVLKSAKARTLIDNERYQKWYQESVEDPEKFWDKHGRRIDWFKPYTKVKNTSFKGRVPIKWFEDGLTNVSYNCIDRHLKTHGERTAIIWEGDNPYIDKKITYNQLYDYVCRLANVLKKHGVKKGDRVTIYMPMIPEAAYAMLACARIGAVHSVVFGGFSPEALAGRIVDCESTFVITCDEGVRGGKPIPLKENTDKAIDIAAKQYVIVNKVLVVRRTGGKTGWAPGRDIWYHQEIATVKPDCPPVKMRAEDPLFILYTSGSTGKPKGVLHTTGGYLVYTSMTHEYVFDYKDGEVFWCTADVGWVTGHSYIVYGPLANCATTLMFEGVPNFPDQGRFWEVIDKHKVNIFYTAPTALRSLMGAGDQFVQRSSRESLRLLGTVGEPINPEAWEWYYHVVGEDKSPIVDTWWQTETGGILISPLPGATDLKPGSATRPFFGVQPQLVDAEGNVLEGPADGNLCIIDSWPGQSRSVYGDHQRFVDTYFSTYKGKYFTGDGCRRDEDGYYWITGRVDDVLNVSGHRLGTAEVESALVSHHQVSEAAVVGYPHPIKGQGIYCYVTLMAGQSGDYALREELVKHVRNEIGPVATPDKIQFAPGLPKTRSGKIMRRILRKIAEDDFGALGDTSTLADPAVVEDLIANRQNRTAS

SEQ ID NO: 122164 - DNA, 1947 bp, Bradyrhizobium japonicum
  CDS (1)..(1947): transl_table=11
atgtccgagaagatttacgacgtgccggcggaatgggcaaagcgcgcctgggtcgaccaagccaagtacaaggaaatgtacgcccgctcgatctcggacccgaacggtttctgggccgaacaggccaagcgcatcgactggatgaaggcgccgacgaaaatcgagaacgtctccttcgcgccgggcaacgtctcgatcaaatggttcgaggacggcgtcctcaacgtcgcccataactgcatcgaccgtcatctgcacaagcgcgccaaccagaccgcaatcatctgggaaggtgacgatccctcgcagtcccgccacatcacctacaaggagctccacgacgaggtctgccggatggccaacatcctgcgtacccgcaacgtcaagaagggcgaccgcgtcaccatctacctgccgatgattccggaagcggcctacgcgatgctggcgtgcgcgcggatcggcgcgatccactccgtggtgttcgcgggcttctcgcccgacagcctcgcccaacgcatcaacgactgccagtccaaggtgatcatcaccgccgacgaaggcctgcgcggcggcaagaaggtgccgctgaaggccaatgtcgacgcggcgctcgccaaggccgacggcgtcgactgggtcgtcgtggtcaagcgcaccggcggcaagatcgacatgaacccgacccgcgacctctggtatcacgaggcggcggcgatggtgacgacggaatgcccggtcgagcatatgcacgccgaggatccgctgttcatcctctatacctcaggctcgaccggccagcccaagggcgtgctgcacacctccgccggctatctcgtctatgccgcgatgacgcatcaatacgtcttcgactatcacgacggcgacatctactggtgcaccgccgacgtcggctgggtcacgggccacagctacattctctacgggccgctcgccaacggcgcgaccacgctgatgttcgagggcgtgccgaattatccggacaattcccgcttctggaacgtcatcgacaagcacaaggtcaataccttctacaccgcgccgaccgcgatccgcgcgctgatgcagggtggcgacgagccggtgaagaagacctcgcgcgcctcgctgcgcctgctcggctcggtcggcgagcccatcaatccggaagcctgggagtggtatcaccgcgtcgtcggcgaggaccgctgcccgatcgtcgatacctggtggcagaccgagaccggcggcatcctgatcacgccgctgccgggcgccactaagctcaagccgggctcggcgacgcagcccttcttcggcgtggtgccggagatcgtcgatgccgacggcaaggttctggaaggcgagaccaccggcaatctctgtctcacccgggcatggccgggcatgatgcgcacggtctatggcgatcacgcgcggttcgagcagacctatttctcgacctacaagggcaagtattttacgggcgacggctgccggcgcgacgccgacggctattactggatcaccggccgcgtcgacgacgtcatcaacgtctccggccaccgcatgggcaccgcggaggtcgagagcgcgctggttgcgcatgagaaggtgtcggaagctgccgtcgtcggcttcccgcacgacatcaagggccagggcatctacgcctatgtcaccctgatggccggcgtccagccgaccgaggatctgcgcaaggagctcgtgacctgggtgcgcaaggagatcggcccgatcgcctcgcccgaccagatccagttcgcgccgggcctgcccaagacccgctccggcaagatcatgcgccgcatcctgcgcaagatcgccgaggacgagccgggcagcctgggcgacacctcgaccctggccgatcccgccgtggtcgacgacctcgtcaagaaccggcagaacaagaagtcggcgtaa

SEQ ID NO: 122165 - protein, 648 aa, Bradyrhizobium japonicum [sequence omitted]

SEQ ID NO: 122166 - DNA, 1956 bp, Brucella melitensis
  CDS (1)..(1956): transl_table=11
atgtcggaaaagctttaccccgtgctgccggaggcaaagaaaaacacgctcatcgacaacgagacttatctcgaatggtatgaggagagcgtgagcgacccggatggcttctgggccaagcacggccggcgtatcgactggttcaagcctttcaccaaggtcaagaacaccgatttcaacggcgatgtaacgatcaagtggtatgaggatggcgtcaccaacgtctcatataattgcatcgaccgccatctgaagagccgcggcgacaaggtcgccatcatctgggaaggcgacaacccctatatcgacaagaagatcacctatcgcgagctttacgagaatgtctgccgcatggcgaatgtgctcaagaagcatggggtgaagaagggcgaccgcgtcacgatctatctgccgatgatcccggaagccgcctatgccatgctcgcctgcgcgcgcatcggcgccgtgcattcggtcgtctttgccggtttctcgccggaggcgctcgctggccgcatcgttgactgcgaatccactttcgtcatcaccgccgatgaaggtgtgcgcggcggcaagcctgttgcgctgaaggaaaacaccgataccgccatcgacatcgccgccaagcaatatgtgatggtcaacaaggtgctggtcgtgcgccgcaccggcggcaaggtaagctggggccgcggccgcgatctgtggtaccatcaggaagtcgcaagcgtcgaaccgcattgcgaaccggaaccgatgaatgcggaagacccgcttttcattctctacacatccggttccaccggcaagccgaagggtgtgctgcataccaccggcggctacctcgtctatgcctcgatgacgcatcaatatgtcttcgattaccatgatggcgagatctactggtgcacggcggatgtgggttgggtaacgggccactcctatatcgtctacggaccgctggccaatggcgcgacaacgctgatgtttgaaggcgtgcccaacttccccgatcagggccgtttctgggaagtcgtcgacaagcaccatgtcaatatcttctacaccgcgccaaccgcgctgcgcgcgcttatgggcgcgggcgatgaattcgtaacccgctcatcgcgttcgacgctgcgcctgctgggctcggtcggcgagccgatcaatccagaggcctgggagtggtattacaatgtcgtgggcgaccagaaatgccccatcgtcgatacctggtggcagacggaaaatggcggcatcctcatcaccccacttcccggcgcgaccgatttgaaacccggttcggcaacacgcccgttcttcggcgtcaagccggtgctggtggacaatgaaggcaatgtgcaggagggcgtagccgacggcaacctgtgcatctccgactcctggccgggccagatgcgcaccgtctatggcgaccacaagcgtttcatcgaaacctacttctccacctataaggggatgtatttttcgggcgatggctgccgccgcgacgaggacggctattactggatcaccggccgcgtcgatgacgtgctgaatatttccggccatcgcctcggcacggcggaaatcgaatcggcacttgtctcgcatcactcggtttcggaagccgccgtggtcggctatccgcacccgatcaagggacagggcatctattgctatgtcacgctgatgaccggcgcagacgcgcaggacccggacgagttgcgcaaggaactggtccagcatgtgcgcaaggaaatcggccccatcgccacaccggacaagatccagtttgcgcccggactgccgaaaacccgttccggcaagatcatgcgccgcatcctgcgcaagatcgccgaagacgagttcggcgcattgggcgacacctcaacgctcgccgatcggggcgtggtggacgacctgatcgaaaatcgccagaacaagaaatga

SEQ ID NO: 122167 - protein, 651 aa, Brucella melitensis
MSEKLYPVLPEAKKNTLIDNETYLEWYEESVSDPDGFWAKHGRRIDWFKPFTKVKNTDFNGDVTIKWYEDGVTNVSYNCIDRHLKSRGDKVAIIWEGDNPYIDKKITYRELYENVCRMANVLKKHGVKKGDRVTIYLPMIPEAAYAMLACARIGAVHSVVFAGFSPEALAGRIVDCESTFVITADEGVRGGKPVALKENTDTAIDIAAKQYVMVNKVLVVRRTGGKVSWGRGRDLWYHQEVASVEPHCEPEPMNAEDPLFILYTSGSTGKPKGVLHTTGGYLVYASMTHQYVFDYHDGEIYWCTADVGWVTGHSYIVYGPLANGATTLMFEGVPNFPDQGRFWEVVDKHHVNIFYTAPTALRALMGAGDEFVTRSSRSTLRLLGSVGEPINPEAWEWYYNVVGDQKCPIVDTWWQTENGGILITPLPGATDLKPGSATRPFFGVKPVLVDNEGNVQEGVADGNLCISDSWPGQMRTVYGDHKRFIETYFSTYKGMYFSGDGCRRDEDGYYWITGRVDDVLNISGHRLGTAEIESALVSHHSVSEAAVVGYPHPIKGQGIYCYVTLMTGADAQDPDELRKELVQHVRKEIGPIATPDKIQFAPGLPKTRSGKIMRRILRKIAEDEFGALGDTSTLADRGVVDDLIENRQNKK

SEQ ID NO: 122168 - DNA, 1956 bp, Brucella suis
  CDS (1)..(1956): transl_table=11
atgtcggaaaagctttaccccgtgctgccggaggcaaagaaaaacacgctcatcgacaacgagacttatctcgaatggtatgaggagagcgtgagcgacccggatggcttctgggccaagcacggccggcgtatcgactggttcaagcctttcaccaaggtcaagaacaccgatttcaacggcgatgtaacgatcaagtggtatgaggatggcgtcaccaacgtctcatataattgcatcgaccgccatctgaagagccgcggcgacaaggtcgccatcatctgggaaggcgacaacccctatatcgacaagaagatcacctatcgcgagctttacgagaatgtctgccgcatggcgaatgtgctcaagaagcatggggtgaagaagggcgaccgcgtcacgatctatctgccgatgatcccggaagccgcctatgccatgctcgcctgcgcgcgcatcggcgccgtgcattcggtcgtctttgccggtttctcgccggaggcgctcgctggccgcatcgttgactgcgaatccactttcgtcatcaccgccgatgaaggtgtgcgcggcggcaagcctgttgcgctgaaggaaaacaccgataccgccatcgacatcgccgccaagcaatatgtgatggtcaacaaggtgctggtcgtgcgccgcaccggcggcaaggtaagctggggccgcggccgcgatctgtggtaccatcaggaagtcgcaagcgtcgaaccgcattgcgaaccggaaccgatgaatgcggaagacccgcttttcattctctacacatccggttccaccggcaagccgaagggtgtgctgcataccaccggcggctacctcgtctatgcctcgatgacgcatcaatatgtcttcgattaccatgatggcgagatctactggtgcacggcggatgtgggttgggtaacgggccactcctatatcgtctacggaccgctggccaatggcgcgacaacgctgatgtttgaaggcgtgcccaacttccccgatcagggccgtttctgggaagtcgtcgacaagcaccatgtcaatatcttctacaccgcgccaaccgcgctgcgcgcgcttatgggcgcgggcgatgaattcgtaacccgctcatcgcgttcgacgctgcgcctgctgggctcggtcggcgagccgatcaatccagaggcctgggagtggtattacaatgtcgtgggcgaccagaaatgccccatcgtcgatacctggtggcagacggaaaatggcggcatcctcatcaccccacttcccggcgcgaccgatttgaaacccggttcggcaacacgcccgttcttcggcgtcaagccggtgctggtggacaatgaaggcaatgtgcaggagggcgtagccgacggcaacctgtgcatctccgactcctggccgggccagatgcgcaccgtctatggcgaccacaagcgtttcatcgaaacctacttctccacctataaggggatgtatttttcgggcgatggctgccgccgcgacgaggacggctattactggatcaccggccgcgtcgatgacgtgctgaatatttccggccatcgcctcggcacggcagaaatcgaatcggcacttgtctcgcatcactcggtttcggaagccgccgtggtcggctatccgcacccgatcaagggacagggcatctattgctatgtcacgctgatgaccggcgcagacgcgcaggacccggacgagttgcgcaaggaactggtccagcatgtgcgcaaggaaatcggccccatcgccacaccggacaagatccagtttgcgcccggactgccgaaaacccgttccggcaagatcatgcgccgcatcctgcgcaagatcgccgaagacgagttcggcgcattgggcgacacctcaacgctcgccgatccgggcgtggtggacgacctgatcgaaaatcgccagaacaagaaatga

SEQ ID NO: 122169 - protein, 651 aa, Brucella suis
MSEKLYPVLPEAKKNTLIDNETYLEWYEESVSDPDGFWAKHGRRIDWFKPFTKVKNTDFNGDVTIKWYEDGVTNVSYNCIDRHLKSRGDKVAIIWEGDNPYIDKKITYRELYENVCRMANVLKKHGVKKGDRVTIYLPMIPEAAYAMLACARIGAVHSVVFAGFSPEALAGRIVDCESTFVITADEGVRGGKPVALKENTDTAIDIAAKQYVMVNKVLVVRRTGGKVSWGRGRDLWYHQEVASVEPHCEPEPMNAEDPLFILYTSGSTGKPKGVLHTTGGYLVYASMTHQYVFDYHDGEIYWCTADVGWVTGHSYIVYGPLANGATTLMFEGVPNFPDQGRFWEVVDKHHVNIFYTAPTALRALMGAGDEFVTRSSRSTLRLLGSVGEPINPEAWEWYYNVVGDQKCPIVDTWWQTENGGILITPLPGATDLKPGSATRPFFGVKPVLVDNEGNVQEGVADGNLCISDSWPGQMRTVYGDHKRFIETYFSTYKGMYFSGDGCRRDEDGYYWITGRVDDVLNISGHRLGTAEIESALVSHHSVSEAAVVGYPHPIKGQGIYCYVTLMTGADAQDPDELRKELVQHVRKEIGPIATPDKIQFAPGLPKTRSGKIMRRILRKIAEDEFGALGDTSTLADPGVVDDLIENRQNKK

SEQ ID NO: 122170 - DNA, 1980 bp, Chlorobium tepidum
  CDS (1)..(1980): transl_table=11
atggctactgagcaaacgaaaggccagtcctctgaatcgatcagttcggttctctccgagcggaggaagtttcctccgccggaagcgttctcttcccagtcgcacatttcaagcatggagcagtacgaaaaactctatgccgatgcagccgcggatcccgacaagtactggggcgatctggcggaacagttccactggttcaagaaatgggactcggttcttgaatggaatgctccatatgccaaatggttcaatggcggcaccaccaacatcgcctacaactgccttgacgtgcacgtaggcagctggcgcaagaacaaggcggctatcatatgggaaggtgaagagggcaacgagcgcatcctcacctatggcgagctgcaccgccaggtcagcaaattcgccaacgtcctgaaaatcgccggcatcaaaccgggtgacaaggtggcgatctacatggggatggtgcctgagctggtcatcgccgtgctcgcctgcgcaagggtcggtgcggtgcacaacgtgatcttcgccggttttgccgcccacgccatcaccgaaagggtcaacgactcacgcgccaaaatagtcatctgcgccgacggcacccgccgccgtggtagcaccatcaacctcaaaaatatcgtcgacgaagcgatcatcaacactccttcggtcaaaaacgtcatcgtcctcaaagtgaccggcgaagagatccacatgcacgacggcatggatcactggtggcacgacctgatggggctagccgtggacgaatgcgaaccggcgcaggtcgattccgagcacccgctctttttgctctacaccagcggctcgaccggcaaaccgaaaggcattctgcacaccaccgccgggtacatggtgcacgccgccagctcgttcaaatatgtgttcgacatcaaggacgaggacatctacttctgcaccgccgacatcggctggatcaccggccacacctacataatctacggcccgctgctcaacggcgcaaccgtcttcatgtacgaaggcgctccgaactacccgcagtgggatcgtttctgggacatcatcaatcgccacaagatcacaatcctctacaccgctccgacggctatccgcgccttcatccgcgccggtaacgagtgggtcaccaagcacgacctcagctcgctcaggctgctcggcacggtcggcgaaccgatcaaccccgaggcctggatgtggtaccacaagtatgtcggtcaggaaaaatgcccgatcgtggacacctggtggcagaccgaaaccggcggcatcatgatttcgccgatgccgggcgcgaccccgaccaaaccgggcacagccacccgcccgctgccgggcattatggtcgatgtcgtccgcaaggatggcaccccgtgcaacgccaacgaaggtggctacctggtcgtcaaacgcccatggccctcgatgctccgcaccatctatggtgacaacgagcgttacgaaaagacctactggtctgaattccccggcatgtacttcaccggcgacggtgcaagaaaagatgatgacggctacatctggatcatgggccgcgtcgatgacgtggtcaacgtctcgggtcaccgcctcggcaccagcgaggtcgaaagcgcgctcgtttcacacgaggctgtcgccgaagccgccgtcgtcagccgtccggacgaaatcaagggcaacgccctcgtcgcattcgtgacgctgaaagacggctacgaaggcgacgccaaactgcgcgactcgctcggcaagcacgtcgccaaggagatcggcgctattgctaagcctgacgaaatccgctgggccaaaggtctgccgaaaacccgcagcggcaaaatcatgcgccgcctgcttcgcgaacttgccacttccaacgagatcaaaggcgacgtcaccaccctcgaagacctcggcgtcatcgagaacctccgcgaacaggaagacgaaggctga

SEQ ID NO: 122171 - protein, 659 aa, Chlorobium tepidum [sequence omitted]

SEQ ID NO: 122172 - DNA, 2041 bp, Coprinus cinereus
  CDS (20)..(2005)
caccgcctcgctctctgcaatgtccgaaggtccaatccgagtcgctccccaccccatcgccaagcgcgtcaagcatggctgcaagacgccccatgtctcccacattgacgattaccgaagccagcaccgggaaaccattggtcacgaatcggacaagtggtgggcaaagaaagctcatgagcttctctattgggatcgaccattccatactgtccgctcgggcagcttcgagaatggcgacattgcttggttccccgagggtggtttgaacgcctcctataactgcgttgaccgctgggcgttcaaacatccggaaaagaccgcgattatctacgaagcagatgaacctggcgagggaagggagatctcttacgcggaactcctccgggaagtctgcagcatcgcaaacgtgctcaagtcgttcggcgtcaagaagggcgacaccgtctccgtctacctccccatgacctggcaagccgtcgccgccttcctcgcctgtgcccgcatcggcgccatccactctgtcgtctttgctggcttctcggccgaagcattgcgtgatcgtatgcaagattgcaaatcgcgtgtgctcatcacgtccgatgaagggcggcgcggtgggaaggcgattgctaccaaggccatcgcggatgcggccctcaaggagtgcccggcggttgagaaggtgttggtgttgaagaggacgggtaacccggttccgtggactgagggtcgggatgtgtggtggcacgaggcggtcgccagggtaccgaggtactgccctcccgaggtcatggcatccgaggaccctctcttcatcctctacacttctggctcgactggcaaacccaagggtgtcgtgcacacgactggtggatatctactctgcgccgccttgactgtcaaatacgtcttcgatgtccaccccgacgacaggttcgcttgcatggccgacgttggctggatcacgggccacacttacatcgtctacggtcctctcgctattggcgctaccaccaccgtgttcgagtccactcccgtataccccactccttcacgatactgggaaaccgtcgagaagtacaagcttacccagttctactcggcccctaccgctatccgactcttgcgtcgcctcggacacgagcacgtcaacaagcacgatttgagcagtttgcgtgtgttgggaagcgttggagagcccatcaaccccgaggcttggcactggtacaacgagcacgtcggaaagaccgagtgcgccatcgttgataccttctggcaaactgagactggttccatcgtcgttactcctttccccggtgctatcgagaccaagcctggtgcggcgactgtacccttcttcggtattgagcccgccatcttggagcctaccactggaaaggtgctcgagggcaatgatgtcgagggtgttctcactatcgctcatccctggccttctatcgctcgaaccatctacggagaccatcagcgctacctcgagacttacatgaagccttatcccggctacttctacaccggtgatggcgctgctcgtgatgaggacggctacatctggatcaagggtcgtgttgatgatgtcattaacgtctctggccatcgtttgtccaccgccgaaatcgaatccgctctcatcacccacactggagttgctgagaccgccgtcatcggtaccgccgacgaactgaccggccaggccgtctacgccttcgtcactctcaagcctgaattcaagttcgacgccgagaacgaggctggcctctccaaggagctcatcctccaagtccgcaagatcatcggtccctttgctgcgcccaagcggatctatatcgtcagtgacctccccaagactcgctccggcaagatcatgcgacgtatcctccgcaagatcgtcgctggcgaggctgaccagctcggtgacctcagcaccttcgccgacccgggcatcgtcgaagtcatcaaggagaaggttgcctctgctgcgtaagcgcacgacagagtagactcatctagcacctgccca

SEQ ID NO: 122173 - protein, 661 aa, Coprinus cinereus [sequence omitted]

SEQ ID NO: 122174 - DNA, 2013 bp, Drosophila melanogaster
  CDS (1)..(2013)
atgccagcggaaaaatcaatatacgatcccaacccggccatcagccaaaatgcctacatatccagcttcgaggagtaccagaagttctaccaggagtcactggacaatccggccgagttctggtcccgcgtggccaagcagttccactgggaaacgccagccgatcaggataagttcctcaagtacaacttcaacatctcgaagggacccatttcgatcaaatggatggagggtgcctccaccaatctgtgctacaatctcctagatcgcaacgttaggaacggcctgggcgaccagatagcctactactgggagggcaaccaccccgacgattattcccggggtctcacctatcgcaagttgctggaggaggtgtgccgcttcgccaacgtgctgaaggatcatggcattcgaaagggcgatcgtgtatccatttacatgcccatgattctggagctgcctatcgcgatgctggcctgcgctcgcattggagccgtgcactcgatcgtattcgccggattctcaccggactcactggcggagcggatgttcgattgcaaggccaagctgctgattacggcggatggagcctggcgtggagagaaacccctgtacctgaaggctctgtgcgacacggccttggagaaagtcgaggagatggggcactccgtggagaagtgcatcgtggtgtcgcatttgaagcgagtgactccgtgccagccggatcatgtcgaggaggaaatcccatggaccgatgaccgcgattactggtggcacgaggagatggaggacaaggagccggcctgctatccggagtggatggacgccgaggatccattgttcatgctctacaccagtggctccactggcaagcccaagggagtgctccacacgactgccggatatctgctgtatgcggccacgacctttaagatcgtatttgactataagccaggggatatctactggtgcaccgccgatgttggctggatcacgggacacacctacgtggtgtacggaccattggccaatggagccacttcagtgattttcgaaggcacaccattcttccctggaaacgatcggtactggagtgtcattgacaaatataaggtaactcagttctacacagctccaacggcgattcgtgccctcatgaagttcggcgagggtcccgttctaaagcacaacctgagcggactcaaagttttgggcagcgtgggtgagcccatcaacccggaggcctggctctggtattacaaatacattggaaaggagcagtgctccattgtggacaccttttggcaaacggaaaccggtggtcatgtcattacacctctgcctggagcgactcccatgaagccgggatctgcttcattccccttctttggagtgaagcccactttgctggatgagtgcggcattgaaattaagggggagggagagggctacttggtcttctcgcaaccttggccgggaatgatgcgcactttgtacaacaaccatgaacgcttcgaggacacttatttctccaagttcccaggctactactgcactggcgatggagcccgacgcgatgctgacggctatttgtggatcactggtcgtgtggacgacatgttaaacgtgtccgggcacctgatgtccactgccgaggtagagtcggttctcacagagcatcctcgcgtggctgagtccgccgtggtttcccgtccgcatcccgtcaagggcgagtgtctctactgcttcataacgccgaacgagaacgaggtattcgaccagaagctaatttcggacctgaagaagatggtgcgagaacgtatcggaccttttgccatgccggatgtcattcaaaacgctcccggactgcccaaaactcgttccggcaagattatgcgtcgtgtgctgcgcaagatcgcggttaacgatcgcaacgtgggcgacacatctaccttggccgatgagcaaattgtggagcaactgttcgccaaccggccagtggaggccaagtag

SEQ ID NO: 122175 - protein, 670 aa, Drosophila melanogaster [sequence omitted]

SEQ ID NO: 122176 - DNA, 1959 bp, Escherichia coli
  CDS (1)..(1959): transl_table=11
atgagccaaattcacaaacacaccattcctgccaacatcgcagaccgttgcctgataaaccctcagcagtacgaggcgatgtatcaacaatctattaacgtacctgataccttctggggcgaacagggaaaaattcttgactggatcaaaccttaccagaaggtgaaaaacacctcctttgcccccggtaatgtgtccattaaatggtacgaggacggcacgctgaatctggcggcaaactgccttgaccgccatctgcaagaaaacggcgatcgtaccgccatcatctgggaaggcgacgacgccagccagagcaaacatatcagctataaagagctgcaccgcgacgtctgccgcttcgccaataccctgctcgagctgggcattaaaaaaggtgatgtggtggcgatttatatgccgatggtgccggaagccgcggttgcgatgctggcctgcgcccgcattggcgcggtgcattcggtgattttcggcggcttctcgccggaagccgttgccgggcgcattattgattccaactcacgactggtgatcacttccgacgaaggtgtgcgtgccgggcgcagtattccgctgaagaaaaacgttgatgacgcgctgaaaaacccgaacgtcaccagcgtagagcatgtggtggtactgaagcgtactggcgggaaaattgactggcaggaagggcgcgacctgtggtggcacgacctggttgagcaagcgagcgatcagcaccaggcggaagagatgaacgccgaagatccgctgtttattctctacacctccggttctaccggtaagccaaaaggtgtgctgcatactaccggcggttatctggtgtacgcggcgctgacctttaaatatgtctttgattatcatccgggtgatatctactggtgcaccgccgatgtgggctgggtgaccggacacagttacttgctgtacggcccgctggcctgcggtgcgaccacgctgatgtttgaaggcgtaccgaactggccgacgcctgcccgtatggcgcaggtggtggacaagcatcaggtcaatattctctataccgcgcccacggcgattcgcgcgctgatggcggaaggggataaagcgattgaaggcaccgaccgatcgtcgctgcgcattctcggttccgtgggcgagccaatcaacccggaagcgtgggagtggtactggaaaaaaatcggcaacgagaaatgtccggtggtcgatacctggtggcagaccgaaactggcggtttcatgatcacgccgctgcctggcgctaccgagctgaaagccggttcggcaacacgtccgttcttcggcgtgcaaccggcgctggtcgataacgaaggtaacccgctggaaggcgctaccgaaggcagcctggtgatcaccgactcctggccgggtcaggcgcgtacgctgtttggcgatcacgaacgttttgaacagacctacttctccaccttcaaaaatatgtatttcagcggcgacggcgcgcgtcgcgatgaagatggctattactggataaccgggcgtgtggacgatgtgctgaacgtctccggtcaccgtctgggaacggcggagattgagtcggcgctggtggcgcatccgaagattgccgaagccgccgtagtaggtattccgcacaatattaaaggtcaggcgatctacgcctacgtcacgcttaatcacggggaggaaccgtcaccagaactgtacgcagaagtccgcaactgggtgcgtaaagagattggcccgctggcgacgccagacgtgctgcactggaccgactccctgcctaaaacccgctccggcaaaattatgcgccgtattctgcgcaaaattgcggcgggcgataccagcaacctgggcgatacctcgacgcttgccgatcctggcgtagtcgagaagctgcttgaagagaagcaggctatcgcgatgccatcgtaa

SEQ ID NO: 122177 - protein, 652 aa, Escherichia coli
MSQIHKHTIPANIADRCLINPQQYEAMYQQSINVPDTFWGEQGKILDWIKPYQKVKNTSFAPGNVSIKWYEDGTLNLAANCLDRHLQENGDRTAIIWEGDDASQSKHISYKELHRDVCRFANTLLELGIKKGDVVAIYMPMVPEAAVAMLACARIGAVHSVIFGGFSPEAVAGRIIDSNSRLVITSDEGVRAGRSIPLKKNVDDALKNPNVTSVEHVVVLKRTGGKIDWQEGRDLWWHDLVEQASDQHQAEEMNAEDPLFILYTSGSTGKPKGVLHTTGGYLVYAALTFKYVFDYHPGDIYWCTADVGWVTGHSYLLYGPLACGATTLMFEGVPNWPTPARMAQVVDKHQVNILYTAPTAIRALMAEGDKAIEGTDRSSLRILGSVGEPINPEAWEWYWKKIGNEKCPVVDTWWQTETGGFMITPLPGATELKAGSATRPFFGVQPALVDNEGNPLEGATEGSLVITDSWPGQARTLFGDHERFEQTYFSTFKNMYFSGDGARRDEDGYYWITGRVDDVLNVSGHRLGTAEIESALVAHPKIAEAAVVGIPHNIKGQAIYAYVTLNHGEEPSPELYAEVRNWVRKEIGPLATPDVLHWTDSLPKTRSGKIMRRILRKIAAGDTSNLGDTSTLADPGVVEKLLEEKQAIAMPS

SEQ ID NO: 122178 - DNA, 2004 bp, Neurospora crassa; identical to SEQ ID NO: 28618
  CDS (1)..(2004)

SEQ ID NO: 122179 - protein, 667 aa, Neurospora crassa; identical to SEQ ID NO: 28619

SEQ ID NO: 122180 - DNA, 2010 bp, Penicillium chrysogenum
  CDS (1)..(2010)
atgtcggacggcccaattcagcctcccaagcccgcagtggtgcatgaggcacacgaggtcgacactttccacgtccccaaggcgttccacgataagcacccctccggcactcacatcaaggacattgaggagtacaagaagctttacgaagaatcaatcaagagccccgacaccttctgggcacgcatggcccgcgagctcctcacatttgacaaggactttgaaaccacacatcacggctcgtttgagaacggcgacaatgcctggttcgtcgagggtcggttgaacgcatcgttcaactgtgtcgatcgccatgccctcaagaacccagataaggtcgccattatttatgaggccgacgagcccaacgagggccgtaagatcacctacggagagctgatgcgcgaggtgtcccgggttgcctggactctgaaggagcgtggcgtcaagaagggcgacacggtcggtatctacctgcccatgattcccgaggccgtaatcgctttcctggcttgctcgcgtattggtgccgtgcactccgttgtcttcgctggtttctcttccgactccctccgggaccgtgtcctggacgcctcctccaaggtcatcattacctccgacgagggcaagcgcggtggcaagatcattggcactaagaagattgtggacgaggccatgaagcagtgccccgatgtgcacaccgtgctggtgtacaagcgcaccggtgccgaggtgccctggaccgctggccgtgacatttggtggcacgaggaggtcgagaagtaccccaactacctcgcccctgagtcggtcagctccgaggatcctctcttcctgttgtacacctccggttccaccggtaagcccaagggtgttatgcacaccactgccggttacctgctcggtgcggccatgactggaaagtacgtgtttgatatccacgacgatgatcgctacttctgcggtggtgatgtcggttggattacaggtcacacctatgtcgtgtacgcccctctattgcttggctgcgccaccgtcgtgttcgagagtacccccgcctaccctaacttctcgcgctactgggatgtcattgacaagcacgacgtcacacaattctacgttgcacccaccgctctgcgtctgctgaagcgcgctggagatgagcacattcaccacaagatgcacagtctgcgtattcttggctccgtcggagagcccattgccgcggaagtctggaagtggtacttcgagtgtgttggcaaggaggaagctcacatctgcgacacatactggcaaaccgagaccggctcacatgtcatcacccctctcggcggtatcacccccaccaagcccggcagtgcctccctacccttcttcggtatcgagcctgccattatcgaccccgtctccggagaggagattgtcggcaatgatgtcgagggtgttttggccttcaagcagccgtggcccagcatggcccgcaccgtgtggggtgcccacaagcgttacatggacacttacttgaacgtgtacaagggttactacttcaccggagatggtgctggccgtgaccacgacggctattactggatccgcggtcgtgttgacgatgtcgtcaacgtttctggacaccgtctgtccaccgctgagatcgaggccgctcttctcgagcacccttccgttgccgaggctgctgtcgttggtattgccgacgagctgaccggtcaggctgtcaatgcctttgtctctctcaaggagggcaagcccacagaacagatcagcaaggaccttgcaatgcaagttcgcaagtccattggtcccttcgccgcccccaaggctgtcttcgtcgtggatgacctccccaagacccgcagtggcaagatcatgcgccgaatcctccggaagattctcagtggcgaggaggacagcctcggtgatacatcaacgctctccgaccccagtgtcgtggacaagatcatagaaaccgtccacagtgctcgccagaagtaa

SEQ ID NO: 122181 - protein, 669 aa, Penicillium chrysogenum
MSDGPIQPPKPAVVHEAHEVDTFHVPKAFHDKHPSGTHIKDIEEYKKLYEESIKSPDTFWARMARELLTFDKDFETTHHGSFENGDNAWFVEGRLNASFNCVDRHALKNPDKVAIIYEADEPNEGRKITYGELMREVSRVAWTLKERGVKKGDTVGIYLPMIPEAVIAFLACSRIGAVHSVVFAGFSSDSLRDRVLDASSKVIITSDEGKRGGKIIGTKKIVDEAMKQCPDVHTVLVYKRTGAEVPWTAGRDIWWHEEVEKYPNYLAPESVSSEDPLFLLYTSGSTGKPKGVMHTTAGYLLGAAMTGKYVFDIHDDDRYFCGGDVGWITGHTYVVYAPLLLGCATVVFESTPAYPNFSRYWDVIDKHDVTQFYVAPTALRLLKRAGDEHIHHKMHSLRILGSVGEPIAAEVWKWYFECVGKEEAHICDTYWQTETGSHVITPLGGITPTKPGSASLPFFGIEPAIIDPVSGEEIVGNDVEGVLAFKQPWPSMARTVWGAHKRYMDTYLNVYKGYYFTGDGAGRDHDGYYWIRGRVDDVVNVSGHRLSTAEIEAALLEHPSVAEAAVVGIADELTGQAVNAFVSLKEGKPTEQISKDLAMQVRKSIGPFAAPKAVFVVDDLPKTRSGKIMRRILRKILSGEEDSLGDTSTLSDPSVVDKIIETVHSARQK

SEQ ID NO: 122182 - DNA, 1983 bp, Ralstonia solanacearum
  CDS (1)..(1983): transl_table=11
atggctggcattgaatctgttctgcaggaaacgcgtgtcttcgagccgcccgcgtccttcgtcaaacaggccaacatcgccggcatggacgcctaccgcaccctgtgcgccgaggccgagcgcgactacgaaggcttctgggcgcgtctggcgcacgagcacctgctgtggcacaagcccttctccaaggtcctcgacgaatccagggcgccgttctacacctggttcgaggacggtgagctcaacgcctcgtacaactgcctcgagcgcaacctggagaacggcaacgccgacaaggtcgccgtgatcttcgaggccgacgatggctcggtcgcgcgcatcacctatcgcgagctgcatgcccgcgtgtgccgcttcgccaatggcctgaaggcactgggcatccgcaagggcgaccgcgtggtgatctacatgccgatgtcgatcgagggcgtcgtcgccatgcaggcctgcgcgcgcatcggggcgacgcactcggtggtgttcggcgggttctcggccaagtcgttgcaggagcggatcgtcgacgtgggggccgttgccgtcatcacggccgacgagcagatgcgcggcggcaaggcgctgccgctcaaggccatcgccgacgaggcgctggcgatggagggcagcgaggccgtccgccacgtgatcgtctatcggcgcaccggcgccggcgtgaactgggtcgagggccgcgaccgcgccatggacgaagtcgaagccggccagcccgacacctgcgaggtcaccccggtcggcgccgagcatccgctgttcatcctctacacctcgggctcgaccggcaagcccaagggcgtgcagcacagcaccggcggctacctgctgtgggcgctgctgacgatgcagtggaccttcgacctgaagcccgacgatgtcttctggtgcaccgccgacatcggctgggtcaccggccacacctatatcgcgtatggcccgctcgccgccggcgccacccaggtggtgttcgagggcgtgccgacctacccgaacgccggccgcttctgggacatgatccagaagcaccgggtcaacaccttctacactgcgccgacggcgatccgctcgctgatcaaggccgccgaggccgatgagacgagccacccgaagcggtacgacctgtccagcctgcgcctgctgggcaccgtgggcgagccgatcaacccggaagcctggatgtggtaccacacgaacatcggcggcggccgctgcccgatcgtcgacaccttctggcagaccgagaccggcggccacatgatctcgccgctgccgggcgcgacgccgctggtgccgggctcatgcacgctgccgctgccgggcatcatggccgccatcgtcgacgagaccgggcaggacctgccggacgggcagggcggcatcctcgtcgtcaagcggccgtggccggcgatgatccgcaccatctggggcgatccggagcgcttccgcaagagctacttcccggccgaactgggcggcaagctctacttggccggcgacggctcggtgcgcgacaaggaaaccggctacttcaccatcatgggccgcatcgacgacgtgctgaacgtctcgggccaccgcatgggcacgatggagatcgaatcggcgctggtggccaacccgctggtggccgaggccgccgtggtgggccgcccggacgacatgaccggcgaggccatctgcgccttcgtggtgctcaagcgcacgcgcccgaacggggacgaggcccggcagatcgccaccgacctgcgcaactgggtcggcaaggagatcggcccgatcgccaagccgaaggacatccgcttcggcgacaacctgcccaagacgcgctcgggcaagatcatgcggcgcctgctgcgctcgatcgccaagggcgaggacatcacgcaggacacctccacgctggagaacccggccatcctggagcagctcaaggaagcccgctga

SEQ ID NO: 122183 - protein, 660 aa, Ralstonia solanacearum
MAGIESVLQETRVFEPPASFVKQANIAGMDAYRTLCAEAERDYEGFWARLAHEHLLWHKPFSKVLDESRAPFYTWFEDGELNASYNCLERNLENGNADKVAVIFEADDGSVARITYRELHARVCRFANGLKALGIRKGDRVVIYMPMSIEGVVAMQACARIGATHSVVFGGFSAKSLQERIVDVGAVAVITADEQMRGGKALPLKAIADEALAMEGSEAVRHVIVYRRTGAGVNWVEGRDRAMDEVEAGQPDTCEVTPVGAEHPLFILYTSGSTGKPKGVQHSTGGYLLWALLTMQWTFDLKPDDVFWCTADIGWVTGHTYIAYGPLAAGATQVVFEGVPTYPNAGRFWDMIQKHRVNTFYTAPTAIRSLIKAAEADETSHPKRYDLSSLRLLGTVGEPINPEAWMWYHTNIGGGRCPIVDTFWQTETGGHMISPLPGATPLVPGSCTLPLPGIMAAIVDETGQDLPDGQGGILVVKRPWPAMIRTIWGDPERFRKSYFPAELGGKLYLAGDGSVRDKETGYFTIMGRIDDVLNVSGHRMGTMEIESALVANPLVAEAAVVGRPDDMTGEAICAFVVLKRTRPNGDEARQIATDLRNWVGKEIGPIAKPKDIRFGDNLPKTRSGKIMRRLLRSIAKGEDITQDTSTLENPAILEQLKEAR

SEQ ID NO: 122184 - DNA, 1956 bp, Rhizobium loti
  CDS (1)..(1956): transl_table=11
atgtccgaggttcatgtccatcgcgtccagccggcgtggaagaagaatgcgctgatcgacaacgacacgtacctgaaatggtatgccgacagcatcaagaacccggacaagttctggggcaagcacggcaagcgcatcgactggttcaagcccttcagcaaggtcaagaacacctccttcgacggcaaggtctcgatcaaatggttcgaggacgggctgaccaatgtttcctacaactgcatcgaccgccatctgaagaagcgcggcgaccagacggccatcatctgggaaggcgacaacccctacgacgacaagaagatcacctacaacgagctctacgagcgcgtttgccggctcgccaatgtgatgaagaagcacggcgtcaagaagggcgaccgcgtcaccatctacatgccgatgatcccggaagccgcctatgcgatgctggcctgcacgcgtatcggcgccatccattcgatcgtcttcggcggcttttcgcccgatgcgctggccggccgcatcgtcgactgcgaatcgaccttcgtcatcaccgccgatgaaggcctgcgcggcggcaagtcgattccgctgaaggagaacaccgacaaggcgatcgacatcgccgcgaagaacttcgtcatggtgaagaacgtcctcgtcgtgcgccgcaccggcggcaaggtcggctgggcgccgggccgcgacctctggtatcacgacgaggtcgcgacggtgaaggccgagtgcaagcccgagaagatgaaggcggaagacccgctgttcatcctttatacctcaggctcgaccggcaagccgaagggcgtgctgcacaccaccgccggctatctcgtctatgcctcgatgacgcaccaatatgtcttcgactaccatgacggcgatatctactggtgcaccgccgatgtcggctgggtgacgggccacagctacatcgtctatggcccgctcgcgaacggcgccaccacgctgatgttcgagggtgtgccgaattacccctcgcagtcgcgcttctgggaagtcatcgacaagcacaaggtcaacatcttctacaccgccccgacggcgctgcgcgcgctgatgggcgccggcaacgacccggtgaagaagacctcgcgcaaatcactgcgtgtgctcggctcagtcggcgagccgatcaatccggaagcctgggagtggtatttcaacgtcgtcggcaacggcaaggtgccgatcgtcgacacatggtggcagaccgagaccggcggcatcctgatcacgccgctgccaggcgccaccgacctcaaggcaggctcggcgacgcggcccttcttcggagtcaagccgcagctagtcgacggcgaaggcaaggtgctggaaggagccgccgacggcaatctttgcatcaccgattcctggccgggccagatgcgcaccgtctatggcgatcacgaccgcttcgtgcagacctatttctccacctacaagggcaagtacttcaccggcgacggctgccgccgcgacgccgacggctactactggatcaccggccgcgtcgacgacgtcatcaacgtctccggccaccgcatgggcacggccgaggtcgaatcggcgctggtgagccatgacaaggtctcggaggccgccgtcgtcggctacccccacgacattaagggccagggcatttacagctacgtcaccttgatgaagggcgaggaaccgaccgaggatctgcgcaaggagctcatcgcccatgtccgcaaggagatcggcgccatcgcctcgcccgacaagatccagttcgcccctggcctgcccaagacacgttccggcaagatcatgcgccgcatcctgcgcaagatcgccgaggacgatttttctacccttggcgacacctcgacgctcgccgatccggccgtcgtcgacgacctcatcgccaaccggcagaacaagaagggctga

SEQ ID NO: 122185 - protein, 651 aa, Rhizobium loti
MSEVHVHRVQPAWKKNALIDNDTYLKWYADSIKNPDKFWGKHGKRIDWFKPFSKVKNTSFDGKVSIKWFEDGLTNVSYNCIDRHLKKRGDQTAIIWEGDNPYDDKKITYNELYERVCRLANVMKKHGVKKGDRVTIYMPMIPEAAYAMLACTRIGAIHSIVFGGFSPDALAGRIVDCESTFVITADEGLRGGKSIPLKENTDKAIDIAAKNFVMVKNVLVVRRTGGKVGWAPGRDLWYHDEVATVKAECKPEKMKAEDPLFILYTSGSTGKPKGVLHTTAGYLVYASMTHQYVFDYHDGDIYWCTADVGWVTGHSYIVYGPLANGATTLMFEGVPNYPSQSRFWEVIDKHKVNIFYTAPTALRALMGAGNDPVKKTSRKSLRVLGSVGEPINPEAWEWYFNVVGNGKVPIVDTWWQTETGGILITPLPGATDLKAGSATRPFFGVKPQLVDGEGKVLEGAADGNLCITDSWPGQMRTVYGDHDRFVQTYFSTYKGKYFTGDGCRRDADGYYWITGRVDDVINVSGHRMGTAEVESALVSHDKVSEAAVVGYPHDIKGQGIYSYVTLMKGEEPTEDLRKELIAHVRKEIGAIASPDKIQFAPGLPKTRSGKIMRRILRKIAEDDFSTLGDTSTLADPAVVDDLIANRQNKKG

SEQ ID NO: 122186 - DNA, 1971 bp, Rhodobacter capsulatus
  CDS (1)..(1971): transl_table=11
atgggagttcaaggacaaccctcggtcgcaccggcgcttcgggaggttccggcggggtttgagactgcgcatgcgaatggcgcgaaatatctcgagatgtatcgggaatcgctcgagaatccggatgcgttctgggggcgcgagggcaagcggctcgactggatcacgccctataccaaggtgaagaataccgatttcaccttcggcaaggtctcgatcaaatggttcgaggatggggtgctgaacgcgtccgtgaactgcatcgaccggcatctgcgcgaccgcgcgctgcaaaccgcgatcatcttcgagcccgatgacccgaaggaaccggcccgccacatcacctacaaggagctctccgaaaaggtgaaccggatggcgaatgtgctgctgtcccagggcatcatgcgcggcgaccgggtggtgatctatctgccgatgatcccggaggcggcctatgcgatgctggcctgcgcccggatcggcgcgatccattccattgttttcgcgggcttttcgcccgatgcgctggcgaaccggatcaatgattgcggcgccaaactggtgatcaccgccgacaccgcgccgcgcggcgggcggcgcacgccgctgaaagcgaacaccgatgcggcgctcttgcactgctcggacaaggtgcgctgcctggtggtcaagcacaccggcgatcagatcagctgggtgcatggccgcgatgtcgaccttttgtacctgatggagcacgtcagcccggaatgcccgccccgcccgatgaatgcggaagatccgctcttcatcctctacacctcgggctcgaccggcaaacccaaaggcgtcgtgcatacgaccggcggctacctcgtctatgccgcgatgacgcaccaatacacgtttgattacaaggacggcgacgtgttctggtgcaccgccgatgtgggctgggtgacggggcacagctacatcatctacgggcccttggcgaatggcgcgacgaccttgatgttcgagggcgtgccgaccttccccgatgcggggcggttctgggcggtgtgcgaaaagcacaaggtcaatcagttctacaccgcgccgacggcgatccgcgcgctgatgggtcagggcccggaatgggttgagaaatatgacctttcctcgcttcgggtgctggggtctgtgggcgagccgatcaaccccgaggcctgggtctggtacgacaaatatgtcggaaaagggaaatgtccgatcgtcgacaccttctggcagaccgagaccggcgggcacatgatcacgcccttgcccggcgcgacaccgacgaaaccgggctcggcgacgaacccgttctttggcgtcaagccggtggtgctggacccgcagaccgcggtgcggatcggcgaggtcgaatgcgagggggtgctctgcatttccgacagctggcccgggcagatgcggacggtctggggcgatcacgaccgcttccaggagacctatttcggccagtatcgcggctattacttcaccggcgacggctgtcggcgcgacaaggacggctattactggatcaccggccgggtcgatgacgtgatcaacgtctcggggcaccggatgggcacggccgaggtggaatcggcgctcgtcgcgcatccgcaggtggccgaggcggcggtggtgggctatccgcatgacatcaagggccagggcatctacgcctatgtgaccctgatgaacgggatcgagcccagcgaggatctgcgcaaggatctggtcaagtgggtgcgcaccgagatcggtccgatcgcctcgcccgatctgatccaatgggcgccgggcctgccgaagacgcgctcgggcaagatcatgcgccggatcctgcgcaagatcgccgagaacgactatggcgcgcttggcgacatctcgacgctggccgatccgggcgtggtgcaggagctgatcgacaaccggatgaaccgggcctga

SEQ ID NO: 122187 - protein, 656 aa, Rhodobacter capsulatus [sequence omitted]

SEQ ID NO: 122188 - DNA, 1959 bp, Salmonella typhimurium
  CDS (1)..(1959): transl_table=11
atgagccaaacacataaacacgccattcccgccaacattgcggatcgttgcctgataaatccagagcagtatgagactaaatataaacagtctattaacgaccccgatacgttttggggcgaacagggaaaaattctcgattggatcacgccgtaccaaaaagtgaaaaacacctcctttgcgccaggcaatgtgtcgattaaatggtacgaggacggcacgctgaatctggcggcgaactgtcttgaccgccatttgcaggaaaatggcgatcgcaccgccattatctgggaaggcgatgacacgtcgcagagtaaacatatctcttatcgcgaactgcatcgcgatgtctgccgtttcgcgaatacgctgctggatctgggcattaaaaaaggcgatgtggtagcgatttatatgccgatggtgccggaagcggcggtggcaatgttggcctgcgcccgcatcggtgcggtgcattcggtgatcttcgggggcttctcgccggaagccgtcgccggacgcattatcgactccagctcgcggctggtgatcaccgctgacgaaggtgtacgtgccggacgcagtatcccgctgaaaaagaatgtcgatgacgcgctgaaaaacccgaatgtcactagcgttgagcatgtgatcgtcctgaagcgcaccggcagcgacattgactggcaagaaggccgcgacctgtggtggcgcgatttgattgaaaaagccagccctgagcaccagcctgaagcgatgaatgccgaagatccgctgtttatcctttatacctccggctccaccggcaagccgaaaggcgtgctgcacaccaccggcggctatctggtctacgccgcgaccacctttaagtatgtctttgattatcaccctggcgatatttactggtgtaccgccgatgtgggttgggtgacggggcacagctatctgttgtatggcccgctggcctgcggcgcgaccaccttaatgtttgaaggcgtgccgaattggccaacgcccgctcgcatgtgccaggtggtcgacaaacaccaggtcaacattctctataccgccccgacggccatccgcgcgctgatggcggaaggcgataaagccattgaaggcaccgaccgttcttcactgcgcattctgggttccgtcggcgagccgatcaatcccgaagcgtgggaatggtactggaagaagatcggcaaggaaaaatgtccggtcgtcgacacctggtggcagactgaaacaggcggttttatgatcacgccgctaccaggcgctatcgaactgaaagccggttccgccacccgtcctttctttggcgtacagcctgcgctggtggataacgaaggccatccgcaagaaggcgcgacggaaggcaatctggtcatcaccgattcctggccgggccaggcgcgcactctgttcggcgatcatgaacgttttgagcagacctatttctctacctttaagaatatgtatttcagcggcgacggcgcgcgtcgcgatgaggacggctattactggatcaccggtcgcgtggacgacgtgttaaacgtctccggccaccgtctgggtacggcggaaatcgagtcagcgctggtggcgcatccgaagatcgccgaagcggcggtggtgggtattccacacgctatcaaaggccaggcgatttacgcttatgtgacgctcaaccacggcgaggagccgtcgccagaactgtacgcggaggtgcgcaactgggtacgtaaagagattggcccactggcgacgccggacgtgctgcactggaccgactcactgccaaaaacccgttccggcaaaattatgcgccgcattttgcgcaaaatcgcggcgggcgataccagcaatctgggcgatacctcgactctcgccgatcctggcgtggtggagaaactgctcgaagagaagcaggccatcgcgatgccgtcataa

SEQ ID NO: 122189 - protein, 652 aa, Salmonella typhimurium
MSQTHKHAIPANIADRCLINPEQYETKYKQSINDPDTFWGEQGKILDWITPYQKVKNTSFAPGNVSIKWYEDGTLNLAANCLDRHLQENGDRTAIIWEGDDTSQSKHISYRELHRDVCRFANTLLDLGIKKGDVVAIYMPMVPEAAVAMLACARIGAVHSVIFGGFSPEAVAGRIIDSSSRLVITADEGVRAGRSIPLKKNVDDALKNPNVTSVEHVIVLKRTGSDIDWQEGRDLWWRDLIEKASPEHQPEAMNAEDPLFILYTSGSTGKPKGVLHTTGGYLVYAATTFKYVFDYHPGDIYWCTADVGWVTGHSYLLYGPLACGATTLMFEGVPNWPTPARMCQVVDKHQVNILYTAPTAIRALMAEGDKAIEGTDRSSLRILGSVGEPINPEAWEWYWKKIGKEKCPVVDTWWQTETGGFMITPLPGAIELKAGSATRPFFGVQPALVDNEGHPQEGATEGNLVITDSWPGQARTLFGDHERFEQTYFSTFKNMYFSGDGARRDEDGYYWITGRVDDVLNVSGHRLGTAEIESALVAHPKIAEAAVVGIPHAIKGQAIYAYVTLNHGEEPSPELYAEVRNWVRKEIGPLATPDVLHWTDSLPKTRSGKIMRRILRKIAAGDTSNLGDTSTLADPGVVEKLLEEKQAIAMPS

SEQ ID NO: 122190 - DNA, 1989 bp, Schizosaccharomyces pombe; identical to SEQ ID NO: 28622
  CDS (1)..(1989)

SEQ ID NO: 122191 - protein, 662 aa, Schizosaccharomyces pombe [sequence omitted]

SEQ ID NO: 122192 - DNA, 1950 bp, Vibrio cholerae
  CDS (1)..(1950): transl_table=11
atgagtgaagcccatatttatccggtcaaacagaacatcaaagcgcatacgcatgccgataacgacacctatctggcgatgtatcaacagtccatcaaagatccggaaggcttttggagcgaacacggcaaaatcgtcgactggattaaacctttcaccaaggtgaaacacacctcttttgacccagggcacatcgatatccgctggtttgaagatggcacgttaaacgtttctgccaactgtattgatcgccatttggcgacccgtggcgaccaagtcgcgatcatttgggaaggcgacgacccgactcaagacaaaactctgacgtataagcaactgcaccaagaagtgtgccgttttgccaatgcgctgaaagagcaaggcgtacgcaagggtgatgttgtctgtatctacatgcctatggtgccagaagcggcggttgctatgttggcttgtacccgtattggcgcagtgcacactatcgtctttggtggcttctcgccagaagcactggctggacgcattatcgactcgaacgccaaattagtgatcactgccgacgaaggtgttcgcggcggccgcgccgtccccctaaagaaaaacgtcgatgaagcactgtgcaatccagaagtcaaaaacatcagtaaagtgatggttcttaagcgtactggcggcaatgtcgcttggcatgaacaccgtgacatttggtggcatgaagcaaccgcaaaagcctccgataattgtccaccagaagagatgaaagccgaagatccgctgtttatcctctacacctctggctcaaccggtaaaccgaaaggcgtattgcacaccactggcggttatttggtttatgcgactatgaccttcaaatatgtattcgactatcagcccaatgaagtgttctggtgtaccgctgatgtgggttggataacgggtcactcctatctggtgtatggcccattggcgaatggcgcaaaaaccattctgtttgaaggcgtgccaaactaccccaccaccgcacgcatgagcgaggtggtagacaagcataaggtcaatatcctttacactgcgccaacggcgatccgtgcgctgatggccaaaggtgatgaagcgattaaaggcactagccgtgacagcttgcgcattatgggctctgtgggtgaaccgattaacccagaagcgtgggagtggtactaccgcacgatcggtaacgaaaaatcaccgattgtggatacttggtggcaaaccgaaaccggcggtatcttgatcacgccactgccgggggcaacggcgttgaaaccaggttcggccacacgcccgttctttggtgtgcagccagcgttagtcgataacatgggcgaaattgtggaaggcgcaactgaaggcaacttggtactgctcgattcatggccgggtcaaatgcgcactgtgtatggcgatcacgaccgctttgaacaaacctacttctctacctttaaaggcatgtactttaccggtgacggcgcgcgtcgcgatgaagacggttactactggatcacaggccgtgtcgatgacgtactcaacgtttcgggtcaccgtatgggaacggcagaaattgaatccgcactggtggcattcaataagattgcagaagccgccgtggtcggtgttccacacgatatcaaaggccaagcgatttacgcttacatcacactcaatgatggggtgtatccgagcgctgaactgcataaagaagtgaaagattgggtacgcaaagagattggcgctatcgcgacaccggatgtcctacactggaccgatgcgctaccgaaaacccgttcaggtaaaattatgcgccgtattttgcgtaaaattgccaccggcgataccagtaacttgggggatacctcaacgctggccgatccaagcgtggttgaccgcctgattgcggaaaaagcccaacttaaataa

SEQ ID NO: 122193 - protein, 649 aa, Vibrio cholerae [sequence omitted]

SEQ ID NO: 122194 - DNA, 1953 bp, Vibrio parahaemolyticus
  CDS (1)..(1953): transl_table=11
atgagcgaagcccacgtttatccggtaaaagaaaatattaaaactcatacacacgcggataatgatacctacctagccatgtatcagcagtcggtcaccgatccagagggcttctggaacgagcacggcaaaatcgttgattggatcaaacctttcaccaaagtaaaaagtacctcattcgacaccggccacgttgacattcgctggtttgaagatggcacactgaacgtatctgcaaactgtatcgaccgtcatctcgcagaacacggcgacgacgtagcgatcatctgggaaggcgatgatccagcagacgacaaaacgctgactttcaacgaactgcacaaagaagtgtgcaagttctctaacgcattaaaagaccaaggcgtgcgcaaaggcgacgtggtgtgtttatacatgccaatggtgccagaagcagctatcgctatgctggcgtgtacacgcatcggcgcggtgcataccgtggtgtttggtggtttctcaccagaagcactgtctggtcgtatcatcgactctgacgcgaaagttgtgatcactgcggacgaaggtgtgcgcggtggacgtgccgttccactgaaaaagaacgtggacgaagcactcactaacccagaagtaaaaactatcagcaaagttgtggtactaaaacgcacaggcggcaatgtagattggcatgggcatcgtgatgtttggtggcacgaagcaaccgcaaaagtatctgatgtttgtccaccagaagagatgaaagcggaagacccactgttcatcctctacacatctggctcgacaggcaaaccaaaaggcgtacttcacaccacaggtggctaccttgtttatgcggccatgacgtttaaatacgtcttcgattaccaaccaggtgaaaccttctggtgtaccgcagacgtaggctggattactggccacacgtaccttatctacggaccacttgcgaacggcgcgaaaaccatcctgttcgaaggtgtaccaaactacccgaacacaagccgtatgagcgaagtggtcgataagcatcaagtgaacattctgtacaccgcaccaacagctattcgtgcgctgatggcaaaaggcaacgaagcggttgctggcacgtctcgctcaagccttcgcatcatgggctcagtgggcgaaccaatcaacccagaggcatgggagtggtactacaaaacgatcggaaacgaaaattcacctatcgtcgacacttggtggcaaacggaaaccggcggcatcttgattgctccacttccgggagcgacagatctcaaaccaggttcagcaactcgcccattcttcggcgtacaacctgcgctggttgataacatgggtaatatccttgaagacaccgtggctgaaggtaacttggtaattcttgattcttggccaggtcaaatgcgtacggtttacggcgaccatgaacgcttcgaacaaacctacttctcaacctttaagggcatgtacttcaccagtgacggcgcgcgtcgtgacgaagacggctattactggatcactggccgcgtcgatgacgtactgaacgtgtctggacaccgtatgggcaccgctgaaattgaatctgcgctagtcgcgcatcataaaattgccgaagccgcgattgttggtattccacacgacattaaaggccaagcgatctacgcctacatcacgctcaacgatggcgagttcccatccgcagagctgcacaaagaagtgaaagattgggtgcgtaaagagattggtccaattgcaacgcctgacgtactgcactggacagactctctaccaaagactcgttcaggtaagatcatgcgtcgtattctgcgtaagattgcgacaggtgatacaagcaacctaggcgatacttcaacgcttgccgatccaagtgtagtagacaaactcatcgccgaaaaagcagaactggtataa

SEQ ID NO: 122195 - protein, 650 aa, Vibrio parahaemolyticus
MSEAHVYPVKENIKTHTHADNDTYLAMYQQSVTDPEGFWNEHGKIVDWIKPFTKVKSTSFDTGHVDIRWFEDGTLNVSANCIDRHLAEHGDDVAIIWEGDDPADDKTLTFNELHKEVCKFSNALKDQGVRKGDVVCLYMPMVPEAAIAMLACTRIGAVHTVVFGGFSPEALSGRIIDSDAKVVITADEGVRGGRAVPLKKNVDEALTNPEVKTISKVVVLKRTGGNVDWHGHRDVWWHEATAKVSDVCPPEEMKAEDPLFILYTSGSTGKPKGVLHTTGGYLVYAAMTFKYVFDYQPGETFWCTADVGWITGHTYLIYGPLANGAKTILFEGVPNYPNTSRMSEVVDKHQVNILYTAPTAIRALMAKGNEAVAGTSRSSLRIMGSVGEPINPEAWEWYYKTIGNENSPIVDTWWQTETGGILIAPLPGATDLKPGSATRPFFGVQPALVDNMGNILEDTVAEGNLVILDSWPGQMRTVYGDHERFEQTYFSTFKGMYFTSDGARRDEDGYYWITGRVDDVLNVSGHRMGTAEIESALVAHHKIAEAAIVGIPHDIKGQAIYAYITLNDGEFPSAELHKEVKDWVRKEIGPIATPDVLHWTDSLPKTRSGKIMRRILRKIATGDTSNLGDTSTLADPSVVDKLIAEKAELV

SEQ ID NO: 122196 - DNA, 1953 bp, Vibrio vulnificus
  CDS (1)..(1953): transl_table=11
atgagtgaagcccacatttatccggtaaaagagaacatcaaagcccatacccatgcggataatgatacctacctagccatgtaccagcagtccgtcactgacccagaacgtttctggagtgaacacggcaaaattgttgactggattaagcccttcaccaaagtcaaacaaacgtcttttgatactggccacgttgatattcgctggtttgaagatggcacgctcaatgtctcagcaaactgtattgaccgccatctagcagagcgcggcgatgatgtcgccatcatttgggaaggcgacaacccagaggacgacaaaactctgacttacaacgaactctataccgaagtgtgtcgtttttcgaatgcactcaaagagcaaggcgtacgcaagggcgacgtggtgtgtctctacatgccaatggtccctgaagcagcggttgcgatgttggcctgtacccgtattggtgcggtgcacaccatcgtctttggtggtttttcaccagaagcactggctggccgcatcatcgactccgatgccaaagtcgtcatcacggccgacgaaggcgttcgtggtggtcgcgcggtgccactgaaaaagaatgtggacgaagcactaaccaacccagaagtgaaaaccatcagcaaagtggtggtgttcaagcgcactggcggcaacattgattggcacgaacatcgtgatgtttggtggcacgaagcgacagcaaaagtctctgacgtttgcccaccagaagagatgaaagctgaagatccgctgttcatcctctacacgtcaggctcaaccggcaaaccgaaaggcgtgctgcacaccacgggcggctatctggtctacgcgaccatgacctttaagtacgtgtttgactaccagccaggcgaaactttctggtgtacggccgacgtgggttggatcactggccacacgtatctggtttacggtccactggcaaacggcgcgaaaaccattctctttgaaggcgtgccaaactatccaaacaccagccgcatgagtgaagtggtcgataagcaccaagtcaacattctttacaccgcaccaacggccattcgtgcgctgatggcaaaaggcaacgaagcgatcgaaggtacagatcgtagcagcctacgcatcatgggctctgtgggtgaacctattaacccagaggcgtgggagtggtactacaaaaccatcggcaacgagaaatcaccgattgtcgatacttggtggcaaaccgaaactggcggcattttgatcacaccactgccaggcgccaccgcgctgaaaccgggttctgcaacgcgcccattctttggtgttcagcctgcactggtggacaacatgggtaatgtgatcgaagaccaagccgcagaaggtaacctcgttatcctcgattcttggccaggtcaaatgcgcacggtttatggtgaccatgaacgtttcgaacaaacctacttctcaacctttaaaggcatgtactttaccggagatggtgcgcgccgcgatgaagatggttactactggatcacaggccgtgtggatgacgtattaaacgtttctggccaccgtatgggtacagcggaaattgaatccgccctagtggcacacccgaaaattgctgaagcggcgattgttggcattccacacgacatcaaaggccaagcaatttacgcctacgtcaccctcaatgcgggcgagtatccaaccgcagagctgcataaagaagtgaaagattgggtacgtaaagagattggccccatcgcaacaccagacgtactgcattggacagatgcactaccgaaaactcgttcaggtaaaatcatgcgccgcattttgcgcaagatcgccacgggagacaccagcaacttgggtgacacctcaacactggccgacccaagcgtagttgataagctgatcgcagaaaaagccgaactggtttaa

SEQ ID NO: 122197 - protein, 650 aa, Vibrio vulnificus
MSEAHIYPVKENIKAHTHADNDTYLAMYQQSVTDPERFWSEHGKIVDWIKPFTKVKQTSFDTGHVDIRWFEDGTLNVSANCIDRHLAERGDDVAIIWEGDNPEDDKTLTYNELYTEVCRFSNALKEQGVRKGDVVCLYMPMVPEAAVAMLACTRIGAVHTIVFGGFSPEALAGRIIDSDAKVVITADEGVRGGRAVPLKKNVDEALTNPEVKTISKVVVFKRTGGNIDWHEHRDVWWHEATAKVSDVCPPEEMKAEDPLFILYTSGSTGKPKGVLHTTGGYLVYATMTFKYVFDYQPGETFWCTADVGWITGHTYLVYGPLANGAKTILFEGVPNYPNTSRMSEVVDKHQVNILYTAPTAIRALMAKGNEAIEGTDRSSLRIMGSVGEPINPEAWEWYYKTIGNEKSPIVDTWWQTETGGILITPLPGATALKPGSATRPFFGVQPALVDNMGNVIEDQAAEGNLVILDSWPGQMRTVYGDHERFEQTYFSTFKGMYFTGDGARRDEDGYYWITGRVDDVLNVSGHRMGTAEIESALVAHPKIAEAAIVGIPHDIKGQAIYAYVTLNAGEYPTAELHKEVKDWVRKEIGPIATPDVLHWTDALPKTRSGKIMRRILRKIATGDTSNLGDTSTLADPSVVDKLIAEKAELV

SEQ ID NO: 122198 - DNA, 1953 bp, Vibrio vulnificus
  CDS (1)..(1953): transl_table=11
atgagtgaagcccacatttatccggtaaaagagaacatcaaagcccatacccatgcggataatgatacctacctagccatgtaccagcagtcagtcactgacccagaaggtttctggagtgaacacggcaaaattgttgactggattaagcccttcaccaaagtcaaacaaacgtcttttgatactggccacgttgatattcgctggtttgaagatggcacgctcaacgtctcagcaaactgtattgaccgccatctagcagagcgcggcgatgatgtcgccatcatttgggaaggcgacaacccagcggacgacaaaactctgacttacaacgagctctacaccgaagtgtgtcgtttctcgaatgcactcaaagagcaaggcgtacgcaaaggcgacgtggtgtgtctctacatgccaatggtccctgaagcggcggttgcgatgttggcctgtacccgtattggtgcggtgcacaccatcgtctttggtggtttttcaccagaagcactggctggccgcatcatcgactccgatgccaaagtcgtcatcacggccgacgaaggcgttcgtggtggtcgcgcggtgccactgaaaaagaacgtggacgaagcactaaccaacccagaagtgaaaaccatcagcaaagtggtggtgttcaagcgcactggcggcaacattgattggcacgaacatcgtgatgtttggtggcacgaagcgacagcaaaagtctctgacgtttgcccaccagaagagatgaaagctgaagatccgctgttcatcctctacacgtcaggctcaaccggcaaaccgaaaggcgtgctgcacaccacgggcggctatttggtctacgcgaccatgacctttaagtacgtgtttgactaccagccaggcgaaactttctggtgtacggccgacgtgggttggatcactggccacacgtatctggtttacggtccactggcaaacggcgcgaaaaccattctctttgaaggcgtgccaaactatccaaacaccagccgcatgagtgaagtggtcgataagcaccaagtcaacattctttacaccgcaccaacggccattcgtgcgctgatggcaaaaggcaacgaagcgattgaaggtacggatcgtagcagcctacgcatcatgggctctgtgggtgaacctattaacccagaggcgtgggagtggtactacaagaccatcggcaacgagaaatcaccgattgtcgatacttggtggcaaaccgaaaccggcggcattttgatcacaccactgccaggcgccaccgcgctgaaaccgggttctgcaacgcgcccattctttggtgttcagcctgcactggtggacaacatgggtaatgtgatcgaagaccaagccgcagaaggtaacctcgttatcctcgattcttggccaggtcaaatgcgcacggtttatggtgaccatgaacgtttcgaacaaacctacttctcaacctttaaaggcatgtactttaccggagatggtgcgcgccgcgatgaagatggttactactggatcacaggccgtgtggatgacgtattaaacgtttctggccaccgtatgggtacagcggaaattgaatccgccctagtggcacacccgaaaattgctgaagcggcgattgttggcattccacacgacatcaaaggccaagcaatttacgcctatgtcaccctcaatgcgggcgagtatccaaccgccgagctgcataaagaagtgaaagattgggtacgtaaagagattggccccatcgcaacaccagatgtcctgcattggacagatgcactaccgaaaactcgttcaggtaaaatcatgcgccgcattttgcgcaagatcgccacgggagacaccagcaacttgggtgacacctcaacactggccgacccaagcgtagttgataagctgatcgcagaaaaagccgaactggtttaa

SEQ ID NO: 122199 - protein, 650 aa, Vibrio vulnificus
MSEAHIYPVKENIKAHTHADNDTYLAMYQQSVTDPEGFWSEHGKIVDWIKPFTKVKQTSFDTGHVDIRWFEDGTLNVSANCIDRHLAERGDDVAIIWEGDNPADDKTLTYNELYTEVCRFSNALKEQGVRKGDVVCLYMPMVPEAAVAMLACTRIGAVHTIVFGGFSPEALAGRIIDSDAKVVITADEGVRGGRAVPLKKNVDEALTNPEVKTISKVVVFKRTGGNIDWHEHRDVWWHEATAKVSDVCPPEEMKAEDPLFILYTSGSTGKPKGVLHTTGGYLVYATMTFKYVFDYQPGETFWCTADVGWITGHTYLVYGPLANGAKTILFEGVPNYPNTSRMSEVVDKHQVNILYTAPTAIRALMAKGNEAIEGTDRSSLRIMGSVGEPINPEAWEWYYKTIGNEKSPIVDTWWQTETGGILITPLPGATALKPGSATRPFFGVQPALVDNMGNVIEDQAAEGNLVILDSWPGQMRTVYGDHERFEQTYFSTFKGMYFTGDGARRDEDGYYWITGRVDDVLNVSGHRMGTAEIESALVAHPKIAEAAIVGIPHDIKGQAIYAYVTLNAGEYPTAELHKEVKDWVRKEIGPIATPDVLHWTDALPKTRSGKIMRRILRKIATGDTSNLGDTSTLADPSVVDKLIAEKAELV

SEQ ID NO: 122200 - DNA, 1944 bp, Xylella fastidiosa
  CDS (1)..(1944): transl_table=11
atgtctgacctgtacaccattgatccgatgttggccaaagatgcgcacgtagaccgtgctcactacaaaacgctttaccacgaatccctcgaacaaccggaagcattctggagcaacatcgcacagcgcctggagtggttcaaaaccccaacaaaaatcaaagatgtcagctaccaactagaagacgttcacatccgctggttcgaagacggtgaactcaatgccagcgtcaactgcctagaccgccacctcaccttacgcggcgacaaaacagcactcctgtttgaacctgacgcccctgacgccccatcctcacgcatcacctaccgtgaactgtacgaacgtgtctgccaactcggtaacgcactgcgccacctcaacatcgaaaagggcgaccgcgtcaccatctatttaccaatgattccagatgcagtcgtcgccatcctcgcttgcgcacgcattggagcaatccactccgtcgtcttcggcggctttgcaccgaactccattgccgatcgaataaacgactgcggtagcaaactcatcatcaccgcagacgaaggcctgcgcggcggcagaaaaattccattgaaagccaatgttgatgccgcattaaagatccacggaacccaatccgtcgaaaccgtactcgtcgtgcgtcacaccggcggtacgatcaacatgcataccccgcgcgaccgctggttccatcacgtcgtcgacatccaagcgaccgaatgcgccccagaacgcatgaacgctgaagacccacttttcatcctctatacctccggctccacaggcaaacccaaaggagtgctgcacaccaccggcggctacctggtgtacaccagctacactcatgaaaccgtgtttgacctgcgcgaaaacgacatctactggtgcactgccgacatcggctggattactggtcacagctacatcgtttacggccccctggccaatggcgccaccgtgttgctgttcgaaggcgtcccccactacccaaccgtgtcgcgcttctgggaagtgatcgacaaacatcacgtcaccctgttctacaccgcgccgaccgcaatccgtgccttgatgcgcgaaggcgacacccctgtaaaaaaaacctcccgcaaaagcttgcggttgcttggcagcgtcggcgaacccatcaaccccgaagcctggcactggtactacaccatcgttggcaacggacgctgtcccattgtcgacacctggtggcaaaccgagacaggaggaatcctcatcaccccactgatcggtgcaaccgaccttaaaccaggctcagtcaccctccccttcttcggcatacgccccgccctagtcgataccaacggacaaatactggatggccccgcagcaggcaacctagtcctcctcgattcctggccgggtcaaatgcgtaccgtctacggtgaccaccaacgttttatagacacttactttcgcacctaccccaatacttacttcaccggcgacggctgccgccgcgatgccgacggctactactggatcactggacgtgtggatgacgtcatcaacatctccggccaccgcatcggcaccgccgaaatcgaaagcacactcgtcgctcaccccaaagtggctgaagccgcggtcgtcggcttccctcacccgatcaaaggccagggcatctacgcatacgtgacattaattaccggcgagacacccagcgaagcactgcaccaagaactgctcacctgggtacgtaaagaaatcggagcaatcgccacacccgatcacgtgcaatgggcacccaacctccccaaaacccgctccggaaagatcatgcgccgcatcctacgcaaaattgcagaaaacgcaccagaccaactcggtgacacctccacactggctgatccgtctatcgtcgacttattgctcaacgaacgactgacacactga

SEQ ID NO: 122201 - protein, 647 aa, Xylella fastidiosa [sequence omitted]

SEQ ID NO: 122202 - DNA, 1944 bp, Xylella fastidiosa
  CDS (1)..(1944): transl_table=11
atgtctgacctgtacaccattgatccgatgttggccaaagatgcgcacatagaccgtgcgcactacaaaacgctttaccacgaatccatcgaacaaccagaagcattctggaacaaagtctcacagcgcctggagtggtttaaagcgccgaccaaaatcaaaaatgtcagctaccaactggaagatgttcacatccgttggttcgaagacggtgaactcaatgccagcgtcaactgcctggaccgccatctcaccttacgtggcgacaaaacagcactcctgtttgaacctgacgccccagacgccccatcctcacgcatcacctaccgtgaactatacgagcgcgtctgccaactcggtaacgcactgcgtcacctcggcatcgaaaagggcgaccgcgtcaccatctacttaccaatgattccagatgcagtcgtcgccatcctcgcttgcgcacgcattggagcaatccactccgtcgtcttcggcggttttgcagcaaactccattgccgaccgagtgaatgactgcggtagcaaactcatcatcaccgcagatgaaggcctgcgtggtggcagaaaaattccattgaaagccaatgtcgatgccgcattaaaaatccacggaacccagtccgtcgaaaccgtactcgtcgtgcgtcacaccggcagtacgatcaacatgcataccccgcgcgaccgctggttccatgacctcgtcgacatccaagcaaccgaatgcgccccagaacgcatgaacgctgaagactcccttttcatcctctatacctccggctccacaggcaaacccaaaggagtcctgcacaccaccggcggctacctggtgtacaccagctacactcatgaaaccgtgtttgacctacgcgaaaacgacatctactggtgcactgccgacatcggctggattactggtcacagctacatcgtttacggccccctagccaatggcaccaccgtcttgctgtttgaaggcaccccccactacccaaccgtgtcgcgcttctgggaagtgatcgacaaacatcacgtcaccctcttctacaccgcgccgaccgcaatccgtgcattgatgcgcgaaggcgacactcctgtaaaaaaaacctcccgcaaaagcttgcggttacttggcagcgttggcgaacccatcaaccccgaagcctggcactggtactacaccatcgttggcaacggacgttgtcccattgtcgacacctggtggcaaaccgagacaggaggaatcctcatcaccccactgatcggtgcaaccgaccttaaaccaggctcagtcaccctccccttcttcggcatacgccccgccctagtggataccaacggacaaacactggatggccccgcagcaggtaacctagtcctgctcgattcctggccgggtcaaatgcgtaccctctacggtgaccaccaacgttttatagacacttactttcgcacctaccccaatacttacttcaccggcgacggctgccgccgcgatgccgacggctattactggatcactggacgtgttgatgacgtcatcaacatctccggccatcgcatcggcaccgccgaaatcgaaagcacactcgtcgctcaccccaaagtggctgaagccgcggtcgtcggcttccctcacccgatcaaaggccagggcatctacgcatacgtgacattaattaccggcgagacacccagcgaagcactgcaccaagaactgctcacctgggtacgcaaagaaatcggagcaatcgccatacccgatcacgtgcaatgggcatccaacctccccaaaacccgctccggaaagatcatgcgccgcatcctgcgcaaaattgcagaaaacgcaccagaccaactcggtgacacctccacactagctgatccgtctatcgtcgacttattgctcaacgaacgactgaaacactga

SEQ ID NO: 122203 - protein, 647 aa, Xylella fastidiosa
MSDLYTIDPMLAKDAHIDRAHYKTLYHESIEQPEAFWNKVSQRLEWFKAPTKIKNVSYQLEDVHIRWFEDGELNASVNCLDRHLTLRGDKTALLFEPDAPDAPSSRITYRELYERVCQLGNALRHLGIEKGDRVTIYLPMIPDAVVAILACARIGAIHSVVFGGFAANSIADRVNDCGSKLIITADEGLRGGRKIPLKANVDAALKIHGTQSVETVLVVRHTGSTINMHTPRDRWFHDLVDIQATECAPERMNAEDSLFILYTSGSTGKPKGVLHTTGGYLVYTSYTHETVFDLRENDIYWCTADIGWITGHSYIVYGPLANGTTVLLFEGTPHYPTVSRFWEVIDKHHVTLFYTAPTAIRALMREGDTPVKKTSRKSLRLLGSVGEPINPEAWHWYYTIVGNGRCPIVDTWWQTETGGILITPLIGATDLKPGSVTLPFFGIRPALVDTNGQTLDGPAAGNLVLLDSWPGQMRTLYGDHQRFIDTYFRTYPNTYFTGDGCRRDADGYYWITGRVDDVINISGHRIGTAEIESTLVAHPKVAEAAVVGFPHPIKGQGIYAYVTLITGETPSEALHQELLTWVRKEIGAIAIPDHVQWASNLPKTRSGKIMRRILRKIAENAPDQLGDTSTLADPSIVDLLLNERLKH

SEQ ID NO: 122204 - DNA, 2244 bp, Oryza sativa
  CDS (1)..(2244)
atggcccagctgcatatatacgccagctgcggctgcgcacgcgcccgcgctgcgatcccgcttcccgcgcaggctcaggcatccgctgcggctctaccttgggtgatgtccgtgacttcgccgccgctgctccggcgaggagggtgggcgatgggcgcgagcgatcacgccgcggtggcggcggcggcgagcggtaacggcaagccgcgggcgaggaggccctccgccgccgcggcggccgtgctgggcgagccggtggcggcgtccgacgaccacggcctcgtccaccccagcacggacttcgcctcccaggccctcgtctcctccacgcagcagtaccaagaaatgtaccgacgttcgatcgacgatccggccgggttctggtcggagatcgcggagacgttctactggaagcacaagtggaaccctgacgaggtctgcaccgagaatctggatgtcaccaaggggccgatcaagatcgaatggttcaaagggggcaagaccaatatatgctacaatgcggtggaccgcaacgtggaggctggcgacggcgagaagatagcgatgtactgggaagggaacgagcccggccaggacgcgaagctcacctactccgagctcctgaacaaggtttgccagctggcaaattacctgaagagcgtcggcgtcgggaagggtgatgccgtggtgatctacctgccgatgctgatggagctgcccattgcgatgctcgcgtgtgctcggattggcgctgttcattcggttgtgtttgctggcttctctgctgacgcactagcacaaagaatcattgactgcaagcctaaggttgtgattacgtgcaacgcggtgaaaaggggaaagaaactcatagctctcaaagatatagtagatgtgtcgctggctgacagtgcgaagaatggagtcgatgtaggcatttctttgacatacgaaaatcagtcggcaatgaagagagaagacacaaaatggacgtcaggcagagacgtttggtggcaggatgttgtgcccaattttccaacaaaatgtgatgtggaatgggtagatgcagaggatccattgtttcttctatatacaagtggtagcacaggaaagccaaagggtgtattgcatacaacgggaggctatatggtgtactctgcaacaacatttaagcacgcatttgattacaagccatcagatatatactggtgcactgcagactgtgggtggattactgggcatagttatgtgacatatggtcctctcctgaatggagccacagttcttgtttacgaaggggctccaaactatcctgatcctagtcgttgttgggacgttgttgacaaatacggggtgacgatattttatactgcaccaacacttattcgtgcactcatgcgtgatggtaccgagtatgttactcggtattctcgtaaatctcttcgagttctaggaagcgtaggcgagccaatcaatcccactgcttggagatggttctatgatattattggtgatgcaagatgcccaatatcagacacttggtggcagactgaaactggtggttttatgatcactcctttacctggcgcttggcctctgaaacccggatctgcgacatttcctttcttcggtgtacagccagtaatagtagatgagaaagggaaggaaatggaaggagaatgcagcggatacctttgcataaagaagtcatggcctggggctttccggacactttatggagacaaggacagatatgaaaccacatacttcaagccatttgctggctattacttctccggtgatggttgcagcagggacaaagatggataccattttctgactggacgggttgacgatgttatcaatgtcagcggccaccggattgggacagcagaggttgagtctgctctggtttcacatccaaaatgcgccgaggccgctgttgttggaattgaccatgaggttaaaggccagggaatttacgctttcgtgacattggtggacggtgttccttacagcgatgagctacggaaaagcctcgttatgactgttcgcagccagattggggcgttcgcggcgccggacaagatccactgggcgccggggctcccgaagacgcggagcggcaagatcatgcggaggatcctgcggaagatcgcgtccaggcagctggacgagctcggcgacaccagcacgctcgccgaaccaggcgtcgtcgaccagctcatcgcgctcgccgatagctag

SEQ ID NO: 122205 - protein, 747 aa, Oryza sativa
MAQLHIYASCGCARARAAIPLPAQAQASAAALPWVMSVTSPPLLRRGGWAMGASDHAAVAAAASGNGKPRARRPSAAAAAVLGEPVAASDDHGLVHPSTDFASQALVSSTQQYQEMYRRSIDDPAGFWSEIAETFYWKHKWNPDEVCTENLDVTKGPIKIEWFKGGKTNICYNAVDRNVEAGDGEKIAMYWEGNEPGQDAKLTYSELLNKVCQLANYLKSVGVGKGDAVVIYLPMLMELPIAMLACARIGAVHSVVFAGFSADALAQRIIDCKPKVVITCNAVKRGKKLIALKDIVDVSLADSAKNGVDVGISLTYENQSAMKREDTKWTSGRDVWWQDVVPNFPTKCDVEWVDAEDPLFLLYTSGSTGKPKGVLHTTGGYMVYSATTFKHAFDYKPSDIYWCTADCGWITGHSYVTYGPLLNGATVLVYEGAPNYPDPSRCWDVVDKYGVTIFYTAPTLIRALMRDGTEYVTRYSRKSLRVLGSVGEPINPTAWRWFYDIIGDARCPISDTWWQTETGGFMITPLPGAWPLKPGSATFPFFGVQPVIVDEKGKEMEGECSGYLCIKKSWPGAFRTLYGDKDRYETTYFKPFAGYYFSGDGCSRDKDGYHFLTGRVDDVINVSGHRIGTAEVESALVSHPKCAEAAVVGIDHEVKGQGIYAFVTLVDGVPYSDELRKSLVMTVRSQIGAFAAPDKIHWAPGLPKTRSGKIMRRILRKIASRQLDELGDTSTLAEPGVVDQLIALADS

SEQ ID NO: 122206 - DNA, 2121 bp, Zea mays
  CDS (1)..(2121)
atgggcacggccaacggccagcagccggcagagggcgctccctctgacaagctccgccacgtcgagtccatgtcggagctgccctccggcgccggcaagatctcggggatcaacgccgtcgtgctcggggagtcgctcgccgccgaggagaacgacctcatcgtccccagccccgagttctctgccagcgccctcgtctcttctccgaaacagtatcgcgagatgtatgagaggtccattaaggacccggccgggttctggtcggagattgccgagaccttttactggaaggagaagtggaaccccgccgaggtctgctcggagaacctcgatgtcaccaagggacccgtccagatcaactggttcaagggagggaaaaccaacatatgttacaacgctgttgaccgcaacatcgagtctggcaatggcgacaaggttgcaatgtactgggagggtaatgagcccggtcaggatgggaagcttacctattccgagctcctggagaaggtttgccagcttgcaaattacttgaagagccttggtgtcggcaagggtgatgctgttattatatacctaccaatgttgctggagcttcccattgccatgcttgcctgtgcccgcattggtgccgttcactcggttgtgtttgctggcttctcagcagattcgctagctcaaaggattgtcgattgcaagcctaagcttgtcatcacgtgcaatgctgtgaagcggggagtcaagcccatctttctcaaagatatagtggatgcagctttggttgaaagtgagaagaatggagtctctgtaggtctctgtttgacgtatgaaaaccagtcagccatgaagagggaaaacacaaaatggcaagcagaaagggatgtttggtggcaggacgttgtcacaaaatttccaaccaaatgtgatgtggagtgggtggatgcagaggatccattgttccttttgtacacaagtggcagcacagggaagccaaagggtgtactgcatacttctgggggctacatggtgtacactgcaacaacatttaagtacgcatttgactacaagccaactgacatatactggtgcactgcagactgtggctggattactggacatagttatgtaacatatggtcctctcctgaatggtgctacggttctcgtttttgaagggacgccgaactaccctgattcgggccgatgctgggatattgtggacaagtacaatgtgacaatattttatactgccccaactcttgttcgttcactcatgcgtgatggcactgagtatgttacacgttactctcgaaagtctctccgagtcctgggaagtgttggtgagccaatcaatcctagtgcatggagatggttctacaatactgttggggattcccggtgccctatatcagacacctggtggcaaactgaaactggcggtttcatgatcacccctttgcctggcgcctggcctcaaaaaccaggttctgcaacctttcctttctttggtgttcagccggtcattgttgacgagaaagggcaagagattgaaggggaatgtagtggatatctttgcataaagaaatcatggcctggggcttcccggactctgtatggagatcatgagagatacgagaccacgtacttcaaaccatttgctgggtactatttcactggtgatggttgcagcagagacaaagatggttaccactggctgactggaagagtagatgatgtcatcaatgtcagtggacaccgaatcggcacagcagagattgagtcagctttagtgtcacatccacagtgtgcagaggctgctgttgttggtgttgagcatgaggtcaaaggtcaaggaatttatgcttttgtaactttggtggatggtgttccgtatagtgaggaactacgaaaaagcctcataatgacagtgcgcaaccagattggggcatttgcagctcctgacaagatccactgggcaccgggacttcctaaaacccggagtggcaagatcatgcgaaggattttgcgcaagattgctgcacggcaactggatgaacttggggacataagcaccctcgctgaacctgctgtagttgaccagcttatttcgctcagcaattgttag

SEQ ID NO: 122207 - protein, 706 aa, Zea mays
MGTANGQQPAEGAPSDKLRHVESMSELPSGAGKISGINAVVLGESLAAEENDLIVPSPEFSASALVSSPKQYREMYERSIKDPAGFWSEIAETFYWKEKWNPAEVCSENLDVTKGPVQINWFKGGKTNICYNAVDRNIESGNGDKVAMYWEGNEPGQDGKLTYSELLEKVCQLANYLKSLGVGKGDAVIIYLPMLLELPIAMLACARIGAVHSVVFAGFSADSLAQRIVDCKPKLVITCNAVKRGVKPIFLKDIVDAALVESEKNGVSVGLCLTYENQSAMKRENTKWQAERDVWWQDVVTKFPTKCDVEWVDAEDPLFLLYTSGSTGKPKGVLHTSGGYMVYTATTFKYAFDYKPTDIYWCTADCGWITGHSYVTYGPLLNGATVLVFEGTPNYPDSGRCWDIVDKYNVTIFYTAPTLVRSLMRDGTEYVTRYSRKSLRVLGSVGEPINPSAWRWFYNTVGDSRCPISDTWWQTETGGFMITPLPGAWPQKPGSATFPFFGVQPVIVDEKGQEIEGECSGYLCIKKSWPGASRTLYGDHERYETTYFKPFAGYYFTGDGCSRDKDGYHWLTGRVDDVINVSGHRIGTAEIESALVSHPQCAEAAVVGVEHEVKGQGIYAFVTLVDGVPYSEELRKSLIMTVRNQIGAFAAPDKIHWAPGLPKTRSGKIMRRILRKIAARQLDELGDISTLAEPAVVDQLISLSNC

SEQ ID NO: 122208 - DNA, 2097 bp, Glycine max
  CDS (1)..(2097)
atggcctctaatctcagaaccaacaatttcctgcgccatgtggaatcaatgaagcttcttccatcaggtgcgggccacatttcacacctgaatgctgtgatacttggtgaatctctcgccactgaagaggatgatttcgttcttccaagtgaggactttgctagccaagccaatgttcagtccccagaacagtatctgaagatgtataatagatccattgaggatcctgctggattctggtctgagattgcctcagagttctattggaaacagagatggggtgataaagtgtgtgatgaaaattttgatgtgaggaaagggaatataaagattgagtggttcaagggtggcatcaccaacatctgttataattgcttggatagaaatgttgaagctggacttggtgacaaggttgccatttactgggaaggcaatgagcctggtttggatggtactttgacatacactgaacttctccaacaagtttgccagcttgcaaactaccttaaagatattggtgtgaagaagggagatgccgtaattatttatttgcccatgcttatggagcttcccatcgcaatgcttgcctgcgcccggattggtgctgttcattcggttgtatttgctggtttttctgcagaagctctttcccagagaatcattgattgtaaaccaaaagttgtaattacttgcaatgctgttaaaaggggccctaagcctatctatctaaaagatattgttgatgctgcaatcaatgattcagcccaaaatggggtctctatagataaatgcctagtttatgaaaacccattggcaatgaagagggtagataccaaatggaaggaagggcgtgatatatggtggcaggatgtcattcctcaatatccaactacttgtccgttggagtgggttgatgcagaggatccactttttctactctatacaagtgggagcacaggaaaacctaagggtgtcctccatacaactggtggttacatggtgtacactgcaacaacatttaagtatgcatttgactacaagccgtctgacatctactggtgtacagctgattgtggttggattactgggcacagctatgtcacttatggacccatgctcaatggtgcatctgttattgtgtatgaaggggctcctaattatcctgatgctgggagatgttgggacattgttgacaaatataaggtgacaatattctacactgctccgacattggtgcggtctctcatgcgtgatggtgatgcgtttgttactcgctactcaaggaaatctttacgagtcctaggaagtgtaggtgagcccataaatccaagtgcatggaggtggttttacaatgtagttggagattcaaggtgccctatctctgacacttggtggcaaacagaaacaggtggcttcatgataactccactaccaggtgcttggccccagaaacctggttctgcaactttccctttctttggagttcagcctgtcatactggatgagaaaggtgttgaaatagaaggggagtgcaatggatatttgtgtgtgaagaaatcatggcctggggcattcagaactctgtatggtgatcatgaaagatatgaaacaacatatttcaagccatttgccggatactatttcagtggtgatggttgcagcagggataaagatggataccattggctcattggaagagttgacgatgtcatcaatgttagtgggcatcgaattggcacggcagaagtggaatcagctttagtttcacatccgcaatgtgcagaggctgctgtggttggtgtggagcatgaggtcaaaggacagggcatctatgcatttgttacagttgtggatggtgttccttacagtgaagaactgcggaaggaccttgtactcatagttcgaaagcagataggagcctttgcagcacctgataaaattcattgggcacctggccttccaaaaacaaggagtggaaagataatgcgaagaattctgagaaaaattgcgtctcggcagctggatgaacttggagatacaagtacccttgcagatccaaatgtggtcaatcaacttatagaacttgcagattcttga

SEQ ID NO: 122209 - protein, 698 aa, Glycine max
MASNLRTNNFLRHVESMKLLPSGAGHISHLNAVILGESLATEEDDFVLPSEDFASQANVQSPEQYLKMYNRSIEDPAGFWSEIASEFYWKQRWGDKVCDENFDVRKGNIKIEWFKGGITNICYNCLDRNVEAGLGDKVAIYWEGNEPGLDGTLTYTELLQQVCQLANYLKDIGVKKGDAVIIYLPMLMELPIAMLACARIGAVHSVVFAGFSAEALSQRIIDCKPKVVITCNAVKRGPKPIYLKDIVDAAINDSAQNGVSIDKCLVYENPLAMKRVDTKWKEGRDIWWQDVIPQYPTTCPLEWVDAEDPLFLLYTSGSTGKPKGVLHTTGGYMVYTATTFKYAFDYKPSDIYWCTADCGWITGHSYVTYGPMLNGASVIVYEGAPNYPDAGRCWDIVDKYKVTIFYTAPTLVRSLMRDGDAFVTRYSRKSLRVLGSVGEPINPSAWRWFYNVVGDSRCPISDTWWQTETGGFMITPLPGAWPQKPGSATFPFFGVQPVILDEKGVEIEGECNGYLCVKKSWPGAFRTLYGDHERYETTYFKPFAGYYFSGDGCSRDKDGYHWLIGRVDDVINVSGHRIGTAEVESALVSHPQCAEAAVVGVEHEVKGQGIYAFVTVVDGVPYSEELRKDLVLIVRKQIGAFAAPDKIHWAPGLPKTRSGKIMRRILRKIASRQLDELGDTSTLADPNVVNQLIELADS

SEQ ID NO: 122210 - DNA, 2259 bp, Glycine max
  CDS (1)..(2259)
atgattcctctgtcccataacccagtctctgttcacctgggtggaacaccctgtgaccctcttcacccaattacgttccatccaactctgaacaagcctcgttcttccacctctctgttttggaactgcaaaaggagaaggaagaggaaaaactccattaccatggcctctaatctcagaaccaacaatttcctgcgccatgtggaatcaatgaagcttcttccatcaggtgcgggccacatttcacacctgaatgctgtgatacttggtgaatctctcgccactgaagaggatgatttcgttcttccaagtgaggactttgctagccaagccaatgttcagtccccagaacagtatctgaagatgtataatagatccattgaggatcctgctggattctggtctgagattgcctcagagttctattggaaacagagatggggtgataaagtgtgtgatgaaaattttgatgtgaggaaagggaatataaagattgagtggttcaagggtggcatcaccaacatctgttataattgcttggatagaaatgttgaagctggacttggtgacaaggttgccatttactgggaaggcaatgagcctggtttggatggtactttgacatacactgaacttctccaacaagtttgccagcttgcaaactaccttaaagatattggtgtgaagaagggagatgccgtaattatttatttgcccatgcttatggagcttcccatcgcaatgcttgcctgcgcccggattggtgctgttcattcggttgtatttgctggtttttctgcagaagctctttcccagagaatcattgattgtaaaccaaaagttgtaattacttgcaatgctgttaaaaggggccctaagcctatctatctaaaagatattgttgatgctgcaatcaatgattcagcccaaaatggggtctctatagataaatgcctagtttatgaaaacccattggcaatgaagagggtagataccaaatggaaggaagggcgtgatatatggtggcaggatgtcattcctcaatatccaactacttgtccgttggagtgggttgatgcagaggatccactttttctactctatacaagtgggagcacaggaaaacctaagggtgtcctccatacaactggtggttacatggtgtacactgcaacaacatttaagtatgcatttgactacaagccgtctgacatctactggtgtacagctgattgtggttggattactgggcacagctatgtcacttatggacccatgctcaatggtgcatctgttattgtgtatgaaggggctcctaattatcctgatgctgggagatgttgggacattgttgacaaatataaggtgacaatattctacactgctccgacattggtgcggtctctcatgcgtgatggtgatgcgtttgttactcgctactcaaggaaatctttacgagtcctaggaagtgtaggtgagcccataaatccaagtgcatggaggtggttttacaatgtagttggagattcaaggtgccctatctctgacacttggtggcaaacagaaacaggtggcttcatgataactccactaccaggtgcttggccccagaaacctggttctgcaactttccctttctttggagttcagcctgtcatactggatgagaaaggtgttgaaatagaaggggagtgcaatggatatttgtgtgtgaagaaatcatggcctggggcattcagaactctgtatggtgatcatgaaagatatgaaacaacatatttcaagccatttgccggatactatttcagtggtgatggttgcagcagggataaagatggataccattggctcattggaagagttgacgatgtcatcaatgttagtgggcatcgaattggcacggcagaagtggaatcagctttagtttcacatccgcaatgtgcagaggctgctgtggttggtgtggagcatgaggtcaaaggacagggcatctatgcatttgttacagttgtggatggtgttccttacagtgaagaactgcggaaggaccttgtactcatagttcgaaagcagataggagcctttgcagcacctgataaaattcattgggcacctggccttccaaaaacaaggagtggaaagataatgcgaagaattctgagaaaaattgcgtctcggcagctggatgaacttggagatacaagtacccttgcagatccaaatgtggtcaatcaacttatagaacttgcagattcttga

SEQ ID NO: 122211 - protein, 752 aa, Glycine max
MIPLSHNPVSVHLGGTPCDPLHPITFHPTLNKPRSSTSLFWNCKRRRKRKNSITMASNLRTNNFLRHVESMKLLPSGAGHISHLNAVILGESLATEEDDFVLPSEDFASQANVQSPEQYLKMYNRSIEDPAGFWSEIASEFYWKQRWGDKVCDENFDVRKGNIKIEWFKGGITNICYNCLDRNVEAGLGDKVAIYWEGNEPGLDGTLTYTELLQQVCQLANYLKDIGVKKGDAVIIYLPMLMELPIAMLACARIGAVHSVVFAGFSAEALSQRIIDCKPKVVITCNAVKRGPKPIYLKDIVDAAINDSAQNGVSIDKCLVYENPLAMKRVDTKWKEGRDIWWQDVIPQYPTTCPLEWVDAEDPLFLLYTSGSTGKPKGVLHTTGGYMVYTATTFKYAFDYKPSDIYWCTADCGWITGHSYVTYGPMLNGASVIVYEGAPNYPDAGRCWDIVDKYKVTIFYTAPTLVRSLMRDGDAFVTRYSRKSLRVLGSVGEPINPSAWRWFYNVVGDSRCPISDTWWQTETGGFMITPLPGAWPQKPGSATFPFFGVQPVILDEKGVEIEGECNGYLCVKKSWPGAFRTLYGDHERYETTYFKPFAGYYFSGDGCSRDKDGYHWLIGRVDDVINVSGHRIGTAEVESALVSHPQCAEAAVVGVEHEVKGQGIYAFVTVVDGVPYSEELRKDLVLIVRKQIGAFAAPDKIHWAPGLPKTRSGKIMRRILRKIASRQLDELGDTSTLADPNVVNQLIELADS

SEQ ID NO: 122212 - DNA, 2121 bp, Zea mays
  CDS (1)..(2121)
atgggcacggccaacggccagcagccggcagagggcgctccctctgacaagctccgccacgtcgagtccatgtcggagctgccctccggcgccggcaagatctcggggatcaacgccgtcgtgctcggggagtcgctcgccgccgaggagaacgacctcatcgtccccagccccgagttctctgccagcgccctcgtctcttctccgaaacagtatcgcgagatgtatgagaggtccattaaggacccggccgggttctggtcggagattgccgagaccttttactggaaggagaagtggaaccccgccgaggtctgctcggagaacctcgatgtcaccaagggacccgtccagatcaactggttcaagggagggaaaaccaacatatgttacaacgctgttgaccgcaacatcgagtctggcaatggcgacaaggttgcaatgtactgggagggtaatgagcccggtcaggatgggaagcttacctattccgagctcctggagaaggtttgccagcttgcaaattacttgaagagccttggtgtcggcaagggtgatgctgttattatatacctaccaatgttgctggagcttcccattgccatgcttgcctgtgcccgcattggtgccgttcactcggttgtgtttgctggcttctcagcagattcgctagctcaaaggattgtcgattgcaagcctaagcttgtcatcacgtgcaatgctgtgaagcggggagtcaagcccatctttctcaaagatatagtggatgcagctttggttgaaagtgagaagaatggagtctctgtaggtctctgtttgacgtatgaaaaccagtcagccatgaagagggaaaacacaaaatggcaagcagaaagggatgtttggtggcaggacgttgtcacaaaatttccaaccaaatgtgatgtggagtgggtggatgcagaggatccattgttccttttgtacacaagtggcagcacagggaagccaaagggtgtactgcatacttctgggggctacatggtgtacactgcaacaacatttaagtacgcatttgactacaagccaactgacatatactggtgcactgcagactgtggctggattactggacatagttatgtaacatatggtcctctcctgaatggtgctacggttctcgtttttgaagggacgccgaactaccctgattcgggccgatgctgggatattgtggacaagtacaatgtgacaatattttatactgccccaactcttgttcgttcactcatgcgtgatggcactgagtatgttacacgttactctcgaaagtctctccgagtcctgggaagtgttggtgagccaatcaatcctagtgcatggagatggttctacaatactgttggggattcccggtgccctatatcagacacctggtggcaaactgaaactggcggtttcatgatcacccctttgcctggcgcctggcctcaaaaaccaggttctgcaacctttcctttctttggtgttcagccggtcattgttgacgagaaagggcaagagattgaaggggaatgtagtggatatctttgcataaagaaatcatggcctggggctttccggactctgtatggagatcatgagagatacgagaccacgtacttcaaaccatttgctgggtactatttcactggtgatggttgcagcagagacaaagatggttaccactggctgactggaagagtagatgatgtcatcaatgtcagtggacaccgaatcggcacagcagaggttgagtcagctttagtgtcacatccacagtgtgcagaggctgctgttgttggtgttgagcatgaggtcaaaggtcaaggaatttatgcttttgtaactttggtggatggtgttccgtatagtgaggaactacgaaaaagcctcataatgacagtgcgcaaccagattggggcatttgcagctcctgacaagatccactgggcaccgggacttcctaaaacccggagtggcaagatcatgcgaaggattttgcgcaagattgctgcacggcaactggatgaacttggggacataagcaccctcgctgaacctgctgtagttgaccagcttatttcgctcagcaattgttag

SEQ ID NO: 122213 - protein, 706 aa, Zea mays
MGTANGQQPAEGAPSDKLRHVESMSELPSGAGKISGINAVVLGESLAAEENDLIVPSPEFSASALVSSPKQYREMYERSIKDPAGFWSEIAETFYWKEKWNPAEVCSENLDVTKGPVQINWFKGGKTNICYNAVDRNIESGNGDKVAMYWEGNEPGQDGKLTYSELLEKVCQLANYLKSLGVGKGDAVIIYLPMLLELPIAMLACARIGAVHSVVFAGFSADSLAQRIVDCKPKLVITCNAVKRGVKPIFLKDIVDAALVESEKNGVSVGLCLTYENQSAMKRENTKWQAERDVWWQDVVTKFPTKCDVEWVDAEDPLFLLYTSGSTGKPKGVLHTSGGYMVYTATTFKYAFDYKPTDIYWCTADCGWITGHSYVTYGPLLNGATVLVFEGTPNYPDSGRCWDIVDKYNVTIFYTAPTLVRSLMRDGTEYVTRYSRKSLRVLGSVGEPINPSAWRWFYNTVGDSRCPISDTWWQTETGGFMITPLPGAWPQKPGSATFPFFGVQPVIVDEKGQEIEGECSGYLCIKKSWPGAFRTLYGDHERYETTYFKPFAGYYFTGDGCSRDKDGYHWLTGRVDDVINVSGHRIGTAEVESALVSHPQCAEAAVVGVEHEVKGQGIYAFVTLVDGVPYSEELRKSLIMTVRNQIGAFAAPDKIHWAPGLPKTRSGKIMRRILRKIAARQLDELGDISTLAEPAVVDQLISLSNC

SEQ ID NO: 122214 - DNA, 22 bp, Artificial sequence
  primer
atgtcgccctctgccgtacaat

SEQ ID NO: 122215 - DNA, 26 bp, Artificial sequence
  primer
ttacaacttgaccgaatcaattagat

SEQ ID NO: 122216 - protein, 788 aa, Artificial sequence
  consensus sequence
  Variant (2)..(7): Xaa in position 2 to 7 is any amino acid
  Variant (9)..(14): Xaa in position 9 to 14 is any amino acid
  Variant (15)..(17): Xaa in position 15 to 17 is any or no amino acid
  Variant (20)..(27): Xaa in position 20 to 27 is any amino acid
  Variant (28)..(28): Xaa in position 28 is any or no amino acid
  Variant (30)..(45): Xaa in position 30 to 45 is any amino acid
  Variant (46)..(67): Xaa in position 46 to 67 is any or no amino acid
  Variant (70)..(71): Xaa in position 70 to 71 is any amino acid
  Variant (73)..(74): Xaa in position 73 to 74 is any amino acid
  Variant (76)..(78): Xaa in position 76 to 78 is any amino acid
  Variant (81)..(81): Xaa in position 81 is any amino acid
  Variant (84)..(92): Xaa in position 84 to 92 is any amino acid
  Variant (93)..(93): Xaa in position 93 is any or no amino acid
  Variant (95)..(97): Xaa in position 95 to 97 is any amino acid
  Variant (99)..(107): Xaa in position 99 to 107 is any amino acid
  Variant (108)..(132): Xaa in position 108 to 132 is any or no amino acid
  Variant (135)..(136): Xaa in position 135 to 136 is any amino acid
  Variant (138)..(140): Xaa in position 138 to 140 is any amino acid
  Variant (142)..(144): Xaa in position 142 to 144 is any amino acid
  Variant (146)..(147): Xaa in position 146 to 147 is any amino acid
  Variant (149)..(151): Xaa in position 149 to 151 is any amino acid
  Variant (152)..(152): Xaa in position 152 is any or no amino acid
  Variant (154)..(155): Xaa in position 154 to 155 is any amino acid
  Variant (159)..(159): Xaa in position 159 is any amino acid
  Variant (161)..(162): Xaa in position 161 to 162 is any amino acid
  Variant (164)..(164): Xaa in position 164 is any amino acid
  Variant (167)..(168): Xaa in position 167 to 168 is any amino acid
  Variant (170)..(172): Xaa in position 170 to 172 is any amino acid
  Variant (174)..(174): Xaa in position 174 is any amino acid
  Variant (178)..(178): Xaa in position 178 is any amino acid
  Variant (183)..(183): Xaa in position 183 is any amino acid
  Variant (189)..(189): Xaa in position 189 is any amino acid
  Variant (193)..(195): Xaa in position 193 to 195 is any amino acid
  Variant (197)..(198): Xaa in position 197 to 198 is any amino acid
  Variant (200)..(201): Xaa in position 200 to 201 is any amino acid
  Variant (203)..(208): Xaa in position 203 to 208 is any amino acid
  Variant (209)..(210): Xaa in position 209 to 210 is any or no amino acid
  Variant (213)..(217): Xaa in position 213 to 217 is any amino acid
  Variant (220)..(225): Xaa in position 220 to 225 is any amino acid
  Variant (226)..(226): Xaa in position 226 is any or no amino acid
  Variant (228)..(230): Xaa in position 228 to 230 is any amino acid
  Variant (232)..(232): Xaa in position 232 is any amino acid
  Variant (234)..(243): Xaa in position 234 to 243 is any amino acid
  Variant (244)..(248): Xaa in position 244 to 248 is any or no amino acid
  Variant (250)..(261): Xaa in position 250 to 261 is any amino acid
  Variant (262)..(288): Xaa in position 262 to 288 is any or no amino acid
  Variant (291)..(309): Xaa in position 291 to 309 is any amino acid
  Variant (310)..(320): Xaa in position 310 to 320 is any or no amino acid
  Variant (322)..(322): Xaa in position 322 is any amino acid
  Variant (326)..(326): Xaa in position 326 is any amino acid
  Variant (335)..(335): Xaa in position 335 is any amino acid
  Variant (340)..(340): Xaa in position 340 is any amino acid
  Variant (342)..(342): Xaa in position 342 is any amino acid
  Variant (344)..(344): Xaa in position 344 is any amino acid
  Variant (347)..(352): Xaa in position 347 to 352 is any amino acid
  Variant (354)..(357): Xaa in position 354 to 357 is any amino acid
  Variant (360)..(367): Xaa in position 360 to 367 is any amino acid
  Variant (368)..(369): Xaa in position 368 to 369 is any or no amino acid
  Variant (371)..(372): Xaa in position 371 to 372 is any amino acid
  Variant (374)..(374): Xaa in position 374 is any amino acid
  Variant (377)..(377): Xaa in position 377 is any amino acid
  Variant (381)..(381): Xaa in position 381 is any amino acid
  Variant (383)..(384): Xaa in position 383 to 384 is any amino acid
  Variant (389)..(390): Xaa in position 389 to 390 is any amino acid
  Variant (392)..(396): Xaa in position 392 to 396 is any amino acid
  Variant (400)..(400): Xaa in position 400 is any amino acid
  Variant (402)..(403): Xaa in position 402 to 403 is any amino acid
  Variant (404)..(404): Xaa in position 404 is any or no amino acid
  Variant (406)..(408): Xaa in position 406 to 408 is any amino acid
  Variant (410)..(410): Xaa in position 410 is any amino acid
  Variant (412)..(418): Xaa in position 412 to 418 is any amino acid
  Variant (420)..(422): Xaa in position 420 to 422 is any amino acid
  Variant (429)..(429): Xaa in position 429 is any amino acid
  Variant (431)..(443): Xaa in position 431 to 443 is any amino acid
  Variant (444)..(452): Xaa in position 444 to 452 is any or no amino acid
  Variant (456)..(456): Xaa in position 456 is any amino acid
  Variant (459)..(459): Xaa in position 459 is any amino acid
  Variant (465)..(465): Xaa in position 465 is any amino acid
  Variant (467)..(468): Xaa in position 467 to 468 is any amino acid
  Variant (469)..(471): Xaa in position 469 to 471 is any or no amino acid
  Variant (473)..(473): Xaa in position 473 is any amino acid
  Variant (476)..(479): Xaa in position 476 to 479 is any amino acid
  Variant (481)..(485): Xaa in position 481 to 485 is any amino acid
  Variant (486)..(487): Xaa in position 486 to 487 is any or no amino acid
  Variant (490)..(490): Xaa in position 490 is any amino acid
  Variant (497)..(501): Xaa in position 497 to 501 is any amino acid
  Variant (502)..(505): Xaa in position 502 to 505 is any or no amino acid
  Variant (508)..(508): Xaa in position 508 is any amino acid
  Variant (510)..(512): Xaa in position 510 to 512 is any amino acid
  Variant (513)..(526): Xaa in position 513 to 526 is any or no amino acid
  Variant (532)..(533): Xaa in position 532 to 533 is any amino acid
  Variant (535)..(536): Xaa in position 535 to 536 is any amino acid
  Variant (538)..(543): Xaa in position 538 to 543 is any amino acid
  Variant (545)..(555): Xaa in position 545 to 555 is any amino acid
  Variant (556)..(560): Xaa in position 556 to 560 is any or no amino acid
  Variant (562)..(562): Xaa in position 562 is any amino acid
  Variant (564)..(568): Xaa in position 564 to 568 is any amino acid
  Variant (571)..(573): Xaa in position 571 to 573 is any amino acid
  Variant (575)..(581): Xaa in position 575 to 581 is any amino acid
  Variant (583)..(586): Xaa in position 583 to 586 is any amino acid
  Variant (588)..(593): Xaa in position 588 to 593 is any amino acid
  Variant (594)..(599): Xaa in position 594 to 599 is any or no amino acid
  Variant (601)..(602): Xaa in position 601 to 602 is any amino acid
  Variant (606)..(607): Xaa in position 606 to 607 is any amino acid
  Variant (610)..(610): Xaa in position 610 is any amino acid
  Variant (612)..(612): Xaa in position 612 is any amino acid
  Variant (615)..(618): Xaa in position 615 to 618 is any amino acid
  Variant (621)..(621): Xaa in position 621 is any amino acid
  Variant (625)..(625): Xaa in position 625 is any amino acid
  Variant (632)..(633): Xaa in position 632 to 633 is any amino acid
  Variant (635)..(635): Xaa in position 635 is any amino acid
  Variant (636)..(637): Xaa in position 636 to 637 is any or no amino acid
  Variant (639)..(639): Xaa in position 639 is any amino acid
  Variant (641)..(641): Xaa in position 641 is any amino acid
  Variant (644)..(645): Xaa in position 644 to 645 is any amino acid
  Variant (647)..(650): Xaa in position 647 to 650 is any amino acid
  Variant (657)..(662): Xaa in position 657 to 662 is any amino acid
  Variant (664)..(669): Xaa in position 664 to 669 is any amino acid
  Variant (671)..(671): Xaa in position 671 is any amino acid
  Variant (673)..(684): Xaa in position 673 to 684 is any amino acid
  Variant (685)..(702): Xaa in position 685 to 702 is any or no amino acid
  Variant (704)..(706): Xaa in position 704 to 706 is any amino acid
  Variant (708)..(710): Xaa in position 708 to 710 is any amino acid
  Variant (713)..(714): Xaa in position 713 to 714 is any amino acid
  Variant (716)..(716): Xaa in position 716 is any amino acid
  Variant (718)..(724): Xaa in position 718 to 724 is any amino acid
  Variant (725)..(726): Xaa in position 725 to 726 is any or no amino acid
  Variant (739)..(739): Xaa in position 739 is any amino acid
  Variant (742)..(743): Xaa in position 742 to 743 is any amino acid
  Variant (745)..(749): Xaa in position 745 to 749 is any amino acid
  Variant (750)..(782): Xaa in position 750 to 782 is any or no amino acid
  Variant (785)..(785): Xaa in position 785 is any amino acid
YXXXXXXSXXXXXXXXXFWXXXXXXXXXWXXXXXXXXXXXXXXXXXXXXXXXXXXXXXXXXXXXXXXWFXXGXXNXXXNCXDRXXXXXXXXXXAXXXEXXXXXXXXXXXXXXXXXXXXXXXXXXXXXXXXXXTYXXLXXXVXXXAXXLXXXXGXXKGDXVXXYXPMXXEXXXAXLACXRIGAXHSVVFXGFSXXXLXXRXXDXXXXXXXXITXXXXXRGXXXXXXXKXXXDXAXXXXXXXXXXXXXXXVXXXXXXXXXXXXXXXXXXXXXXXXXXXXXXXXXXXXXXXRDXXXXXXXXXXXXXXXXXXXXXXXXXXXXXXEXPLFXLYTSGSTGXPKGVXHXTXGYXXXXXXTXXXXFDXXXXXXXXXXCXXDXGWXTGHXYXXYGPLXXGXXXXXFEGXPXXXPXXXRXWXXXXXXXVXXXYTAPTAXRXXXXXXXXXXXXXXXXXXXXXXSLRXLGXVGEPIXPXXXXXWXWYXXXXGXXXXXXXDTXWQTETGXXXXXXXXXPLXGXXXXXXXXXXXXXXXXXKPGSAXXPXXGXXXXXXDXXXXXXXXXXXXXXXXGXLXXXXXWPXXXRXXXXXXXRXXXXYXXXXXXXXXXXXYXXGDGXXRDXDXGYXXXXGRXDDVXNVSGHRXXTXXXEXEXALXXHXXXXEAAVVGXXXXXXGXXXXXXVXLXXXXXXXXXXXXXXXXXXXXXXXXXXXXXXLXXXVXXXIGXXAXPXXXXXXXXXLPKTRSGKIMRRXLRXXAXXXXXXXXXXXXXXXXXXXXXXXXXXXXXXXXXXXXXXGDXSTL

SEQ ID NO: 122217 - protein, 41 aa, Artificial sequence
  protein pattern
  Variant (2)..(3): Xaa in position 2 to 3 is any or no amino acid
  Variant (7)..(7): Xaa in position 7 is any amino acid
  Variant (9)..(9): Xaa in position 9 is any amino acid
  Variant (10)..(10): Xaa in position 10 is Ile, Leu, Met or Val
  Variant (12)..(12): Xaa in position 12 is Ile, Leu or Met
  Variant (14)..(14): Xaa in position 14 is Leu, Met or Val
  Variant (15)..(16): Xaa in position 15 to 16 is any amino acid
  Variant (17)..(17): Xaa in position 17 is Ala, Asp, Glu or Gln
  Variant (18)..(20): Xaa in position 18 to 20 is any amino acid
  Variant (21)..(21): Xaa in position 21 is Ala, Gly or Thr
  Variant (22)..(23): Xaa in position 22 to 23 is any amino acid
  Variant (24)..(24): Xaa in position 24 is Ala or Gly
  Variant (25)..(25): Xaa in position 25 is any amino acid
  Variant (26)..(26): Xaa in position 26 is Ala, Asn, Ser, Thr or Val
  Variant (28)..(28): Xaa in position 28 is Ile, Leu or Val
  Variant (30)..(30): Xaa in position 30 is Ala, Gly or Val
  Variant (31)..(31): Xaa in position 31 is any amino acid
  Variant (33)..(33): Xaa in position 33 is Ala, Cys, Ser or Thr
  Variant (34)..(34): Xaa in position 34 is Ala, Ile, Leu or Val
  Variant (35)..(35): Xaa in position 35 is Ile or Val
  Variant (37)..(37): Xaa in position 37 is Ala, Gly or Ser
  Variant (39)..(39): Xaa in position 39 is Phe or Tyr
  Variant (40)..(40): Xaa in position 40 is Ala or Ser
  Variant (41)..(41): Xaa in position 41 is Ala, Pro, Ser or Thr
GXXKGDXVXXYXPXXXXXXXXXXXXXRXGXXHXXXFXGXXX

SEQ ID NO: 122218 - protein, 28 aa, Artificial sequence
  protein pattern
  Variant (2)..(2): Xaa in position 2 is Asp or His
  Variant (3)..(3): Xaa in position 3 is any amino acid
  Variant (6)..(6): Xaa in position 6 is Ile, Leu, Met or Val
  Variant (15)..(16): Xaa in position 15 to 16 is any or no amino acid
  Variant (18)..(19): Xaa in position 18 to 19 is any or no amino acid
  Variant (22)..(22): Xaa in position 22 is any amino acid
  Variant (24)..(24): Xaa in position 24 is Ala, Cys, Asn, Ser or Thr
  Variant (25)..(25): Xaa in position 25 is Cys, Ser or Thr
  Variant (26)..(26): Xaa in position 26 is Ala or Gly
EXXLFXLYTSGSTGXXKXXGVXHXXXGY

SEQ ID NO: 122219 - protein, 29 aa, Artificial sequence
  protein pattern
  Variant (2)..(2): Xaa in position 2 is any or no amino acid
  Variant (4)..(6): Xaa in position 4 to 6 is any amino acid
  Variant (7)..(7): Xaa in position 7 is any or no amino acid
  Variant (10)..(10): Xaa in position 10 is Ile, Met or Val
  Variant (14)..(14): Xaa in position 14 is Ile, Leu, Met or Val
  Variant (16)..(16): Xaa in position 16 is Ile or Val
  Variant (21)..(21): Xaa in position 21 is Ile, Leu or Met
  Variant (22)..(22): Xaa in position 22 is Gly or Ser
  Variant (24)..(24): Xaa in position 24 is any amino acid
  Variant (26)..(26): Xaa in position 26 is Ile, Leu or Val
  Variant (28)..(28): Xaa in position 28 is any or no amino acid
GXYXXXXGRXDDVXNXSGHRXXTXEXEXA

SEQ ID NO: 122220 - protein, 35 aa, Artificial sequence
  protein pattern
  Variant (3)..(3): Xaa in position 3 is any or no amino acid
  Variant (5)..(5): Xaa in position 5 is any amino acid
  Variant (8)..(8): Xaa in position 8 is Ile or Val
  Variant (12)..(12): Xaa in position 12 is Ser or Thr
  Variant (13)..(13): Xaa in position 13 is Phe or Tyr
  Variant (14)..(15): Xaa in position 14 to 15 is any amino acid
  Variant (16)..(16): Xaa in position 16 is Phe or Tyr
  Variant (17)..(17): Xaa in position 17 is Ala or Gly
  Variant (19)..(21): Xaa in position 19 to 21 is any amino acid
  Variant (22)..(22): Xaa in position 22 is Cys or Gly
  Variant (23)..(25): Xaa in position 23 to 25 is any amino acid
  Variant (26)..(26): Xaa in position 26 is Phe, Ile, Leu or Val
  Variant (27)..(28): Xaa in position 27 to 28 is any amino acid
  Variant (29)..(29): Xaa in position 29 is Glu or Gly
  Variant (30)..(30): Xaa in position 30 is Gly or Ser
  Variant (31)..(31): Xaa in position 31 is any amino acid
  Variant (33)..(34): Xaa in position 33 to 34 is any amino acid
  Variant (35)..(35): Xaa in position 35 is Pro or Ser
TAXDXGWXTGHXXXXXXPXXXXXXXXXXXXXPXXX

SEQ ID NO: 122221 - protein, 19 aa, Artificial sequence
  protein pattern
  Variant (13)..(13): Xaa in position 13 is Ile, Leu or Val
  Variant (16)..(17): Xaa in position 16 to 17 is any amino acid
  Variant (18)..(18): Xaa in position 18 is any or no amino acid
LPKTRSGKIMRRXLRXXXA

SEQ ID NO: 122222 - protein, 11 aa, Artificial sequence
  protein pattern
  Variant (3)..(3): Xaa in position 3 is any or no amino acid
  Variant (5)..(5): Xaa in position 5 is any or no amino acid
  Variant (9)..(9): Xaa in position 9 is Ser or Thr
  Variant (11)..(11): Xaa in position 11 is Gly or Ser
DTXWXQTEXGX

SEQ ID NO: 122223 - protein, 21 aa, Artificial sequence
  protein pattern
  Variant (2)..(5): Xaa in position 2 to 5 is any amino acid
  Variant (6)..(7): Xaa in position 6 to 7 is any or no amino acid
  Variant (9)..(9): Xaa in position 9 is Thr or Val
  Variant (13)..(13): Xaa in position 13 is Ala or Leu
  Variant (14)..(14): Xaa in position 14 is Ile, Leu or Val
  Variant (16)..(16): Xaa in position 16 is any amino acid
  Variant (17)..(17): Xaa in position 17 is Phe, Leu or Met
  Variant (18)..(20): Xaa in position 18 to 20 is any amino acid
  Variant (21)..(21): Xaa in position 21 is Ala, Asp, Glu or Gly
KXXXXXXYXAPTXXRXXXXXX

SEQ ID NO: 122224 - protein, 23 aa, Artificial sequence
  protein pattern
  Variant (3)..(3): Xaa in position 3 is any amino acid
  Variant (4)..(4): Xaa in position 4 is Ile, Leu or Met
  Variant (6)..(6): Xaa in position 6 is Ser or Thr
  Variant (12)..(12): Xaa in position 12 is Ala, Asn or Ser
  Variant (13)..(13): Xaa in position 13 is Ala or Pro
  Variant (14)..(14): Xaa in position 14 is Ala, Asp, Glu, Ser or Thr
  Variant (15)..(15): Xaa in position 15 is Ala, Ile, Leu or Val
  Variant (17)..(17): Xaa in position 17 is any amino acid
  Variant (19)..(19): Xaa in position 19 is Phe or Tyr
  Variant (20)..(22): Xaa in position 20 to 22 is any amino acid
  Variant (23)..(23): Xaa in position 23 is Ile or Val
LRXXGXVGEPIXXXXWXWXXXXX

SEQ ID NO: 122225 - protein, 18 aa, Artificial sequence
  protein pattern
  Variant (2)..(2): Xaa in position 2 is Phe or Tyr
  Variant (3)..(3): Xaa in position 3 is any amino acid
  Variant (4)..(4): Xaa in position 4 is Asp, Glu, Gly or Asn
  Variant (6)..(7): Xaa in position 6 to 7 is any amino acid
  Variant (9)..(9): Xaa in position 9 is Ala, Ile, Leu or Val
  Variant (10)..(10): Xaa in position 10 is Ala, Cys, Ser or Thr
  Variant (11)..(11): Xaa in position 11 is any amino acid
  Variant (13)..(13): Xaa in position 13 is any amino acid
  Variant (14)..(14): Xaa in position 14 is Ile, Leu or Val
  Variant (17)..(17): Xaa in position 17 is any amino acid
  Variant (18)..(18): Xaa in position 18 is Ala, Ile, Leu or Val
WXXXGXXNXXXNXXDRXX

SEQ ID NO: 122226 - protein, 19 aa, Artificial sequence
  protein pattern
  Variant (3)..(3): Xaa in position 3 is Gly or Ser
  Variant (4)..(5): Xaa in position 4 to 5 is any amino acid
  Variant (7)..(7): Xaa in position 7 is Gly, Ser or Thr
  Variant (8)..(8): Xaa in position 8 is Ile, Leu or Val
  Variant (9)..(13): Xaa in position 9 to 13 is any amino acid
  Variant (15)..(17): Xaa in position 15 to 17 is any amino acid
  Variant (18)..(18): Xaa in position 18 is Ala, Gly, Ser or Thr
WPXXXRXXXXXXXRXXXXY

SEQ ID NO: 122227 - protein, 21 aa, Artificial sequence
  protein pattern
  Variant (2)..(3): Xaa in position 2 to 3 is any or no amino acid
  Variant (7)..(7): Xaa in position 7 is Gly or Ser
  Variant (8)..(9): Xaa in position 8 to 9 is any amino acid
  Variant (10)..(10): Xaa in position 10 is Asp or His
  Variant (11)..(11): Xaa in position 11 is Asp, Glu, Asn or Pro
  Variant (12)..(13): Xaa in position 12 to 13 is any amino acid
  Variant (15)..(15): Xaa in position 15 is Glu, Asn, Gln or Thr
  Variant (16)..(16): Xaa in position 16 is Ala, Cys, Gly, Ser or Thr
  Variant (17)..(17): Xaa in position 17 is Ile, Leu or Val
  Variant (18)..(18): Xaa in position 18 is any amino acid
  Variant (19)..(19): Xaa in position 19 is Ala, Cys, Ser, Thr or Val
  Variant (20)..(20): Xaa in position 20 is Phe or Tyr
  Variant (21)..(21): Xaa in position 21 is Ile or Val
AXXAVVXXXXXXXGXXXXXXX

SEQ ID NO: 122228 - DNA, 1287 bp, Saccharomyces cerevisiae
  CDS (1)..(1287)
atgagtatgttatctagaagattattttccacctctcgccttgctgctttcagtaagattaaggtcaaacaacccgttgtcgagttggacggtgatgaaatgacccgtatcatttgggataagatcaagaagaaattgattctaccctacttggacgtagatttgaagtactacgacttatctgtcgaatctcgtgacgccacctccgacaagattactcaggatgctgctgaggcgatcaagaagtatggtgttggtatcaaatgtgccaccatcactcctgatgaagctcgtgtgaaggaattcaacctgcacaagatgtggaaatctcctaatggtaccatcagaaacattctcggcggtacagtgttcagagagcccattgtgattcctagaattcctagactggtcccacgttgggaaaaaccaatcattattggaagacacgcccacggtgatcaatataaagctacggacacactgatcccaggcccaggatctttggaactggtctacaagccatccgaccctacgactgctcaaccacaaactttgaaagtgtatgactacaagggcagtggtgtggccatggccatgtacaatactgacgaatccatcgaagggtttgctcattcgtctttcaagctggccattgacaaaaagctaaatcttttcttgtcaaccaagaacactattttgaagaaatatgacggtcggttcaaagacattttccaagaagtttatgaagctcaatataaatccaaattcgaacaactagggatccactatgaacaccgtttaattgatgatatggtcgctcaaatgataaaatctaaaggtggctttatcatggcgctaaagaactatgacggtgatgtccaatctgacatcgtcgctcaaggatttggctccttaggtttgatgacttctatcttagttacaccagacggtaaaactttcgaaagtgaagctgctcatggtaccgtgacaagacattatagaaagtaccaaaagggtgaagaaacttctacaaactccattgcatccattttcgcgtggtcgagaggtctattgaagagaggtgaattggacaatactcctgctttgtgtaaatttgccaatattttggaatccgccactttgaacacagttcagcaagacggtatcatgacgaaggacttggctttggcttgcggtaacaacgaaagatctgcttatgttaccacagaagaatttttggatgccgttgaaaaaagactacaaaaagaaatcaagtcgatcgagtaa

SEQ ID NO: 122229 - protein, 428 aa, Saccharomyces cerevisiae
MSMLSRRLFSTSRLAAFSKIKVKQPVVELDGDEMTRIIWDKIKKKLILPYLDVDLKYYDLSVESRDATSDKITQDAAEAIKKYGVGIKCATITPDEARVKEFNLHKMWKSPNGTIRNILGGTVFREPIVIPRIPRLVPRWEKPIIIGRHAHGDQYKATDTLIPGPGSLELVYKPSDPTTAQPQTLKVYDYKGSGVAMAMYNTDESIEGFAHSSFKLAIDKKLNLFLSTKNTILKKYDGRFKDIFQEVYEAQYKSKFEQLGIHYEHRLIDDMVAQMIKSKGGFIMALKNYDGDVQSDIVAQGFGSLGLMTSILVTPDGKTFESEAAHGTVTRHYRKYQKGEETSTNSIASIFAWSRGLLKRGELDNTPALCKFANILESATLNTVQQDGIMTKDLALACGNNERSAYVTTEEFLDAVEKRLQKEIKSIE

SEQ ID NO: 122230 - DNA, 1434 bp, Oryza sativa
  CDS (71)..(1360)
gttctcatcgctgacgcctttcgcctcgacctttgatttcatcccgcgccgcgctttcgctctcgacgccatgtccatcgttcgtccccgtggctcggctcgaccagccaagatcaaggtcgccaaccccgtcgtcgagctcgacggcgatgagatgacccgcatcatctggcagaagatccgcgaggacctcatcctccccttcctcgacatcgacctcaagtactacgaccttggcatcgagcaccgcgacgccaccgacgaccaggtcaccgtcgacgccgcagaggccatcaagaagtacagggtcggcgtcaagtgcgccaccatcacccccgatgaggcccgtgtcaaggagttcggcctcaagaagatgtggctcagccccaacggcaccatccgcaacatcctcggcggcaccgtcttccgcgcccccatcgtcctcgacgacctcccgcgccccgttcctggctggaccaagcccatcatcatcggccgtcacgctttcggcgaccagtaccgatgccagaactttgccgtcgacaagcccggcaagttcaccatgcagttcacccccgaggacggctccgcgccccagacctgggacatcttcaacttccccgacgcaggaggcgtcggcctcgccatgtacaacaccaccgagtccatcaccggcttcgcacacgcctgcttcaagatggccctcgagaagaaggtgccactttacctctccaccaagaacaccatcctcaaggcatacgacggccgcttcaaggacatcttcgagaacctttacgagactgtctacaagaaggacttcgaagcgcaaggcacgtggttcaatcataggctcatcgatgatctcgtcgcccaagctatcaagtcggatggaggctttgtctgggcatgcaagaactacgatggtgacgtccagtcggacatcgtcgctcagggttacggctcgctcggcatgatgacctcggagctcatcacccccgacggccagatcatcgagtccgaggctgcgcacggcactgtcacccgccactaccgcgagcaccagaagggcaacgagacctcgaccaactcggtcgcctccatctatgcctggacccgcggtctcgccttccgcggcaagctcgacaagaacgacgagctcgtctactttgccaacgccctcgaggaggcatgcctcgacgccatcagcgccggcaagatgaccaaggatcttgcgctgatctaccacggcaagcagatgaagcgtgaacactatgtcaccaccatggagtacattgacgaggtggccaagatcctcaagcacaagctctcggccaagggcatcgaggccggcaagctctaagccggcgccactcttctctcgtgtgcgagaggcacactgaaacaaaattggaatgcaacgcgatttccgcccgc

SEQ ID NO: 122231 - protein, 429 aa, Oryza sativa
MSIVRPRGSARPAKIKVANPVVELDGDEMTRIIWQKIREDLILPFLDIDLKYYDLGIEHRDATDDQVTVDAAEAIKKYRVGVKCATITPDEARVKEFGLKKMWLSPNGTIRNILGGTVFRAPIVLDDLPRPVPGWTKPIIIGRHAFGDQYRCQNFAVDKPGKFTMQFTPEDGSAPQTWDIFNFPDAGGVGLAMYNTTESITGFAHACFKMALEKKVPLYLSTKNTILKAYDGRFKDIFENLYETVYKKDFEAQGTWFNHRLIDDLVAQAIKSDGGFVWACKNYDGDVQSDIVAQGYGSLGMMTSELITPDGQIIESEAAHGTVTRHYREHQKGNETSTNSVASIYAWTRGLAFRGKLDKNDELVYFANALEEACLDAISAGKMTKDLALIYHGKQMKREHYVTTMEYIDEVAKILKHKLSAKGIEAGKL

SEQ ID NO: 122232 - DNA, 2071 bp, Glycine max
  CDS (305)..(1555)
gaacaaacgtccataatgtgttggctagcattattgatcgtttgtgtgggtgtgtctgttttcgttgtttcccactttccaaatcacatccaacgtgaatccgtcattcaacttgattgaagtatccaacgaaaattcaaacacacactaaccttactgagtgtgttcattgggaactggttcattccacacattttatttaagccaaaaaaacccacaatttctcttagtgtgtgcttttttgttgaaattgttgtttcttcctctgagttccaactttcacctcagccaaatacacaacaaaatggggtttcagaagataagggtgggcaaccccatcgtcgaaatggatggggatgaaatgacccgagtgatttggaaactgataaaagataagcttattttcccttatttggagctggatattaagtattttgaccttggccttcctcatcgcgatgccactaatgatagagttactattgaaagcgctgaagctacactcaagtataatgtagctatcaaatgtgctactataactccagatgaagctcgtgtcaaggagtttaacttaaaacaaatgtggagaagtccaaatgggacgatccgaaacattttaaatggtacagtttttagagagccaattatctgtaagaacattcctcgtcttgtttcaggatggacaaagccaatatgcattggaagacatgcttttggagaccaatatcgggcaactgatacagttataaaaggcccaggaaagctaaaattggtttttgcacccagtggaaatgaaggcattaaagagctagaggtctataactttactggtgctggaggcatagctttgtccatgtataatactgatgagtccattcgagcttttgctgaggcttcaatgaactttgcttaccagaagaaatggcctctctatcttagcactaaaaataccattttaaagaaatatgatggaagattcaaggacattttccaggaagtttttgacacccaatggaatcacaagttcaaagctgcagggatatggtatgaacaccgtcttatagatgatatggttgcttatgctctcaaaagtgatggaggttatgtatgggcctgcaagaattatgatggtgatgtgcagagtgatttcttagctcaaggatttggttcacttggcttgatgacgtcagtactggtttgcccagatgggaaaaccattgaagcagaggcagcccatggcactgttacccgtcattatcgggttcatcagaagggaggtgaaaccagcacaaacagtattgcttcaatttttgcctggtcgcgaggtcttgcacatagggcaaaattggatggaaatgctagattgttggacttcacagagaaactggaagcagcttgcattggaacagttgaattgggaaagatgacaaaggatcttgcacttcttgttcatggacctaaggtttctagatcccagtatttgaatactgaagagttcattgatgccgtagccgaggagctgcgaacaagattatcttcacaatcgaagctgtaatgttcaaaatgagtgtgcccaataaatgttctccatttccttcatttttcctttttctttcttgaaggagggaaattctattgcttgagttaaacattttagagcaataaggtcaccaaaattctgatgcatcacttattgcatgttgcttccttcagccataagaactcaacatttgaagaactcataccatgtaccacaaaatcaatactatcttttcattgtcaaaacaacagtgctactttggaagtccttacaacaatattaaagacattgtaaaaaaaaatagggaaaaaaagcatcttcgaatgaatttacatgtctgtttacaatctatatttctcagggatgtcttcaattttctttagggaaagaggaggtggaggcgacagtttgtactgtatattcttgtcaaagaagtatatttttaactgagtatatgacttttactactaaaaatactcgaaatgtatgtaagatcgatcaccaaaattctaatgcatcatcactgattgc

SEQ ID NO: 122233 - protein, 416 aa, Glycine max
MGFQKIRVGNPIVEMDGDEMTRVIWKLIKDKLIFPYLELDIKYFDLGLPHRDATNDRVTIESAEATLKYNVAIKCATITPDEARVKEFNLKQMWRSPNGTIRNILNGTVFREPIICKNIPRLVSGWTKPICIGRHAFGDQYRATDTVIKGPGKLKLVFAPSGNEGIKELEVYNFTGAGGIALSMYNTDESIRAFAEASMNFAYQKKWPLYLSTKNTILKKYDGRFKDIFQEVFDTQWNHKFKAAGIWYEHRLIDDMVAYALKSDGGYVWACKNYDGDVQSDFLAQGFGSLGLMTSVLVCPDGKTIEAEAAHGTVTRHYRVHQKGGETSTNSIASIFAWSRGLAHRAKLDGNARLLDFTEKLEAACIGTVELGKMTKDLALLVHGPKVSRSQYLNTEEFIDAVAEELRTRLSSQSKL

SEQ ID NO: 122234 - DNA, 2345 bp, Glycine max
  CDS (93)..(1505)
  misc_feature (2288)..(2288): n is a, g, c or t
  misc_feature (2289)..(2289): n is a, g, c or t
  misc_feature (2290)..(2290): n is a, g, c or t
  misc_feature (2291)..(2291): n is a, g, c or t
tacggctgcgagaagaagacagaagggggggtgaagcttgtctagcaagtcgcattgaaaattgtaagctgcactgcagagagtgagagcgaatggtaagagtatcagcggttcgattaagcgccaccatgttctcctcaacctctctcagaaaccctaacttcctcctccttccaactcgcttcgacgcacccgttcttcgctcccacacgctttccttctccaatcgcctctcgcttcgatgctacgctgctcgcgccgccttcgacagagttcccgttctcaatcccatcgtcgaaatggacggtgatgaaatgacgaggattatatggaggatgatcaaggataaacttatatttccttacctggatttgaacataaagtactttgatttggggcttcaaaatcgtgatgctactgatgacagagttactgtggaaagtgctgaagccactctcaagtataacgtcgctgtgaaatgtgcaacaataactcctgatgagacccgagtgaaagaatttggactgaagtctatgtggagaagccccaatggcacaattaggaatattttaaatggtactgttttccgtgaacccataatatgctgcaacataccgagaattgtttccggatggaaaaaacccatttgtattggtaggcatgcttttggtgaccagtatcgggccactgatgcaataattacaggaccagggaagcttaagttggtatttgtcccagaagatggtgatgctccaatggagcttgatgtttacaatttcaaaggcccaggtgtagcacttgctatgtataatgttgatgagtctattcgagcatttgctgaatcatcaatgtcacttgcatttgcaaagaaatggccactttacttgagcaccaaaaacacaattctaaagaaatatgatggcagatttaaggacatattccaggacgtgtatcgaatcggctcgaggcaaaagtttgaagaacactcaatatggtatgagcataggctaattgatgacatggtagcatatgcactcaaaagtgaaggtggatatgtttgggcttgcaagaattatgatggtgatgtccaaagtgatttacttgctcaaggttttggctcattgggtctcatgacttctgtgctgttatcttctgatggcaagacattagaagctgaggcagctcatggaactgtaactcgacattttcggtttcatcagaagggacaagaaactagtacaaacagtattgcttccatatttgcatggacaagaggactggaacatagagcgaagctggataataatgaaaaattacgggattttactcaaaatttggaggctgcatgtgttgagacagtggaatcaggaaagatgactaaagatcttgcaattctgattcatggacctaaggtatcaagggaattttacttgaacacggaggaatttattgatgctgtggcacataatcttcagaaaaagctccgagagcctgcagtggtctagacattatttttgcaggggggaagaggaacataagttggaaaagctaaaaagtggtttgatgggtgcttaattttttggcctgtgatgctgcttttggttggaatcatgggaccctaggatctgaggaaaattttaattggtggttgggtggataattgattcttggatttttggccactgactgtcccattcttacacacaccaccattacagttatttaaaacggtaaaaatccgtcagtacggaccagcagaattaggaaagtacaaaattttgatgtgaataatgcagatgatggatcatgtttttattgtaatttgattggtttatatatatatatatatatccaaacatatatctagttactcttatatctcctttccttaagcttgtttctctaaattcacgttgacttcagattaattctataaattcacgttgatttcaaatcaattttacaaatgctagttggtacacatattaagaaatctaatcttttcgtattgtgaatatttccaacaacttaaaaattcctcgcgtggaggaaatgaacataaggaagaagccaaggagagacactcagacacttcaggacagtcattggcatgcggtgaaccattcacattagcagctgattggtatgttgggaggagaaaaggagcaacgcggcatactcaatgggttgaagaaagaaaaaaagaagagcaattttggatttttcatgcaataaactatattttttaatattaataaatagcttttggtatataaaaaaaatttgannnnaattcaactcactttaactcatgggttaagtgggtcaactctatgtaatcctgc

SEQ ID NO: 122235 - protein, 470 aa, Glycine max
MVRVSAVRLSATMFSSTSLRNPNFLLLPTRFDAPVLRSHTLSFSNRLSLRCYAARAAFDRVPVLNPIVEMDGDEMTRIIWRMIKDKLIFPYLDLNIKYFDLGLQNRDATDDRVTVESAEATLKYNVAVKCATITPDETRVKEFGLKSMWRSPNGTIRNILNGTVFREPIICCNIPRIVSGWKKPICIGRHAFGDQYRATDAIITGPGKLKLVFVPEDGDAPMELDVYNFKGPGVALAMYNVDESIRAFAESSMSLAFAKKWPLYLSTKNTILKKYDGRFKDIFQDVYRIGSRQKFEEHSIWYEHRLIDDMVAYALKSEGGYVWACKNYDGDVQSDLLAQGFGSLGLMTSVLLSSDGKTLEAEAAHGTVTRHFRFHQKGQETSTNSIASIFAWTRGLEHRAKLDNNEKLRDFTQNLEAACVETVESGKMTKDLAILIHGPKVSREFYLNTEEFIDAVAHNLQKKLREPAVV

SEQ ID NO: 122236 - DNA, 1822 bp, Sorghum bicolor
  CDS (126)..(1370)
accacccccaccccttcggtcatctcctcctccccaagacacccaccaaccccgtccagccgccggctgtctcggccgccgccgccgccgccctctcccggtccctgaggcgcgccaggtcggccatggcgttcaacaagatccaggtcgccaaccccgtcgtcgagatggacggcgatgaaatgaccagggtgttctggaaatctatcaaggacaagcttatcttccctttcgtggacctggacatcaaatactttgacctcgggcttccatatcgtgatgaaaccgatgacaaagtcacagtcgaggctgcggaggccacactcaagtacaatgtggctatcaagtgtgccaccattacaccagacgaagcaagggtgaaggagtttggcttgaaggccatgtggaagagcccgaatggcacaatcaggaacattctgaatggcactgtgttcagagaaccaatcatctgcaaaaacatcccaaggcttgttccaggctggacaaagcccatttgcattgggaggcatgcatttggtgatcaataccgggcaactgatgcagttataaagggacctggcaagctcaaattaatgctagtttttgagggaaaagaagaacagattgatctggaggtgttcaacttcactggtgctggaggagttgccttgtctatgtacaacactgatgagtcaattcgagcttttgccgaggcttctatgacaactgcttatgagaagaaatggccactctaccttagcaccaaaaacacaatcctgaaaaaatacgatggcaggtttaaggacattttccaggaggtctatgaagctggctggaaatcaaaatttgaggctgctggaatatggtatgagcatcgtcttattgatgacatggttgcgtatgcgcttaagagtgaaggaggctatgtgtgggcttgcaagaattacgatggagatgtgcagagtgatttcttagctcaaggttttggctctttgggtttgatgacatcagtgttggtgtgccctgatggaaaaaccattgaagctgaagctgcccacggcacagttacccgtcatttccgtgttcaccagaaaggaggtgaaaccagtacgaacagcattgcttcaatctttgcatggacaagaggacttgcacacagggcaaagctggatgacaatgctaggctactcgacttcgctctcaaactcgaggctgcttgcgtcggaactgtggagtctgggaagatgactaaagatcttgcacttcttgttcatgggtccgccagcgtcacaagaagccattacctgaacactgaagagttcatcgatgcagttgctactgagctccgatcaagattgggagccaattgagcttacaagaaactttgtgcatggcgacttgaatgcttcatcaccgatctgctccagtcatttctgttacattggtactgccagtcatgcttccgtgatgaattgaatgtgcgtcatcgcaatgcaatttcgatcgaagctgattaaagatgatggtgtcacgtgagcgcccataataaaggatatatagaacaactgtggcagatgattaaaatacttttatgttagctatatctgatacatttcaataaagtccttgttttctccttttctgtagttcacaaatcacgcagttcgttcggtttggtttgcccattccgtagttcgccgataaccgtatgcactcggtttttccatcatcatcaagtaaacagatgccttccgttaaaaaaaaaacccaaaaaactatgtatatgctaatctttcgatgttaccttttggcccacaaagga

SEQ ID NO: 122237 - protein, 414 aa, Sorghum bicolor
MAFNKIQVANPVVEMDGDEMTRVFWKSIKDKLIFPFVDLDIKYFDLGLPYRDETDDKVTVEAAEATLKYNVAIKCATITPDEARVKEFGLKAMWKSPNGTIRNILNGTVFREPIICKNIPRLVPGWTKPICIGRHAFGDQYRATDAVIKGPGKLKLMLVFEGKEEQIDLEVFNFTGAGGVALSMYNTDESIRAFAEASMTTAYEKKWPLYLSTKNTILKKYDGRFKDIFQEVYEAGWKSKFEAAGIWYEHRLIDDMVAYALKSEGGYVWACKNYDGDVQSDFLAQGFGSLGLMTSVLVCPDGKTIEAEAAHGTVTRHFRVHQKGGETSTNSIASIFAWTRGLAHRAKLDDNARLLDFALKLEAACVGTVESGKMTKDLALLVHGSASVTRSHYLNTEEFIDAVATELRSRLGAN

SEQ ID NO: 122238 - DNA, 1710 bp, Zea mays
  CDS (157)..(1404)
cattgggtacctcgaggccggccgggcctgttcctcctgtcatcttctcctcctcagaaacccaccaaccccgtccagccgccggctgtctcggccgccgccgccgccgccgccgccgccgccctatcccggtccttcaggtgaaccaggttggccatggccttcaacaagatcaaggtcgccaaccccatcgtcgagatggacggcgatgagatgaccagggtgttctggaaatctatcaaggacaagcttatattccctttcgtagacctcgacatcaaatattttgacctcgggcttccacaccgtgatgctaccgacgacaaagtcacagtggaggctgcggaggccacactcaagtacaatgtggctatcaagtgtgccaccattacaccagatgaagcaagggtaaaggagtttggcttgaaggctatgtggaagagcccaaatggcacaattaggaatattctgaatggcactgtgttcagagaaccaatcatctgcaaaaacatcccacggcttgttccagggtggacaaagcccatttgcattgggaggcatgcattcggcgatcagtaccgggcaactgatgcagttatcaaggggccggggaagcttaaattagtttttgagggaaaagaagagcaagttgagctggaggtgttcaacttcactggtgccggaggagttgccttatcaatgtacaacactgacgagtccatccatgcctttgctgacgcttctatggccactgcttatgaaaagaaatggccattgtatcttagcaccaaaaacactattttgaagaaatatgatggcaggttcaaggacattttccaggaggtgtatgaagctggttggaaaaccaaatttgaagctgccggcatatggtatgagcaccgccttatcgatgacatggtagcatacgcacttaagagtgaaggagggtatgtctgggcttgcaagaattatgatggagatgtgcagagcgatttcttagctcaaggttttggctcattgggtttgatgacttcggtactggtgtgccctgatggaaagacgatcgaagctgaagctgcccatggtactgttacccgtcattaccgtgttcaccagaaaggaggtgaaaccagtacgaacagtattgcctcaatctttgcgtggacaagaggacttgcacacagggcaaagcttgatgacaatgctagactacttgacttcacccagaagcttgaggctgcctgcgttggagccgtcgagtctgggaagatgaccaaggaccttgcccttctcgttcacggatcttcaaatatcacgaggagccattacctgaacacggaggagttcattgacgctgttgctgacgagctcagatcaaggctggcggccaactcgaacctttgaaatccttgccgaagttgtggtgctttcctgcgcgacgctttcgaaccgtttttattatgtcgccattttctttccctgtgccaccaccctgatgaatgaagaaggcctgagctaggcgaacatctgcaggctgcagcagtatgccaaatcattatcattaccgttaccattaccaattggagattgccgtagatttccgcgattatgggaactcatttacctgattatctgatacgtttgaaataaaaggtcgcccattagaatgatttctggttgtctaaaaaaaaaaaaaaaaaaaaaaaaaaa

SEQ ID NO: 122239 - protein, 415 aa, Zea mays
MAFNKIKVANPIVEMDGDEMTRVFWKSIKDKLIFPFVDLDIKYFDLGLPHRDATDDKVTVEAAEATLKYNVAIKCATITPDEARVKEFGLKAMWKSPNGTIRNILNGTVFREPIICKNIPRLVPGWTKPICIGRHAFGDQYRATDAVIKGPGKLKLVFEGKEEQVELEVFNFTGAGGVALSMYNTDESIHAFADASMATAYEKKWPLYLSTKNTILKKYDGRFKDIFQEVYEAGWKTKFEAAGIWYEHRLIDDMVAYALKSEGGYVWACKNYDGDVQSDFLAQGFGSLGLMTSVLVCPDGKTIEAEAAHGTVTRHYRVHQKGGETSTNSIASIFAWTRGLAHRAKLDDNARLLDFTQKLEAACVGAVESGKMTKDLALLVHGSSNITRSHYLNTEEFIDAVADELRSRLAANSNL

SEQ ID NO: 122240 - DNA, 1652 bp, Zea mays
  CDS (136)..(1374)
aaataagcccgcttgggggccccgcgcggccgcgggccctgccgtctctttccccctccaccacaagcgccgccgcagccggtgcctgctccttcccgatccccgaggcaaagctgcgactccgcaaccgccgccatggcgttcgagaagatcaaggtctccaacccaatcgtcgagatggacggtgatgagatgaccagggtattctggcagtctatcaaggacaagcttatcctcccatttctggacctggacatcaagtactatgatttggggatactgcaccgtgaagcaactgatgacaaggtcacagtggaggctgcagaggctactctcaagtacaacgtggctattaagtgtgcgaccattactccagatgaaactcgggttaaggagttcaatctgaaacacatgtggaagagcccaaatggcacaattaggaacattataaatggcactgtgttcagagagcctattatatgcaaaaacgttccaagacttgttccaggatggactaagcccatctgcattggaaggcatgccttcggtgatcaataccgagctaccgatgcagttctgaaggggcctgggaagctgaagctagtttttgagggaaaagaagaacagattgatctggaggtattcaacttcactggtgctggaggagttgccttgtctatgtacaacaccgacgagtcaatccgagcttttgctgaggcttctatgacaactgcttatgagaagaaatggccactctaccttagcaccaaaaacacaatcctgaaaaaatatgatggcaggtttaaggacattttccaggaggtctatgaagctgactggaagtccaaatttgaggctgctggaatatggtatgagcatcgtcttattgatgacatggttgcgtacgcgcttaagagcgaaggaggctatgtgtgggcttgcaagaactacgatggagatgtgcagagtgatttcttagctcaaggttttggatctttgggtttgatgacatcagtgttggtgtgccctgatggaaaaaccatcgaagctgaagctgcccatggcacggttacccgtcatttccgtgtccaccagaaaggaggcgaaaccagcacgaacagcattgcttcgatctttgcatggacaagaggacttgcccacagggcaaagctcgacgacaacgctagactactcgacttcgctctcaaactcgaggctgcttgcgttgagaccgtggagtccgggaagatgactaaagatctggcgattcttgtccatggatcttccagcgtcacgagaagccattacctgaacaccgaggagttcatcgacgcagtcgctactgagctccgatcaagactgggagccaactgagcctacaagaaactttgcatggcgactttgaatgcttcgtcaccgtcaccgatctgctagtcgtcttttctgttatgaagaagtgaatgtgcgtcaccgcagtttcgatgcaagctaattatagatgtggtgtcacgtgagcgctcaaaataaaggatacacatgattaaattgtttttatgtcagtactaagctcagtcatccccccccccccaaaaaaaaaaaacaaaacgaaaaaaaaaaaaaaaaaagcggccaaaaaaaaaaaaaaaaaaaaa

SEQ ID NO: 122241 - protein, 412 aa, Zea mays
MAFEKIKVSNPIVEMDGDEMTRVFWQSIKDKLILPFLDLDIKYYDLGILHREATDDKVTVEAAEATLKYNVAIKCATITPDETRVKEFNLKHMWKSPNGTIRNIINGTVFREPIICKNVPRLVPGWTKPICIGRHAFGDQYRATDAVLKGPGKLKLVFEGKEEQIDLEVFNFTGAGGVALSMYNTDESIRAFAEASMTTAYEKKWPLYLSTKNTILKKYDGRFKDIFQEVYEADWKSKFEAAGIWYEHRLIDDMVAYALKSEGGYVWACKNYDGDVQSDFLAQGFGSLGLMTSVLVCPDGKTIEAEAAHGTVTRHFRVHQKGGETSTNSIASIFAWTRGLAHRAKLDDNARLLDFALKLEAACVETVESGKMTKDLAILVHGSSSVTRSHYLNTEEFIDAVATELRSRLGAN

SEQ ID NO: 122242 - DNA, 1800 bp, Zea mays
  CDS (212)..(1672)
ctcgaggccggccgggggcttgccgtggccctcggctctggttatcccgccaggcgactcttcgactaagcaagagctgctcgtcccatcagccgaacatcgtcgcccttctgactgcccattcgagaccgcggccggaaaccaccaccttctgaaacgcgctggcagctgcaattccgaggctatcttcttgttctacacatcattcgcaatgaggccggcaattgctgcccccgcggctatccgccatgcatcttcaattgcccatccctcccgtcgccagacttgtgccgggaaaactcgctgtttagcttctcactcgcctgcgacatcggcccaacttttgagcccgcgacgaccagcaacaatcactgccaggacaactcccgccagcctatacactctcgtcgcacagcacagaatggcgtcctcctcctcagtccagaagatcaaggtcaaaaaccccgtcgtggagctcgacggtgatgagatgaccaggatcatctggcaggtcatcaaggacaagtttatccacccttaccccgacattgacctcaagtactacgacctgggcctgccataccgtgatgagaccgacgaccaagtcacgctcgatgccgccgaggccatcaaaaagtactcagttggtgtcaagtgcgcaaccattactccagacgagcagcgtgtagaagaattcaagctcaagaagatgtggttgtcgcccaatggcaccattcgaaaccatctaggaggaaccgtcttccgcgcacccattgttatccccaccatccctcgtctcgtccctggatggaagcagcccatcatcattggccgtcacgctttcggcgaccagtaccgcgccaaggaccgtgtcatccccggtgagggtaccttggaaatggtcttcacaccaaagggcggcaagcccgaggtgatcaaggtctacgacttccctgcagagggtggtgtcgctcagacccagtacaacacaaccgagtccatctcgggcttcgcacatgcctcgttcaagatggcgctcgacaagaagctgcctctgtacatgagcactaagaacaccattcttaaagcctacgacggaaagttcaaggatgttttccaagaaatctacgacacccagtataagaaggactttgaggccgccaagatctggtacgagcaccgtctgattgacgacatggtcgctcagatgatcaagagcgagggtggctacgttattgccatgaagaactacgacggagacgtccaatctgacattgtcgctcagggtttcggctctcttggtctcatgacttccacactcatcacccccgacggcaagacgttcgaggctgaggccgcgcacggtaccgttacccgccactaccgcgagcaccaaaagggcaaggagacatctactaaccccattgcctccatctttgcctggacacaaggtctggccaagcgtggcgagctcgacaacacccctgaacttgtcgtctttgccgagacgctcgagaaggcttgcatcgacacggtcgatgttgacaagatcatgaccaaggatctggcgctagcgtgcggaaagaaggatagggctagctgggtcacaaccaacgagtacctggacgcagtggaacgaaggctcaagtcgagtttgaagggaaagctatagacgcaaggagcaggccaaggacaagatatcctggttgagtgatcaccctacgtatccaatgttgagcgcatatagacggatgagtgcttattcccatgtagaaatcaaatctaccaattctcaggacg

SEQ ID NO: 122243 - protein, 486 aa, Zea mays
MRPAIAAPAAIRHASSIAHPSRRQTCAGKTRCLASHSPATSAQLLSPRRPATITARTTPASLYTLVAQHRMASSSSVQKIKVKNPVVELDGDEMTRIIWQVIKDKFIHPYPDIDLKYYDLGLPYRDETDDQVTLDAAEAIKKYSVGVKCATITPDEQRVEEFKLKKMWLSPNGTIRNHLGGTVFRAPIVIPTIPRLVPGWKQPIIIGRHAFGDQYRAKDRVIPGEGTLEMVFTPKGGKPEVIKVYDFPAEGGVAQTQYNTTESISGFAHASFKMALDKKLPLYMSTKNTILKAYDGKFKDVFQEIYDTQYKKDFEAAKIWYEHRLIDDMVAQMIKSEGGYVIAMKNYDGDVQSDIVAQGFGSLGLMTSTLITPDGKTFEAEAAHGTVTRHYREHQKGKETSTNPIASIFAWTQGLAKRGELDNTPELVVFAETLEKACIDTVDVDKIMTKDLALACGKKDRASWVTTNEYLDAVERRLKSSLKGKL

SEQ ID NO: 122244 - DNA, 1215 bp, Xanthobacter autotrophicus Py2
  CDS (1)..(1215): transl_table=11
atggcgaagatcaaggtggcaaatccggtcgtcgagctcgacggcgacgagatgacccggatcatctggcagtacatcaaggacaagctgatccacccctatctcgacatcgacctggaatattacgatctttcggtcgagaaccgggacgccaccagcgacaaggtcacggtcgacgcggccaatgccatcaaaaagcatggcgtgggcgtgaagtgcgccaccattaccccggacgaggcccgcgtcgaggaattcaagctcaaggaaatgtggaagtcgcccaacggcaccatccgcaacatcctgggcggcgtgatcttccgcgagcccatcatctgcaagaacgtgccgcgcctggtgccgggctggacccagcccatcgtggtgggccgccatgccttcggcgaccagtatcgcgccaccgatttcaaggtgccgggcaagggcacgctgaccgtcaccttcgtgggcgaggacggcaccaagatcgagaaggaagtgtacaagttcccgggcgccggcgtggcgctgtccatgtacaatctcgacgagtcgatccgcgaattcgcccgcgcctcgctcaactacggcctgatccggaactacccggtctatctctccacgaagaacacgatcctgaaggcctatgacggccgcttcaaggacatcttccaggaggtctacgaggccgagttcaaggccgagttcgacaagcgcggcctcacctacgagcatcgcctgatcgacgacatggtggcctcggccctcaagtggtccggcggctatgtgtgggcctgcaagaactacgacggcgacgtgcagtccgacatcgtggcccagggcttcggctcgctcggcctcatgacctccgtgctgatgacgcccgacggccagaccgtggaggccgaggccgcccacggcaccgtcacccgtcactatcgcgagcaccagaagggcaaggagacctccaccaactccatcgcctccatcttcgcctggacccgcggcctctcccaccgcgccaagctcgacggcaacgacgagctggccaagttcgccgcgacccttgagaaggtgtgcgtggacacggtggaagaaggctacatgacgaaggacctcgcgctcctcgtcggcgccgaccagaagtggctctccaccaccggcttcctcgacaagatctccgagaacctcaccaaggccatggctgcgtga

SEQ ID NO: 122245 - protein, 404 aa, Xanthobacter autotrophicus Py2
MAKIKVANPVVELDGDEMTRIIWQYIKDKLIHPYLDIDLEYYDLSVENRDATSDKVTVDAANAIKKHGVGVKCATITPDEARVEEFKLKEMWKSPNGTIRNILGGVIFREPIICKNVPRLVPGWTQPIVVGRHAFGDQYRATDFKVPGKGTLTVTFVGEDGTKIEKEVYKFPGAGVALSMYNLDESIREFARASLNYGLIRNYPVYLSTKNTILKAYDGRFKDIFQEVYEAEFKAEFDKRGLTYEHRLIDDMVASALKWSGGYVWACKNYDGDVQSDIVAQGFGSLGLMTSVLMTPDGQTVEAEAAHGTVTRHYREHQKGKETSTNSIASIFAWTRGLSHRAKLDGNDELAKFAATLEKVCVDTVEEGYMTKDLALLVGADQKWLSTTGFLDKISENLTKAMAA

SEQ ID NO: 122246 - DNA, 1227 bp, Bombyx mori
  CDS (1)..(1227)
atgtctaaaataaaggctggacctgttgttgacatccttggtgatgaaatgaccagaataatctgggatcttatcaaagaaaagctgattcttcctttcttggacattgaattacatgtctacgacttgggtatggaaaatcgtgataagactgatgatcaagttacaattgattgtgctgaggccataaagaaatacaatgtgggcatcaaatgtgcgaccataactcctgatgagaagagagttgaagaatttaaactgaagaaaatgtggaaaagccctaatgggaccatccgtaatattcttggtggtactgttttcagggaggctattatttgcaagaatataccgagacttgtaacagggtgggacaaacccatcatcattggacgtcatgctcatgctgatcaatacaaagcaactgactttgttgtcccaggtgctggtactcttgaaataatcttcaaacctgaatctggtgaggcaataaaacatgtagttcatgagtacaagggtgcaggtgtagcactggctatgtttaacactgatgcatctattattgactttgctcattcttcattcaagtttgctttggacagaaaataccctctgtacttaagcactaagaatacaatcctcaagaaatacgatggtcgtttcaaagacatctttcaagatatttatgacagggagtacaagaaacagtttgaggatgctggtatctggtatgaacacaggctaattgatgatatggtggcttatgctatgaaatcagagggtggatttgtctgggcctgcaaaaattatgatggagacgtacaatctgatagtgttgctcagggctatgggtcactgggcctcatgacatctgttctcatttgtcctgatggcaaaacagttgaggctgaagctgcccatggcactgttacacgtcatttcagattctatcagcaaggaaaagagacatccaccaatccaattgcttcaatttttgcttggactagaggtttgttgcatcgtgctaaattagacaacaatgatgccttaaagaactttgctgagactctggagaaggtctgcattgaaactattgaatctggaattatgactaaagaccttgccatttgcatcaaaggtatgaacaatgtcaaaagatcagactactatgaaacattcgaattcatggataaactagccgaaaacctgaaggttgctctaggacaatga

SEQ ID NO: 122247 - protein, 408 aa, Bombyx mori
MSKIKAGPVVDILGDEMTRIIWDLIKEKLILPFLDIELHVYDLGMENRDKTDDQVTIDCAEAIKKYNVGIKCATITPDEKRVEEFKLKKMWKSPNGTIRNILGGTVFREAIICKNIPRLVTGWDKPIIIGRHAHADQYKATDFVVPGAGTLEIIFKPESGEAIKHVVHEYKGAGVALAMFNTDASIIDFAHSSFKFALDRKYPLYLSTKNTILKKYDGRFKDIFQDIYDREYKKQFEDAGIWYEHRLIDDMVAYAMKSEGGFVWACKNYDGDVQSDSVAQGYGSLGLMTSVLICPDGKTVEAEAAHGTVTRHFRFYQQGKETSTNPIASIFAWTRGLLHRAKLDNNDALKNFAETLEKVCIETIESGIMTKDLAICIKGMNNVKRSDYYETFEFMDKLAENLKVALGQ

SEQ ID NO: 122248 - DNA, 1308 bp, Bombyx mori
  CDS (1)..(1308)
atggctaatactagtacaacaaaaattctaaagtgtgtaaaccagtttgcatcactgactagaaactatggaactgctaagagagttgtggctgctaaaccagttgtcgagatggatggtgatgagatgacacgcatcatctgggctaagatcaaagagaggctgatatttccatatgttaaggtggattgtctttactttgacttgggcctcccgcatcgtgacgccactgatgatcaggtcaccatcgactcagcgcatgccattctaaagcataatgtgggcatcaaatgcgctactatcacacctgatgaacaaagagtagaagagttcaagttgaagaaaatgtggctaagtccgaacggaacgatccgtaacattttgggcggtacagtattccgtgaaccgatattgtgtcagagtatcccgagggttgtgcctggttggacgaaacctattgtgataggccgtcatgcgcacggcgaccaatacaaggcgcaagattttgttgtaccgaaacccggaaaggttgaactcgtttacactacacaagatggtacgacagagaggcgtgtattatatgattttaaaactccgggcgttgctatgggcatgtacaataccgacgaatcgattcggtcctttgcccattccagttttcaggtagctttacagaaaaaatggcctctatacctgtctacgaagaataccattttgaaacgttacgatggtcgtttcaaagacattttcgaagaagtttttcagagtgactacaagactaagtttgatgaagccaagatatggtacgagcatcgtttaattgacgacatggtggcacaggctattaagggatcaggtggctttgtttgggcctgcaaaaactacgacggagatgtgcagtccgatattgttgctcagggttacgggtcattgggaatgatgacatcagtattgatgtgtcccgatggccgtaccgtggaatccgaagcggcgcacgggacggtgacgcgtcactaccgtatgcaccagcaaggcaagccgacatcgactaacccggtcgcttctatctacgcctggaccagaggccttgcacaccgggccaaattagacgggactcccgaattggagcgcttcgctctagccctcgaagaggcgtgcgtcgagtgcatcgatagcggtaaaatgacaaaagatttggttatttgtatacacggattggcgaacacgaaagaaggtatgtttttacacaccgaagatttcctggaggccatcgccgagcagctggaacgcaagttgggcggcaaataa

SEQ ID NO: 122249 - protein, 435 aa, Bombyx mori
MANTSTTKILKCVNQFASLTRNYGTAKRVVAAKPVVEMDGDEMTRIIWAKIKERLIFPYVKVDCLYFDLGLPHRDATDDQVTIDSAHAILKHNVGIKCATITPDEQRVEEFKLKKMWLSPNGTIRNILGGTVFREPILCQSIPRVVPGWTKPIVIGRHAHGDQYKAQDFVVPKPGKVELVYTTQDGTTERRVLYDFKTPGVAMGMYNTDESIRSFAHSSFQVALQKKWPLYLSTKNTILKRYDGRFKDIFEEVFQSDYKTKFDEAKIWYEHRLIDDMVAQAIKGSGGFVWACKNYDGDVQSDIVAQGYGSLGMMTSVLMCPDGRTVESEAAHGTVTRHYRMHQQGKPTSTNPVASIYAWTRGLAHRAKLDGTPELERFALALEEACVECIDSGKMTKDLVICIHGLANTKEGMFLHTEDFLEAIAEQLERKLGGK

SEQ ID NO: 122250 - DNA, 1212 bp, Mesorhizobium loti MAFF303099
  CDS (1)..(1212): transl_table=11
atggcgaagatcaaggtggcgaacccggtcgtcgagctcgacggcgacgagatgacccgcatcatctggcagttcatcaaggacaagctgatccacccttatctcgacctgaagctcgaatattacgatctcggcatcgagcatcgtgacgccaccaacgaccaggtgaccatcgattcggccaacgccatcaagaaatacggcgtcggcgtgaagtgcgcgacgatcacccccgacgaacagcgcgtcgaggagttcaagctgaagaagatgtggaagtcgccgaatggcaccatccgcaacatccttggcggcaccatcttccgcgagccgatcatcatgaagaacgtgccgcgcctggtgcccggctggaccaagccgatcatcgtcggccgccacgccttcggcgaccagtaccgcgccaccgatttccgcttccccggcaagggcaagctgacgatcaagttcgtcggtgaagacggaaaggtcatcgagcatgacgtgttcgacgcacccggcgccggcgtcgccatggccatgtacaatctcgacgagtcgatccgcgagtttgcccgcgcctcgctgaattacggcctgctgcgcaactatccggtctatctgtcgaccaagaacaccatcctgaaagcctatgacggccgcttcaaggacattttccaggaagtctacgaggctgaattcgaggccgacttcaagtcgaagaagctgtggtacgaacaccgcctgatcgacgacatggtggcgtccagtctgaaatggtcgggcggctatgtctgggcctgcaagaactatgacggcgacgtccagtccgataccgtggcgcaaggtttcggctcgctcggccttatgacttcggtgctgatgacgccggacggcaagacggtggaagccgaagccgcgcacggcaccgtaacccgccactaccgccagcaccagaagggcgaggaaacctcgaccaattcgatcgcctcgatcttcgcctggacgcgcgggctggcccaccgcgccaagctcgacgacaatgcggagctgaagcgctttgccgagacgctggaaaaggtctgtatccagaccgtcgagtccggcttcatgaccaaggacctgtcgctgttgatcggtcccgatcagccctggctctcgaccaccggcttcctcgacaagatcgacgaaaacttgcagaaggcgatggcgtaa

SEQ ID NO: 122251 - protein, 403 aa, Mesorhizobium loti MAFF303099
MAKIKVANPVVELDGDEMTRIIWQFIKDKLIHPYLDLKLEYYDLGIEHRDATNDQVTIDSANAIKKYGVGVKCATITPDEQRVEEFKLKKMWKSPNGTIRNILGGTIFREPIIMKNVPRLVPGWTKPIIVGRHAFGDQYRATDFRFPGKGKLTIKFVGEDGKVIEHDVFDAPGAGVAMAMYNLDESIREFARASLNYGLLRNYPVYLSTKNTILKAYDGRFKDIFQEVYEAEFEADFKSKKLWYEHRLIDDMVASSLKWSGGYVWACKNYDGDVQSDTVAQGFGSLGLMTSVLMTPDGKTVEAEAAHGTVTRHYRQHQKGEETSTNSIASIFAWTRGLAHRAKLDDNAELKRFAETLEKVCIQTVESGFMTKDLSLLIGPDQPWLSTTGFLDKIDENLQKAMA

SEQ ID NO: 122252 - DNA, 1251 bp, Arabidopsis thaliana
  CDS (1)..(1251)
atggaattcgagaagatcaaggtgatcaatcccgttgttgaaatggatggagacgaaatgactcgagttatctggaaattcatcaaagacaagcttattttccctttcctggagctggatatcaaatactttgatcttggactgcctaaccgcgatttcactgatgataaggttactatagagactgctgaagctactttaaagtataatgtggctattaagtgtgcgacgattactccggatgaagctcgtgttagggagttcggcttaaagaaaatgtggaggagtcctaatggaactataaggaacattttaaacggcacagttttcagggaacctatcatttgcagaaacatccctcgtcttgttccaggatggacgaagccaatctgtattggaaggcatgcttttggtgatcagtatagagccactgatctcattgtcaatgaaccaggaaaactgaaactagtttttgagccaagtggatcttctcagaaaacagaattcgaagtcttcaatttcaccggtggaggtgttgctttagccatgtataacactgatgagtctattcgtgcatttgctgagtcctcgatgtacacagcttaccagaaaaagtggccactttacctctccacaaaaaacaccatcctcaaaatatatgatggaagattcaaggatatattccaagaagtttatgaagctaactggagatccaagtatgaagcagcagggatatggtatgagcatcgtttgatagatgatatggttgcatatgccatgaaaagtgaagggggttacgtctgggcatgcaagaattacgatggagatgtacagagcgatttcttagcccaaggatatggatctctgggaatgatgacttcggtgttggtttgtccagatggaaagaccattgaagcagaagcagctcatggcacagttacacgccactacagagttcaccagaaaggtggtgaaacaagcaccaacagcatagcctctatttttgcttggtccagaggccttgcccacagggcaaagctggacagcaatgccgcactcttgagctatactgagaaactagaagcagcttgcatggggacggtggagtctggcaaaatgaccaaggatctagctcttctgatccacggagccaaggttaggagggatcagtatgtgaatacggaagagttcattgatgcggtggcatgggagttaaaaagaagattgttaggcaacaactccaggttgtga

SEQ ID NO: 122253 - protein, 416 aa, Arabidopsis thaliana
MEFEKIKVINPVVEMDGDEMTRVIWKFIKDKLIFPFLELDIKYFDLGLPNRDFTDDKVTIETAEATLKYNVAIKCATITPDEARVREFGLKKMWRSPNGTIRNILNGTVFREPIICRNIPRLVPGWTKPICIGRHAFGDQYRATDLIVNEPGKLKLVFEPSGSSQKTEFEVFNFTGGGVALAMYNTDESIRAFAESSMYTAYQKKWPLYLSTKNTILKIYDGRFKDIFQEVYEANWRSKYEAAGIWYEHRLIDDMVAYAMKSEGGYVWACKNYDGDVQSDFLAQGYGSLGMMTSVLVCPDGKTIEAEAAHGTVTRHYRVHQKGGETSTNSIASIFAWSRGLAHRAKLDSNAALLSYTEKLEAACMGTVESGKMTKDLALLIHGAKVRRDQYVNTEEFIDAVAWELKRRLLGNNSRL

SEQ ID NO: 122254 - DNA, 1233 bp, Arabidopsis thaliana
  CDS (1)..(1233)
atggcgtttgagaagatcaaggtggcaaatcccatcgtcgagatggatggtgatgaaatgaccagggttatttggaagtctatcaaggataagcttattactccttttgtggagttggatatcaagtacttcgaccttggtcttcctcaccgtgatgctacggatgacaaagttactattgaaagtgctgaagctactaagaagtacaatgtggcgatcaagtgtgccaccatcactccagatgaaggccgtgtcacggaatttggcttgaagcagatgtggagaagtccaaatgggaccatcaggaatatcctgaatggaactgtatttagagagccaattatctgcaaaaatgttcccaagcttgtcccaggctggacaaagcccatctgcattggaaggcatgcttttggtgatcagtaccgtgccactgatgctgtaatcaagggaccaggaaaactgactatgacctttgagggaaaagatgggaaaactgaaaccgaagtctttacatttactggtgaaggtggtgttgctatggcaatgtacaacactgatgagtccatccgtgcttttgctgatgcatcgatgaacactgcttatgagaaaaagtggccactttaccttagcacaaagaataccattcttaagaaatacgatggcagattcaaagacatcttccaagaagtctatgaagccagctggaagtcgaagtatgatgctgctggaatctggtatgaacaccgtctcattgatgatatggtggcctacgctcttaagagtgagggaggctatgtttgggcatgcaaaaactatgatggtgatgtccaaagtgatttcttggcacaaggattcgggtcacttggattgatgacatctgttctggtctgcccagatggaaagacgattgaagctgaagcggcccatggaactgtcacccgtcacttcagggttcatcagaaaggtggtgagaccagcacaaacagcatagcctctatttttgcttggactcgtggacttgcacacagggctaagttagatgacaacgcaaaactcttggatttcactgagaagctggaagccgcttgtgttgggacagtggagtcagggaaaatgaccaaagatcttgcactcatcattcacggctcaaagctttcgagggacacgtacctgaacacagaggagttcatcgatgcagtcgctgctgagctcaaagaaagactcaatgcttaa

SEQ ID NO: 122255 - protein, 410 aa, Arabidopsis thaliana
MAFEKIKVANPIVEMDGDEMTRVIWKSIKDKLITPFVELDIKYFDLGLPHRDATDDKVTIESAEATKKYNVAIKCATITPDEGRVTEFGLKQMWRSPNGTIRNILNGTVFREPIICKNVPKLVPGWTKPICIGRHAFGDQYRATDAVIKGPGKLTMTFEGKDGKTETEVFTFTGEGGVAMAMYNTDESIRAFADASMNTAYEKKWPLYLSTKNTILKKYDGRFKDIFQEVYEASWKSKYDAAGIWYEHRLIDDMVAYALKSEGGYVWACKNYDGDVQSDFLAQGFGSLGLMTSVLVCPDGKTIEAEAAHGTVTRHFRVHQKGGETSTNSIASIFAWTRGLAHRAKLDDNAKLLDFTEKLEAACVGTVESGKMTKDLALIIHGSKLSRDTYLNTEEFIDAVAAELKERLNA

SEQ ID NO: 122256 - DNA, 1458 bp, Arabidopsis thaliana
  CDS (1)..(1458)
atgctgaataagctcacgcacggcgttttcacgtaccgtgccagcctcaccgccatgttatcttcttcaacctctgctggtttatcgtcttcgttcgtttcttcgagatttcttagttccggtatattctctagtggcgcttcgaggaatcgcgtgacttttcccgttcagtttcatcgcgcatcagctgttcgatgttttgcttcttcaggcggttctgatagaattcaggttcagaatcctatcgttgaaatggatggcgatgaaatgacgagggtgatatggagtatgataaaggagaaacttattcttccttatctggatttggacattaagtacttcgacttggggattctgaatcgcgatgctactgatgacaaggttacagttgaaagtgcagaagcagctcttaagtacaatgttgctatcaaatgtgccactataactcctgatgagggtagagtgaaggagtttggactgaaatcaatgtggaggagtcctaatgggacgatcagaaacattctagatggaaccgtattccgtgaacctattatgtgcagcaatatcccccggcttgttcctggttgggaaaagcctatatgcattggtagacatgcctttggtgaccagtatcgtgccactgatacagtaattaaagggccaggaaagttgaaaatggtttttgtcccagaagatggaaacgcacctgtggagctagatgtatatgatttcaagggcccaggtgtcgcacttgctatgtacaacgtagatgagtcaattagagcttttgctgagtcatctatggcgatggcattaactaagaaatggccattatacttgagcaccaagaacacaattctcaagaaatatgatggcagatttaaggacatatttcaagaagtttatgaggcgaattggaagcaaaagtttgaagagcactcaatctggtacgagcaccggttgattgatgacatggtggcttacgcagtcaaaagtgaaggtggctatgtctgggcttgcaaaaactacgacggtgatgttcaaagcgatcttcttgcccaagggtttggctcattaggcctcatgacctccgttttgctgtccgctgatgggaaaacactcgagtcggaagcggctcatggaacagtaactcggcatttccgactgcaccaaaagggacaagaaaccagtactaacagcatagcctcaatatttgcatggacacgcggcttagaacacagggcgaaactggataagaacgagaaattaatggatttcgtgaagaagctcgagtcgtcatgtgtaaacactgttgagacagggaaaatgaccaaggatcttgcccttttaatccatggtcccaaggtgagtagggatttgtttttgaacacggaagagttcattgatgcagtagcctccaagctcaaaacacagttcaaagagcttcctcttgtctga

SEQ ID NO: 122257 - protein, 485 aa, Arabidopsis thaliana
MLNKLTHGVFTYRASLTAMLSSSTSAGLSSSFVSSRFLSSGIFSSGASRNRVTFPVQFHRASAVRCFASSGGSDRIQVQNPIVEMDGDEMTRVIWSMIKEKLILPYLDLDIKYFDLGILNRDATDDKVTVESAEAALKYNVAIKCATITPDEGRVKEFGLKSMWRSPNGTIRNILDGTVFREPIMCSNIPRLVPGWEKPICIGRHAFGDQYRATDTVIKGPGKLKMVFVPEDGNAPVELDVYDFKGPGVALAMYNVDESIRAFAESSMAMALTKKWPLYLSTKNTILKKYDGRFKDIFQEVYEANWKQKFEEHSIWYEHRLIDDMVAYAVKSEGGYVWACKNYDGDVQSDLLAQGFGSLGLMTSVLLSADGKTLESEAAHGTVTRHFRLHQKGQETSTNSIASIFAWTRGLEHRAKLDKNEKLMDFVKKLESSCVNTVETGKMTKDLALLIHGPKVSRDLFLNTEEFIDAVASKLKTQFKELPLV

SEQ ID NO: 122258 - DNA, 1200 bp, Thermotoga maritima MSB8
  CDS (1)..(1200): transl_table=11
atggagaaagtcaaagtcaaaaatcctattgttgagcttgacggtgacgagatggcacgcgtgatgtggaagatgatcaaagaaaaactcatccttccctatctcgacatccagctggtttacttcgatctcggaataaagaagagagacgaaacagacgatcagatcacgatcgaagcggcaaaggccatcaaaaagtacggtgtcggtgtcaagtgcgcaacgatcaccccggatgcggaaagagtgaaggaatacaacctgaagaaagcctggaagagtccaaatgccaccatcagagcgtatctcgatggaacggttttcagaaagcccatcatggtgaagaacgtgccaccgcttgtgaagcgctggaagaaaccgatcatcataggaagacacgcctacggtgacatatacaacgctgtggaagcaaaagtagaaggcccagcagaagtggaacttgtggtgagaaacaaagaaaacaaaacactcctcgtacacaaattcgaaggaaacggtgttgtcatggcaatgcacaacctggagaaatcgatcagaagcttcgctcagtcgtgtataaactacgctatctctgaaaaggtcgacatctggtttgcgacgaaagacacgatctccaaggtgtaccatgcgtacttcaaagacatattccaggaagaggtcgacaaaagaaaagaagaactcgaaaaagctggagtgaactacagatacatgctcatagatgatgcggctgcgcagattttgagaagtgagggcggcatgctctgggcctgtatgaactacgaaggggatatcatgtccgatatgatcgcctcaggattcggcagtctcggcctcatgacgtcggttcttgtctctcccgatggggtctacgagttcgaggcagcccacggcacggtgagaagacactactacagatatttgaagggagaaaagacctcgacgaatccaaccgcatcgatcttcgcgtggacaggtgctataaggaaaaggggagaactcgacggaacaccggaggtgtgtgaattcgcagacaaactggagaaggctgtgataaacaccatagaatccggtgtgatcacaaaggaccttcagcctttcacagaaccaccgatcgacaagtatgtcactctcgaagagttcatagacgaagtgaagaagaatctcgaaaaattactgtga

SEQ ID NO: 122259 - protein, 399 aa, Thermotoga maritima MSB8
MEKVKVKNPIVELDGDEMARVMWKMIKEKLILPYLDIQLVYFDLGIKKRDETDDQITIEAAKAIKKYGVGVKCATITPDAERVKEYNLKKAWKSPNATIRAYLDGTVFRKPIMVKNVPPLVKRWKKPIIIGRHAYGDIYNAVEAKVEGPAEVELVVRNKENKTLLVHKFEGNGVVMAMHNLEKSIRSFAQSCINYAISEKVDIWFATKDTISKVYHAYFKDIFQEEVDKRKEELEKAGVNYRYMLIDDAAAQILRSEGGMLWACMNYEGDIMSDMIASGFGSLGLMTSVLVSPDGVYEFEAAHGTVRRHYYRYLKGEKTSTNPTASIFAWTGAIRKRGELDGTPEVCEFADKLEKAVINTIESGVITKDLQPFTEPPIDKYVTLEEFIDEVKKNLEKLL

SEQ ID NO: 122260 - DNA, 1215 bp, Sinorhizobium meliloti 1021
  CDS (1)..(1215): transl_table=11
atggcaaagatcaaggtcgccaatccggtcgtcgaactcgacggcgacgagatgacccgcatcatctggcagttcatcaaggacaagctgatccacccttatctcgacctcgatctcgaatattacgacctgggcgtcgaaaaccgtgatgcaactgacgaccaggtgacgatcgacgccgcaaacgccatcaagaagcacggcgtcggcgtaaaatgcgccacgatcacgccggacgagggtcgcgtcgaggagttcaagctgaagaagatgtggaagtcgccgaacggcacgatccgcaacatcctcggcggcgtcatcttccgcgagccgatcatctgcaagaacgtgccgcgcctggtccccggctggaccaagccgatcatcgtcggccgccacgccttcggcgaccagtaccgcgcgaccgatttcaagttcccgggcaagggcaagctctcgatcaaattcgtcggcgaagacggccagacgatcgagcatgacgtttacgacgcgccgggcgccggcgtggcactcgccatgtacaacctggacgaatcgatcaccgaattcgcgcgcgcctcgttcaactacggcctgcagcgcaaggttccggtctatctctcgaccaagaacacgatcctgaaggcctatgacggccgcttcaaagacatcttccagaaggtgttcgacgaggaattcgccgcccagttcaaggccgagaagctctggtacgaacaccgcctgatcgacgacatggtcgcctcggcgctgaagtggtccggcggctatgtctgggcctgcaagaactacgacggcgacgtgcagtccgacatcgtcgcgcagggcttcggctcgctcggcctgatgacctcggtgctgatgacgccggacggcaagacggtcgaggcggaagccgcccacggcacggtgacgcgccactaccgccagcatcagaagggcgaggaaacctcgaccaactcgatcgcatcgatcttcgcctggacccgcggcctcgcccaccgcgccaagctcgacggcaacgccgaactcgcgaagttctccgagaccctggagcgcgtctgcgtggatacggtcgagtccggcttcatgaccaaggatctggcacttctcatcggtcccgaccagccctggctgtcgaccaccggtttcctcgacaagatcgacgagaacctcaggaaggcaatggcggcgtaa

SEQ ID NO: 122261 - protein, 404 aa, Sinorhizobium meliloti 1021
MAKIKVANPVVELDGDEMTRIIWQFIKDKLIHPYLDLDLEYYDLGVENRDATDDQVTIDAANAIKKHGVGVKCATITPDEGRVEEFKLKKMWKSPNGTIRNILGGVIFREPIICKNVPRLVPGWTKPIIVGRHAFGDQYRATDFKFPGKGKLSIKFVGEDGQTIEHDVYDAPGAGVALAMYNLDESITEFARASFNYGLQRKVPVYLSTKNTILKAYDGRFKDIFQKVFDEEFAAQFKAEKLWYEHRLIDDMVASALKWSGGYVWACKNYDGDVQSDIVAQGFGSLGLMTSVLMTPDGKTVEAEAAHGTVTRHYRQHQKGEETSTNSIASIFAWTRGLAHRAKLDGNAELAKFSETLERVCVDTVESGFMTKDLALLIGPDQPWLSTTGFLDKIDENLRKAMAA

SEQ ID NO: 122262 - DNA, 1212 bp, Caulobacter crescentus CB15
  CDS (1)..(1212): transl_table=11
atggccaagatcaaagtcgccaatcccgtcgtcgacatggacggcgatgaaatgacccgcatcatctggaagctcatcaaggacaagctgatcttcccgtacttggacctggaactggactattacgacctctcggtcgagaaccgcgatgcgaccgacgaccaggtgaccatcgacgcggccaacgcgaccaagaagcacggcgtggccgtcaagtgcgcgaccatcacgcccgatgagcagcgcgtcgaagagttcaagctcaagaagatgtggaagtcgccgaacggcacgatccgcaacatcctgggcggcgtcatcttccgcgagccgatcatctgccagaacgtgccgcgcctggtgccgggctggacccagccgatcatcgtcggccgtcacgccttcggcgaccagtatcgcgcgaccgacttcaagttccccggcaagggcaccctgtcgatcaagttcgtcggcgaagacggccagaccatcgagcacgaagtgttcaaggctccggacgccggcgtcgccatggcgatgtacaatctcgacgagtcgatccgcgatttcgcccacgcctcgttcgcctacggtctgaaccgcggttacccggtctatctctccacgaagaacacgatcctcaaggcctatgacggccgcttcaaggacatcttccaggagatctacgacgccgaatacgccgagaagttcaaggcggccggcatccactacgagcaccgtctgatcgacgacatggtcgcctcggccctgaagtggtcgggcggctacgtctgggcctgtaagaactacgacggcgacgtccagtcggacatcgtcgcccagggcttcgggtcgctgggcctgatgacctcggtgctgatgacgccggacggcaagacggtggaagccgaagccgcccacggcacggtgacccgtcactatcgccagcatcagaagggcgagagcacctcgaccaactcgatcgcctcgatcttcgcctggacgcgtggcctggcccaccgcgccaagctggacgacaaccaggatctggccaacttcgccgccaccctggagaaggtctgcatcgataccgtcgagagcggctacatgaccaaggacctggctctgctggtcggcgacaagcaaggctggctgaccaccgaaggcttcctcgacaagatcgacgagaacctgaagaaggccatggcctaa

SEQ ID NO: 122263 - protein, 403 aa, Caulobacter crescentus CB15
MAKIKVANPVVDMDGDEMTRIIWKLIKDKLIFPYLDLELDYYDLSVENRDATDDQVTIDAANATKKHGVAVKCATITPDEQRVEEFKLKKMWKSPNGTIRNILGGVIFREPIICQNVPRLVPGWTQPIIVGRHAFGDQYRATDFKFPGKGTLSIKFVGEDGQTIEHEVFKAPDAGVAMAMYNLDESIRDFAHASFAYGLNRGYPVYLSTKNTILKAYDGRFKDIFQEIYDAEYAEKFKAAGIHYEHRLIDDMVASALKWSGGYVWACKNYDGDVQSDIVAQGFGSLGLMTSVLMTPDGKTVEAEAAHGTVTRHYRQHQKGESTSTNSIASIFAWTRGLAHRAKLDDNQDLANFAATLEKVCIDTVESGYMTKDLALLVGDKQGWLTTEGFLDKIDENLKKAMA

SEQ ID NO: 122264 - DNA, 1368 bp, Agrobacterium tumefaciens str. C58
  CDS (1)..(1368): transl_table=11
ttgtggtttggcaatgcgcaaagcgttattgcgctgcgccaaaaaagcgccccccatggctttgcctcagacgctcgcgatgctatagcccgaccggatatttttccgactattggcgtcaacaggcgccacagcttcgaaggtgaggaattcatggcaaagatcaaggtagccaatccagtcgtcgatctcgacggcgacgaaatgacccgtatcatctggcagctcatcaaggacaagctgatcctgccatacctcgatctcgacatcgaatattacgacctctcggttgaaaaccgcgatgccaccaacgaccaggtcaccgtcgatgcggcacacgccatcaagaagcatggcgtcggcatcaagtgcgcgacgatcacgccggacgagcagcgcgtcgaggaattcggcctgaagcagatgtggaagagcccgaacggcacgatccgcaacattctcggcggcgtcatcttccgcgagccgatcatctgcaagaacgttccgcgcctcgttcccggctggaccaagccgatcgtcgtcggccgtcacgcctttggcgaccagtacaaggcaaccgatttcaagttccccggcaagggcaagctgacgatcaagttcgtcggtgaagacggcacggtcatcgaaaaggacgtcttcgacgccccgagcgccggcgtggcactcgccatgtacaacctcgacgaatccatccgcgaattcgcccgcgcctcgatgatgtatggcctgatgcgcaagtggccggtttacctctccaccaagaacaccatcctcaaggcctatgacggccgcttcaaggatatcttcgaagaagtctaccagaccgagttcaaggcaaagttcgacgaagtcggcatcacctacgaacaccgcctgatcgacgacatggttgcctcggcgctgaagtggtccggcggctacgtctgggcctgcaagaactacgatggcgacgtgcagtccgacacggttgcccagggcttcggctcgctcggcctgatgacctcggttctgctgtcgccggatggccgcaccgtcgaagccgaagcggcgcacggcacggtgacgcgtcactaccgccagcaccagaagggtcaggaaacctcgaccaactcgatcgcctcgatcttcgcctggacccgtggcctcgcccaccgcgccaagctggatgacaatgcggaactggcaaagttcgcgacgacgctcgaaaccgtctgcgtcgacaccgtcgaaagcggcttcatgaccaaggatctggccctcctcatcggaccggaccagccctggctctccaccaccgccttcctcgacaagatcgacgaaaacctcaagacggcgatggcggcctga

SEQ ID NO: 122265 - protein, 455 aa, Agrobacterium tumefaciens str. C58
MWFGNAQSVIALRQKSAPHGFASDARDAIARPDIFPTIGVNRRHSFEGEEFMAKIKVANPVVDLDGDEMTRIIWQLIKDKLILPYLDLDIEYYDLSVENRDATNDQVTVDAAHAIKKHGVGIKCATITPDEQRVEEFGLKQMWKSPNGTIRNILGGVIFREPIICKNVPRLVPGWTKPIVVGRHAFGDQYKATDFKFPGKGKLTIKFVGEDGTVIEKDVFDAPSAGVALAMYNLDESIREFARASMMYGLMRKWPVYLSTKNTILKAYDGRFKDIFEEVYQTEFKAKFDEVGITYEHRLIDDMVASALKWSGGYVWACKNYDGDVQSDTVAQGFGSLGLMTSVLLSPDGRTVEAEAAHGTVTRHYRQHQKGQETSTNSIASIFAWTRGLAHRAKLDDNAELAKFATTLETVCVDTVESGFMTKDLALLIGPDQPWLSTTAFLDKIDENLKTAMAA

SEQ ID NO: 122266 - DNA, 1212 bp, Thermoanaerobacter tengcongensis MB4
  CDS (1)..(1212): transl_table=11
atggcacaaaaaattgagatgaaggttcctattgtggaaatggacggagatgaaatgacaagaattatatggaaattgataaaagaaatgcttataaagccctatgtagatttaaagacagagtactatgatttgggcattaaaaacagagatgaaacagaagaccaggtcacagttgatgcagcatacgcaataaaaaaatacggagtcggggtaaaatgcgcaacaatcaccccaaatgctgaaagagtaaaagaatacaatttgaaaaatatgtggaaaagccctaacgctactatacgatccatactcgatgggacagtatttcgcacacctattctggttgaaggaataaagccgcttgtaaggacatggaaaaaacctattacaattgcaaggcatgcttatggggatatttataaaggggtagaatacagaatccctgaaaaaggtaaggctgagcttgtctttacttctgaaaaaggagaagagataaggtatgcaatacacgagtttgaaactcctggtgtcatattaggtatgcacaacactgatgagtcaataaaaagttttgcgagagcatgttttaattatgctttagatacgaagcaggatttgtggtttgcgactaaagacaccatttcaaaaatatacgaccacagatttaaagacatattccaggaaatatatgaaaatgaatataaagaaaaatttgaagaagcaggtattgaatatttttacacccttattgacgatgccgtagctcgaattgtaaggtctgaaggcggaatgatttgggcatgcaaaaattatgacggcgatgtaatgtcagatatggtagcaacagcatttggcagccttgccatgatgacttctgtactggtatctcctgatggtaaatacgaatttgaagcggctcatgggacagttacaaggcattattataaataccttaaaggtgaagaaacttctactaatcctattgctacaattttcgcgtggacaggtgctttgaaaaagagaggagaacttgacggaataaaagaccttgttgattttgcagataagcttgaaaaagcctcacttaaaacggttgaaaaaggaataatgacaaaagacttagccgctttatctgaattgccaaataaaactgttgtaaacacggaaactttcctcattgaaattaaaaaaactttagaagagatgctgtaa

SEQ ID NO: 122267 - protein, 403 aa, Thermoanaerobacter tengcongensis MB4
MAQKIEMKVPIVEMDGDEMTRIIWKLIKEMLIKPYVDLKTEYYDLGIKNRDETEDQVTVDAAYAIKKYGVGVKCATITPNAERVKEYNLKNMWKSPNATIRSILDGTVFRTPILVEGIKPLVRTWKKPITIARHAYGDIYKGVEYRIPEKGKAELVFTSEKGEEIRYAIHEFETPGVILGMHNTDESIKSFARACFNYALDTKQDLWFATKDTISKIYDHRFKDIFQEIYENEYKEKFEEAGIEYFYTLIDDAVARIVRSEGGMIWACKNYDGDVMSDMVATAFGSLAMMTSVLVSPDGKYEFEAAHGTVTRHYYKYLKGEETSTNPIATIFAWTGALKKRGELDGIKDLVDFADKLEKASLKTVEKGIMTKDLAALSELPNKTVVNTETFLIEIKKTLEEML

SEQ ID NO: 122268 - DNA, 1410 bp, Drosophila melanogaster
  CDS (1)..(1410)
atgttcgccctgcgccgcacagccgcaatgatgacgtcggtccaccggcagccgcatctcagccaggccgtttttcgggccaatttcgccatcagcgccgcggaccccaaaacccataagatatccatggataatgaaaggatgtccgccgtgagcgagatggcccagaagatcaaagccggtcccgttgtggatgtcctcggtgacgagatgacccgcatcatttgggactccattaagagccaactgattctgcccttcctggacattgagctgcatacctacgatcttggtattgagaaccgcgataaaaccgaggaccaggtcaccattgactgtgctgaggccatcaagaagtacaacgtgggcatcaagtgcgccacaatcactcccgacgagaagcgcgtagaggagttcaacctgaagaagatgtggaagtcgcccaacggtaccatccgtaacatcttgggaggaaccgtcttccgtgaggcaatcatctgcaagaacgtgccccgtctggtgactggctggcagaagcctattgtgatcggtcgccatgcccacgccgatcagtacaaggccgtcgactacgtggttcccggacccggcaagctgaccctcacctggaagggaaccgacggtcaggtgatcgatgaggtcattaatgacttcaagggccccggtattgccctgggaatgttcaacacggacgattccattgtggactttgcccacgcctctttcaaatatgctctggaccgcaagctgccgctgtacatgagcaccaagaacaccattctgaagaagtacgatggacgcttcaaggacatattcgaggacctgtacaacaagcagtacaagaaggagtacgaggcggcgggcatctggtatgaacaccgtctcatcgacgatatggttgcttatgccatgaagtcggagggtggcttcgtgtgggcctgcaagaactacgacggtgatgtgcagtcggactccgttgcccagggctacggatctctgggtctgatgacctccgtgctgctatgccccgatggcaagaccgtggaggctgaagccgctcacggaacggtgacgcgtcacttccgcttctaccagcagggcaaggagacctccaccaaccccattgcctcgatattcgcctggacccgtggcctgctgcatcgtgccaagctggacaacaatgagccactgaagcagttcgccgacacccttgagcaggtgtgcatcgacacaattgagagcggcgccatgaccaaggatctggccatctgcattaaaggcaacatcaacgccgttactcgcagggactaccaggagacttttgagttcattaacacgctggccaagaacctggagggtgccctggccaagaatgccgttgctgccaaatga

SEQ ID NO: 122269 - protein, 469 aa, Drosophila melanogaster
MFALRRTAAMMTSVHRQPHLSQAVFRANFAISAADPKTHKISMDNERMSAVSEMAQKIKAGPVVDVLGDEMTRIIWDSIKSQLILPFLDIELHTYDLGIENRDKTEDQVTIDCAEAIKKYNVGIKCATITPDEKRVEEFNLKKMWKSPNGTIRNILGGTVFREAIICKNVPRLVTGWQKPIVIGRHAHADQYKAVDYVVPGPGKLTLTWKGTDGQVIDEVINDFKGPGIALGMFNTDDSIVDFAHASFKYALDRKLPLYMSTKNTILKKYDGRFKDIFEDLYNKQYKKEYEAAGIWYEHRLIDDMVAYAMKSEGGFVWACKNYDGDVQSDSVAQGYGSLGLMTSVLLCPDGKTVEAEAAHGTVTRHFRFYQQGKETSTNPIASIFAWTRGLLHRAKLDNNEPLKQFADTLEQVCIDTIESGAMTKDLAICIKGNINAVTRRDYQETFEFINTLAKNLEGALAKNAVAAK

SEQ ID NO: 122270 - DNA, 1221 bp, Bifidobacterium longum NCC2705
  CDS (1)..(1221): transl_table=11
atggccaaaatcaaggtcgaaggcactgtcgtcgaactcgacggcgacgagatgacccgcgtgatctggaaggacatcaaggatcgtctgatcctgccgtacctcgacgtgaacctcgactactacgatctgggcatcgagcaccgcgacgagaccgatgaccaggtgaccatcgacgccgcccacgccatccagaagcaccatgtcggtgtcaagtgcgccaccatcacccccgatgaggcccgagtcaaggaattcggtctcaagaagatgtggaagtcccccaacggcaccatccgcaacatcctgggcggcacgatcttccgcgagccgattgtgatgagcaacgtgcctcgtctggtgcccggctggaccaagccgatcgtcgtagcccgtcacgcattcggcgaccagtacaaggccaccgatttcaaggttccgggagccggccagctgaccgtcaccttcactccggacgatggctccgagccgattcagcacgtggtctacaactacggcgaagacggcggcgtggcccaggtgcagtacaacgtcaacgattcgatccgcggtttcgctcgcgcctgcttcaactacggcctgatgcgtcattacccggtgtacttgtccaccaagaacacgattttgaaggcctacgacggccagttcaaggacatctttgccgaggtgttcgagaccgaatacaaggacaggtacgccgaggccggcctgacttacgagcaccgcctgatcgacgacatggtggccagctccctgaagtggcacggcggttacatctgggcctgcaagaactacgatggcgatgtgcagtccgactccgtggcccagggcttcggttcgctgggcctcatgacctccgtgctcatgaccccggacggccagaccgtcgaggccgaagcggcgcacggcaccgtgacccgtcactaccgccgctggcagaagggcgagaagacctccaccaacccaatcgcatccatcttcgcgtggaccggcggccttaagcaccgcgccgatctggacggcacgcccgaagtccgtcacttcgccaagacgctggagaaggtcatcgtcgacaccgttgaaggcggtcagatgaccaaggatctggccatgctcatcggcccggacgaaccgtggctcgacaccgacggcttcatgaacgcgctggacgagaacctggccaaggctctggccgagtaa

SEQ ID NO: 122271 - protein, 406 aa, Bifidobacterium longum NCC2705
MAKIKVEGTVVELDGDEMTRVIWKDIKDRLILPYLDVNLDYYDLGIEHRDETDDQVTIDAAHAIQKHHVGVKCATITPDEARVKEFGLKKMWKSPNGTIRNILGGTIFREPIVMSNVPRLVPGWTKPIVVARHAFGDQYKATDFKVPGAGQLTVTFTPDDGSEPIQHVVYNYGEDGGVAQVQYNVNDSIRGFARACFNYGLMRHYPVYLSTKNTILKAYDGQFKDIFAEVFETEYKDRYAEAGLTYEHRLIDDMVASSLKWHGGYIWACKNYDGDVQSDSVAQGFGSLGLMTSVLMTPDGQTVEAEAAHGTVTRHYRRWQKGEKTSTNPIASIFAWTGGLKHRADLDGTPEVRHFAKTLEKVIVDTVEGGQMTKDLAMLIGPDEPWLDTDGFMNALDENLAKALAE

SEQ ID NO: 122272 - DNA, 1215 bp, Brucella suis 1330
  CDS (1)..(1215): transl_table=11
atggcaaaaatcaaggttgcaaacccggtcgtcgagctcgacggcgacgagatgacccgcattatctggcagttcatcaaggacaagcttatccatccctatctcgacatcgacctgaaatactacgatctttcggtcgagaaccgcgatgcgaccaatgatcaggtcacgatcgatgcagccaatgccatcaaggaatatggcgtgggcgtaaaatgcgcgaccatcacgcccgacgaagcgcgcgtggaagaattcaagctgaagaaaatgtggaagtcgcccaacggcaccatccgcaatatcctcggcggcgtgatcttccgcgagccgatcatctgcaagaacgtgccgcgcctcgtgccgggctggacccagccgatcatcgtcggccgccatgctttcggcgaccagtaccgcgcgactgacttcaagttccccggcaagggcacactgacgatcaagttcgtcggtgaagatggccagaccatcgaacatgaagtctatcaggccccttcggctggcgtggccatggccatgtataatctggacgaatcgatccgcgaattcgcacgcgcttccttcaattacggcttgcagcgcggctatccggtctatctctccacgaagaacaccatcctcaaggcctatgatggccgcttcaaggacatcttccaggaagtcttcgacgccgaattcaagtcgaagtttgaagaaaagaagatctggtacgaacaccgcctcatcgacgacatggtcgcctcggcgctcaagtggtcgggcggctatgtctgggcctgtaagaactatgatggcgacgtgcagtcggatatcgtcgcgcagggcttcggctcgctcggcctgatgacctcggttctgatgacgccggatggcaagacggtggaagcggaagccgcccacggcaccgtaacccgccactatcgccagtatcagaagggcgaggaaacctcgaccaactccatcgcttcgatcttcgcatggacccgcggtctggcgcatcgcgccaagctcgacaacaatgccgatctgaagaagttcgccgaaacgctggaaaaggtctgcgtggacaccgttgaaagcggcttcatgaccaaggatctggcgctcctcatcggcccggatcagccttggctctcgaccaccggcttcctcgacaagatcgacgaaaatcttcagaaagccatggctgcctga

SEQ ID NO: 122273 - protein, 404 aa, Brucella suis 1330
MAKIKVANPVVELDGDEMTRIIWQFIKDKLIHPYLDIDLKYYDLSVENRDATNDQVTIDAANAIKEYGVGVKCATITPDEARVEEFKLKKMWKSPNGTIRNILGGVIFREPIICKNVPRLVPGWTQPIIVGRHAFGDQYRATDFKFPGKGTLTIKFVGEDGQTIEHEVYQAPSAGVAMAMYNLDESIREFARASFNYGLQRGYPVYLSTKNTILKAYDGRFKDIFQEVFDAEFKSKFEEKKIWYEHRLIDDMVASALKWSGGYVWACKNYDGDVQSDIVAQGFGSLGLMTSVLMTPDGKTVEAEAAHGTVTRHYRQYQKGEETSTNSIASIFAWTRGLAHRAKLDNNADLKKFAETLEKVCVDTVESGFMTKDLALLIGPDQPWLSTTGFLDKIDENLQKAMAA

SEQ ID NO: 122274 - DNA, 1251 bp, Drosophila melanogaster
  CDS (1)..(1251)
atggcccagaagatcaaagccggtcccgttgtggatgtcctcggtgacgagatgacccgcatcatttgggactccattaagagccaactgattctgcccttcctggacattgagctgcatacctacgatcttggtattgagaaccgcgataaaaccgaggaccaggtcaccattgactgtgctgaggccatcaagaagtacaacgtgggcatcaagtgcgccacaatcactcccgacgagaagcgcgtagaggagttcaacctgaagaagatgtggaagtcgcccaacggtaccatccgtaacatcttgggaggaaccgtcttccgtgaggcaatcatctgcaagaacgtgccccgtctggtgactggctggcagaagcctattgtgatcggtcgccatgcccacgccgatcagtacaaggccgtcgactacgtggttcccggacccggcaagctgaccctcacctggaagggaaccgacggtcaggtgatcgatgaggtcattaatgacttcaagggccccggtattgccctgggaatgttcaacacggacgattccattgtggactttgcccacgcctctttcaaatatgctctggaccgcaagctgccgctgtacatgagcaccaagaacaccattctgaagaagtacgatggacgcttcaaggacatattcgaggacctgtacaacaagcagtacaagaaggagtacgaggcggcgggcatctggtatgaacaccgtctcatcgacgatatggttgcttatgccatgaagtcggagggtggcttcgtgtgggcctgcaagaactacgacggtgatgtgcagtcggactccgttgcccagggctacggatctctgggtctgatgacctccgtgctgctatgccccgatggcaagaccgtggaggctgaagccgctcacggaacggtgacgcgtcacttccgcttctaccagcagggcaaggagacctccaccaaccccattgcctcgatattcgcctggacccgtggcctgctgcatcgtgccaagctggacaacaatgagccactgaagcagttcgccgacacccttgagcaggtgtgcatcgacacaattgagagcggcgccatgaccaaggatctggccatctgcattaaaggcaacatcaacgccgttactcgcagggactaccaggagacttttgagttcattaacacgctggccaagaacctggagggtgccctggccaagaatgccgttgctgccaaatga

SEQ ID NO: 122275 - protein, 416 aa, Drosophila melanogaster
MAQKIKAGPVVDVLGDEMTRIIWDSIKSQLILPFLDIELHTYDLGIENRDKTEDQVTIDCAEAIKKYNVGIKCATITPDEKRVEEFNLKKMWKSPNGTIRNILGGTVFREAIICKNVPRLVTGWQKPIVIGRHAHADQYKAVDYVVPGPGKLTLTWKGTDGQVIDEVINDFKGPGIALGMFNTDDSIVDFAHASFKYALDRKLPLYMSTKNTILKKYDGRFKDIFEDLYNKQYKKEYEAAGIWYEHRLIDDMVAYAMKSEGGFVWACKNYDGDVQSDSVAQGYGSLGLMTSVLLCPDGKTVEAEAAHGTVTRHFRFYQQGKETSTNPIASIFAWTRGLLHRAKLDNNEPLKQFADTLEQVCIDTIESGAMTKDLAICIKGNINAVTRRDYQETFEFINTLAKNLEGALAKNAVAAK

SEQ ID NO: 122276 - DNA, 1215 bp, Bradyrhizobium japonicum USDA 110
  CDS (1)..(1215): transl_table=11
atggcaaaaatcaaggtatccaatcccgtcgtcgaactcgatggcgacgagatgacccggatcatctggcagtacatcaaggacaagctgatcaccccgttcctggatgtcgagctgatgtatttcgacctggggatggaataccgcgaccacaccaacgatcaggtcaccatcgacgccgccgaagcgatcaagaaggtcggcgtcggcgtcaagtgcgccaccatcacccctgatgaagcccgggtgaaggagttcaacctcaagcagatgtggaagtcgccgaacggcaccatccgcaacatcctcggcggcgtgatcttccgcgagccgatcatctgcaagaacgtgccgcgcctggttcccggctggaccaagccgatcatcatcggccgccacgcctatggcgaccagtaccgcgccaccgatttcaagttcccgggcaagggcaccctgtcgatgaagttcgtcggcgaggacggcaccgtgatcgagaaggaagtgttcaaggcccccggcgccggcgtcgccatggagatgtacaatctcgacgactccatcatcgacttcgcccgcgcctcgctgaactacggcctgctgcgcaactacccggtctatctgtcgaccaagaacaccatcctcaaggtctatgacggccgcttcaaggacatcttccaggacatctacgaccgcgagttcaagaaggaattcgaggccaagggcctgacctacgagcaccgcctgatcgacgacatggtggcctcggcgctgaaatggtccggcggctatgtctgggcctgcaagaactacgacggcgacgtgcagtccgacacggtcgcgcagggctacggctcgctcggcctgatgacctcggtgctgctcaccccggacggcaagaccgtggaagcggaagccgcccacggcacggtgacccgccactaccgcgagcaccagaagggcaaggagacctcgaccaactcgatcgcgtcgatcttcgcctggacccgtggcctcgcccaccgcgccaagctcgacaacaacgccgagctcgccaagttcgcgaacaccctcgagaaggtctgcgtcgacaccgtcgaggccggctacatgaccaaggacctcgcgctgctggtcggcgccgaccagcgctggctctcgaccaccggcttcctcgacaaagtcgcggagaacctcaccaaggcgatggcggcgtaa

SEQ ID NO: 122277 - protein, 404 aa, Bradyrhizobium japonicum USDA 110
MAKIKVSNPVVELDGDEMTRIIWQYIKDKLITPFLDVELMYFDLGMEYRDHTNDQVTIDAAEAIKKVGVGVKCATITPDEARVKEFNLKQMWKSPNGTIRNILGGVIFREPIICKNVPRLVPGWTKPIIIGRHAYGDQYRATDFKFPGKGTLSMKFVGEDGTVIEKEVFKAPGAGVAMEMYNLDDSIIDFARASLNYGLLRNYPVYLSTKNTILKVYDGRFKDIFQDIYDREFKKEFEAKGLTYEHRLIDDMVASALKWSGGYVWACKNYDGDVQSDTVAQGYGSLGLMTSVLLTPDGKTVEAEAAHGTVTRHYREHQKGKETSTNSIASIFAWTRGLAHRAKLDNNAELAKFANTLEKVCVDTVEAGYMTKDLALLVGADQRWLSTTGFLDKVAENLTKAMAA

SEQ ID NO: 122278 - DNA, 1353 bp, Drosophila melanogaster
  CDS (1)..(1353)
atgttcgccctgcgccgcacagccgcaatgatgacgtcggtccaccggcagccgcatctcagccaggccgtttttcgggccaatttcgccatcagcgccgcgatggcccagaagatcaaagccggtcccgttgtggatgtcctcggtgacgagatgacccgcatcatttgggactccattaagagccaactgattctgcccttcctggacattgagctgcatacctacgatcttggtattgagaaccgcgataaaaccgaggaccaggtcaccattgactgtgctgaggccatcaagaagtacaacgtgggcatcaagtgcgccacaatcactcccgacgagaagcgcgtagaggagttcaacctgaagaagatgtggaagtcgcccaacggtaccatccgtaacatcttgggaggaaccgtcttccgtgaggcaatcatctgcaagaacgtgccccgtctggtgactggctggcagaagcctattgtgatcggtcgccatgcccacgccgatcagtacaaggccgtcgactacgtggttcccggacccggcaagctgaccctcacctggaagggaaccgacggtcaggtgatcgatgaggtcattaatgacttcaagggccccggtattgccctgggaatgttcaacacggacgattccattgtggactttgcccacgcctctttcaaatatgctctggaccgcaagctgccgctgtacatgagcaccaagaacaccattctgaagaagtacgatggacgcttcaaggacatattcgaggacctgtacaacaagcagtacaagaaggagtacgaggcggcgggcatctggtatgaacaccgtctcatcgacgatatggttgcttatgccatgaagtcggagggtggcttcgtgtgggcctgcaagaactacgacggtgatgtgcagtcggactccgttgcccagggctacggatctctgggtctgatgacctccgtgctgctatgccccgatggcaagaccgtggaggctgaagccgctcacggaacggtgacgcgtcacttccgcttctaccagcagggcaaggagacctccaccaaccccattgcctcgatattcgcctggacccgtggcctgctgcatcgtgccaagctggacaacaatgagccactgaagcagttcgccgacacccttgagcaggtgtgcatcgacacaattgagagcggcgccatgaccaaggatctggccatctgcattaaaggcaacatcaacgccgttactcgcagggactaccaggagacttttgagttcattaacacgctggccaagaacctggagggtgccctggccaagaatgccgttgctgccaaatga

SEQ ID NO: 122279 - protein, 450 aa, Drosophila melanogaster
MFALRRTAAMMTSVHRQPHLSQAVFRANFAISAAMAQKIKAGPVVDVLGDEMTRIIWDSIKSQLILPFLDIELHTYDLGIENRDKTEDQVTIDCAEAIKKYNVGIKCATITPDEKRVEEFNLKKMWKSPNGTIRNILGGTVFREAIICKNVPRLVTGWQKPIVIGRHAHADQYKAVDYVVPGPGKLTLTWKGTDGQVIDEVINDFKGPGIALGMFNTDDSIVDFAHASFKYALDRKLPLYMSTKNTILKKYDGRFKDIFEDLYNKQYKKEYEAAGIWYEHRLIDDMVAYAMKSEGGFVWACKNYDGDVQSDSVAQGYGSLGLMTSVLLCPDGKTVEAEAAHGTVTRHFRFYQQGKETSTNPIASIFAWTRGLLHRAKLDNNEPLKQFADTLEQVCIDTIESGAMTKDLAICIKGNINAVTRRDYQETFEFINTLAKNLEGALAKNAVAAK

SEQ ID NO: 122280 - DNA, 1230 bp, Gloeobacter violaceus PCC 7421
  CDS (1)..(1230): transl_table=11
gtgtccaaattgacggtgaagacgaccgtggttgatatcgacggcgatgagatgacccggattatctgggagatgatccagcagaagctgctcaggccgtatctggagatgacgatcgagcgctacgacctcggcatcgaaaaccgtgacgccaccgacgatcgggtgacggtggaggcggccgaggccgttatgcgccacggcgtgggtgtcaagtgcgccacgatcacccccgacgaagcacgcgtcaaagagttcggcctcaaaaaaatgtggaagtcccccaacggcaccatccgcaacatcctcggggggacggtctttcgcgagccgatcatctgtcgcaacatcccgcgattggtgcccggctggacacggcctatcgtcgtcgcccgccacgccttcggcgatcagtaccgggccaccgagtaccgcgtgccggggccgggaaaactcaaactcgtctttgagccgacccaagggggcgagccggtcgagcagacggttttcgatttcgcggacaaaggcgtcgccctgggcatgtacaacctcgatgtgtcgatcgccgggtttgccagggcctgcttcaactttgccctgacccgcaactggccggtgtacctgtcgaccaaaaacacgatcctcaaagtctacgacggcaactttaaagacatcttccagagcgtctacgacagcgaattcaaggccgccttcgcggagcgcggtttgagttacgaacaccgcctgatcgacgacatggtggccgccgccctcaaatggtcgggcgggtttgtctgggcctgcaagaactacgacggcgacgtgcaatcggacgtggtggcgcagggcttcggctccctcggcttgatgacttcgattttgctcactcccgacggcaagtcggtcgagaccgaggccgcccacggcacagttacccgccactaccgcctgcaccagcagggcaagcagacttccaccaacccgatcgcttcgatttttgcctggagccggggactttggtaccgcggccagttcgacggtaccccggagatttgcgcttttgccgaattgctggagcacgtctgcgtcgagacggtcgaggcgggcgagatgaccagggatctggcgctgctggtgagccccgagcagccgtacctcaccaccggcgcatttatcgacgccgtcgcccgcaggctcgacgccgcttacgcagaacgcttcgccgcctga

SEQ ID NO: 122281 - protein, 409 aa, Gloeobacter violaceus PCC 7421
MSKLTVKTTVVDIDGDEMTRIIWEMIQQKLLRPYLEMTIERYDLGIENRDATDDRVTVEAAEAVMRHGVGVKCATITPDEARVKEFGLKKMWKSPNGTIRNILGGTVFREPIICRNIPRLVPGWTRPIVVARHAFGDQYRATEYRVPGPGKLKLVFEPTQGGEPVEQTVFDFADKGVALGMYNLDVSIAGFARACFNFALTRNWPVYLSTKNTILKVYDGNFKDIFQSVYDSEFKAAFAERGLSYEHRLIDDMVAAALKWSGGFVWACKNYDGDVQSDVVAQGFGSLGLMTSILLTPDGKSVETEAAHGTVTRHYRLHQQGKQTSTNPIASIFAWSRGLWYRGQFDGTPEICAFAELLEHVCVETVEAGEMTRDLALLVSPEQPYLTTGAFIDAVARRLDAAYAERFAA

SEQ ID NO: 122282 - DNA, 1227 bp, Rhodopseudomonas palustris CGA009
  CDS (1)..(1227): transl_table=11
atggcgaaaatcaaggtgaagaaccccgtcgtggaactcgacggtgacgagatgaccaggatcatatggcagatgatcaaggacaagctcatcaccccgttccttgatgtcgagctgatgtatttcgacctcgggatggagcaccgcgacaagaccgacgatcaggtcacgatcgatgcggccaacgccatcaagcaggtcggcgtcggcgtgaagtgcgccaccatcaccccggacgaagcgcgggtgaaggagttcggcctcaagagcatgtggaagtcgccgaacggcaccatccgcaacatcctcggcggcgtgatcttccgcgagccgatcatctgcaagaacgtgccgcggctggtgccgggctggaccaagccgatcgtgatcggccgccacgcctacggcgaccagtatcgtgcgaccgacatcaagttccccggcccgggcacgctgacgatgaagttcgtcggcgaggacggctcggtgatcgagcgcgaagtgttcaaggcgcccggcgccggcgtcgcgatgtcgatgtacaacctcgacgagtcgatcaaggacttcgcccgcgcctcgctgaactacggcctgatgcgcaactacccggtctatttgtcgaccaaaaacaccatcatgaaggtgtacgatggccgcttcaaagacatcttccaggagatcttcgacgccgagttcaagaaggaatacgacgccaagggcctgacctacgagcaccgcctgatcgacgacatggtcgcctcggcgctgaagtggtcgggcggctacgtctgggcctgtaagaactacgacggcgacgtgcagtccgacaccgtggcgcagggttacggctcgctcggcctgatgacctcggtgctgatgacgccggacggcaagacggtggaagccgaagccgcccacggcaccgtcacccgtcactaccgcgaacaccagaagggcaaggcgacctcgaccaactcgatcgcctcgatcttcgcctggacccgcggcctcgcgcatcgcgccaagctcgacagcaacgaagagctcgctcgcttcgccgacctgctcgagaaggtctgcgtcgacaccgtcgaagccggcgcgatgaccaaggacctcgcgctcctggtcggcgccgaccagcgctggctgtcgaccgagggcttcctcgacaaggtcgcgcagaacctcaacaaggcgatggaagacgccaaggccgcctga

SEQ ID NO: 122283 - protein, 408 aa, Rhodopseudomonas palustris CGA009
MAKIKVKNPVVELDGDEMTRIIWQMIKDKLITPFLDVELMYFDLGMEHRDKTDDQVTIDAANAIKQVGVGVKCATITPDEARVKEFGLKSMWKSPNGTIRNILGGVIFREPIICKNVPRLVPGWTKPIVIGRHAYGDQYRATDIKFPGPGTLTMKFVGEDGSVIEREVFKAPGAGVAMSMYNLDESIKDFARASLNYGLMRNYPVYLSTKNTIMKVYDGRFKDIFQEIFDAEFKKEYDAKGLTYEHRLIDDMVASALKWSGGYVWACKNYDGDVQSDTVAQGYGSLGLMTSVLMTPDGKTVEAEAAHGTVTRHYREHQKGKATSTNSIASIFAWTRGLAHRAKLDSNEELARFADLLEKVCVDTVEAGAMTKDLALLVGADQRWLSTEGFLDKVAQNLNKAMEDAKAA

SEQ ID NO: 122284 - DNA, 1230 bp, Bdellovibrio bacteriovorus HD100
  CDS (1)..(1230): transl_table=11
atgaaaaaaatcaaagttgccaatcccgtcgttgaactcgacggcgatgaaatgacaagaatcatctggaaattcatcaaacaacaattgatccttccataccttgatatcgacattaagtactatgacctgggcatggagcatcgtgatgctaccaacgaccaagtaactgttgacgctgcggaagcgatcaaaaagtacaacgtgggtatcaaatgcgcgacgatcactcctgacgaagctcgcgtaaaagaattcaacctgaaacaaatgtggaagtccccgaacggcactatccgtaacattttggatggtactgtattccgtgaacccatcatctgcaaaaacgttccacgtctggttcctaactggacagctcccatctgcatcggtcgtcacgctttcggcgaccagtaccgtgcaactgatttcgtaaccaaaggcaaaggcaagctgactgtgactttccagcctgagaacggtggagaaacgatcactcacgaagtttacaacttcaaaggcgatggcgttgctttgactatgtacaacactgacgaatccatcaccggtttcgcacgttcttgcttcaaccaggcgttgaccaagaaatggccgttgtacctttccactaaaaataccatcctgaaaaaatacgatggtcgcttcaaagacatcttcgaagagatctatcaaaaagaattcaaagcgaagttcgatgctgctggcatcacttacgagcaccgcctgatcgacgacatggttgcttccgctttgaaatggaatggtaacttcgtatgggcatgtaagaactacgacggcgacgttcagtccgatacagtagctcaaggcttcggttctttgggtctgatgacttccgtattggtcactccagacggtaagactatggaatctgaagcagctcacggcacagtgactcgtcactaccgtcagcaccagcaaggcaaaccaacttccacgaacccaatcgcttccatctttgcatggactcgcggtcttgagcaccgtggtaacctggataacaaccaggagcttgtgaagttcgctcagactttggaaaaagtctgcgttgagactgttgaagctggcttcatgaccaaagaccttgccgtttgcatctatggcgacaaagttccagctgacaagtacatgaacacggagccgttcctggcgaagttggatgagaacttgaaaaaagctctttccatgtaa

SEQ ID NO: 122285 - protein, 409 aa, Bdellovibrio bacteriovorus HD100
MKKIKVANPVVELDGDEMTRIIWKFIKQQLILPYLDIDIKYYDLGMEHRDATNDQVTVDAAEAIKKYNVGIKCATITPDEARVKEFNLKQMWKSPNGTIRNILDGTVFREPIICKNVPRLVPNWTAPICIGRHAFGDQYRATDFVTKGKGKLTVTFQPENGGETITHEVYNFKGDGVALTMYNTDESITGFARSCFNQALTKKWPLYLSTKNTILKKYDGRFKDIFEEIYQKEFKAKFDAAGITYEHRLIDDMVASALKWNGNFVWACKNYDGDVQSDTVAQGFGSLGLMTSVLVTPDGKTMESEAAHGTVTRHYRQHQQGKPTSTNPIASIFAWTRGLEHRGNLDNNQELVKFAQTLEKVCVETVEAGFMTKDLAVCIYGDKVPADKYMNTEPFLAKLDENLKKALSM

SEQ ID NO: 122286 - DNA, 1350 bp, Strongylocentrotus purpuratus
  CDS (1)..(1350)
atggctggttctcttgcaaagattggtcgtgcttttgttgcagcaaccaggactgattctccgcgatgtgtccagtctggtgtcgcccttagttccacccaggaaagaaactactctgataggaagcgtatcgaggtagccaaaccagtggtggaactcgatggagatgagatgacaagagttatctgggagaagatcaaggaaacgttgatctttccctacctgaacgttgaatgtttatactatgacctgggtctaccttaccgtgaccaaaccaacgaccaagtcaccgtcgatgccgccgtggccatcaaggaacacaacgttggaatcaagtgtgcaaccatcaccccagacgaagaacgtgtagtggaattcaacctgaaggagatgtggaagtcccccaacggaacgttgaggaacatccttggaggaacagtattccgtgagcccatcctctgcgacaccatccctcgtctggttccaggctggaccaaggccatcaccatcggccgtcatgctttcggtgaccagtaccgtgcaacagacatggtgatcaaggaaccaggcaagtttgagttggtcttcagccctgccagcggagcagagccaacaaggacagaagtcttcaacttcccaggaggtggatgtggcatggccatgtacaacacagacgagtccatcacagggtttgcacacagctgtttccagtatgctctagccaagaagtggcctctctacctgagcacaaagaacaccatcctcaagagatacgatggaagattcaaggatatctttgaggagatttttgtagcaaactacaagaaggattatgattcagctggcatctggtatgagcatcgtctcatcgatgatatggtagctcaggctcttaagtccagtggagagtttgtgtgggcctgcaagaactacgatggtgacgtccagtctgatatcgttgctcaaggttacggatctctaggattgatgaccagtgtgctaatgtgcccagatggcaagaccattgagtcagaggcagctcatggaacagtaacaaggcatttcagagagcaccagaagggcaacgcaaccagcaccaaccccatcgccagtatatttgcctggacccgcggtctggagcacagggccaagctggacaataaccctgacctgaagcacttctgtaccaccctggagaaggtctgtgtggacaccgttgactctggcatgatgaccaaggacttggctggttgtatccatgggctcaagaacgtgaaaccagagcactacctgaacaccatggacttcctcaatgccatctctgtgaacctggacaaagctctgaagtaa

SEQ ID NO: 122287 - protein, 449 aa, Strongylocentrotus purpuratus
MAGSLAKIGRAFVAATRTDSPRCVQSGVALSSTQERNYSDRKRIEVAKPVVELDGDEMTRVIWEKIKETLIFPYLNVECLYYDLGLPYRDQTNDQVTVDAAVAIKEHNVGIKCATITPDEERVVEFNLKEMWKSPNGTLRNILGGTVFREPILCDTIPRLVPGWTKAITIGRHAFGDQYRATDMVIKEPGKFELVFSPASGAEPTRTEVFNFPGGGCGMAMYNTDESITGFAHSCFQYALAKKWPLYLSTKNTILKRYDGRFKDIFEEIFVANYKKDYDSAGIWYEHRLIDDMVAQALKSSGEFVWACKNYDGDVQSDIVAQGYGSLGLMTSVLMCPDGKTIESEAAHGTVTRHFREHQKGNATSTNPIASIFAWTRGLEHRAKLDNNPDLKHFCTTLEKVCVDTVDSGMMTKDLAGCIHGLKNVKPEHYLNTMDFLNAISVNLDKALK

SEQ ID NO: 122288 - DNA, 1230 bp, Strongylocentrotus purpuratus
  CDS (1)..(1230)
atgtctaagattcaaggaggaaccgttgttgagatgcaaggagatgagatgacaaggatcatatgggatgacatcaaaaagaagctcatccttccattcattgatctcaacatacagagttatgatctcagcattcagaatagggatgctacggatgataaagtgactgtagagtgtgcagaggccatcaagaagtgtaatgtaggcattaaatgtgctactattacccctgatgagaagagagttgaagaattcaacctgaagaagatgtggaagtcacctaacggtacgatccgaaacatcctgggaggcaccgtgttcagggaagctatcatctgcaagaacattcctcgactggttgtgacatggaacaaacctatcgtcattggccgtcatgctcacgctgatcagtacctagccactgaccttgtcgtacctggcaagggcaagatggagatgaagttcactccagcggacggcagtgaacctcaaacattcaccattcatgacttcaaagatggcggtggcgttgctatgggaatgtttaacactgatgtctccattacaaactttgctcattgttgctttcgcttttcccttgatagaggctatcctctctatctcagcaccaagaatacgattctaaagcgttatgatggtcggttcaaggacatcttccaggagatctatgagaaggaataccgggcagattatgaggccaagaatatctggtatgagcatagactcatagatgacatggtggccttcgctatgaagaatgaaggtggattcgtctgggcctgtaagaactatgacggagatgttcagagtgactccgtagcacaaggctatggatcccttggtatgatgacatcagtactggtctgccctgatgggaagacagtcgaatcagaagctgctcatggcacagtcacaagacattatagaatgcatcaacaaggcaaagaaacatctactaactcagttgcttccatctttgcctggactcgcggtcttgcacacagggccaagttggatagtaatgaagcccttgccaagttttctacagccctagaagaagcctgtattgaaactatagaggggggtacaatgaccaaagatctcgctatctgcatcaagggaatggcaaatgtcacccgtgctgactatgtgaacacctttgaattcattgagaaagtagctgagattgttgctgctaagtgtaattga

SEQ ID NO: 122289 - protein, 409 aa, Strongylocentrotus purpuratus
MSKIQGGTVVEMQGDEMTRIIWDDIKKKLILPFIDLNIQSYDLSIQNRDATDDKVTVECAEAIKKCNVGIKCATITPDEKRVEEFNLKKMWKSPNGTIRNILGGTVFREAIICKNIPRLVVTWNKPIVIGRHAHADQYLATDLVVPGKGKMEMKFTPADGSEPQTFTIHDFKDGGGVAMGMFNTDVSITNFAHCCFRFSLDRGYPLYLSTKNTILKRYDGRFKDIFQEIYEKEYRADYEAKNIWYEHRLIDDMVAFAMKNEGGFVWACKNYDGDVQSDSVAQGYGSLGMMTSVLVCPDGKTVESEAAHGTVTRHYRMHQQGKETSTNSVASIFAWTRGLAHRAKLDSNEALAKFSTALEEACIETIEGGTMTKDLAICIKGMANVTRADYVNTFEFIEKVAEIVAAKCN

SEQ ID NO: 122290 - DNA, 1230 bp, Nasonia vitripennis
  CDS (1)..(1230)
atggctgctaaaatcaaggccggacccgtggtcgacatcctcggcgacgagatgaccaggataatctgggacctgatcaagcagaagctgatcctgccgtacctggacatcgagctgcacacctacgacctcggcatggagaaccgcgacgcgaccgacgacaaggtgaccgtcgactgcgccgaggccatcaagaagtacaacgtcggcatcaagtgcgcgaccatcacccccgacgagaagcgcgtcgaggagttcaagctgaagaagatgtggaagtcgccgaacggcaccatccgtaacatcctcggcggcaccgtcttccgcgaggccatcatctgcaagaacatcccccggctggtcggcggctgggagaagcccatcatcatcggccgtcacgcccacgccgaccagtacaaggccgtggactttgtcgtcccggggccgggcaagctcgagctcacctggaccagtccgtccggcgagaagatccagcacacggtgaacgagttcaagggcgccggcatcgcccaggcccagttcaacaccgacgagagcatccaagccttcgcccacagctcgttcaagtacgccctcgccaggaagtacccgctctacctctccaccaagaacaccatcctcaagcagtacgacggccgcttcaagaacatcttccaggagatctacgagaaggagtacaagtcgcagttcgaggcgctgaacatctggtacgagcacaggctcatcgacgacatggtcgcctactgcatgaagtccaacggcggctacgtctgggcctgcaagaactacgacggcgacgtgcagtccgactcggtcgcccagggcttcggctccctcggcctcatgacctcggtgctgctctgccccgacggcaagaccgtcgaggccgaggcggcccacggcaccgtcacccgccactaccgcatgcaccagcagggcaaggagacctcgaccaaccccatcgcctcgatcttcgcctggacccagggcctgctgcaccgagccaagctcgacaacaacgcgcccctcaagaagttcgccgagaccctggagaaggtctgcgtcagcaccatcgagtccggcttcatgaccaaggacctggcgctctgcatcaagaaggccgacgacgtcaagaggagcgactacctcaacaccttcgagttcctcgacaagctcgccgagaacctgaagaagagcctcgacgcgtga

SEQ ID NO: 122291 - protein, 409 aa, Nasonia vitripennis
MAAKIKAGPVVDILGDEMTRIIWDLIKQKLILPYLDIELHTYDLGMENRDATDDKVTVDCAEAIKKYNVGIKCATITPDEKRVEEFKLKKMWKSPNGTIRNILGGTVFREAIICKNIPRLVGGWEKPIIIGRHAHADQYKAVDFVVPGPGKLELTWTSPSGEKIQHTVNEFKGAGIAQAQFNTDESIQAFAHSSFKYALARKYPLYLSTKNTILKQYDGRFKNIFQEIYEKEYKSQFEALNIWYEHRLIDDMVAYCMKSNGGYVWACKNYDGDVQSDSVAQGFGSLGLMTSVLLCPDGKTVEAEAAHGTVTRHYRMHQQGKETSTNPIASIFAWTQGLLHRAKLDNNAPLKKFAETLEKVCVSTIESGFMTKDLALCIKKADDVKRSDYLNTFEFLDKLAENLKKSLDA

SEQ ID NO: 122292 - DNA, 1242 bp, Magnaporthe grisea 70-15
  CDS (1)..(1242)
atggcgtcccaggccaagatcaaggtcaagaacccagtcgtcgagctggacggcgacgagatgacccgcatcatctggcagaacatcaaggacaagttcatccacccttacctcgacatcgacctcaagtactacgacctcgggctcgagtaccgcgacaagaccgatgacaaggtcactctggacgccgcagaggccatcaagaagtactcggttggtgtcaagtgcgccaccatcacccccgacgaggcccgtgtcaaggagttcaacctcaagcagatgtggctctcccccaacggcaccatccgtaatgctctgggcggcaccgtcttccgggagccgatcgtgatcccgcgtattccgcgcctggtgccgagctggcagaagcccatcatcatcggccgccacgcctttggcgaccagtaccgcgccaaggacatggtcgtgcccggcgagggcaagctgaccatgaccttcacccccaagggcggcgagccgcaggagatccaggtctttgacttcaagaacggcggcggcgtcgcgcagacccagtacaacaccgatgagagcatcacgggctttgcccagtcaagcttcaagctcgccctcgccaagggtctgccgttgtacatgagcaccaagaacgccatcctcaagaagtacgacggccgcttcaaggacatctttgagcagctgtaccagtcgacctacaaggccgagttcgaggccaagggcatctggtacgagcaccgcctgatcgacgacatggtcgcccagatgatcaagagcacaggcggctacatcatggctctgaagaactacgacggtgacgtccagtccgacattgtcgcccagggcttcggctccctcggcctgatgacctcggtcctcatcactcccgacggcaagaccttcgagtccgaggccgcacacggcaccgtgactcgccactaccgcgagcaccaaaagggtcgcgagacctcgaccaaccccatcgcctccatcttcgcctggacccgcggcctgatccagaggggcaagctggacgagactcccgacgtcgtcgcctttgccgagaccctcgagcgcgcctgcatcgagacggtcgacattgacggcatcatgaccaaggacctcgccctcgcctgcggcaagaccgcccgcagcgactacgtcaccaccaacgagtacctcgatgctgtcgagaggaggatgaagtcgagcctcaaggagaagctgtga

SEQ ID NO: 122293 - protein, 413 aa, Magnaporthe grisea 70-15
MASQAKIKVKNPVVELDGDEMTRIIWQNIKDKFIHPYLDIDLKYYDLGLEYRDKTDDKVTLDAAEAIKKYSVGVKCATITPDEARVKEFNLKQMWLSPNGTIRNALGGTVFREPIVIPRIPRLVPSWQKPIIIGRHAFGDQYRAKDMVVPGEGKLTMTFTPKGGEPQEIQVFDFKNGGGVAQTQYNTDESITGFAQSSFKLALAKGLPLYMSTKNAILKKYDGRFKDIFEQLYQSTYKAEFEAKGIWYEHRLIDDMVAQMIKSTGGYIMALKNYDGDVQSDIVAQGFGSLGLMTSVLITPDGKTFESEAAHGTVTRHYREHQKGRETSTNPIASIFAWTRGLIQRGKLDETPDVVAFAETLERACIETVDIDGIMTKDLALACGKTARSDYVTTNEYLDAVERRMKSSLKEKL

SEQ ID NO: 122294 - DNA, 1338 bp, Gibberella zeae PH-1
  CDS (1)..(1338)
ctgcgccgtgtcgcttatacttccaccactatccgccctgttcgcgcttcattcggtgctatccaaaccatctccccatttgcagtccgcacaatggcttcctccactcagaagatcaaggtcaagaaccccgtcgtcgaactcgacggtgatgagatgacccgcatcatctggcaggtcatcaaggacaagttcatccacccctacctcgacatcgacctcaagtactatgatctcggtcttgagtaccgtgatgagaccaacgaccaggtcaccattgatgccgccgaggccatcaagaagtactctgtcggtgtcaagtgtgctaccatcactcccgatgaggctcgtgttgaggagttcaagctgaagaagatgtggctttctcccaacggcaccatccgaaacgctcttggcggtaccgtcttccgtgagcccattgttatcccccgtatcccccgtctggttcctggctggaagaagcccatcatcattggccgtcacgcctttggtgaccagtaccgcgccaaggatgctgtcctgcccggtcccggtaagctctccatggtctacacccccgagggtggccagcccgaggagattgaggtcttccagttcaaggagggtggtggtgttgcccagactcagtacaacaccgacgagtccatcactggattcgctcacgcttctttcaagctcgccattgacaaggagctccctctctacatgagcaccaagaacaccatcctcaagaagtacgatggtcgcttcaaggacatcttccaggagatctacgaaaccacctacaagaaggagttcgaggccaagaagatctggtacgagcaccgtctcattgacgacatggtcgcccagatgatcaagagctccggtggttacatcatggctctcaagaactacgatggtgatgtccagtctgacattgtcgcccagggcttcggctctctcggtctcatgacctctgtcctcatcacacccgatggcaagaccttcgagtctgaggctgcccacggcaccgtcactcgccactaccgtgagcaccagaagggtaacgagacctccaccaaccccattgcttccatcttcgcctggacccgtggtctcatccagcgtggtaagctcgacgacacccccgatgtcgttgccttcgccgagggccttgagcaggcttgcattgacaccgtcgacattgacggtatcatgaccaaggatcttgcccttgccactggcaagtctgagcgcaaggactatgccaccaccaacgagtaccttgatgctgttgagcgccgcctcaagaagactctcaaggagaagctgtaa

SEQ ID NO: 122295 - protein, 445 aa, Gibberella zeae PH-1
MRRVAYTSTTIRPVRASFGAIQTISPFAVRTMASSTQKIKVKNPVVELDGDEMTRIIWQVIKDKFIHPYLDIDLKYYDLGLEYRDETNDQVTIDAAEAIKKYSVGVKCATITPDEARVEEFKLKKMWLSPNGTIRNALGGTVFREPIVIPRIPRLVPGWKKPIIIGRHAFGDQYRAKDAVLPGPGKLSMVYTPEGGQPEEIEVFQFKEGGGVAQTQYNTDESITGFAHASFKLAIDKELPLYMSTKNTILKKYDGRFKDIFQEIYETTYKKEFEAKKIWYEHRLIDDMVAQMIKSSGGYIMALKNYDGDVQSDIVAQGFGSLGLMTSVLITPDGKTFESEAAHGTVTRHYREHQKGNETSTNPIASIFAWTRGLIQRGKLDDTPDVVAFAEGLEQACIDTVDIDGIMTKDLALATGKSERKDYATTNEYLDAVERRLKKTLKEKL

SEQ ID NO: 122296 - DNA, 1236 bp, Candida glabrata CBS 138
  CDS (1)..(1236)
atgagtaaagttaaggtagttaatcccatcgttgagatggatggtgatgaacagacaagaattatctggcatttaattcgtgagaaactaattttaccattcttggatgttgatttgaagtattacgacttgtctatcgaatacagagatgagaccaatgataaggtcaccgaagatagtgccttggctactttgaagtatggtgttgcggttaaatgtgctacaatcacccctgatgaggctcgtgttgaggaattcaacttgaaggagatgtggaaatcgccaaatggtactattagaaacattttgggtggtactgtgttcagagaacccattgttattcctagaatcccaaaattggtcccacaatggaaggaacctataatcattggtaggcacgccttcggcgaccagtatagggccaccgatgtcgttatcccagatgaaggtgaagttcgactagtgtacaaatcaaaggatggtaaaactgatatcgatattcctgtttataatttccctaaagaaggcggtgttgctatgatgatgtataatactactgaatctatccgtgggtttgctagagcttcttttaatatggctttggaacatgaaatgccactatattctactactaaaaacaccatcttaaagaaatacgatggtaaattcaaggacacatttgagtctatgtatgaagccgagtataaagaacaatttgaggccaaaggtatctggtatgagcatcgtttaatcgatgatatggtcgcgcaaatgttgaaatctaaaggtggttttattattgccatgaagaattacgacggtgacgttgaatctgatattgttgcccaaggctttggttccctaggtctaatgacttctgtactaatcagtccagacggtaaaacttttgagagtgaagctgctcatggtactgtcactaggcattacagacaacatcaacagggtaaagaaacttccactaactcgattgcatccatctttgcttggactagaggtattatccaaagaggtaagttagatgagaccgcagatgtagtcaaatttggtgaattgctagaaagagcaacagttgacactgttcaagaggatggcatcatgacgaaggatttagctttaattctaggtaaaaccgacaggtcggcttatgttactactgaggaatttattgatgcagtggaaaatcggataaaatcagagttccaaaagaacttttaa

SEQ ID NO: 122297 - protein, 411 aa, Candida glabrata CBS 138
MSKVKVVNPIVEMDGDEQTRIIWHLIREKLILPFLDVDLKYYDLSIEYRDETNDKVTEDSALATLKYGVAVKCATITPDEARVEEFNLKEMWKSPNGTIRNILGGTVFREPIVIPRIPKLVPQWKEPIIIGRHAFGDQYRATDVVIPDEGEVRLVYKSKDGKTDIDIPVYNFPKEGGVAMMMYNTTESIRGFARASFNMALEHEMPLYSTTKNTILKKYDGKFKDTFESMYEAEYKEQFEAKGIWYEHRLIDDMVAQMLKSKGGFIIAMKNYDGDVESDIVAQGFGSLGLMTSVLISPDGKTFESEAAHGTVTRHYRQHQQGKETSTNSIASIFAWTRGIIQRGKLDETADVVKFGELLERATVDTVQEDGIMTKDLALILGKTDRSAYVTTEEFIDAVENRIKSEFQKNF

SEQ ID NO: 122298 - DNA, 1272 bp, Candida glabrata CBS 138
  CDS (1)..(1272)
atgctcggaagaagatgttttgcttcctctgcgaagcttgccaagatcaaagtgaagaccccagttgtagagctggatggtgatgagatgaccagaattatctgggacaagataaagaagcaactgatcctaccattccttgatgtcgatttgaagtactacgacttgtctatccagtcccgtgacaaaaccaaggaccagatcacacatgactctgctgaggctatcaagaaatatggtgtcggtgtcaagtgtgctaccatcaccccagatgaggcccgtgttaaggagttcaatttgaccaagatgtggaagtctcctaacggtacaattagaaacatactcggtggtaccgtcttcagagaaccaattgtcatcccaagagtccccagactggttccaggttgggaaaagccaatcatcataggtagacacgcccatggtgaccagtacaaggctactgatgccgttatacctggtcaaggtaagctagaacttgtctacaagccaaacggcgacgcctccaaggccgaagttatggaagtttatgactataagggcccaggtgttgcactagcaatgtataataccgacgaatccatccgtggttttgcccattcgtctttcaaactagcactacaaaagaaattgaacttgtttttgtccactaaaaacactattctaaagaaatacgatggtagattcaaggacatcttccaagaggtctacgattcagagtacaaacagaagtttgctgaattgaacatcacatatgagcaccgtctaatagatgacatggttgctcagatgatcaaatctaagggtggttttatcatggctttgaagaattacgatggtgatgtgcaatccgacattgttgctcaaggttttggttctctaggtttgatgacttctattttaatcactccagatggtaagaccttcgaaagtgaagctgctcacggtacggtcacaagacactacagaaagcaccaacaaggtgaagaaacttctactaactccattgcctctatttttgcttggaccagaggtctagctaagagaggtgaattggatggtactccagacgttgttagatttgccaacattttagaatctgcaactttgaacactgtccaacaagatggcattatgaccaaggaccttgctttagcatgtggtaagactgatagagcttcttatgtcactaccactgagtttttagatgcagtagaaaagagactacaaactgaaattaaatctattgactaa

SEQ ID NO: 122299 - protein, 423 aa, Candida glabrata CBS 138
MLGRRCFASSAKLAKIKVKTPVVELDGDEMTRIIWDKIKKQLILPFLDVDLKYYDLSIQSRDKTKDQITHDSAEAIKKYGVGVKCATITPDEARVKEFNLTKMWKSPNGTIRNILGGTVFREPIVIPRVPRLVPGWEKPIIIGRHAHGDQYKATDAVIPGQGKLELVYKPNGDASKAEVMEVYDYKGPGVALAMYNTDESIRGFAHSSFKLALQKKLNLFLSTKNTILKKYDGRFKDIFQEVYDSEYKQKFAELNITYEHRLIDDMVAQMIKSKGGFIMALKNYDGDVQSDIVAQGFGSLGLMTSILITPDGKTFESEAAHGTVTRHYRKHQQGEETSTNSIASIFAWTRGLAKRGELDGTPDVVRFANILESATLNTVQQDGIMTKDLALACGKTDRASYVTTTEFLDAVEKRLQTEIKSID

SEQ ID NO: 122300 - DNA, 1257 bp, Candida glabrata CBS 138
  CDS (1)..(1257)
atggcagggaagatcaaagttaagaatcccattgtggagatggatggggatgagatgacgagggttatctgggggatggtgaaggataaattgatatatccatatttagatgttgatttgaagtactacgatctgtctattcagcacagagatgaaactgaggatagagttactgtagatgctgcagaggccaccttgaagcatggggtagcaattaaatgtgccactataacgccggatgaagcaaggatgaaggaattccatttaaagaagatgtggaaatctccaaatggtaccataagaaatatcctaggtggtacagtttttagggaaccgataattatcccacgtatacctagaattgttcctacatggaataagcccataattattggaaggcatgcgtttggggatcaatataaagcatcagatgcagtcatcaaagagccagggaaattagagctagtcttcactcctgcatcaggtcagggcaatcccaagacaattaaagtctatgattataaatcccccggcgtagcgctagcgatgtacaacactgacgaatcaataacaggatttgcaagagcttcgtttgagctagccataaagaggaaattaccattgtttttcactactaaaaatactatactgaagaaatatgacggtaggtttaaagatatcttccaaaagatgtacgatgaagattacaagggtaaattcaaggaactaggtataagttatgagcacaggcttattgatgatatggttgcgcaaatgattaaatccaaaggtgggtttatcattgccatgaaaaactatgacggggatgttcaatctgatatagtagcccaaggtttcggatcacttggcttaatgacatcgacattattgactccagatggtaagatcttcgaaagcgaagctgcacatggcacagtaactaggcattacaggcagtatcaaaagggcaaagagacctcgacaaactcaattgctacaatctttgcttggtcccaaggtataatccacagaggcaaagtggaccagacacctgatgttagactatttggagagatcctagagaggtctacaattgacactgtccagatagacggtatcatgactaaagacctagctctaattctcggaaagactgagagaaaggactacgcaagcacagaagagttcatagacgctgttgcaagaagactcaagcgtgagttcaattcccatttcaacaagccatcgaaactataa

SEQ ID NO: 122301 - protein, 418 aa, Candida glabrata CBS 138
MAGKIKVKNPIVEMDGDEMTRVIWGMVKDKLIYPYLDVDLKYYDLSIQHRDETEDRVTVDAAEATLKHGVAIKCATITPDEARMKEFHLKKMWKSPNGTIRNILGGTVFREPIIIPRIPRIVPTWNKPIIIGRHAFGDQYKASDAVIKEPGKLELVFTPASGQGNPKTIKVYDYKSPGVALAMYNTDESITGFARASFELAIKRKLPLFFTTKNTILKKYDGRFKDIFQKMYDEDYKGKFKELGISYEHRLIDDMVAQMIKSKGGFIIAMKNYDGDVQSDIVAQGFGSLGLMTSTLLTPDGKIFESEAAHGTVTRHYRQYQKGKETSTNSIATIFAWSQGIIHRGKVDQTPDVRLFGEILERSTIDTVQIDGIMTKDLALILGKTERKDYASTEEFIDAVARRLKREFNSHFNKPSKL

SEQ ID NO: 122302 - DNA, 1290 bp, Kluyveromyces lactis NRRL Y-1140
  CDS (1)..(1290)
atgaaggccgcagtgatgagtattaatcgtcagttttccagctctgctgcaactgggttgcgcaagattaaagttcagactcccgttgtggagttggacggtgatgagatgactagaattatctgggataagattaagagtaaacttatcttaccatatttggatgtggatttgaagtattacgatctttccgtgacgaaccgtgatgccactaacgatcaagttactgtggattctgctaatgccatcaagaaatacggtgttggtgtgaaatgtgccactattacaccggacgagggtcgtgttaaagagttcaatttgaaaaagatgtggaaatcaccaaatggtaccatcagaaacatccttggtggtactgttttccgtgaaccaattgtcattcctagaatcccaagattagtgcctggatgggaaaaacctattgtcatcggtagacatgcccatggtgatcaatataaggccaccgatcttgtcgttccaggtcctggtaagttggaattggtttacaagccaactgatggatccgagaccaagactttggaagtttacgactacaagggtcctggtatcgctttggccatgtacaacacagacgaatccatccgtggattcgctcatgcctctttcaaattggctatcaccaagaaattgaacctttatctttccaccaagaacactatcttgaagaaatacgatggtagattcaaggatatcttccaggaaatttacgattccgagtataaatccgaatttgaaaagttgggtatctggtacgaacaccgtttaattgacgatatggttgcccaaatgatcaaatctaagggtggattcatccttgcgtttaagaactatgatggtgatgtccaatccgatatcgttgctcaagggttcgggtcccttggtttgatgacctctgttctagtgaccccagacggtaaggccttcgaaagtgaagctgctcacggtaccgtcactagacactacagacaataccaacagggtaaagaaacctcaacaaactccatcgcttccatcttcgcttggactagaggtttggccaagagaggtgaactagacaacactccagaagtcgtcgaatttgccaacttgttggaaaaatccactttgaacactgtccaagaagacggtatcatgaccaaagatttggcccttgcctgtggtaacactgacagatcaagttatgtgaacaccgacgaattcttggatgctgttgaaaagagattcagaaatgacgttaaatctctgcagtga

SEQ ID NO: 122303 - protein, 429 aa, Kluyveromyces lactis NRRL Y-1140
MKAAVMSINRQFSSSAATGLRKIKVQTPVVELDGDEMTRIIWDKIKSKLILPYLDVDLKYYDLSVTNRDATNDQVTVDSANAIKKYGVGVKCATITPDEGRVKEFNLKKMWKSPNGTIRNILGGTVFREPIVIPRIPRLVPGWEKPIVIGRHAHGDQYKATDLVVPGPGKLELVYKPTDGSETKTLEVYDYKGPGIALAMYNTDESIRGFAHASFKLAITKKLNLYLSTKNTILKKYDGRFKDIFQEIYDSEYKSEFEKLGIWYEHRLIDDMVAQMIKSKGGFILAFKNYDGDVQSDIVAQGFGSLGLMTSVLVTPDGKAFESEAAHGTVTRHYRQYQQGKETSTNSIASIFAWTRGLAKRGELDNTPEVVEFANLLEKSTLNTVQEDGIMTKDLALACGNTDRSSYVNTDEFLDAVEKRFRNDVKSLQ

SEQ ID NO: 122304 - DNA, 1248 bp, Kluyveromyces lactis NRRL Y-1140
  CDS (1)..(1248)
atgtcaaagattagtgtcaagactcccattgtggagatggatggtgatgaacaaacaagaatcatttggaaattaatcaaagaccacttgattcacccatatttggacattgatttgaaatactacgatctttccatcgaaaaccgtgatttgactgatgataaagtcactgaacaatccgctcaagcgactttgaaatacggtgttgctgtgaaatgtgctacgattacaccggatgaggctcgtgtcgaggaattcaaattgaaaaagatgtggaaatctccaaacggtaccattagaaatatcctaggtggtaccgtgttccgtgaaccaattgtgattccaagaattccaaagttggtgaccaactgggaaaaaccaatcattattggtagacacgctttcggtgaccaatacagggccactgacgtagttattccaggagcaggtaagttgaagttggtgttcgagagcgatgactcgaatacggaaaatatcgaactgagcgtttacgatttcgatgaagagagtaaaggtggtgttgccatggccatgtacaacactttggaatctatcactgggtttgctcatgcttctttcaagatggctttggaaagaggtttgcctctttactccaccaccaagaataccatcttgaagaaatacgacggtaagttcaaggacgtgttcgaatcgctatacgaaagtcagtacaaatcggcgttcgaagctaaggggatctggtacgaacatcgtttgatcgacgatatggttgctcagatgttgaaatcgaagggtggctacatcatcgcaatgaagaattacgatggtgatgtggaatccgatattgtcgctcaagggttcggttctcttggtctaatgacttctgtgttgattactccagatggtaaggccttcgaaagtgaagctgctcatggtaccgtcactagacattacagacaacaccaacagggtaaagaaacctcgacaaactcgatcgcctcgattttcgcttggaccagaggcttgatccaaaggggtaagttggatagcaccccagatgtggtgaaattcgccgaattggtggaatctgctaccgtcaacacggttcaagaagatgaaattatgactaaagatttggcattgatcttgggtaagaccgacagatcctcatacgtcactaccgaagagttcattgaagctgttcacaagagattggactccgaatttaaatcatcattcaactag

SEQ ID NO: 122305 - protein, 415 aa, Kluyveromyces lactis NRRL Y-1140
MSKISVKTPIVEMDGDEQTRIIWKLIKDHLIHPYLDIDLKYYDLSIENRDLTDDKVTEQSAQATLKYGVAVKCATITPDEARVEEFKLKKMWKSPNGTIRNILGGTVFREPIVIPRIPKLVTNWEKPIIIGRHAFGDQYRATDVVIPGAGKLKLVFESDDSNTENIELSVYDFDEESKGGVAMAMYNTLESITGFAHASFKMALERGLPLYSTTKNTILKKYDGKFKDVFESLYESQYKSAFEAKGIWYEHRLIDDMVAQMLKSKGGYIIAMKNYDGDVESDIVAQGFGSLGLMTSVLITPDGKAFESEAAHGTVTRHYRQHQQGKETSTNSIASIFAWTRGLIQRGKLDSTPDVVKFAELVESATVNTVQEDEIMTKDLALILGKTDRSSYVTTEEFIEAVHKRLDSEFKSSFN

SEQ ID NO: 122306 - DNA, 1296 bp, Debaryomyces hansenii CBS767
  CDS (1)..(1296)
atgagaaacccagctatgtctgggtacagcaaatattcaatgcgttcattttcgtcgagtttaatcaacttggacaaaattaaagtgaaaaatccgattgtcgaattagatggtgatgaaatgaccagaatcatctggcaaagaatcaaggacaaattaattaacccatacttggatgttgatttgaaatattacgatttaggtattgaaagtagagataaaacagacgatcagatcaccattgatgcggccaacgccattaaggaatacggggttggtgtcaagtgtgctacgatcacacctgatgaatccagagttgaagaatttaacttgaagaagatgtggttgtcgccaaatggtaccattagaaatattttaggaggtaccgttttcagggaagccattattattcctagaattccaagattggtaccaggatggaaggaacctattgtcattggtagacatgcacatggtgaccaatataaggctactgacttggtcattaacgaaccgggtaaattggaaatgacttttaccccagaaaacggtggagctccagaaactagaactgtgtacgattacaagggacctggtgtcggtttagctatgtataataccgatgagtccatcattggttttgcccattcttccttcaagatggcattaactaagaaattaccattatacttgtcaaccaaaaacactattttgaagaaatacgatggaagattcaaagacattttccatgaaatttatgaatccacctacaaaaaagaatttgaaaccaataacatctggtacgaacatagattaattgatgatatggttgcacaaatgattaaatctaagggtggttttgtcatggccttgaagaactatgatggtgatgtgcaatctgatattgttgcccaaggatttggttcattgggtttaatgacttctgttttgatgaccccagatggtaagaccttcgaaagtgaagctgcacacggtactgtcacaagacatttcagacaacatcaacaaggtaaggaaacttcaaccaactcgattgcctccatttttgcctggactagaggtattgctcaaagaggtagattagatgacaccccagatgtcgtaaaattcgccgaaattgtggaaaaggctacctttgatactgttcaagaagatggtattatgactaaggatttggctttagctcttggcagaaccgatagagaatcctacgtaaccacaactgaatttttggatgcagtttctgacaagttacagaaacaagtccaagtttag

SEQ ID NO: 122307 - protein, 431 aa, Debaryomyces hansenii CBS767
MRNPAMSGYSKYSMRSFSSSLINLDKIKVKNPIVELDGDEMTRIIWQRIKDKLINPYLDVDLKYYDLGIESRDKTDDQITIDAANAIKEYGVGVKCATITPDESRVEEFNLKKMWLSPNGTIRNILGGTVFREAIIIPRIPRLVPGWKEPIVIGRHAHGDQYKATDLVINEPGKLEMTFTPENGGAPETRTVYDYKGPGVGLAMYNTDESIIGFAHSSFKMALTKKLPLYLSTKNTILKKYDGRFKDIFHEIYESTYKKEFETNNIWYEHRLIDDMVAQMIKSKGGFVMALKNYDGDVQSDIVAQGFGSLGLMTSVLMTPDGKTFESEAAHGTVTRHFRQHQQGKETSTNSIASIFAWTRGIAQRGRLDDTPDVVKFAEIVEKATFDTVQEDGIMTKDLALALGRTDRESYVTTTEFLDAVSDKLQKQVQV

SEQ ID NO: 122308 - DNA, 1233 bp, Debaryomyces hansenii CBS767
  CDS (1)..(1233)
atgggattcaataagattaaggttgaccaaccaattgttgaaatggatggtgatgaaatgaccagaatcatctggaaatttatcaaagataagttgatcttcccatacttggacgtagatttgaaatactacgatttaggtattgaatacagaaatcagactgacgacaaggttaccaccgatgctgctgaagcaattttgaagtaccaagtcggagtcaaatgtgcaaccattaccccagacgaagccagagtcgaagaattcaagttgaagaagatgtggttatctccaaacggtacattgagaaatatcttgggtggaactgttttcagagaaccaattgtcattgataacatcccaagaatcgttccacaatgggaaagcccaattatcattggtagacatgcattcggtgatcaatacaaggccaccgatgttgttattccaaaggccggtcaattagaattagttttcaagccagctgatggctcagcaaccgaagtttatccagtgtacaactatgacgcgccaggtgttgcgttagccatgtacaacactgagaagtcaatcactgatttcgccgaatcatccttcaaaatggccttggatagaaaattaatattgttctcctctaccaagaacaccatcttgaagaagtacgatggtagattcaaagacatcttcgaagatttatacgaaaagaaatataagaagcaattcgaagaagccggtatctggtatgaacatagattaattgacgatatggtcgcccaaatgttgaaatccaagggcggttatatcattgccatgaagaactacgatggtgatgtgcaatcagatattgttgcgcaaggttttggttcattaggtttaatgacctctgtcttgatgaccccagatggaaaggcgttcgaagctgaagccgctcatggtacagttaccagacactataggcagcatcaacaaggtaaggagacctccactaactctatcgcttctatctttgcatggaccagaggtataattcaaagaggtaagttagataacaatgctgatgtcgttaaattcggtgaaagcttggaaaaagctactatcgataccgttgctttagacaacgtcatgactaaggatttagctttagctcaaggtaagactgaaagatcatcgtatgtcactaccgaagaattcatcgatgctgttgcaaagagattaaacaagaacttaggagcttaa

SEQ ID NO: 122309 - protein, 410 aa, Debaryomyces hansenii CBS767
MGFNKIKVDQPIVEMDGDEMTRIIWKFIKDKLIFPYLDVDLKYYDLGIEYRNQTDDKVTTDAAEAILKYQVGVKCATITPDEARVEEFKLKKMWLSPNGTLRNILGGTVFREPIVIDNIPRIVPQWESPIIIGRHAFGDQYKATDVVIPKAGQLELVFKPADGSATEVYPVYNYDAPGVALAMYNTEKSITDFAESSFKMALDRKLILFSSTKNTILKKYDGRFKDIFEDLYEKKYKKQFEEAGIWYEHRLIDDMVAQMLKSKGGYIIAMKNYDGDVQSDIVAQGFGSLGLMTSVLMTPDGKAFEAEAAHGTVTRHYRQHQQGKETSTNSIASIFAWTRGIIQRGKLDNNADVVKFGESLEKATIDTVALDNVMTKDLALAQGKTERSSYVTTEEFIDAVAKRLNKNLGA

SEQ ID NO: 122310 - DNA, 1230 bp, Apis mellifera
  CDS (1)..(1230)
atgactaaaatacaggttggacctgttgttgatgttttaggtgatgaaatgacaagagtcatttgggattccattaaagagaaactcattttaccatatttagatattaaattacatacttatgatttgagtattgaaaatcgagatgctactaatgataacgtgactgtagaatgtgctgaggctattaaaaaatataatgtaggaatcaaatgtgctactattactccagatgaaaaaagagtgaaagaatttaatttaaaaaaaatgtggaaaagtccaaatggtactattagaaatattttaggtggtacagtttttcgtgaacctattatctgtaaaaatataccaaaattagtaaacagttggattcgaccaattatcattggcagacatgctcatgcagatcaatataaagctgtagactttataatacctggtccaggaaaacttgaaatcacttggattggagataatgaacaaaaaattcaacatatagttcataattttaaaggacctggcattgcacaagctcaatataatacggatgaaagtattcatgcttttgctcacagttcttttcaatatgctttatcaagaaattatcctttgtacctttctacaaagaatacaattcttaaacaatatgatggtaaatttaaagatatttttcatgaaatatatgaaaaagaatataaagcacaatttgaagccaagaatatttggtatgagcatcgtttaatagatgatatggtagcatatgcaatgaaatcagatggtggttttgtatggtcttgtaaaaattatgatggtgatgttcaatctgattctgtagcacaaggttatggatctctaggtctgatgacttcagttttaatttgtccagatggacgtactgtggaagctgaagctgctcatggtacagttacaagacattatcgtcaatatcaacaaggaaaggaaacttcaacaaatcccattgcttctatatttgcatggacaagaggtttacttcatcgtgcaaaattggatgataacaaagatcttaaacaattttcagaaacattggaagcagtttgtattaatactattgaatcaggtttcatgacaaaagatcttgcaatttgtatcaaaggcatgaataatgttactagatctgattatttagaaacatttgaatttatagataagttagcagaaaatttgcaaaaacaaataaaagtaaattga

SEQ ID NO: 122311 - protein, 409 aa, Apis mellifera
MTKIQVGPVVDVLGDEMTRVIWDSIKEKLILPYLDIKLHTYDLSIENRDATNDNVTVECAEAIKKYNVGIKCATITPDEKRVKEFNLKKMWKSPNGTIRNILGGTVFREPIICKNIPKLVNSWIRPIIIGRHAHADQYKAVDFIIPGPGKLEITWIGDNEQKIQHIVHNFKGPGIAQAQYNTDESIHAFAHSSFQYALSRNYPLYLSTKNTILKQYDGKFKDIFHEIYEKEYKAQFEAKNIWYEHRLIDDMVAYAMKSDGGFVWSCKNYDGDVQSDSVAQGYGSLGLMTSVLICPDGRTVEAEAAHGTVTRHYRQYQQGKETSTNPIASIFAWTRGLLHRAKLDDNKDLKQFSETLEAVCINTIESGFMTKDLAICIKGMNNVTRSDYLETFEFIDKLAENLQKQIKVN

SEQ ID NO: 122312 - DNA, 1476 bp, Aspergillus nidulans FGSC A4
  CDS (1)..(1476)
atgtcgtcggttcggttcacttccgcattggctcgccgctccctcaactcccctcttctgccctgcggtgcccctcccatttcctccgctcttcgctctttctcttctgcttcttattctgctttctcttcttcttcttcttcttttccctcaccatccagcgctcgcgctctcgcatccactgctcgcatctcccgtcccgcagctactcgttctctataccgcgttcaaacccgcaccatggcgactgaagtacagaagatcaaggtcaagaaccccgtcgtggagttggacggtgatgagatgacccgcattatctggaaggagatcagggaaaaggctagtttcctcgatattgacctcaagtactacgacctgggtcttgagtaccgtgaccagaccgatgacaaggtcaccaccgagtccgctgaggccatcaagaagtatggtgtcggtgtcaagtgcgccaccatcactcctgatgaggcccgtgttgaggagttcaagctgaagaagatgtggctgtctcctaacggtactatccgtaacatccttggcggtactgtcttccgtgagcccattgtcattcctcgcattcctcgcctcgtccccggatggactaagcccatcatcatcggtcgtcatgctttcggtgaccagtaccgtgctaccgaccgtgtgatccctgggcctggcaagcttgagctcgtctacacccccgagggcggccagcctgaggctatcaaggtctttgatttccctggcggtggtgttacccagactcagtacaacaccgatgagtcgattcgcggcttcgcccacgccagtttcaagcttgccttgactaagggccttcctctctacatgagcaccaagaacactattctgaagaagtacgatggccgcttcaaggacatcttccaagagatcttcgagtccgactacaagaaggaatttgatgccaagggcatctggtacgagcaccgtctcattgatgacatggtcgctcaaatgatcaagagcgagggtggtttcatcatggctttgaagaactacgatggtgacgttcagtccgacattgttgcccagggcttcggctccctgggtctgatgacctccacactcatcacccctgacggccaggcctttgagtctgaagctgcccacggcaccgtcacccgtcactaccgcgagcaccagaagggccgcgagacctccaccaaccccattgcctccatcttcgcctggacccgtggtcttatccagcgtggtaagctcgacgaaacccccgacgttgtcaagttcgccgaggagctcgagcgcgcttgtatcgatgttgtcaacgaggagggtatcatgaccaaggaccttgctctgtcctgcggccgcaaggagcgcgacgcgtgggttaccacccgcgagtacatggctgccgtcgagcgccgactcagggcaaacttgaaggcccgtctatag

SEQ ID NO: 122313 - protein, 491 aa, Aspergillus nidulans FGSC A4
MSSVRFTSALARRSLNSPLLPCGAPPISSALRSFSSASYSAFSSSSSSFPSPSSARALASTARISRPAATRSLYRVQTRTMATEVQKIKVKNPVVELDGDEMTRIIWKEIREKASFLDIDLKYYDLGLEYRDQTDDKVTTESAEAIKKYGVGVKCATITPDEARVEEFKLKKMWLSPNGTIRNILGGTVFREPIVIPRIPRLVPGWTKPIIIGRHAFGDQYRATDRVIPGPGKLELVYTPEGGQPEAIKVFDFPGGGVTQTQYNTDESIRGFAHASFKLALTKGLPLYMSTKNTILKKYDGRFKDIFQEIFESDYKKEFDAKGIWYEHRLIDDMVAQMIKSEGGFIMALKNYDGDVQSDIVAQGFGSLGLMTSTLITPDGQAFESEAAHGTVTRHYREHQKGRETSTNPIASIFAWTRGLIQRGKLDETPDVVKFAEELERACIDVVNEEGIMTKDLALSCGRKERDAWVTTREYMAAVERRLRANLKARL

SEQ ID NO: 122314 - DNA, 1302 bp, Candida albicans SC5314
  CDS (1)..(1302): transl_table=12
atgattagaacaaccactaccagagccattaaccgcacagctatgttgcaaaaccacattcgtgggttttccagtactgcttcaattttagataagatcaaagtgaaaaaccccattgtcgaattggatggtgatgaaatgacccgtattatttggcaaaaaattaaagatcaattgatcttgccatatttggatgttaatttgaaatattacgatttaggaatcgagtctcgtgatgccaccaatgaccaaatcaccattgatgccgcaaatgcaattaaagaacatggtgttggtgtcaaatgtgcaacaattacccccgatgaagctagagtaaaagaattcaatttgaagaaaatgtggctttctccaaatggtaccattagaaacattcttggtggtactgtctttagggaatcaattattattccatgtattccaagattgattccgggatggaaagaaccaattgtcataggtagacatgcttttggagatcaatacaaagctactgatttagttatcagtgaacctggtaaattggaattgagattcaccccggaaaatggcggtgaaacccaaactcataaggtctacgactacactggtccaggtgtcggattggccatgtacaacaccgacgaatctatcagtgggtttgctcgtgcctccttcaacatggcattatccaagaacttgccattgtatatgtcaaccaaaaacactattttgaaaaaatacgatggaagatttaaagacatcttccaagacatttacgaaaatgaatacgccagtgaatttgaaaagaaggggttgtggtatgaacacagattaattgatgatatggttgctcaaatgattaaatccaaaggtggattcgtcatggcattaaagaattacgatggtgatgttcaatcagatattgttgctcaaggttttggatcattaggtttaatgacatctgcattgatgactccagatggaaaggcatacgaagctgaagctgcccacggtaccgtcaccagacactacagacagcaccaacaaggtaaagaaacctctacgaactccattgcatctatatttgcctggacaagaggtttggcccaaagaggaagattagatgagacaccagaagtcgttgactttgctgacaaacttgaaaaggctactatcgacactgttgaagttgatcgtatcatgaccaaagatttagccttggccatgggcaaaaccgacagatctgcatatgttaccactactgaatttttggatgctgttgctgatagattgaagaaataa

SEQ ID NO: 122315 - protein, 433 aa, Candida albicans SC5314
MIRTTTTRAINRTAMLQNHIRGFSSTASILDKIKVKNPIVELDGDEMTRIIWQKIKDQLILPYLDVNLKYYDLGIESRDATNDQITIDAANAIKEHGVGVKCATITPDEARVKEFNLKKMWLSPNGTIRNILGGTVFRESIIIPCIPRLIPGWKEPIVIGRHAFGDQYKATDLVISEPGKLELRFTPENGGETQTHKVYDYTGPGVGLAMYNTDESISGFARASFNMALSKNLPLYMSTKNTILKKYDGRFKDIFQDIYENEYASEFEKKGLWYEHRLIDDMVAQMIKSKGGFVMALKNYDGDVQSDIVAQGFGSLGLMTSALMTPDGKAYEAEAAHGTVTRHYRQHQQGKETSTNSIASIFAWTRGLAQRGRLDETPEVVDFADKLEKATIDTVEVDRIMTKDLALAMGKTDRSAYVTTTEFLDAVADRLKK

SEQ ID NO: 122316 - DNA, 1239 bp, Candida albicans SC5314
  CDS (1)..(1239): transl_table=12
atgggtgaaattcaaaaaatcaaagttaaaaatcctattgttgaaatggatggggatgaaatgactcgtatcatttggcaattcattaaagataaattaattactccttatttggatgtcgatttgaaatattatgatttgggtattgaatatagagatcaaaccgatgataaagtcaccactgatgctgccaatgccattttgaaatatggtgttggtgtcaaatgtgccactattacccccgatgaagctagagttaaagaatttaatttgaaaaaaatgtggctttcaccaaatggtactttaagaaatattcttggtggtactgtttttagagaaccaattgtcattgataatattccaagaattgttccaagttgggaaaaaccaattattattggtagacacgcttttggtgatcaatataaagccaccgatattgttgttcctggtgctggtgaattaaaattggttttcaaaccaaaagatggtggagaaatccaagaatatcctgtttataattttgaaggcccaggtgttggtttaagtatgtataatactgatgcttctattcaagattttgctgaaagttcatttcaattggccattgaacgtaaattgaacttattttcatctactaaaaacaccattttgaagaaatatgatggtagatttaaagatattttcgaaggattatatgccagtaaatacaagactaaaatggatgaattgggcatttggtacgaacatagattaattgatgatatggttgcccaaatgttgaaatctaaaggtggatatatcattgctatgaagaattacgatggtgatgttcaatcagacattgttgctcaaggttttggatctttgggtttgatgacctcagtgttggttactccagatggtaaagcatttgaatctgaagctgctcacggtactgtcactagacattatagacaacatcaacaaggtaaagaaacatcaactaactcaattgcatctatatatgcttggactagaggtttgattcaaagaggtaaattagatgaaactccggaagttgtcaaatttgctgaagatttggaaaaagccattattgatactgttagtaaagataacataatgaccaaagatttggctttgacccaaggtaaaaccgatagatcttcatatgttaccaccgaagaattcattgatgctgttgctaatagattaaacaaaaacttaggctacgcataa

SEQ ID NO: 122317 - protein, 412 aa, Candida albicans SC5314
MGEIQKIKVKNPIVEMDGDEMTRIIWQFIKDKLITPYLDVDLKYYDLGIEYRDQTDDKVTTDAANAILKYGVGVKCATITPDEARVKEFNLKKMWLSPNGTLRNILGGTVFREPIVIDNIPRIVPSWEKPIIIGRHAFGDQYKATDIVVPGAGELKLVFKPKDGGEIQEYPVYNFEGPGVGLSMYNTDASIQDFAESSFQLAIERKLNLFSSTKNTILKKYDGRFKDIFEGLYASKYKTKMDELGIWYEHRLIDDMVAQMLKSKGGYIIAMKNYDGDVQSDIVAQGFGSLGLMTSVLVTPDGKAFESEAAHGTVTRHYRQHQQGKETSTNSIASIYAWTRGLIQRGKLDETPEVVKFAEDLEKAIIDTVSKDNIMTKDLALTQGKTDRSSYVTTEEFIDAVANRLNKNLGYA

SEQ ID NO: 122318 - DNA, 1290 bp, Ustilago maydis 521
  CDS (1)..(1290)
atgtccatcgttcgtccacgtggtttggccccgccagccaagatcaaggtctccaaccctgtcgttgagctcgacggtgacgagatgacgcgtatcatctggcacaagattcgcgaggacctcattcttcccttcttggatatcgagctcaagtactacgacctcggtatggagcaccgtgatgctaccgacgaccaggtcaccgtcgaggctgccgaggccatcaaaaagtacaaggtgggtgtcaagtgcgctaccatcacacccgacgaggctcgtgtcaaggagtttggcctcaagaagatgtggctctcgccgaacggcaccatccgaaacattcttggcggtaccgtgttccgtgcgcccatcgtcctggacgacctccctcgcccggttcccggttggaccaagcccatcgtcatcggtcgtcacgcgtttggtgaccagtaccgctgccagaactttgccgtcgacaaggcgggcaagtttactatggagtttacgccttccgacggctcgcaaggtcagaagtgggaggtgttcaactaccccgagggtggtggatcgggtctcgccatgtacaacaccaccgagtcgatcactggtttcgcccactcgtcgttcaagatggcactcgaaaagaacatcccgctgtacatgtcgaccaagaacaccatccttaaggcatacgacggtcgattcaaggacattttccagcacctttacgacaccatctacaagaaggactttgaggccaagggtctctggtatgagcaccgtctcattgatgacatggttgcacagatgatcaagtctgacggcggtttcctcatggcgcttaagaactacgatggtgacgtgatctcggacatcaccgcgcaaggatttggatcgctcggaatgatgacgagcgagctgatcacacccgatggcgacatcatggaggccgaagcagcgcacggtactgtcacccgtcactaccgtgagcaccagaagggcaacgagacgtcgaccaactcagtggcatccatctacgcctggactcgtggtcttgccttccgtggcaagctcgacaagaacgacgacctgatttactttgccaacgctcttgaagaggcatgtcttgatgctatcagcgccggaaagatgaccaaggatctcgctttgatctaccacggcaagggcatgaagcgcgagcactacgtcaccactatggagtacatcgatgaggttgcgaagctcctcaaaaagaagctccagactcgcggcatcgaggctggcaagctttga

SEQ ID NO: 122319 - protein, 429 aa, Ustilago maydis 521
MSIVRPRGLAPPAKIKVSNPVVELDGDEMTRIIWHKIREDLILPFLDIELKYYDLGMEHRDATDDQVTVEAAEAIKKYKVGVKCATITPDEARVKEFGLKKMWLSPNGTIRNILGGTVFRAPIVLDDLPRPVPGWTKPIVIGRHAFGDQYRCQNFAVDKAGKFTMEFTPSDGSQGQKWEVFNYPEGGGSGLAMYNTTESITGFAHSSFKMALEKNIPLYMSTKNTILKAYDGRFKDIFQHLYDTIYKKDFEAKGLWYEHRLIDDMVAQMIKSDGGFLMALKNYDGDVISDITAQGFGSLGMMTSELITPDGDIMEAEAAHGTVTRHYREHQKGNETSTNSVASIYAWTRGLAFRGKLDKNDDLIYFANALEEACLDAISAGKMTKDLALIYHGKGMKREHYVTTMEYIDEVAKLLKKKLQTRGIEAGKL

SEQ ID NO: 122320 - DNA, 1359 bp, Cryptococcus neoformans var. neoformans B-3501A
  CDS (1)..(1359)
atgttcccacagctcgctcgaagcaccactgcctttacgcgctcatctcttctccgatcaactagacctttagcattcgcaatggcttcacgcaactatgcttccacccctgccggcatcgacaggatcaaggtcaagaaccccgtggttgagattgacggtgatgagatgacaaggatcatctggaagaagatcagggaggagcttatcttgccctacgttgacgttgacctcaagtactacgacttgggaatggagagccgagatgctaccaacgaccaaatcactatcgactctgccgaagctatcaaaaagtactctgtcggtgtcaagtgcgctaccatcacccctgacgaggctcgagtcaaggaattcaaattgaaggaaatgtggcgaagccccaacggaactatccgaaacatcctcggaggaaccgtcttccgagagcccattatcctcgacaagatccccaagcccgtccccggatggaccaagcccatctgtatcggtcgacatgctttcggtgaccaataccgatccaccgactttatcgcccccggacccggaaagctcaccctcacttacacccccgctgaaggaggtgcccccaccgagctcaacgtctacgacttcaagggcaagggtgtcgccttggccatgtataacaccgacgaaagcatttacggtttcgcccacgcgagcttcaagatggctttaagcaagaagatgcccttgttcatgtctaccaagaacaccatcttgaagaagtacgatggccgattcaaggacattttccaagaggtctacgaatctacgtacaaggccgagtttgagaagctcggtgtctattatgagcatcgcctcatcgacgacatggttgctcaggccatcaagtcttctggtggtttcgtttgggcgtgcaagaactacgacggtgatgtcatgagcgacattctcgcccagggtttcggttctctcggtatgatgacttccgagctcatcaccccagacggcaagaccatggaatctgaagctgcccacggtaccgtcacccgacactaccgacaataccaagctggtcacgaaacctctaccaaccctgttgcctccatctttgcctggacccgagggcttgccttccgagccaagttggacgagacccccgcgctcgaggcgttcgccaaggacttggaagctgcctgtgttgaagtcatcgacaaggacggtatcatgaccaaggatttggctttggcgatgaagggtaaggacatgactagggatgactgggtcaccaccgacgtctacatgaagaaggtcaacgagaggttggtcgaaaagctcaaggcgaggagcgcgtaa

SEQ ID NO: 122321 - protein, 452 aa, Cryptococcus neoformans var. neoformans B-3501A
MFPQLARSTTAFTRSSLLRSTRPLAFAMASRNYASTPAGIDRIKVKNPVVEIDGDEMTRIIWKKIREELILPYVDVDLKYYDLGMESRDATNDQITIDSAEAIKKYSVGVKCATITPDEARVKEFKLKEMWRSPNGTIRNILGGTVFREPIILDKIPKPVPGWTKPICIGRHAFGDQYRSTDFIAPGPGKLTLTYTPAEGGAPTELNVYDFKGKGVALAMYNTDESIYGFAHASFKMALSKKMPLFMSTKNTILKKYDGRFKDIFQEVYESTYKAEFEKLGVYYEHRLIDDMVAQAIKSSGGFVWACKNYDGDVMSDILAQGFGSLGMMTSELITPDGKTMESEAAHGTVTRHYRQYQAGHETSTNPVASIFAWTRGLAFRAKLDETPALEAFAKDLEAACVEVIDKDGIMTKDLALAMKGKDMTRDDWVTTDVYMKKVNERLVEKLKARSA

SEQ ID NO: 122322 - DNA, 1350 bp, Cryptococcus neoformans var. neoformans B-3501A
  CDS (1)..(1350)
atgctcgctcgaagcaccactgcctttacgcgctcatctcttctccgatcaactagacctttagcattcgcaatggcttcacgcaactatgcttccacccctgccggcatcgacaggatcaaggtcaagaaccccgtggttgagattgacggtgatgagatgacaaggatcatctggaagaagatcagggaggagcttatcttgccctacgttgacgttgacctcaagtactacgacttgggaatggagagccgagatgctaccaacgaccaaatcactatcgactctgccgaagctatcaaaaagtactctgtcggtgtcaagtgcgctaccatcacccctgacgaggctcgagtcaaggaattcaaattgaaggaaatgtggcgaagccccaacggaactatccgaaacatcctcggaggaaccgtcttccgagagcccattatcctcgacaagatccccaagcccgtccccggatggaccaagcccatctgtatcggtcgacatgctttcggtgaccaataccgatccaccgactttatcgcccccggacccggaaagctcaccctcacttacacccccgctgaaggaggtgcccccaccgagctcaacgtctacgacttcaagggcaagggtgtcgccttggccatgtataacaccgacgaaagcatttacggtttcgcccacgcgagcttcaagatggctttaagcaagaagatgcccttgttcatgtctaccaagaacaccatcttgaagaagtacgatggccgattcaaggacattttccaagaggtctacgaatctacgtacaaggccgagtttgagaagctcggtgtctattatgagcatcgcctcatcgacgacatggttgctcaggccatcaagtcttctggtggtttcgtttgggcgtgcaagaactacgacggtgatgtcatgagcgacattctcgcccagggtttcggttctctcggtatgatgacttccgagctcatcaccccagacggcaagaccatggaatctgaagctgcccacggtaccgtcacccgacactaccgacaataccaagctggtcacgaaacctctaccaaccctgttgcctccatctttgcctggacccgagggcttgccttccgagccaagttggacgagacccccgcgctcgaggcgttcgccaaggacttggaagctgcctgtgttgaagtcatcgacaaggacggtatcatgaccaaggatttggctttggcgatgaagggtaaggacatgactagggatgactgggtcaccaccgacgtctacatgaagaaggtcaacgagaggttggtcgaaaagctcaaggcgaggagcgcgtaa

SEQ ID NO: 122323 - protein, 449 aa, Cryptococcus neoformans var. neoformans B-3501A
MLARSTTAFTRSSLLRSTRPLAFAMASRNYASTPAGIDRIKVKNPVVEIDGDEMTRIIWKKIREELILPYVDVDLKYYDLGMESRDATNDQITIDSAEAIKKYSVGVKCATITPDEARVKEFKLKEMWRSPNGTIRNILGGTVFREPIILDKIPKPVPGWTKPICIGRHAFGDQYRSTDFIAPGPGKLTLTYTPAEGGAPTELNVYDFKGKGVALAMYNTDESIYGFAHASFKMALSKKMPLFMSTKNTILKKYDGRFKDIFQEVYESTYKAEFEKLGVYYEHRLIDDMVAQAIKSSGGFVWACKNYDGDVMSDILAQGFGSLGMMTSELITPDGKTMESEAAHGTVTRHYRQYQAGHETSTNPVASIFAWTRGLAFRAKLDETPALEAFAKDLEAACVEVIDKDGIMTKDLALAMKGKDMTRDDWVTTDVYMKKVNERLVEKLKARSA

SEQ ID NO: 122324 - DNA, 1227 bp, Tribolium castaneum
  CDS (1)..(1227)
atgggtaaaataaaagctggacctgttgtcgacatccttggggatgaaatgacccgaattatatgggactccatcaaagagaaattgattctgccctttttggacgtcgaactgcacacttacgacctagggattgaaaaccgggataaaaccagtgaccaggtcaccgtcgattgtgccgaagctatcaaaaagtacaatgttggaattaaatgtgccactattacgcccgatgagaagagggttgaggagttcaacttgaaacaaatgtggaagagcccaaacggcaccattagaaacattttggggggcactgtgttccgcgaggccataatttgcaaaaacatcccccgattggtgtcgggctggaacaagccaatcataatcggtcgtcacgcccacgctgaccaatacaaagccaccgatttcgtggttcccggacccgggaaactcgaattggtgtttacgccaatctcggggcaacccatcaaacacatcgtcaacgaatataagggggctggtgtagcccttggaatgttcaacaccgacgaatccattaaagatttcgctcattcgtccttcaaatttgccctcaatcaaggatatcctctttacttgagcaccaaaaacaccattttgaagaaatacgatggacgcttcaaagacatcttccaggatatctacgatcgcgagtacaagaagcaattcgaagcgaagggcatctggtacgagcatcgtttgattgacgacatggtcgcgtatgccatgaaatcggaagggggctttgtgtgggcttgcaagaattatgatggggacgttcagtcggattcagtcgctcaaggttatgggtctttggggctcatgacttcggttctgatttgtccagatggtaaaacagtggaatcagaggcggctcatggtactgtcacgcgccattatcgaatgtaccagaagggacaagaaacgtcaactaatcccattgcgtccattttcgcttggactagagggctgttgcacagagccaagcttgataataacaaagaattggagaagtttgccaacactttggaaaaagtttgcattgatacgatcgaatctggcttcatgaccaaagatttggccatttgtattaaaggcatgaacggagtcaaaagatccgattatttggagacgttcgaatttatgcaaaaattggccgataatttgaagaaggccatggggtgttga

SEQ ID NO: 122325 - protein, 408 aa, Tribolium castaneum
MGKIKAGPVVDILGDEMTRIIWDSIKEKLILPFLDVELHTYDLGIENRDKTSDQVTVDCAEAIKKYNVGIKCATITPDEKRVEEFNLKQMWKSPNGTIRNILGGTVFREAIICKNIPRLVSGWNKPIIIGRHAHADQYKATDFVVPGPGKLELVFTPISGQPIKHIVNEYKGAGVALGMFNTDESIKDFAHSSFKFALNQGYPLYLSTKNTILKKYDGRFKDIFQDIYDREYKKQFEAKGIWYEHRLIDDMVAYAMKSEGGFVWACKNYDGDVQSDSVAQGYGSLGLMTSVLICPDGKTVESEAAHGTVTRHYRMYQKGQETSTNPIASIFAWTRGLLHRAKLDNNKELEKFANTLEKVCIDTIESGFMTKDLAICIKGMNGVKRSDYLETFEFMQKLADNLKKAMGC

SEQ ID NO: 122326 - DNA, 1311 bp, Tribolium castaneum
  CDS (1)..(1311)
atggccggtactttgaccaaattttcgaaaagcttgaacgctgttgccacaaaaaatgggctgctgcaagggcgcaactatgggacccagcgcgtggtggccaagaaccccgtggtggagatggacggcgacgaaatgacccgaatcatctgggagaaaatcaaagaacgcctaatcttcccctacgttaaactcgagtctctttacttcgacttggggcttccccaccgtgaccaaaccaacgaccaagtgaccatcgacgccgccaacgccatcctcaagcacaacgtggggatcaaatgcgccaccatcacccccgacgagcagcgagtccaagaattcaacttgaaaaaaatgtggctttcccccaacggcaccatccgaaatattttaggcgggacggttttccgcgaacccattttatgcaaaaacatccccaagctggtacccggctggaccaagcccatcgtcatcgggcgtcacgcccatggcgaccagtacaaagccaaagatttcgttgtaacgaaaccaggaaccgtcgaacttgtctacacttcggacgatggtaaagtcgaaaagtacgagcttttcaagtacaaagggggcggcgtcgccctggggatgtacaacacggatgagagcatccgcgccttcgcccattcgtccttccaggtggccttaaacaaaggctggccgctgtatctctccaccaaaaacacgattttgaagaagtacgacgggaggttcaaagacatcttccaggagatttacgaaaaagagtacaagtctcaatacgaggcgaagaaaatctggtatgagcaccgcttgattgacgacatggtggcccaagggctgaaatcgtcaggtggtttcgtctgggcttgcaaaaactacgatggagacgtccagtcggacatagtcgcccaagggtacggttccctggggatgatgacctcggtgctgatgtgtcccgacgggaagaccatcgagtcggaggccgcccatgggacggtcacgaggcactaccgcgagcaccagaaggggaatcccacgtccactaaccccatagcgtccatttttgcctggactaggggcctggaacatagagccaagcttgatgggacgcccgatttggccaagtttgcgcaaactttggagaaggcgtgcgttgattgcgtcgagtcagggaaaatgaccaaggatttggctgcgtccattcatgggctgcccaatgtcaagccggggatgtatttgaatactcaagactttttagaggcgatcgcagaggagttggaaaggcagatgaagtga

SEQ ID NO: 122327 - protein, 436 aa, Tribolium castaneum
MAGTLTKFSKSLNAVATKNGLLQGRNYGTQRVVAKNPVVEMDGDEMTRIIWEKIKERLIFPYVKLESLYFDLGLPHRDQTNDQVTIDAANAILKHNVGIKCATITPDEQRVQEFNLKKMWLSPNGTIRNILGGTVFREPILCKNIPKLVPGWTKPIVIGRHAHGDQYKAKDFVVTKPGTVELVYTSDDGKVEKYELFKYKGGGVALGMYNTDESIRAFAHSSFQVALNKGWPLYLSTKNTILKKYDGRFKDIFQEIYEKEYKSQYEAKKIWYEHRLIDDMVAQGLKSSGGFVWACKNYDGDVQSDIVAQGYGSLGMMTSVLMCPDGKTIESEAAHGTVTRHYREHQKGNPTSTNPIASIFAWTRGLEHRAKLDGTPDLAKFAQTLEKACVDCVESGKMTKDLAASIHGLPNVKPGMYLNTQDFLEAIAEELERQMK

SEQ ID NO: 122328 - DNA, 1266 bp, Tribolium castaneum
  CDS (1)..(1266)
atgttcaaaacacaaattgtgaagttgctgagtcggaaatatgccacaaaaacgaaaatcgccgtttcgaaaccaatcgttgaaatcgacggtgacgaaatgaccaaaataattttcgccgaaatcaaaaataaactaattttgcctttcgtcgagctcgggagagactactacgattgtagccttccgaatcgaaatgcgaccaaaaatcaggtatcaaaagacgcagctgaagcaattttgagacacaatgtagggattaaatgctccaccataacgccagatgaggaacgggtcaaagaattcaatttgacccagatgtggcctagcccaaacggtatgattcgaaacgccctcaatgggacgcaattccgggagtccatcatttgccgaaatgtgaacaagtacgtccgtgggtggaccaaacccatcatcatggggcgccatactttcggcgatcagtacggaggcaaagacctcacaatcgaaaaaccatcaaaaatttatctaaccgtgaaaaccggcgatcatgaggaaaaattcgaaattttcgattacaaaaatcgaggtgtggcgatggtgacgttcaacactgaagatagcatccgaaactttgcaacttcctgcttccggatggccttggaacgccaatttccggtttatttcgccacgaaaagtacgctcttgaagcagtacgacaagttgttcaatgacgtgtttttggaagtttacgaaaaaaactttaagtcaaaatttgcccaagctaacttaacttttgaactgcgcctaattgacgatatggccgcccaggctatgaaatcctccggtgggtttttatgggctttgaaaagctacgacggtgatgtcctgtcggacgtcgttgggcagggcttcggttccatgggtttgatgatccacagtctcatatcacacgatggtaggaccataatgaccgaaccagcgcatggtactgtgaccagacacttccgcgagtaccaaaagggtgtgaaagtttcaacgaacccaatttcgtccatttttgcctggaccaggggtttacaacatcgcgcaaagctggataataacccagatttgggtagttttgcccaaactttggaaaaaagtaccatttcgacggttgaggaagggttggttacgaaagatttggcaccttgtgtttttggaactgaatttagggaagatcagtatttggggacttctgaatttattgataaagtggcacaaaaactgggcaagcttgtgtaa

SEQ ID NO: 122329 - protein, 421 aa, Tribolium castaneum
MFKTQIVKLLSRKYATKTKIAVSKPIVEIDGDEMTKIIFAEIKNKLILPFVELGRDYYDCSLPNRNATKNQVSKDAAEAILRHNVGIKCSTITPDEERVKEFNLTQMWPSPNGMIRNALNGTQFRESIICRNVNKYVRGWTKPIIMGRHTFGDQYGGKDLTIEKPSKIYLTVKTGDHEEKFEIFDYKNRGVAMVTFNTEDSIRNFATSCFRMALERQFPVYFATKSTLLKQYDKLFNDVFLEVYEKNFKSKFAQANLTFELRLIDDMAAQAMKSSGGFLWALKSYDGDVLSDVVGQGFGSMGLMIHSLISHDGRTIMTEPAHGTVTRHFREYQKGVKVSTNPISSIFAWTRGLQHRAKLDNNPDLGSFAQTLEKSTISTVEEGLVTKDLAPCVFGTEFREDQYLGTSEFIDKVAQKLGKLV

SEQ ID NO: 122330 - DNA, 1209 bp, Clostridium thermocellum ATCC 27405
  CDS (1)..(1209): transl_table=11
atgagtaagataaaaatgaaagttccgttggtcgagatggacggagatgaaatgacccgaatcatatggagattgataaaggaaaatctcttggagccatacatagagctcaatacagaatattacgatttggggcttgaaaacagggacaagaccgaggaccaggttaccattgacgctgccagggctattcagaaatatggtgttggagtaaagtgcgcgactattactcccaatgctcagagggttgaggaatacaacttaaagaagatgtggaagagtcctaacggtacaatcagggcgattcttgatggtacggttttccgtgccccgatagttgtaaacagcataaagccctttgttaaaggatggaaaaaacctatttccattgcaaggcatgcttacggtgacgtatacaagaatgtggaatactatgtgccttcggcgggaaaagccgagcttgtatttacgtctgaaaacggagaggtttcaaggcagaccattcatgagtttgacggtcccggtgtgataatgggtatgcacaataccgacaaatccatcagaagctttgcaagggcctgctttaactatgcccttgacatgaaccaggacctctggttttcaaccaaggataccatttcgaagacatatgaccataggtttaaagatatattccaggaaatctatgaaaacgagtacaaggaaaaattcgaagccaagaatttgcaatatttctacactctgatagacgatgctgtggcacgtattataagatctgaaggcggcatggtttgggcatgcaagaattatgacggtgatgtcatgtccgatatggtggcttctgcctttggaagtcttgcaatgatgacgtcagttctggtttcacccgacggaaagtatgagtttgaagcagcacatggaactgttacaagacattattacaagcaccttaaaggagaagagacatccaccaactcaatggcaaccatatttgcatggacgggtgcattaaagaaacgcggcgagctggatggcataaaagagcttgttgattttgcaaccaagcttgaacaagcatctgttcagacaatagaaaatggtgtaatgacaaaggatcttgcttcgctttcagaagttccggagaagaaaatagtaaatactgaggattttcttaaagaaatcaggaaaacttttgaaggtatggcataa

SEQ ID NO: 122331 - protein, 402 aa, Clostridium thermocellum ATCC 27405
MSKIKMKVPLVEMDGDEMTRIIWRLIKENLLEPYIELNTEYYDLGLENRDKTEDQVTIDAARAIQKYGVGVKCATITPNAQRVEEYNLKKMWKSPNGTIRAILDGTVFRAPIVVNSIKPFVKGWKKPISIARHAYGDVYKNVEYYVPSAGKAELVFTSENGEVSRQTIHEFDGPGVIMGMHNTDKSIRSFARACFNYALDMNQDLWFSTKDTISKTYDHRFKDIFQEIYENEYKEKFEAKNLQYFYTLIDDAVARIIRSEGGMVWACKNYDGDVMSDMVASAFGSLAMMTSVLVSPDGKYEFEAAHGTVTRHYYKHLKGEETSTNSMATIFAWTGALKKRGELDGIKELVDFATKLEQASVQTIENGVMTKDLASLSEVPEKKIVNTEDFLKEIRKTFEGMA

SEQ ID NO: 122332 - DNA, 1197 bp, Leptospira interrogans serovar Copenhageni str. Fiocruz L1-130
  CDS (1)..(1197): transl_table=11
atggcaaagatcaaggtaaaaaccccgctcgtggagcttgacggggacgagatgaccaggatcatctggaaggagattaaggatagattcattcatccgtatctcgatatagaactggattattatgatttaggcgtggagtacagggacaaaacggatgataaagtaactgtggattctgctcacgcgattcaaaaatatggagtaggcgtaaaatgtgcgacgattactcctaaccaagatagagttaaagaatacaatctcaaacaagaatggaaatctccgaacggaaccattcgttctattttagacggaaccgtttttcgtaaaccgatcatcgtaaaaaatattcctcctgcggttcgttcttggaaaaaaccgattacagtaggacgtcacgcttacggagatctttataaggacacagaactttatattcccgaagccggaaaggtggaactcgtttataccggaaaggacggaaaagaaaaacaaagagctttgattcacgactttgaaggagccggtgtgatcatggggcaacataacttggataagtcgatcttaagttttgcccaggcttgttttaactacgctatttccgaaaagattgatctttggttcgctacaaaggacacaatctccaaaaaatatcacgccagattccgcgccatctttgacgaacttgcaaaggctaaagctgcggatctcaaaaaagcgggaattgaatattcgtattatctaatcgatgacgcggtcgctcagctgatgaaaaatgaaggtggaatgctctgggccctgatgaattacgacggagatgttatgagcgacatggtcgcctccggatttggatctttaggacttatgacttctgtgctcgtttctcctgatggaaaatttgaatacgaagcagcacacggtactgtgaccagacattatcgtaaataccaacagggtgaaactacttctacaaattcggtagcttctatttttgcttggacgggtgcgttgattaaaaggggagagttggacggaactcccgatgtggtcgcatttggtcataagctggaaaaagcggtgattgatacaatcgaaagcggagagatgacaaaagatttaactcttctttgcaccgattcgaatgcaaaagctttagacacttttcaatttatggaagcaattcaaaaacgactttaa

SEQ ID NO: 122333 - protein, 398 aa, Leptospira interrogans serovar Copenhageni str. Fiocruz L1-130
MAKIKVKTPLVELDGDEMTRIIWKEIKDRFIHPYLDIELDYYDLGVEYRDKTDDKVTVDSAHAIQKYGVGVKCATITPNQDRVKEYNLKQEWKSPNGTIRSILDGTVFRKPIIVKNIPPAVRSWKKPITVGRHAYGDLYKDTELYIPEAGKVELVYTGKDGKEKQRALIHDFEGAGVIMGQHNLDKSILSFAQACFNYAISEKIDLWFATKDTISKKYHARFRAIFDELAKAKAADLKKAGIEYSYYLIDDAVAQLMKNEGGMLWALMNYDGDVMSDMVASGFGSLGLMTSVLVSPDGKFEYEAAHGTVTRHYRKYQQGETTSTNSVASIFAWTGALIKRGELDGTPDVVAFGHKLEKAVIDTIESGEMTKDLTLLCTDSNAKALDTFQFMEAIQKRL

SEQ ID NO: 122334 - DNA, 1215 bp, Bartonella quintana str. Toulouse
  CDS (1)..(1215): transl_table=11
atggtaaagatcaaagtgcaaaaccccattgttgaaattgatggggatgagatgacccgtatcatctggaaatatatcaaagacaaactgatccatccttatctcgacattgaccttaaatattacgatctttctgtcgaaaatcgagatacaaccaatgatcaagtaactatcgattctgcgaatgctatcaaaaaatatggggttggtataaaatgtgcaaccatcacgcctgatgaagcacgagtcaaagagtttaacctaaaaaaaatgtggaaatcacccaatggcacgatccgcaatattttagggggagtcatttttcgcgaaccgattatctgcaaaaatgtcccacgtctcgttcctaactggaccaaaccaattattatcggacgtcatgcttttggtgatcagtataaggcaactgatttcaaatttcctggcaagggaaagttaagtattaaatttgtcggcgatgacaatcaagttatcgaacatgatgtttttgacgccccaagtgcaggggtcgccatggctatgtataaccttgatgaatcaatttgtgattttgctcgagcatcttttaattatggactacagcggaatgttccagtctatctttcaacaaaaaacaccatactgaaatcttacgatggccgttttaaagatatctttcaagaaatattcgatgctgaatttaaagctgaatttgaaaatcgtaaattacattacgaacaccgcctcattgatgacatggttgcttctgcacttaaatggtcaggtggctacgtgtgggcatgtaaaaattatgatggtgatgttcagtccgatatcgttgctcaaggctttggttcccttggtcttatgacttctgttctcatgacaccagacggtaaaattgttgaagcagaagctgcacacggtacagtgacacgccattaccgtcagtatcaaaaaaatgaagaaacatcaacaaattctattgcatctatttttgcatggacacgtggcctgacgcatcgtgccaaacttgataacaatgagaaattaaaaaactttgccacaacattggaagaagtttgtattaagactgttgaagaaggttttatgaccaaagatctcgcacttttgattggacctaaacaaaaatggctttctacaacaggcttcctcgataaaattcatgaaaatctcaaaaaagcaatgggtaattaa

SEQ ID NO: 122335 - protein, 404 aa, Bartonella quintana str. Toulouse
MVKIKVQNPIVEIDGDEMTRIIWKYIKDKLIHPYLDIDLKYYDLSVENRDTTNDQVTIDSANAIKKYGVGIKCATITPDEARVKEFNLKKMWKSPNGTIRNILGGVIFREPIICKNVPRLVPNWTKPIIIGRHAFGDQYKATDFKFPGKGKLSIKFVGDDNQVIEHDVFDAPSAGVAMAMYNLDESICDFARASFNYGLQRNVPVYLSTKNTILKSYDGRFKDIFQEIFDAEFKAEFENRKLHYEHRLIDDMVASALKWSGGYVWACKNYDGDVQSDIVAQGFGSLGLMTSVLMTPDGKIVEAEAAHGTVTRHYRQYQKNEETSTNSIASIFAWTRGLTHRAKLDNNEKLKNFATTLEEVCIKTVEEGFMTKDLALLIGPKQKWLSTTGFLDKIHENLKKAMGN

SEQ ID NO: 122336 - DNA, 1215 bp, Bartonella henselae str. Houston-1
  CDS (1)..(1215): transl_table=11
atgataaagatcaaagtggaaaaccccattgttgaaatcgatggggatgaaatgacccgtataatctggaaatatatcaaagacaaattaatccacccgtatctggatattgaactcaaatattacgatctttccgtggaaaatcgagacgcaaccaatgatcaggtaactatcgattctgccaatgctattaaaaaatatggtgttggtataaaatgtgcaactataacaccagatgaatcgcgtgttaaagaattcaatttaaaaaaaatgtggaaatcacccaatggcacgatccgtaatattttaggaggcgttatttttcgcgaacctattatctgtaaaaatgtcccccgcctcgttcctaactggacaaagccaattattatcggacgtcatgcttttggtgatcaatataaggcaacagatttcaaatttcctggcaaaggaaagttaagtattaaatttgttggcgatgacaatcaagttatcgaacatgatgtttttgacgctccaagtgcaggtattgcaatggctatgtataacctcgatgaatcaattcgtgattttgcccgcgcatcttttaattatggactacagcgaaatcttccagtttatctttcaacaaaaaacaccattctgaaaacttacgatggtcgttttaaagacatctttcaagaaatatttgatgcagaatttaaggctgaatttgaaaatcgtaaattatattatgaacatcgcctaattgatgacatggttgcttctgcactgaaatggtcagggggctacgtgtgggcatgtaaaaactacgatggtgatgttcaatcagatatcgttgctcaaggttttggttcccttgggcttatgacttctgttctcatgacaccagacggtaaaattgttgaagcagaagctgcacatggtacagtaacacgccattatcgtcagtatcaaaaaaatgaagaaacatcaacaaattctattgcctctattttcgcatggacacgtggactgacgcaccgtgccaaacttgataacaatgaaaaattaaaaaatttcgccacaacactggaaagcgtttgtattaaaaccgttgaagaaggttttatgaccaaagatctcgcacttttaattggatctaaacaaaaatggctttctacaacaggttttctcgataaaattgatgaaaatctcaaaaaagcaatgggaaactaa

SEQ ID NO: 122337 - protein, 404 aa, Bartonella henselae str. Houston-1
MIKIKVENPIVEIDGDEMTRIIWKYIKDKLIHPYLDIELKYYDLSVENRDATNDQVTIDSANAIKKYGVGIKCATITPDESRVKEFNLKKMWKSPNGTIRNILGGVIFREPIICKNVPRLVPNWTKPIIIGRHAFGDQYKATDFKFPGKGKLSIKFVGDDNQVIEHDVFDAPSAGIAMAMYNLDESIRDFARASFNYGLQRNLPVYLSTKNTILKTYDGRFKDIFQEIFDAEFKAEFENRKLYYEHRLIDDMVASALKWSGGYVWACKNYDGDVQSDIVAQGFGSLGLMTSVLMTPDGKIVEAEAAHGTVTRHYRQYQKNEETSTNSIASIFAWTRGLTHRAKLDNNEKLKNFATTLESVCIKTVEEGFMTKDLALLIGSKQKWLSTTGFLDKIDENLKKAMGN

SEQ ID NO: 122338 - DNA, 1215 bp, Leifsonia xyli subsp. xyli str. CTCB07
  CDS (1)..(1215): transl_table=11
gtggacaagatcaaggttgaaggaacggtcgtcgagctcgatggcgacgagatgacccgcatcatctggaaggcgatcaaggactcgctcatccacccgtacctcgacatcgacctcgagtactacgacctcggcatccagaagcgcgacgagaccgacgaccagatcacgatcgacgccgcacacgccatccagaagcacggcgtcggcgtcaaatgcgccacgatcaccccggacgaggcgcgcgtcgaggagttcggcctcaagaagatgtggaagagcccgaacggcaccatccgcaacatcctcggcggcgtggtgttccgcgagccgatcatcatctccaacatcccgcggctcgtccccggctggaacaagccgatcatcatcggccgccacgccttcggcgaccagtaccgcgccaccgattttaccttcgacggcccgggcaccctcaccctcagcttccagccgagcgacggcggagaggccaagagcgtcgaggtgtaccaggcgccgggcgccggtgtcgcactggccatgtacaaccaggacgaatccatccgcgacttcgcccgggcctctttcacctacgggctggaccggcagtatccggtgtacctctcgaccaagaacaccatcctgaaggcctacgatggccggttcaaagacctgttccaggaggtcttcgacactgagtacaaggagaagttcgacgcggccgggctcacctatgagcaccgtctcatcgacgacatggtggcctccagcctcaaatgggagggcggctacgtctgggcgtgcaagaactacgacggcgatgtccagtccgacacggtggcccaggggttcggctcgctcggtctgatgacctcggtcctgaccacgccggacggcaaggtcgtcgaggcggaggccgcgcacggaacggtgacccgccactaccgccagcaccagcagggcaagccgacctccaccaacccgatcgcctcgatcttcgcctggacgcgcgggctcgcgcaccggggcaaactcgacggcaaccagcagctcatcgacttcacccacactctcgaagatgtcgtggtgaagacggtcgagcagggcaagatgaccaaggatctcgccctcctggtcggcccggagcaggcgttcctgacgacggaggagttcctcgaggcgatcagtgcgaacctcaaggcgctcctgggctga

SEQ ID NO: 122339 - protein, 404 aa, Leifsonia xyli subsp. xyli str. CTCB07
MDKIKVEGTVVELDGDEMTRIIWKAIKDSLIHPYLDIDLEYYDLGIQKRDETDDQITIDAAHAIQKHGVGVKCATITPDEARVEEFGLKKMWKSPNGTIRNILGGVVFREPIIISNIPRLVPGWNKPIIIGRHAFGDQYRATDFTFDGPGTLTLSFQPSDGGEAKSVEVYQAPGAGVALAMYNQDESIRDFARASFTYGLDRQYPVYLSTKNTILKAYDGRFKDLFQEVFDTEYKEKFDAAGLTYEHRLIDDMVASSLKWEGGYVWACKNYDGDVQSDTVAQGFGSLGLMTSVLTTPDGKVVEAEAAHGTVTRHYRQHQQGKPTSTNPIASIFAWTRGLAHRGKLDGNQQLIDFTHTLEDVVVKTVEQGKMTKDLALLVGPEQAFLTTEEFLEAISANLKALLG

SEQ ID NO: 122340 - DNA, 1209 bp, Desulfotalea psychrophila LSv54
  CDS (1)..(1209): transl_table=11
atgaagatacaaatgaaaactccactcgtggagcttgatggcgatgaaatgaccagagttctttggccccttatcaaggataagttgctcctgccatttatcgacttacaaacagaatactacgatctgggcatcgaagagagagacagaacaaacgatcagatcaccattgacgcggcagaggccatcaagaaatatggtgttggggttaaaaacgcgaccatcacccccaaccaggatcgagtagaggaatacggtctcaaggagcagtggaagtcacccaacgccaccgttcgcgccatgctcgatggaacggtgttccgcaaacccatcatggtaaagaacatcaagccctctgtacgctcttggcagaagcccattgtggtgggacgacatgcctatggcgatttttacaagaatgccgaaatttttgccgaggccggtggaaagcttgaaatagttgtcaccgacaaaaatggcaaagaaacccgtcaaaccatcatggaggtggatgagccagccattgttcagggcatccacaacaccgtcgcctccatcggccactttgccagggcctgctttgaatactctcttgatcaaaaaattgactgctggtttgccaccaaggataccatttcgaaacagtacgaccagcgtttcaaaattatctttgaagagatctttgcgcaggagtacaaagaaaaattcgccgcagccggtatcgaatatttttacacccttatcgacgacgttgttgcccggatgatgaagacagagggtggcatgctctgggcctgcaaaaactatgatggcgatgtgatgagcgacatggtggcctccgcctttggctccctggccatgatgtcctccgtacttgtctccccctacggctattttgagtatgaggccgcccacggcaccgtccaacgtcattattatcaacacctcaagggcgaaagaacctctaccaaccccgtagcccttatctacgcctggacaggtgctctgagaaaaagaggtgaacttgatggcaccccagatttatgcgccttctgtgatagcttggaagcaataactatcgaatgcattgagagcggatacatgaccggagatttggccagaatatgcgaaccagccgctatcaaggtccttgactctattgagttcattgatgagctcggcaaaagattgcaacagctcaacaagtaa

SEQ ID NO: 122341 - protein, 402 aa, Desulfotalea psychrophila LSv54
MKIQMKTPLVELDGDEMTRVLWPLIKDKLLLPFIDLQTEYYDLGIEERDRTNDQITIDAAEAIKKYGVGVKNATITPNQDRVEEYGLKEQWKSPNATVRAMLDGTVFRKPIMVKNIKPSVRSWQKPIVVGRHAYGDFYKNAEIFAEAGGKLEIVVTDKNGKETRQTIMEVDEPAIVQGIHNTVASIGHFARACFEYSLDQKIDCWFATKDTISKQYDQRFKIIFEEIFAQEYKEKFAAAGIEYFYTLIDDVVARMMKTEGGMLWACKNYDGDVMSDMVASAFGSLAMMSSVLVSPYGYFEYEAAHGTVQRHYYQHLKGERTSTNPVALIYAWTGALRKRGELDGTPDLCAFCDSLEAITIECIESGYMTGDLARICEPAAIKVLDSIEFIDELGKRLQQLNK

SEQ ID NO: 122342 - DNA, 1221 bp, Thermobifida fusca YX
  CDS (1)..(1221): transl_table=11
atggccaagatcaaggttgagaaccccgtagtagagctcgacggcgacgagatgacccggatcatctggtccttcatcaaggagcggctgatcctgccgtatctcgacatcgacctcaagtactacgacctgggtattgaggagcgcgaccgcaccgaggaccaggtgacgatcgacgcggcccacgccatcaagaagtacggtgtcggcgtcaagtgcgcgaccatcaccccggacgaggctcgggttgaagagttcgggctgaagaagatgtggcggtcgcccaacggcacgatccggaacattctcggcggtgtggtcttccgcgagccgatcatctgctctaacgtgcctcgcctggtcccgggctggaccaagccgatcatcatcggccggcacgcccacggcgaccagtacaaggccagcgacttcaaggtgcccggtcctggtaccgtgaccatcacctacaccccggagaacggcggcgagcccatcgagatggaggtcgccaagttccccgagggcggcggtgttgcgctcggcatgtacaacttccgcaagtccatcgaggacttcgcgcgggcctgcttcaattacggtctcgaccgcaactacccggtctacctgtccaccaagaacacgatcctcaaggcctacgacggcatgttcaaggacgtgttcgcggagatctacgagaacgagttcaaggagaagttcgagaaggccgggctgacctacgagcaccggctgatcgacgacatggtggccgccgcgctcaagtgggagggcggctacgtgtgggcctgcaagaactacgacggtgacgtgcagtcggacacggtcgcgcagggcttcggttcgctgggtctgatgacttcggtgctgcgcacctccgacggccgggtcgtggaggccgaggccgcgcacggtacggtcacccgccactaccggcagcaccagcagggcaagcccacctccaccaacccgatcgcgtcgatcttcgcgtggacgcggggcctggagcaccggggcaagctcgacaacacccccgcggtcatcgagttcgcccgcaccctggaggacgtggtcatcaagaccgtggagagcggccagatgaccaaggacctggcgatcctgatcggccccgaccaggagtggctgaccaccgagcagttcctcgccgtgctcgacgagaacctgcagaagcgcctggcggcctga

SEQ ID NO: 122343 - protein, 406 aa, Thermobifida fusca YX
MAKIKVENPVVELDGDEMTRIIWSFIKERLILPYLDIDLKYYDLGIEERDRTEDQVTIDAAHAIKKYGVGVKCATITPDEARVEEFGLKKMWRSPNGTIRNILGGVVFREPIICSNVPRLVPGWTKPIIIGRHAHGDQYKASDFKVPGPGTVTITYTPENGGEPIEMEVAKFPEGGGVALGMYNFRKSIEDFARACFNYGLDRNYPVYLSTKNTILKAYDGMFKDVFAEIYENEFKEKFEKAGLTYEHRLIDDMVAAALKWEGGYVWACKNYDGDVQSDTVAQGFGSLGLMTSVLRTSDGRVVEAEAAHGTVTRHYRQHQQGKPTSTNPIASIFAWTRGLEHRGKLDNTPAVIEFARTLEDVVIKTVESGQMTKDLAILIGPDQEWLTTEQFLAVLDENLQKRLAA

SEQ ID NO: 122344 - DNA, 1215 bp, Rhodobacter sphaeroides 2.4.1
  CDS (1)..(1215): transl_table=11
atgtcgaagatcaaggtagcgaaccccgtcgtcgagctcgacggcgacgagatgacccgcatcatctgggacttcatcaagcagaagctgatcctgccctacctcgacatcgacctgcattactacgacctcggcatcgaggagcgcgaccgcaccgaggaccggatcacggtcgatgcggcccatgcgatcaagcagtatggcgtgggcgtgaaatgcgccaccatcacgccggacgaggcgcgggtcgacgaattcggcctgaaatccatgtggaagagcccgaacggcacgatccgcaacatcctcggcggcgtgatcttccgccagccgatcatctgccgcaacgtcccgcgcctcgtgccgggctggacgaagcccatcgtcgtcggccgccatgccttcggcgaccagtatcgcgcgacggacttccgcttcccgggcaagggcaagctcacgctgaaattcgtgggcgaggacggcgcggtgatcgagcgcgaggtgttcgacgcgccgggctcgggcgtgaccatggcgatgtacaacctcgaccagtcgatcatcgacttcgcgcgggcctcgatgaactacgggctgaacctcggctggccggtgtacctctcgaccaagaacacgatcctcaaggcctacgacgggcgcttcaaggacctcttccagcaggtctacgaggaggaattcgccgagaagttcaaggcggcgggcatcacctacgagcaccggctgatcgacgacatggtggcctcggcgctgaaatggtcgggcggctatgtctgggcctgcaagaactacgacggcgacgtgcagtcggatacggtggcgcagggcttcggctcgctcgggctgatgacgagcgtgctgatgacgccggacgggcagacggtggaggccgaggccgcgcatggcacggtcacgcggcacttccgccagcatcaggcgggcaaggagacctcgaccaactcgatcgcctcgatctacgcctggacggggggcctcaagcaccgcgccaagctcgacggcaatgccgatctcgcccgcttcgccgagacgctcgagcgggtcacggtgcagacggtcgaggacggcttcatgacgaaggacctcgcactcctcgtgggcccggatcagaagtggctgaccacgatgggctatctcgagagggtcgacgaatatctcgaccgcgcgctcggcgcctga

SEQ ID NO: 122345 - protein, 404 aa, Rhodobacter sphaeroides 2.4.1
MSKIKVANPVVELDGDEMTRIIWDFIKQKLILPYLDIDLHYYDLGIEERDRTEDRITVDAAHAIKQYGVGVKCATITPDEARVDEFGLKSMWKSPNGTIRNILGGVIFRQPIICRNVPRLVPGWTKPIVVGRHAFGDQYRATDFRFPGKGKLTLKFVGEDGAVIEREVFDAPGSGVTMAMYNLDQSIIDFARASMNYGLNLGWPVYLSTKNTILKAYDGRFKDLFQQVYEEEFAEKFKAAGITYEHRLIDDMVASALKWSGGYVWACKNYDGDVQSDTVAQGFGSLGLMTSVLMTPDGQTVEAEAAHGTVTRHFRQHQAGKETSTNSIASIYAWTGGLKHRAKLDGNADLARFAETLERVTVQTVEDGFMTKDLALLVGPDQKWLTTMGYLERVDEYLDRALGA

SEQ ID NO: 122346 - DNA, 1218 bp, Rhodospirillum rubrum ATCC 11170
  CDS (1)..(1218): transl_table=11
atgagcaagatcacggtaaagaatcccatcgtcgaactcgacggcgatgaaatgactcgtatcatttggcagttcattaaagaaaagctgatccttccctatctcgacgtcgatcttctttattacgacctgggggtcgagaagcgcgacgagaccgaagaccgcatcaccatcgaagccgccaatgccatcaaaaagcatcatgtcggcgtgaaatgcgcgaccatcacccccgacgaggcccgcgtcgaggagttcggcctgaagaagatgtggaagtcgcccaatggcaccatccgcaatattctcgatggcaccgtcttccgcgagccgatcatctgcaagaacgtgccgcgtctggtgcccggctggacccagcccatcgtcatcggccgtcacgcctttggcgaccagtacaaggcgacggatttcatcgttcccggcgccggcaccctgacgatgagcttcaagcccgaggacggcggtccggcccaggagtacgaggtgttcaaattcccgggcgccggcgtggccatgggcatgtacaacctcgacgactcgatccgcggcttcgcccgcgcctgcctgaactacggcatcctgcgcaactggccggtctatctgtcgaccaagaacaccatcctcaaagcctatgacggccgcttcaaggatctgttccaggaggtcttcgacgccgaattcgccgagcgcttcaaggccaagggcatcacctatgagcatcgcctgatcgatgacatggtcgcctgctgcatgaagtggtcgggcggcttcgtctgggcttgcaagaactatgacggcgacgtgcagtccgacaccgtggcccagggcttcggctcgcttggcctgatgacctcggtgctgatgacccccgatggcgagacggtggaggccgaggccgcccacggcacggtgacccgccattaccgcctgcaccagaagggcaaggagacctcgaccaatcccatcgcctcgatcttcgcctggacgcgcggattgaagttccgcggcgagttcgacggcacccccgatgtggtgcaattcgccgaggccctggagcgggtttgcgtggaaaccgtggaagccggcttcatgaccaaggatctggcgatcctgatcgggcccgaccagccctggctgaccaccacccagttccttgacaagctcgacgccaccttgaaggcggaaatgaagagctga

SEQ ID NO: 122347 - protein, 405 aa, Rhodospirillum rubrum ATCC 11170
MSKITVKNPIVELDGDEMTRIIWQFIKEKLILPYLDVDLLYYDLGVEKRDETEDRITIEAANAIKKHHVGVKCATITPDEARVEEFGLKKMWKSPNGTIRNILDGTVFREPIICKNVPRLVPGWTQPIVIGRHAFGDQYKATDFIVPGAGTLTMSFKPEDGGPAQEYEVFKFPGAGVAMGMYNLDDSIRGFARACLNYGILRNWPVYLSTKNTILKAYDGRFKDLFQEVFDAEFAERFKAKGITYEHRLIDDMVACCMKWSGGFVWACKNYDGDVQSDTVAQGFGSLGLMTSVLMTPDGETVEAEAAHGTVTRHYRLHQKGKETSTNPIASIFAWTRGLKFRGEFDGTPDVVQFAEALERVCVETVEAGFMTKDLAILIGPDQPWLTTTQFLDKLDATLKAEMKS

SEQ ID NO: 122348 - DNA, 1218 bp, Syntrophus aciditrophicus SB
  CDS (1)..(1218): transl_table=11
atgaaatcaaaaattcgagtccatacacccattgttgaaatggacggcgacgaaatgacccgggtgatgtggcatatggtcaaggaaaaacttcttctgccttatctggatatacctgtggcttattacgatcttcatgtcagtcaccgcgacaaaaccgacgaccaggttaccgtcgacgcctcaaaagctattatgaaatacggcgtcggggtgaaatgcgccacaattacgcccaatgaagatcgcgttcgcgaatatggacttaaaaaagcatggaaaagcccgaatgcaacgattcgggccctgctggacgggaccgttttccgaaagcccatcccggtcaggaatatccgaccggcggtatcttcctggaagaagcccatcatcattggacgacatgcctatggagatgtctataataatatcgaaatacgggtggatggacctggaatggccgagctggtttttactcccctcatgggagagcccatcagacaaaccatccatttttttaaaaatcccggcattcttcagggaattcacaatacggacgaatccattgtcagcttcgcccgttcctgctttgccttcgcgctggaccagaaaatcgatctctggttcagcaccaaagacacgatctccaaaatctatgatggtcgatttcgggaggtcttcgctcaggaatatgaaacatcctggagggaagcttttcaaaacgccggcattgagtattttttcactttgattgacgacgccgtcgcacggatcatgaaatcggagggtggcatcctctgggcgcttaagaattatgacggagacgtcatgtcggacatgatcgcatcggcgaacggcagtctggccatgatgacttccgtccttgtttcgccatccggttatttcgaatatgaagcggcccacggcacagtgcagaaacattattacaagcatctcaagggtgaggaaacgtcctccaactccacggcgctgatttttgcctggtccggaggtcttcgaaaacgcggggaactcgatgcaacccccgacgtcgttttctttgccgatcaactggaggcggccacactggaaaccattgaatcaggaatcatgacgggagatctccttcttgtcgccgaccccaacccggacaatcgcaaggttaatacggaaagctttatcgaggcgattgccctcaatctggacagaaaactgatttag

SEQ ID NO: 122349 - protein, 405 aa, Syntrophus aciditrophicus SB
MKSKIRVHTPIVEMDGDEMTRVMWHMVKEKLLLPYLDIPVAYYDLHVSHRDKTDDQVTVDASKAIMKYGVGVKCATITPNEDRVREYGLKKAWKSPNATIRALLDGTVFRKPIPVRNIRPAVSSWKKPIIIGRHAYGDVYNNIEIRVDGPGMAELVFTPLMGEPIRQTIHFFKNPGILQGIHNTDESIVSFARSCFAFALDQKIDLWFSTKDTISKIYDGRFREVFAQEYETSWREAFQNAGIEYFFTLIDDAVARIMKSEGGILWALKNYDGDVMSDMIASANGSLAMMTSVLVSPSGYFEYEAAHGTVQKHYYKHLKGEETSSNSTALIFAWSGGLRKRGELDATPDVVFFADQLEAATLETIESGIMTGDLLLVADPNPDNRKVNTESFIEAIALNLDRKLI

SEQ ID NO: 122350 - DNA, 1224 bp, Novosphingobium aromaticivorans DSM 12444
  CDS (1)..(1224): transl_table=11
atggcgaagatcaaggtgaagaacccggtcgtcgagatcgacggcgacgaaatgacccggatcatctgggaatggatccgcgaacgcctgatcctcccctacctcgacatcgatctcaagtactacgacctctcggtccagaagcgcgacgagacgaacgaccagatcacgatcgattccgccaacgcgatcaagcagtatggcgtcggcgtgaagtgcgccacgatcacccccgacgaagcgcgcgtcgaggaattcaacctcaagtcgatgtggaagtcgccgaacggcacgatccgtaacatcctgggcggcgtggtgttccgcgaacccatcgtgatccagaacgtgccgcgtctggtccccggctggaccgaccccatcgtcgtcggccgtcacgctttcggcgaccagtaccgcgccaccgacttcgtcgtgccgggtccgggcaagctgcgcctcgtgtgggaaggcgacaatggcgaaaccatcgaccgcgaggtgttcaactacccctcgggcggcgttgccatggcgatgtacaacctcgacgattcgatccgcgacttcgcccgcgcctcgttcaactatggcctcggcctgggttggccggtgtacctttcgaccaagaacacgatcctcaaggcctatgacggccgcttcaaggatctgttccaggaagtgttcgacaccgaaggcttcaaggaaaagttcgccgccgccggcatcgtctacgaacaccgcctgatcgacgacatggtcgcctctgcgctcaagtggtcgggcaagttcgtctgggcgtgcaagaactacgacggcgacgtccagtcggacaccgtcgcgcagggcttcggctcgctcggcctgatgacctcggtcctgatgacgccggacggcaagaccgtcgaggctgaagccgcgcacggcaccgtgacccgtcactaccgccagcaccagcagggcaagcagacttcgaccaacccgatcgcgtcgatcttcgcctggacccgcggcctgatctatcgcggcaagttcgacgagacgccggaagtggtgaagttcgccgaaacgctggagcgcgtctgcatcgaaaccgtcgagagcggcaagatgaccaaggacctcgcgctgctcatcgggccggaccaggcctggatgaccaccgagaagttcttcgaggccatcgtcgagaacctcgagaccgaaatgaagaactgggcataa

SEQ ID NO: 122351 - protein, 407 aa, Novosphingobium aromaticivorans DSM 12444
MAKIKVKNPVVEIDGDEMTRIIWEWIRERLILPYLDIDLKYYDLSVQKRDETNDQITIDSANAIKQYGVGVKCATITPDEARVEEFNLKSMWKSPNGTIRNILGGVVFREPIVIQNVPRLVPGWTDPIVVGRHAFGDQYRATDFVVPGPGKLRLVWEGDNGETIDREVFNYPSGGVAMAMYNLDDSIRDFARASFNYGLGLGWPVYLSTKNTILKAYDGRFKDLFQEVFDTEGFKEKFAAAGIVYEHRLIDDMVASALKWSGKFVWACKNYDGDVQSDTVAQGFGSLGLMTSVLMTPDGKTVEAEAAHGTVTRHYRQHQQGKQTSTNPIASIFAWTRGLIYRGKFDETPEVVKFAETLERVCIETVESGKMTKDLALLIGPDQAWMTTEKFFEAIVENLETEMKNWA

SEQ ID NO: 122352 - DNA, 1212 bp, Desulfitobacterium hafniense Y51
  CDS (1)..(1212): transl_table=11
atgactaaaattcaaatgaatgtccccctggtggaaatggacggagatgaaatgacccggattatctgggactatatcaaggaaatcctgctttatccctatattgaattgaagaccgagtattatgatctgggtctgcagaaacgggatgaaaccgatgaccagatcaccgttgatgcagccttggccaccaaaaaatatggggtagcggttaaatgtgcgacgattacacccaatgcccagcgtgttgaggaatacaatctgaagcaaatgtggaaaagccccaatggaacgattcgggccttgctcgacggaacggtctttcgcgctcccgtcttggtagaagggatcaagcctttggtcaccacctggaagaaaccgattaccatcgctcgtcatgcctatggcgatatctataaaaatgtggagtatcgggtgggtggtcccggcaaggcggagctggttttctcaggtgaacatggggaggaatcccgtcaaaccatctgtaactttgaaggcaagggaattcttatgggcatgcataaccttgatagctccatcgagagctttgcccgggcgtgctttaattatgccctcgatgtaaaacaagacgtgtggtttgctaccaaggacacggtctccaagcaatatgatcatacctttaaagatattttccaggaagtttatgacaaggaatataaggaacgctttgcagcggctcagcttgaatacttctatactcttattgacgatgctgtggctcgggttattcgctctgaaggaggctatatctgggcttgtaagaactatgacggggatgtcatgtcggacatggtagcgactgctttcggaagcttggcgatgatgacttcggtattggtttcgcccgaagggaatttcgaatatgaggcggcccatggtacggtaacccgtcactattatcaacatcttaagggtgaagagacatcgaccaaccccattgcgacgatttttgcctggacaggcgcccttaagaaacggggagagctggatggtctgccggatttagccgactttgccgctcagttggaggaagcctcattaaagaccatcgaagccggaattatgaccaaggatctggctctgatctcggaactgcccaatatcaaaaccgtcaacaccaaggatttcctcgaagaaattaagaaaactctcgatacgctccgcccatag

SEQ ID NO: 122353 - protein, 403 aa, Desulfitobacterium hafniense Y51
MTKIQMNVPLVEMDGDEMTRIIWDYIKEILLYPYIELKTEYYDLGLQKRDETDDQITVDAALATKKYGVAVKCATITPNAQRVEEYNLKQMWKSPNGTIRALLDGTVFRAPVLVEGIKPLVTTWKKPITIARHAYGDIYKNVEYRVGGPGKAELVFSGEHGEESRQTICNFEGKGILMGMHNLDSSIESFARACFNYALDVKQDVWFATKDTVSKQYDHTFKDIFQEVYDKEYKERFAAAQLEYFYTLIDDAVARVIRSEGGYIWACKNYDGDVMSDMVATAFGSLAMMTSVLVSPEGNFEYEAAHGTVTRHYYQHLKGEETSTNPIATIFAWTGALKKRGELDGLPDLADFAAQLEEASLKTIEAGIMTKDLALISELPNIKTVNTKDFLEEIKKTLDTLRP

SEQ ID NO: 122354 - DNA, 1215 bp, Mesorhizobium sp. BNC1
  CDS (1)..(1215): transl_table=11
atggcgaagatcaaggtggacaatcctgtcgtcgaactggatggcgacgagatgacgcgcatcatctggcagctcatcaaggacaagctgatccacccttatctcgatatcgatctcaaatattacgacctcggcatccagaagcgcgacgaaaccgacgatcagatcaccatcgatgcggccaaagctatcaagaaatacggcgtcggcgtgaaatgcgccaccatcacaccggacgaagcgcgggtggaggaattcaagctcaagaagatgtggaagtcgcccaacggcacgatccgcaacatcctgggcggcgtcatcttccgcgagccgatcatctgccgcaacgtgccgcgcctggtgccaggctggacgaagccgatcgtggtcggccgccatgcctttggcgatcagtaccgcgcgacggatttcaagttccccggcaagggcaagctgtccatcaagtttgtcggcgaggacggagaggtaatcgagcacgaggtgtttgacgcgccgggctcgggcgtggccatggccatgtacaatctggacgactcgatccgcgactttgcgcgcgcctccttcaattacggcctgcagcgcgggttcccggtctatctttccaccaagaacacgatcctcaaggcctatgacgggcgcttcaaggacatcttccaggaaatctacgagacggagttcgaggccgccttcaaggaaaggaagctctggtacgagcaccggctgatcgacgacatggtggcggcgagcctcaaatggtccggcggctatgtctgggcgtgcaaaaactatgacggcgacgtgcagtcggacatcgtggcccagggcttcggctccctcggcctgatgacctccgtgctcatgacgccggacggcaagaccgtggaagccgaggccgcccacggcacggtgacgcgtcactaccgccagcaccagaagggcgaagagacctccacgaactccatcgcctccatcttcgcctggacgcgcgggcttgcccatcgcgcgaagctcgacggcaatgcggaactcaagaagttcgccgaaacgctggagcgtgtctgcgtggataccgtggaagcaggccacatgaccaaggacctcgcgctcctcatcgggccggatcagccttggctttctacgactggcttcctggacaagatcgacgagaatttgcagaaggccatggcggcctga

SEQ ID NO: 122355 - protein, 404 aa, Mesorhizobium sp. BNC1
MAKIKVDNPVVELDGDEMTRIIWQLIKDKLIHPYLDIDLKYYDLGIQKRDETDDQITIDAAKAIKKYGVGVKCATITPDEARVEEFKLKKMWKSPNGTIRNILGGVIFREPIICRNVPRLVPGWTKPIVVGRHAFGDQYRATDFKFPGKGKLSIKFVGEDGEVIEHEVFDAPGSGVAMAMYNLDDSIRDFARASFNYGLQRGFPVYLSTKNTILKAYDGRFKDIFQEIYETEFEAAFKERKLWYEHRLIDDMVAASLKWSGGYVWACKNYDGDVQSDIVAQGFGSLGLMTSVLMTPDGKTVEAEAAHGTVTRHYRQHQKGEETSTNSIASIFAWTRGLAHRAKLDGNAELKKFAETLERVCVDTVEAGHMTKDLALLIGPDQPWLSTTGFLDKIDENLQKAMAA

SEQ ID NO: 122356 - DNA, 1233 bp, Cytophaga hutchinsonii ATCC 33406
  CDS (1)..(1233): transl_table=11
atgagcggaaaaattaaagtagctaacccggttgttgaactggatggcgatgaaatgacacgaattatctggaaatttattaaagataaattgatccttccttacctggatttagatatcaagtattatgacttgggtatggaaaaccgcgatgctacaaacgatcaggttacaattgattctgcagaagcaattaaaaaatacagcgttggtatcaagtgtgctactattacaccggatgaacaacgtgttgaagaatttaaacttaaacaaatgtggaagtctccaaacggtaccatccgtaacatcttagatggtactgttttccgtgagccgatcgtttgtacaaacgtaccacgcttagttcctaactggactgctcctattgttgttggccgtcacgcatttggtgatcagtacaaagcaacggatttcgttgtaccgggcaaaggtaaattaaccatcaaatttgaaggtgaagacggaaaagtaattgagcacgaagtgtatcagttcaaaggtccgggtgttgcaatgggcatgtacaatacagaagagtcaatcagaggttttgcgtattcttgtttcaacatggccttaagcaaaaaatggcccttatacttatctactaaaaacaccattttaaagaaatacgatggtcgcttcaaagatatttttgaagagatctaccagaaagattacaaatccaagtttgaagctgcgggtattgtttacgaacaccgtttgattgatgacatggttgcttctgcattaaagtggaacggtaactttgtctgggcttgtaaaaactatgacggagacgttcaatcagatacggttgctcaaggtttcggttcattaggtttaatgacatcagtattggttacgccagacggttctacaatggaagcagaagcggcacacggtacagtaacgcgtcactacagagatcaccaggcaggtaaaccaacgtctacaaacccgatcgcgtctatcttcgcatggacaagaggtttggaattccgcggtaaaaaagatggtaaccaggaattggttaacttctgccagacacttgaaaaagtttgcgttgcaaccgttgaaagtggtaaaatgacaaaagatttagctgtttgtatccatggcaacaaagtgaaacatggcgaacactatttatatacagaagaatttttagctgcaattgatgacaatttgaaaattgcattaaagaagtaa

SEQ ID NO: 122357 - protein, 410 aa, Cytophaga hutchinsonii ATCC 33406
MSGKIKVANPVVELDGDEMTRIIWKFIKDKLILPYLDLDIKYYDLGMENRDATNDQVTIDSAEAIKKYSVGIKCATITPDEQRVEEFKLKQMWKSPNGTIRNILDGTVFREPIVCTNVPRLVPNWTAPIVVGRHAFGDQYKATDFVVPGKGKLTIKFEGEDGKVIEHEVYQFKGPGVAMGMYNTEESIRGFAYSCFNMALSKKWPLYLSTKNTILKKYDGRFKDIFEEIYQKDYKSKFEAAGIVYEHRLIDDMVASALKWNGNFVWACKNYDGDVQSDTVAQGFGSLGLMTSVLVTPDGSTMEAEAAHGTVTRHYRDHQAGKPTSTNPIASIFAWTRGLEFRGKKDGNQELVNFCQTLEKVCVATVESGKMTKDLAVCIHGNKVKHGEHYLYTEEFLAAIDDNLKIALKK

SEQ ID NO: 122358 - DNA, 1224 bp, Rhodococcus sp. RHA1
  CDS (1)..(1224): transl_table=11
atgtccaaaatcaaggttgagggcaccgtcgtcgaactcgacggcgacgagatgacgcgcattatctggcagttcatcaaagacaaactgatccatccttacctggatgtgaatctcgagtactacgacctcggcatcgaataccgggacgagaccgacgaccaggtgaccatcgacgcggccaacgccatcaagaagcacggcgtcggcgtcaagtgcgcgaccatcaccccggacgaggcacgcgtcgaggagttcggtctcaagaagatgtggcggtcgcccaacggcaccatccgcaacatcctcggtgggacgatcttccgcgcgccgatcatcatctccaacgttccgcgactggttccgggctggaccaagccgatcatcatcggccgtcacgccttcggcgaccagtaccgcgccaccgacttcaaggtccccggccccggcaaggtgatgatcacctacacgcccgaggacggcagcgagccgatcgagcacgagctggtgaacttccccgagggtggcggcgtcgtccaggggcagtacaacttcaccaagtccatcgaggacttcgcgcgtgcctcgctcaactacggcctgcagcagaactacccggtgtacctgtcgaccaagaacaccatcctcaaggcgtacgacggcgcgttcaaggacatcttccagcacgtctacgagaccgagttcaagtcggagttcgacgcggcaggactcacctacgagcaccgactcatcgacgacatggtcgcgtcggcgctcaagtgggagggcggctacgtctgggcctgcaagaactacgacggcgacgtccagtcggacaccgtcgcgcagggcttcgggtcgctcggcctcatgacctccgtgctgctgaccccggacggaaagacgtgtgaggccgaggccgcacacggcaccgtgacgcgtcacttccgtcagcaccagcagggcaagccgacgtccaccaaccccatcgcgtcgatcttcgcatggacccgtggactcgagcaccgcggcaagctggacaacacccccgacgtcatcggcttcgcccagaagctcgaagacgtggtcatcaagaccgtcgagggtggccagatgaccaaggacctcgcgatgctggtcggcggcgaccagggctacctgaccaccgaggagttcctcggtgcgctggacatcaacctccagaaggccatcgccgagcagtag

SEQ ID NO: 122359 - protein, 407 aa, Rhodococcus sp. RHA1
MSKIKVEGTVVELDGDEMTRIIWQFIKDKLIHPYLDVNLEYYDLGIEYRDETDDQVTIDAANAIKKHGVGVKCATITPDEARVEEFGLKKMWRSPNGTIRNILGGTIFRAPIIISNVPRLVPGWTKPIIIGRHAFGDQYRATDFKVPGPGKVMITYTPEDGSEPIEHELVNFPEGGGVVQGQYNFTKSIEDFARASLNYGLQQNYPVYLSTKNTILKAYDGAFKDIFQHVYETEFKSEFDAAGLTYEHRLIDDMVASALKWEGGYVWACKNYDGDVQSDTVAQGFGSLGLMTSVLLTPDGKTCEAEAAHGTVTRHFRQHQQGKPTSTNPIASIFAWTRGLEHRGKLDNTPDVIGFAQKLEDVVIKTVEGGQMTKDLAMLVGGDQGYLTTEEFLGALDINLQKAIAEQ

SEQ ID NO: 122360 - DNA, 1218 bp, Hyphomonas neptunium ATCC 15444
  CDS (1)..(1218): transl_table=11
atggcgaagatcaaggtcaaaaacccgattgtcgagatggacggggacgagatgacccggatcatctggcaactcatcaaagacaagctgatccacccctacctcgatatcgacctgaaatattacgacctctcgatcgagaaacgcgacgagaccgacgaccagatcaccatcgactcggccgaagccaccaagaaatacggcgtcgccgtcaagtgcgcgaccatcacgccggacgaagcccgcgttgaggaattcggtctgaagaagatgtggaagtcgcccaacggcaccatccgcaacatccttggcggcgttgtcttccgcgagccgatcgtcatctccaacatcccgcgcctcgtgcccggctggaccaagccagtcatcatcggccgccatgctttcggcgaccagtaccgcgccactgacttcctcgtccccggcaagggcaagctgacgatgaaattcgaaggcgaagacggcaaggtcatcgaaaaggaaatcttcgatttcccgagcgccggcatcgccatgggtatgtacaaccttgacgactcgatccgcgacttcgcccgcgcctcgttcaactatggcctccagcgcaaactgccggtctacctctccaccaagaacacgatcctgaaagcctatgacggccgcttcaaggacatcttccaggaagagtgggacaaagagttcaaagccaagttcgccgaattcaaaggcacctacgagcaccgcctcatcgacgacatggtcgcggctgccatgaaatggtcgggcggctatgtctgggcctgtaagaactatgacggcgacgttcagtccgacacggttgctcaaggttatggctcgctcggtctgatgacgtcggtcctgctcagccccgatggcaagaccgtcgaagccgaagccgcccacggcaccgtcacccgccactaccgcgcccaccagaagggcgaagccacttcgaccaactcgatcgcgtcgatctacgcctggacgcagggcctcgaccatcgcggccgcatggacgagacccccgaagtgcgcaagttcgcccagacgcttgagaaaaccatcatcaagaccgtcgaagccggcttcatgaccaaagacctcgccctcctcgtcggccccgaccagggctatctgacgaccgaaggcttcatcgaaaaagtcgcccagaacctcgaaatcgagatgggcaaagcgtaa

SEQ ID NO: 122361 - protein, 405 aa, Hyphomonas neptunium ATCC 15444
MAKIKVKNPIVEMDGDEMTRIIWQLIKDKLIHPYLDIDLKYYDLSIEKRDETDDQITIDSAEATKKYGVAVKCATITPDEARVEEFGLKKMWKSPNGTIRNILGGVVFREPIVISNIPRLVPGWTKPVIIGRHAFGDQYRATDFLVPGKGKLTMKFEGEDGKVIEKEIFDFPSAGIAMGMYNLDDSIRDFARASFNYGLQRKLPVYLSTKNTILKAYDGRFKDIFQEEWDKEFKAKFAEFKGTYEHRLIDDMVAAAMKWSGGYVWACKNYDGDVQSDTVAQGYGSLGLMTSVLLSPDGKTVEAEAAHGTVTRHYRAHQKGEATSTNSIASIYAWTQGLDHRGRMDETPEVRKFAQTLEKTIIKTVEAGFMTKDLALLVGPDQGYLTTEGFIEKVAQNLEIEMGKA

SEQ ID NO: 122362 - DNA, 1212 bp, Rhizobium leguminosarum bv. viciae 3841
  CDS (1)..(1212): transl_table=11
atgaacaagatcaaggtcgccaatcccgtcgccgatctcgacggcgatgaaatgacgcgcatcatctggcagctcatcaaggataagctgatccatccgtatcttgacctcgacatcgactatttcgacctctcggtcgaaaaccgcgacgccaccaacgaccaggtcaccgtcgatgccgccaacgccatcaagaagtacggcgtcggcatcaagtgcgcgacgatcacgccggatgaagcccgcgtcaaggaattcaacctcaaggaaatgtggaagagcccgaacggcacgatccgcaacatcctcggcggagttatcttccgcgaaccgatcatctgcaagaacgtgccgcgcctggttcccggctggaccaagccgatcgtcgtcggccgccatgccttcggcgaccagtaccgcgccaccgatttcaagttccccggcaagggcaagctgacgatcaagttcgtcggcgaagacggcacagtcatcgagaaggaagtcttcaacgcaccgggcgccggcgttgccatggccatgtacaacctcgacgaatcgatccgtgaattcgcccgcgcttcgatgatgtacggcctgatgcgcaagtggccggtctatctgtcgaccaagaacaccatcctcaaggcctatgacggccgcttcaaggacattttcgaggaagtctacgagaccgaattcaaggatcagttcaaggaagccggcatcacctacgaacaccgcctgatcgacgacatggtcgcctcggcgctcaagtggtcgggcggttacgtctgggcctgcaagaactatgacggcgacgtccagtccgacaccgtcgctcaaggcttcggctcgctcggcctgatgacctcggttctgctgacgcccgacggcaagacggtcgaagccgaagccgctcacggcacggtcacccgccactaccgccagcaccagaagggccaggaaacctcgacgaactcgatcgcctcgatcttcgcctggacccgcggcctagcgcaccgcgccaagctcgacgacaatgccgagcttgcccgcttcgccgcgacgctcgaaaaggtctgcgtcgacaccgtcgaatccggtttcatgaccaaggacctggcgctgctgatcggccccgaccagccgtggctctcgaccaccgccttcctcgacaagatcgaccagaacctgcagaaggccatggcgtaa

SEQ ID NO: 122363 - protein, 403 aa, Rhizobium leguminosarum bv. viciae 3841
MNKIKVANPVADLDGDEMTRIIWQLIKDKLIHPYLDLDIDYFDLSVENRDATNDQVTVDAANAIKKYGVGIKCATITPDEARVKEFNLKEMWKSPNGTIRNILGGVIFREPIICKNVPRLVPGWTKPIVVGRHAFGDQYRATDFKFPGKGKLTIKFVGEDGTVIEKEVFNAPGAGVAMAMYNLDESIREFARASMMYGLMRKWPVYLSTKNTILKAYDGRFKDIFEEVYETEFKDQFKEAGITYEHRLIDDMVASALKWSGGYVWACKNYDGDVQSDTVAQGFGSLGLMTSVLLTPDGKTVEAEAAHGTVTRHYRQHQKGQETSTNSIASIFAWTRGLAHRAKLDDNAELARFAATLEKVCVDTVESGFMTKDLALLIGPDQPWLSTTAFLDKIDQNLQKAMA

SEQ ID NO: 122364 - DNA, 1239 bp, Mycobacterium avium 104
  CDS (1)..(1239): transl_table=11
atgtccaagcccgccaacacgtccaagatcaaggtcaagggccgcgtcgtcgagctcgacggtgacgagatgacccgggtcatctggaagatgatcaaggagaacttgatccttccctacctcgacatcgacctggactactacgacctgggcatcgagcaccgcgaccgcaccgacgaccaggtgacgatcgacgcggcgtatgccatcaagaagcacggcgtgggcgtcaagtgcgcgacgatcacccccgacgaggcgagggtccgggagttcaacctcaagaggatgtggctgtccccgaacgggacgatccggaacatcttgggcggcaccatcttccgcgagccgatcgtgatatccaatgtgccgcggctggttccgggctggagcaagccgatcgtcatcggccgccacgcattcggcgaccagtaccggtcgaccaacttcaaggtggacaagccgggcaccgtcgcgatcaccttcactcccgccgacggcagcgagccgatcgtgcacgagatggtgtccatccccgaggacggcggggtggtgatggggatgtacaacttccgggagtcgatccgcgacttcgcccgcgcgtcgttcaagtacggcctgaacgccaaatggccggtgtacctgtcgaccaagaacaccatcctcaaggcctacgacggcatgttcaaggacgagttccagcgcatctacgacgaggaattcaaggagcagttcgaagcggaggggctgacctacgaacaccggctgatcgacgacatggtggcggcctgcctcaaatgggagggcggctacgtgtgggcttgcaagaactacgacggcgacgtccaatccgacgcgatagcacagggttacggctcgctggggctgatgacctcggtgctgatgaccgccgacggcaaaacggtcgaggccgaggccgcgcacggcaccgtcacccggcacttccgtcagtaccaggccggcaagccgacctcgaccaacccgatcgcctcgatcttcgcctggacgcgcgggctggcgcaccgcggcaagctggacgacacccccgaggtgatcgagttcgcgcagaccctggaacgcgtcgtcgtctccaccgtggagagcggcaagatgaccaaggacctcgccatcctgatcggccccgaccaaaagtggcagcagagcgaggaattcctcaactcgatcgccgagaacctgcggcgggagctgactaactag

SEQ ID NO: 122365 - protein, 412 aa, Mycobacterium avium 104
MSKPANTSKIKVKGRVVELDGDEMTRVIWKMIKENLILPYLDIDLDYYDLGIEHRDRTDDQVTIDAAYAIKKHGVGVKCATITPDEARVREFNLKRMWLSPNGTIRNILGGTIFREPIVISNVPRLVPGWSKPIVIGRHAFGDQYRSTNFKVDKPGTVAITFTPADGSEPIVHEMVSIPEDGGVVMGMYNFRESIRDFARASFKYGLNAKWPVYLSTKNTILKAYDGMFKDEFQRIYDEEFKEQFEAEGLTYEHRLIDDMVAACLKWEGGYVWACKNYDGDVQSDAIAQGYGSLGLMTSVLMTADGKTVEAEAAHGTVTRHFRQYQAGKPTSTNPIASIFAWTRGLAHRGKLDDTPEVIEFAQTLERVVVSTVESGKMTKDLAILIGPDQKWQQSEEFLNSIAENLRRELTN

SEQ ID NO: 122366 - DNA, 1218 bp, Magnetospirillum magnetotacticum MS-1
  CDS (1)..(1218): transl_table=11
atgaagaagatcaaagtcgcaaacccgatcgtcgagctggacggcgacgagatgacccggatcatctggaagttcatcaaggacaagctgatcctgccctatctggatgtggatctgaaatactacgatctgggcatcgaataccgcgacaagaccgacgacaaggtgacggtcgaggcctcggaggccatcaagaagtatggcgtcggcgtcaaatgcgccaccatcacccccgacgaggcgcgggtgaaggaattcaacctcaagaagatgtggaagtcgcccaacggcaccatccgcaacattcttgacggcaccgtgttccgcgagccgatcatctgcaagaacgtgccgcgcctggtgcccggctggaccaagcccatcgtcatcggccgccacgccttcggcgaccagtacaaggccaccgacttcaccgtccccggccccggcaagctgaccatcaagttcgtcggcaccaatggcgagaccatcgagcacgaagtcttcgacttccccggcgcgggcgtcgccatgggcatgtacaatctggacgagtccatctacggcttcgcccgggcctgcctgaattatggccgccagaagaagtggccggtttatctgtcgaccaagaacaccattctcaaggcctatgacggccgcttcaaggacatcttccaggaagtctacgagaaggaattcaaggccgattacgacaagctgggcatcacctacgagcatcgcctgatcgacgacatggtcgcctcggcgctcaagtggtcgggcgaattcgtctgggcttgcaagaattacgacggcgacgtgcagtccgataccgtggcccagggcttcggctctctcggcctgatgacctcggtgctgatgagccccgacggcaaggtggtcgaggccgaggccgcccacggcacggtgacgcggcattaccgcgaacaccagaagggcaaggaaacctccaccaaccccatcgcgtccatcttcgcctggacgcggggcctgttctaccgcgcccagttcgacaacacccccgaagtggccaatttcgcccaggccctcgaggaagtgtgcgtggaaacggtggaatccggcttcatgaccaaggacctggccatcctgatcggccccggccaatcctggctgaccacccagcagttcctggacaagctggacgagaacctgaagaagcgcatggccctggcctga

SEQ ID NO: 122367 - protein, 405 aa, Magnetospirillum magnetotacticum MS-1
MKKIKVANPIVELDGDEMTRIIWKFIKDKLILPYLDVDLKYYDLGIEYRDKTDDKVTVEASEAIKKYGVGVKCATITPDEARVKEFNLKKMWKSPNGTIRNILDGTVFREPIICKNVPRLVPGWTKPIVIGRHAFGDQYKATDFTVPGPGKLTIKFVGTNGETIEHEVFDFPGAGVAMGMYNLDESIYGFARACLNYGRQKKWPVYLSTKNTILKAYDGRFKDIFQEVYEKEFKADYDKLGITYEHRLIDDMVASALKWSGEFVWACKNYDGDVQSDTVAQGFGSLGLMTSVLMSPDGKVVEAEAAHGTVTRHYREHQKGKETSTNPIASIFAWTRGLFYRAQFDNTPEVANFAQALEEVCVETVESGFMTKDLAILIGPGQSWLTTQQFLDKLDENLKKRMALA

SEQ ID NO: 122368 - DNA, 1221 bp, Bifidobacterium longum DJO10A
  CDS (1)..(1221): transl_table=11
atggccaaaatcaaggtcgaaggcactgtcgtcgaactcgacggcgacgagatgacccgcgtgatctggaaggacatcaaggatcgtctgatcctgccgtacctcgacgtgaacctcgactactacgatctgggcatcgagcaccgcgacgagaccgatgaccaggtgaccatcgacgccgcccacgccatccagaagcaccatgtcggtgtcaagtgcgccaccatcacccccgatgaggcccgagtcaaggaattcggtctcaagaagatgtggaagtcccccaacggcaccatccgcaacatcctgggcggcacgatcttccgcgagccgattgtgatgagcaacgtgcctcgtctggtgcccggctggaccaagccgatcgtcgtagcccgtcacgcattcggcgaccagtacaaggccaccgatttcaaggttccgggagccggccagctgaccgtcaccttcactccggacgatggctccgagccgattcagcacgtggtctacaactacggcgaagacggcggcgtggcccaggtgcagtacaacgtcaacgattcgatccgcggtttcgctcgcgcctgcttcaactacggcctgatgcgtcattacccggtgtacttgtccaccaagaacacgattttgaaggcctacgacggccagttcaaggacatctttgccgaggtgttcgagaccgaatacaaggacaagtacgccgaggccggcctgacttacgagcaccgcctgatcgacgacatggtggccagctccctgaagtggcacggcggttacatctgggcctgcaagaactacgatggcgatgtgcagtccgactccgtggcccagggcttcggttcgctgggcctcatgacctccgtgctcatgaccccggacggccagaccgtcgaggccgaagcggcgcacggcaccgtgacccgtcactaccgccgctggcagaagggcgagaagacctccaccaacccgatcgcctccatcttcgcgtggaccggcggccttaagcaccgcgccgatctggacggcacgcccgaagtccgtcacttcgccaagacgctggagaaggtcatcgtcgacaccgttgaaggcggtcagatgaccaaggatctggccatgctcatcggcccggacgaaccgtggctcgacaccgacggcttcatgaacgcgctggacgagaacctggccaaggctctggccgagtaa

SEQ ID NO: 122369 - protein, 406 aa, Bifidobacterium longum DJO10A
MAKIKVEGTVVELDGDEMTRVIWKDIKDRLILPYLDVNLDYYDLGIEHRDETDDQVTIDAAHAIQKHHVGVKCATITPDEARVKEFGLKKMWKSPNGTIRNILGGTIFREPIVMSNVPRLVPGWTKPIVVARHAFGDQYKATDFKVPGAGQLTVTFTPDDGSEPIQHVVYNYGEDGGVAQVQYNVNDSIRGFARACFNYGLMRHYPVYLSTKNTILKAYDGQFKDIFAEVFETEYKDKYAEAGLTYEHRLIDDMVASSLKWHGGYIWACKNYDGDVQSDSVAQGFGSLGLMTSVLMTPDGQTVEAEAAHGTVTRHYRRWQKGEKTSTNPIASIFAWTGGLKHRADLDGTPEVRHFAKTLEKVIVDTVEGGQMTKDLAMLIGPDEPWLDTDGFMNALDENLAKALAE

SEQ ID NO: 122370 - DNA, 1218 bp, Sulfitobacter sp. EE-36
  CDS (1)..(1218): transl_table=11
atgaccaagatcaaagtggaaaacccgatcgttgagctcgacggtgatgagatgacccgcatcatgtgggatttcattaagaaaaagctgatccttccctatctcgatgtggatctgaaatattacgatctggggatggaggtccgcgacgagaccaacgaccagatcaccatagacgcggcccatgcgatcaaggaatacggcgttggcgtcaaatgcgcgaccatcacccctgacgaggcccgggtcgaggaattcggcctgaaagagatgtggcgctcccccaacgggacgatccgtaacattctgggcggcgtgattttccgtcagccgatcatctgcaagaacgtcccccgccttgtgcccggttggaccaagccgattgtcgtgggccgtcatgcctatggcgaccagtataaagcgaccgatttcaaatttcccggcaagggcaagctgaccctgaaattcgtcggcgaagacgggacagagattgaacgcgagcttttcgacgcccccgacgccggtgtcgtgatggggatgtacaaccttgataaatccatcatcgacttcgcccgcgcctcgctgaactacggtttgaaccttggctggccggtgtatctgagcaccaagaacacgatcctcaagcagtatgacggccgtttccttgagctgttccagcacatctacgagaccgagttcgaagataaattcaaagcggcgggcattacctatgaacaccgtctgatcgacgacatggtcgcctgcgcgatgaagtggaacggcggctatgtctgggcctgcaagaactatgacggcgacgtgcagtcagacaccgttgcgcaggggttcggctcgctcgggttgatgacatccgtgctgatgacccccgatggccagacggtcgaggctgaagccgcccacggcacggtcacccgccactatcgtcaacaccagaagggcgaggaaacctcgaccaactccatcgcgtcgatctacgcatggaccggcgggctgaagcaccgcggcaagctggatggcaacgccgagctgacacgctttgccgagacgctcgagaaaaccgtggtggacacagtggaatcgggtttcatgaccaaggacctcgcgctgctggtcggccctgaccaaggctggctgacgacaatgggcttccttgaaaaagtggacgagaacctcgacaaggcgcttggcgcgcagtaa

SEQ ID NO: 122371 - protein, 405 aa, Sulfitobacter sp. EE-36
MTKIKVENPIVELDGDEMTRIMWDFIKKKLILPYLDVDLKYYDLGMEVRDETNDQITIDAAHAIKEYGVGVKCATITPDEARVEEFGLKEMWRSPNGTIRNILGGVIFRQPIICKNVPRLVPGWTKPIVVGRHAYGDQYKATDFKFPGKGKLTLKFVGEDGTEIERELFDAPDAGVVMGMYNLDKSIIDFARASLNYGLNLGWPVYLSTKNTILKQYDGRFLELFQHIYETEFEDKFKAAGITYEHRLIDDMVACAMKWNGGYVWACKNYDGDVQSDTVAQGFGSLGLMTSVLMTPDGQTVEAEAAHGTVTRHYRQHQKGEETSTNSIASIYAWTGGLKHRGKLDGNAELTRFAETLEKTVVDTVESGFMTKDLALLVGPDQGWLTTMGFLEKVDENLDKALGAQ

SEQ ID NO: 122372 - DNA, 1215 bp, Roseovarius nubinhibens ISM
  CDS (1)..(1215): transl_table=11
atgtccaagatcaaggtagccaacccggtcgtcgaactcgacggcgatgaaatgacccggatcatctgggacttcatcaagaagaaactcatcctgccctatctcgacgtggatctgctctactacgatctcggcatcgaagagcgcgaccgcaccgatgaccagatcaccatcgacgccgccaataagatcaaggaaatcggcgttggcgtgaaatgcgccaccatcacccccgatgaaggccgggtcgaagagttcggcctcaagaagatgtggcgcagccccaacggcaccatccgcaacatcctcggcggtgtcgtctttcgcgagccgatcatctgctcgaacgtgccgcgtctggtgccgggctggacccagcccatcgtcatcggtcgtcacgcctttggtgaccagtaccgcgccaccgacatgaaattccccggcccgggcaagctgtcgatgaaattcgtcggcgaagacggcaccgtgatggaagaagaggtgttcgacgcgccctcctccggcatctacatgggcatgtacaacctcgaccagtcgatcatcgactttgcccgcgcctcgttcaactacgggctcaagcgcggctacccggtctatctctcgaccaagaacaccatcctcaagcaatatgatggtcagttcatgatcctcttccagaaggtgttcgacgaagagttcaaggaccagttcgaagaggccggcctcacctatgagcaccgcctgatcgacgacatggtcgcctcggcgatgaaatggtcgggcggctatgtctgggcctgcaaaaactacgatggcgacgtgcagtcggacaccgtggcacagggctttggctcgctcggcctgatgacctcgcagctgatgacgccggatggaaagatcgtcgaggccgaagcggcccacggcaccgtcacccgtcactaccgtcagcaccagaagggcgaagagacctcgaccaactcgatcgcgtcgatctttgcctggaccggcggcctcaagcaccgcgcgaaactcgacgagaacgcgccgctcaagacctttgccgaaacgctggaaaaagtcatcgtggacaccgtcgaaagcggccacatgaccaaggacctggcgctgctcgtcggccccgatcagggctggctcaccaccatgggcttcctcgagaaagtcgacgaaaacctcggcaaggccctcaagggctaa

SEQ ID NO: 122373 - protein, 404 aa, Roseovarius nubinhibens ISM
MSKIKVANPVVELDGDEMTRIIWDFIKKKLILPYLDVDLLYYDLGIEERDRTDDQITIDAANKIKEIGVGVKCATITPDEGRVEEFGLKKMWRSPNGTIRNILGGVVFREPIICSNVPRLVPGWTQPIVIGRHAFGDQYRATDMKFPGPGKLSMKFVGEDGTVMEEEVFDAPSSGIYMGMYNLDQSIIDFARASFNYGLKRGYPVYLSTKNTILKQYDGQFMILFQKVFDEEFKDQFEEAGLTYEHRLIDDMVASAMKWSGGYVWACKNYDGDVQSDTVAQGFGSLGLMTSQLMTPDGKIVEAEAAHGTVTRHYRQHQKGEETSTNSIASIFAWTGGLKHRAKLDENAPLKTFAETLEKVIVDTVESGHMTKDLALLVGPDQGWLTTMGFLEKVDENLGKALKG

SEQ ID NO: 122374 - DNA, 1215 bp, Oceanicola batsensis HTCC2597
  CDS (1)..(1215): transl_table=11
atgagcaagatcaaggtcgaaaatccgatagtcgaaatggacggcgacgagatgacccgcatcatctgggccttcatcaaggaaaagctgatcgagccctatctggacatcgacctgctctactacgacctcggcatcgaggaacgcgacaggaccgaggaccagatcaccatcgacgccgcggaaaagaccaaggaggtcggcgtggcggtcaaatgcgccacgatcacgcccgacgaggcgcgggtcgaggaattcggcctcaagaagatgtggaaatcgcccaacggcacgatccgcaacatcctgggcggggtggtcttccgccagcccatcatctgccgcaacgtgccccgcctcgtccccggctggaccaagcccatcgtcatcggccgccacgccttcggcgaccagtacaaggccaccgacatgaagttccccggccccggcaaactgacgatgaaattcgtcggcgacgacgggaccgagatcgaacacgaagtctatcaggccccctcgagcggcgtctacatgggcatgtacaacctcgacgactcgatccgcgacttcgcgcgcgcctcgctcaactacgggctgcagctgggctggccggtctacctgtcgacgaagaacaccatcctcaagcaatacgatggccagttcctgcagatcttccaggaggtgttcgagcaggagttcgaggaagagttcaagaaaaagaagatctggtacgagcaccgcctgatcgacgacatggtggcctgctgcatgaagtggaacggcggtttcgtctgggcctgcaagaactacgacggcgacgtgcagtccgacacggtggcgcagggcttcggctcgctcggcctgatgacctcgcaactgcgcacccccgatggcaagatcgtcgaggccgaggccgcgcacggcacagtcacccgccattatcgccaacatcaggccggagaggcgacctcgaccaactcgatcgcctcgatctacgcctggaccggcgggctcaagcaccgggccgaactggacggcaacgccgccctgctgaagtttgcgatgacgctggaaaaggtgatcgtcgagacggtggaggacgggcacatgaccaaggacctggcccttctggtcggcccggatcagggatggctgaccaccatggggttccttgagaagatcgacgagaacctggacaaggccctggccggataa

SEQ ID NO: 122375 - protein, 404 aa, Oceanicola batsensis HTCC2597
MSKIKVENPIVEMDGDEMTRIIWAFIKEKLIEPYLDIDLLYYDLGIEERDRTEDQITIDAAEKTKEVGVAVKCATITPDEARVEEFGLKKMWKSPNGTIRNILGGVVFRQPIICRNVPRLVPGWTKPIVIGRHAFGDQYKATDMKFPGPGKLTMKFVGDDGTEIEHEVYQAPSSGVYMGMYNLDDSIRDFARASLNYGLQLGWPVYLSTKNTILKQYDGQFLQIFQEVFEQEFEEEFKKKKIWYEHRLIDDMVACCMKWNGGFVWACKNYDGDVQSDTVAQGFGSLGLMTSQLRTPDGKIVEAEAAHGTVTRHYRQHQAGEATSTNSIASIYAWTGGLKHRAELDGNAALLKFAMTLEKVIVETVEDGHMTKDLALLVGPDQGWLTTMGFLEKIDENLDKALAG

SEQ ID NO: 122376 - DNA, 1221 bp, Erythrobacter sp. NAP1
  CDS (1)..(1221): transl_table=11
atgcagaaaattcaggtcaaaaacccgattgtcgaactcgacggcgacgagatgacgaagatcatctggcagtggatccgcgaaaggctgatcctgccttatctcgacgttgacctgaagtattacgacctctcggtcgaaaagcgcgacgagaccgacgaccagatcaccatcgatgcagccaacgcgatcaaggaatatggcgttggcgtgaaatgcgcgacgattactcctgacgaagcgcgcgtcgaggaatttgacctcaagaaaatgtggaagtcgccgaacggcaccatccgcaacatccttggcggcgttgttttccgtgaaccgatcgtgatcgacaatgtcccgcgcctcgtaccgggctggactcacccgatcgtcgtcggccgtcacgcatttggcgaccagtaccgcgcgaccgacacgctgatcccgggaccgggcaagctgcgcatggtctaccacggcgatgacgggaccgagatcgacctcaacgttttcgacttcccgagcgccggcatcgccatgtcgatgtacaacctcgacgattcgatccgcgacttcgcgcgcgcttcgatgaattacggcctcgaccgcaagtggccggtctacctgtcgaccaagaacacgatcatgaaagcctatgatggccgcttcaaggatctgttccaggaagtgttcgacgccgaattcgccgacaagttcaaggaagccggcatcacctatgagcaccgcctgatcgacgacatggtcgcatcggcgctcaagtggtcgggcaagttcgtctgggcctgtaagaactatgatggcgacgttcagtccgacactgttgcgcaagggttcggatcgctcggcctgatgacttcggtcctgatgacgcccgatggcaagactgtcgaagccgaagccgcacacggcaccgtcacccgccactatcgccagcaccagcagggcaaggcgacctcgaccaacccgatcgcctcgatcttcgcgtggacccgcggcctcatgtatcgcggcaagttcgacgacacccccgacgtggtgcgctttgccgaaacgcttgagcgcgtgtgcatcgaaacggtcgagaacggccagatgaccaaggacctcgctctgctcatcggtccgagccagaactggctcactaccgagcagttcttcgaggcaatcgtgcagaacctcgaaaaggaaatgcagagctgggcctga

SEQ ID NO: 122377 - protein, 406 aa, Erythrobacter sp. NAP1
MQKIQVKNPIVELDGDEMTKIIWQWIRERLILPYLDVDLKYYDLSVEKRDETDDQITIDAANAIKEYGVGVKCATITPDEARVEEFDLKKMWKSPNGTIRNILGGVVFREPIVIDNVPRLVPGWTHPIVVGRHAFGDQYRATDTLIPGPGKLRMVYHGDDGTEIDLNVFDFPSAGIAMSMYNLDDSIRDFARASMNYGLDRKWPVYLSTKNTIMKAYDGRFKDLFQEVFDAEFADKFKEAGITYEHRLIDDMVASALKWSGKFVWACKNYDGDVQSDTVAQGFGSLGLMTSVLMTPDGKTVEAEAAHGTVTRHYRQHQQGKATSTNPIASIFAWTRGLMYRGKFDDTPDVVRFAETLERVCIETVENGQMTKDLALLIGPSQNWLTTEQFFEAIVQNLEKEMQSWA

SEQ ID NO: 122378 - DNA, 1221 bp, Erythrobacter sp. SD-21
  CDS (1)..(1221): transl_table=11
atggccaagatcaaggtagccaacccggtcgtcgaactcgacggcgacgaaatgacgaagatcatctggaagtggatccgcgaacggctgatccttccttacctcgacgtcgacctcaaatattacgacctctcgatcgagaagcgcgacgagaccgacgaccagatcacggtcgacgcagccaacgcgatcaaggaacacggcgtcggcgtgaagtgcgccaccattacgcccgacgaagcgcgcgtcgaggaattcgacctcaagaagatgtggcgctcgcccaacggcaccatccgcaacattctcggcggcgtggtcttccgcgaaccaatcgtcatcgacaacgtgccgcgtctcgtccccggctggaccgatcccatcgtggtcggccgtcacgccttcggtgaccagtaccgcgccaccgacaccctcatcccgggtgcgggcaagctgcgcctcgtcttcgaaggcgagaacggcgagaatatcgatctcgacgtgttcgaattccagagccccggcgttgccatggcgatgtacaacctcgacgacagcatccgcgatttcgcgcgcgcaagcttccagtacggcctcgaccgcaagtggccggtgtacctgtcgaccaagaacaccatcctcaagaagtacgatggacgcttcaaggacctgttccaggaaatcttcgacgccgagtacaaggaccagttcgaaaagcacgggatcacttacgaacaccgcctgatcgacgacatggtcgcagccgccctcaagtggaacggcaagtttgtctgggcctgcaagaactacgacggtgacgtgcagtcggacatcgtcgcacagggctttggctcgctcggcctgatgacctcggtcctgatgacgcccgacggcaaaaccgtcgaagcggaagcggcgcacggcactgtcacccgtcactatcgccagcaccagcagggcaaggcgacctccaccaacccgatcgccagcattttcgcatggacgcgcggcctcatgtatcgcggcaagttcgacaacacgcccgaagtggtcaagttcgccgagacactcgagcaggtctgcatcaagaccgtcgaaagcggcaagatgacgaaggacctcgcgctgctcatcggtccggaccagagctggatgacaaccgaacagttcttcgaagccattgtggaaggcctcgaagccgaaatggcgaattggggctga

SEQ ID NO: 122379 - protein, 406 aa, Erythrobacter sp. SD-21
MAKIKVANPVVELDGDEMTKIIWKWIRERLILPYLDVDLKYYDLSIEKRDETDDQITVDAANAIKEHGVGVKCATITPDEARVEEFDLKKMWRSPNGTIRNILGGVVFREPIVIDNVPRLVPGWTDPIVVGRHAFGDQYRATDTLIPGAGKLRLVFEGENGENIDLDVFEFQSPGVAMAMYNLDDSIRDFARASFQYGLDRKWPVYLSTKNTILKKYDGRFKDLFQEIFDAEYKDQFEKHGITYEHRLIDDMVAAALKWNGKFVWACKNYDGDVQSDIVAQGFGSLGLMTSVLMTPDGKTVEAEAAHGTVTRHYRQHQQGKATSTNPIASIFAWTRGLMYRGKFDNTPEVVKFAETLEQVCIKTVESGKMTKDLALLIGPDQSWMTTEQFFEAIVEGLEAEMANWG

SEQ ID NO: 122380 - DNA, 1254 bp, Pinus pinaster
  CDS (1)..(1254)
atggcgtcggagaagatcaaggtggagaatcccatcgtcgagatggacggggatgaaatgaccagggtcatatggacaatgattaaggacaagcttatttttccatttgtagagctggatattaagtattttgatttggggcttccccatcgcgatgctacagatgacaaggttacaattgagagtgcagaagccacattaaaatacaatgtggccatcaagtgtgcaactatcacaccagatgaagctcgagtcaaggaattcgacttgaaggctatgtggaagagtcccaatgggactatccgtaacattttgaatggtaccgtgttcagagagccaatcttatgtaagaacgtccctaagcttgttccaggatggacaaaggccatatgtattggaagacatgcttttggtgaccaatacaaagcaacagatacagttatcaagggccctggcaagctgaaattagttttcgttccagagaaagatggtgaaacatctgagttagaggtgtaccccttcaaaggtgatggaggagtagcattagccatgtacaatactgatgagtcgatacgttcatttgctgaggcttcaatgaccgtggcctatgagaagaagtggccactctaccttagtacgaaaaatacaattttgaaaaaatacgatggaaggttcaaagatattttccaagaggtctatgaatccaactggaaaagtaaatatgaaaaagcaggaatctggtatgaacataggcttatcgatgacatggtagcctatgcattaaagagtgaagggggctatgtatgggcgtgcaaaaattacgatggtgatgtacagagtgatttcttggcacagggatttggatcccttggcttgatgacgtctgtactggtttgtcctgatggaaaaactatcgaggccgaagcagctcatggcactgttactcggcattaccgcgtacatcaaaagggaggtgaaactagcacgaacagcattgcttctatttttgcatggacacgtgggcttgcacacagggcaaaactggacggaaatgcaaggctacttgaatttgcagagaagctggaagttgcttgtgtaggtactgttgaggccggaaaaatgacaaaagacttggcgctaattattcacggttccaacctttccagggagcactacctaaacactgaagagtttattgacgcagtggcagccgatctgaaaataagactttctgcaaaaccaaagagttcttaa

SEQ ID NO: 122381 - protein, 417 aa, Pinus pinaster
MASEKIKVENPIVEMDGDEMTRVIWTMIKDKLIFPFVELDIKYFDLGLPHRDATDDKVTIESAEATLKYNVAIKCATITPDEARVKEFDLKAMWKSPNGTIRNILNGTVFREPILCKNVPKLVPGWTKAICIGRHAFGDQYKATDTVIKGPGKLKLVFVPEKDGETSELEVYPFKGDGGVALAMYNTDESIRSFAEASMTVAYEKKWPLYLSTKNTILKKYDGRFKDIFQEVYESNWKSKYEKAGIWYEHRLIDDMVAYALKSEGGYVWACKNYDGDVQSDFLAQGFGSLGLMTSVLVCPDGKTIEAEAAHGTVTRHYRVHQKGGETSTNSIASIFAWTRGLAHRAKLDGNARLLEFAEKLEVACVGTVEAGKMTKDLALIIHGSNLSREHYLNTEEFIDAVAADLKIRLSAKPKSS

SEQ ID NO: 122382 - DNA, 1263 bp, Populus tremula x Populus alba
  CDS (1)..(1263)
atggctttcgaaaagatcaaggttgctaaccccatcgttgaaatggatggagatgaaatgaccagagttttctggcaatcaataaaggaaaagcttattttcccatttttggagttggatatcaagtactttgaccttggccttcctcatcgcgatgccactgatgataaagtcactattgaaagctcagaggctactcttaagtacaatgtagcaatcaagtgtgcaactattactccagatgaagatcgtgtcaaggagtttaaattgaagcagatgtggaagagtccaaacggaacaattaggaacattttgaacggtactgtcttcagagaaccaattatttgcaaaaacgttccccgccttgtcccaggctggacgaaggcaatttgcatcggaagacatgcttttggtgatcaatatcgagcaactgatgcagtcatcaaaggagctggcaaactcaagctagtgtttgtgccagaaggacaggatgagaagacagagttggaggtgtacaattttacaggtgctggtggggtggcattggccatgtataacaccgatgagtccatccgttcttttgctgaagcttctatgaacactgcttaccaaaagaagtggccactttatctcagcacaaaaaatactatccttaagaagtacgatggaagattcaaggacatctttcaagaagtctatgaggctaactggaaatcaaagtacgaggctgcaggaatatggtatgaacaccgactcattgatgatatggttgcatatgctctcaagagtgaaggaggttatgtttgggcatgcaaaaactatgatggggatgtgcagagtgatttcttggcccaaggttttggatcacttggcttgatgacctctgtattggtgtgccctgatggaaagaccatagaggccgaggcagcccatggtacagttactcggcattacagggttcaccagaaaggtggtgaaaccagcacaaacagtattgcctctatttttgcttggtcaagagaacttgcccacagggctaagttggatgacaatgctaaactcttggatttcactgagaaactagaggcagcttgcgttggggctgtggagtctggcaagatgaccaaggatctcgcattgcttatccatggatctaaggttagtagggaccagtacctcaacactgaagagttcattgatgctgtggccgaggagctgaaagccagacttggcaggcaaagtgagcagtgcattaaagcttga

SEQ ID NO: 122383 - protein, 420 aa, Populus tremula x Populus alba
MAFEKIKVANPIVEMDGDEMTRVFWQSIKEKLIFPFLELDIKYFDLGLPHRDATDDKVTIESSEATLKYNVAIKCATITPDEDRVKEFKLKQMWKSPNGTIRNILNGTVFREPIICKNVPRLVPGWTKAICIGRHAFGDQYRATDAVIKGAGKLKLVFVPEGQDEKTELEVYNFTGAGGVALAMYNTDESIRSFAEASMNTAYQKKWPLYLSTKNTILKKYDGRFKDIFQEVYEANWKSKYEAAGIWYEHRLIDDMVAYALKSEGGYVWACKNYDGDVQSDFLAQGFGSLGLMTSVLVCPDGKTIEAEAAHGTVTRHYRVHQKGGETSTNSIASIFAWSRELAHRAKLDDNAKLLDFTEKLEAACVGAVESGKMTKDLALLIHGSKVSRDQYLNTEEFIDAVAEELKARLGRQSEQCIKA

SEQ ID NO: 122384 - DNA, 1218 bp, Magnetospirillum gryphiswaldense
  CDS (1)..(1218): transl_table=11
atgaataagatcaaggtcgccaatcccatcgtcgagctcgacggcgacgagatgacccgcatcatctggaagttcattaaggacaagctgatcctgccctatctggacgtggatctgaagtactacgacctgggcgtcgagtaccgcgacgaaaccaatgaccaggtcaccatcgatgccgccgaagccatcaagcagtacggcgtcggcgtcaagtgcgccaccatcacccccgatgaagcgcgcgtgaaggaattcaacctcaagaagatgtggaagtcgcccaacggcaccatccgcaacatccttgacggcaccgtgttccgcgagccgatcatctgccagaacgtgccgcgcctggttcccggctggaccaagcccatcgtcatcggtcgtcatgctttcggcgaccagtatcgcgccaccgatttcaaggtgcccggccccggcatcctgaccatgaagttcgtcggcgaggacggtcaggtcatcgaacacgaagtgttcaatttccccagctcgggcgttgccatgggcatgtacaacctggatgaatccatccgtggtttcgcccgcgcctgcatgaattacggcttggccaagaagtggccggtctacctgtcgaccaagaacaccattctcaaggcctatgacggtcgcttcaaggacatcttccaggaagtgtacgagaaggaattcaaggccgagttcgacaagtacggcatgacctacgaacaccgcctgatcgacgacatggtcgcgtcggccctgaagtggtcgggtgaattcgtctgggcctgcaagaactatgacggcgacgtccagtccgacaccgtcgcccagggcttcggctcgttgggcctgatgacctcggtcctgctgtcccccgatggcaagaccgtcgaggccgaagccgcccacggtaccgtgacccgtcactaccgcgagcaccagaagggcaaggaaacctcgaccaaccccatcgcctcgatcttcgcctggacccgcggcctgctgtaccgcgcccagttcgacaacactcccgaggtggccaagttcgccaccgctttggaggaagtctgcgtcgagacggtggaagccggcttcatgaccaaggatctggccatcctgatcggccccgatcagccctggctgaccaccacccagttcctggacaagctggacgaaaacctgaagaagaagatgggcgtcgcctga

SEQ ID NO: 122385 - protein, 405 aa, Magnetospirillum gryphiswaldense
MNKIKVANPIVELDGDEMTRIIWKFIKDKLILPYLDVDLKYYDLGVEYRDETNDQVTIDAAEAIKQYGVGVKCATITPDEARVKEFNLKKMWKSPNGTIRNILDGTVFREPIICQNVPRLVPGWTKPIVIGRHAFGDQYRATDFKVPGPGILTMKFVGEDGQVIEHEVFNFPSSGVAMGMYNLDESIRGFARACMNYGLAKKWPVYLSTKNTILKAYDGRFKDIFQEVYEKEFKAEFDKYGMTYEHRLIDDMVASALKWSGEFVWACKNYDGDVQSDTVAQGFGSLGLMTSVLLSPDGKTVEAEAAHGTVTRHYREHQKGKETSTNPIASIFAWTRGLLYRAQFDNTPEVAKFATALEEVCVETVEAGFMTKDLAILIGPDQPWLTTTQFLDKLDENLKKKMGVA

SEQ ID NO: 122386 - DNA, 1197 bp, Vitis vinifera
  CDS (1)..(1197)
atggctttggagaagatcaaggtggacaaccccatcgttgagatggatggtgatgaaatgactcgggttttctggaaatcaatcaaggataagcttattctcccctttctagagttggatatcaaatactttgatcttggcctacccaaccgtgaggccactcgtgatcaagttacggttgatagtgctcatgccactcttaagtataatgtggcgattaagtgtgcaactataactccagatgaagcccgtgttaaggagttcaacttgaaacagatgtggaagagtccaaatgggactattaggaacattttaaatggttggtccaagccaatatgcattggaaggcatgcttatggggatcaatatcgagcaactgatgccgttattgaaggatccggaaaactgaaaatggtgtttgtgcctgatggaccaaatgagataaaagaattggaggtttaccaatttactggtgctggaggagttgctttgtcaatgtataatactgatgagtccatccgcgcttttgctgaggcttcaatgaacatggcttaccagaaaaggtggccactttatctttcaacaaaaaataccattcttaagaaatatgatggcagatttaaagacatattccaagaggtttatgaagctcaatggaaatccaagtttgaagctgtggggatatggtatgagcatcgtctcattgatgatatggttgcttatgcccttaaaagtgatggcggctatgtatgggcctgcaaaaattatgatggagatgtccagagtgatttcctagcccaaggatttggatctcttgggttgatgacttcagtactggtgtgcccagatggaaagactattgaagctgaagcagcacatggcacagttacccgccattacagggttcatcagaaaggaggtgaaaccagcacaaacagcatagcctctatctttgcctggtcaaggggtcttgcacacagggcaaagttggatgggaatgctaggctattggattttactgagaaactggaagcagcctgtattgcaactgtagaatcagggaagatgactaaggatcttgcacttcttattcacgggcctaaggttactagggctcagtatctgaacactgaagagttcatagaagctgtggctgaggaactgagagcaaggctgcctaaaagatcgaagttttga

SEQ ID NO: 122387 - protein, 398 aa, Vitis vinifera
MALEKIKVDNPIVEMDGDEMTRVFWKSIKDKLILPFLELDIKYFDLGLPNREATRDQVTVDSAHATLKYNVAIKCATITPDEARVKEFNLKQMWKSPNGTIRNILNGWSKPICIGRHAYGDQYRATDAVIEGSGKLKMVFVPDGPNEIKELEVYQFTGAGGVALSMYNTDESIRAFAEASMNMAYQKRWPLYLSTKNTILKKYDGRFKDIFQEVYEAQWKSKFEAVGIWYEHRLIDDMVAYALKSDGGYVWACKNYDGDVQSDFLAQGFGSLGLMTSVLVCPDGKTIEAEAAHGTVTRHYRVHQKGGETSTNSIASIFAWSRGLAHRAKLDGNARLLDFTEKLEAACIATVESGKMTKDLALLIHGPKVTRAQYLNTEEFIEAVAEELRARLPKRSKF

SEQ ID NO: 122388 - DNA, 1239 bp, Vitis vinifera
  CDS (1)..(1239)
atggccttcgacaagatcaaagtcgccaaccccatcgttgagatggatggagatgaaatgactcgagttttctggaaatcaatcaaggataagcttatttttccatttctggagttggatataaagtattttgatcttgggctccctcatcgtgacgccactgatgataaggttacagttgaaagtgcagaagctacacttaagtacaatgtagcaatcaagtgtgcaactattactccagatgaaggtcgcatgaaggaattcgacttgaagcaaatgtggaagagtccaaatgggacaattaggaatatattgaatggcaccgttttcagagaaccaatcatttgcaaaaacattcccaggcttgtcccaagttggacaaagccaatatgcattggaaggcatgcttttggtgatcagtatcgagcaactgatacagtgattaaaggagctgggaaactcaaattggtgtttgtaccagaaggaaaagatgaaaagacagagcttgaggttttcaactttacaggtgctggaggagtagcattgtcgatgtataatactgatgagtccatttatgcttttgctgaggcttcaatgaacactgcttacctaaaacagtggcccctttatcttagcacaaaaaatactattcttaagaagtatgatgggagattcaaggacatattccaagaagtttatgagacccaatggaaatcaaagtatgaggctgctgggatctggtatgaacaccgtctcattgatgatatggttgcttatgctctcaagagtgaaggaggttatgtgtgggcatgcaagaactatgatggagatgtacagagtgatttcttagctcaaggattcggatctcttggtttgatgacatctgtgctggtttgtccagatggaaagaccatagaagctgaagctgcccatgggacagtgacacgtcatttccgggttcatcagaaaggaggtgaaaccagtacaaacagcatagcctctatctttgcttggtcacgaggccttgcacacagggcaaagttggatgacaatgctagactcttggatttcactgagaaactagaagcagcttgtgttggaactgtggaatctggaaagatgaccaaggatcttgcacttcttatccatggatctaaggtgacgagggattggtatctgaatactgaagagttcatcgatgctgtggcagcagagctgacagcaaaactttcttgctaa

SEQ ID NO: 122389 - protein, 412 aa, Vitis vinifera
MAFDKIKVANPIVEMDGDEMTRVFWKSIKDKLIFPFLELDIKYFDLGLPHRDATDDKVTVESAEATLKYNVAIKCATITPDEGRMKEFDLKQMWKSPNGTIRNILNGTVFREPIICKNIPRLVPSWTKPICIGRHAFGDQYRATDTVIKGAGKLKLVFVPEGKDEKTELEVFNFTGAGGVALSMYNTDESIYAFAEASMNTAYLKQWPLYLSTKNTILKKYDGRFKDIFQEVYETQWKSKYEAAGIWYEHRLIDDMVAYALKSEGGYVWACKNYDGDVQSDFLAQGFGSLGLMTSVLVCPDGKTIEAEAAHGTVTRHFRVHQKGGETSTNSIASIFAWSRGLAHRAKLDDNARLLDFTEKLEAACVGTVESGKMTKDLALLIHGSKVTRDWYLNTEEFIDAVAAELTAKLSC

SEQ ID NO: 122390 - DNA, 1239 bp, Apium graveolens
  CDS (1)..(1239)
atggcgtttcagaagattaaggtcgctaaccccatcgtcgaaatggacggagatgaaatgacccgtgtattttggaaatctattaaggacaagcttatatttccctttgttgagcttgatataaaatactttgaccttggccttcctcaccgtgatgcaaccgatgataaagttactgttgaaagtgcagaggctaccctcaagtataatgtagcaatcaaatgtgcaacaattactccagatgaagctcgggttgaggaatttggtttgaagcagatgtggaagagtccaaatgggactattagaaatattttaaatggcacggtatttagggaaccaattatctgcaaaaacatcccgaagctcatcccagggtggacgaagccaatatgcatcggaagacatgcttttggtgatcaataccgcgcaacagatgcagttatcaaaggaccaggaaaacttaaattggtgtttgtaccagaaggtaaagaggaaaagacagagttggaagtttacaactttactggtgctggaggtgtagctctgtcaatgtacaacacagatgagtccattcgttcctttgctgaagcttctatgaccactgcttatgaaaagaagtggccactttatcttagcacaaaaaatactattcttaagaaatacgatggaagattcaaggacatattccaagaagtttatgaagccagctggaaatcgaagtatgaagctgcagggatatggtatgagcaccgtcttattgatgatatggttgcatatgctcttaaaagtgatggaggttatgtctgggcatgcaaaaattatgacggggatgtacaaagtgacttcctcgcgcaaggtttcggatctcttgggttgatgacatcagtcctagtatgtcctgacggaaagaccatagaagctgaagcagcccatggcactgttacccgtcattacagggttcatcagaagggtggagagaccagcacaaacagcatagcatcaatctttgcatggtcccggggccttgctcacagggcaaagctggatgataatgctgccctcctgagttttgcggagaagctagaggctgcttgtgttggtactgtggaggctggaaggatgaccaaggaccttgctcttattcttcatggatccaaactcagcagggaacactatctgaacactgaagagttcattgatgctgtagcagatgatttgaaagcaagactcgccaactag

SEQ ID NO: 122391 - protein, 412 aa, Apium graveolens
MAFQKIKVANPIVEMDGDEMTRVFWKSIKDKLIFPFVELDIKYFDLGLPHRDATDDKVTVESAEATLKYNVAIKCATITPDEARVEEFGLKQMWKSPNGTIRNILNGTVFREPIICKNIPKLIPGWTKPICIGRHAFGDQYRATDAVIKGPGKLKLVFVPEGKEEKTELEVYNFTGAGGVALSMYNTDESIRSFAEASMTTAYEKKWPLYLSTKNTILKKYDGRFKDIFQEVYEASWKSKYEAAGIWYEHRLIDDMVAYALKSDGGYVWACKNYDGDVQSDFLAQGFGSLGLMTSVLVCPDGKTIEAEAAHGTVTRHYRVHQKGGETSTNSIASIFAWSRGLAHRAKLDDNAALLSFAEKLEAACVGTVEAGRMTKDLALILHGSKLSREHYLNTEEFIDAVADDLKARLAN

SEQ ID NO: 122392 - DNA, 1449 bp, Nicotiana tabacum
  CDS (1)..(1449)
atgcttaccacccgactcagactccggtgttccgccatggctagtgttgcttcttttatctcatcttcatcggcttcaacatcatccgcagttaccaaaaaccttcccttttccatcatttccaatcggcaactgttcaagaaccgtgtttatctcctccaccgaatccccaatgcttcaattcgatcgttcgcttccactacagcttcgtctaaaatccgcgttgaaaatcctattgtcgaaatggacggtgatgaaatgacgagggttatatggacaatgatcaaagagaagctaatatatccttatctagagttggatacgaagtattacgatttggggatattgaaccgtgatgccactgacgatcaagttactgttgaaagtgctgaggctactcttaagtataatgttgctgtgaaatgcgctactataacacctgatgagaccagagttaaggaatttgggctgaagtctatgtggagaagtcccaatgccacaatcagaaacattttaaatggtactgttttccgggagcctatactatgcaagaacgtccccagaattgttcctggttggaagaaacccatttgtattggtaggcatgcctttggtgaccagtatcgtgccacagatgcagttattaatggaccaggaaagctcaaaatggtttttgagccagaaaatggggaagcccctacggaactggatgtttatgattttaaaggtccaggtgttgcacttgccatgtacaatgttgaccagtcaattcgagcgtttgctgaatcatcaatgtcaatggcattttcgaagaaatggcctctttatttgagtacaaaaaatacaatactaaagaaatacgatggcaggtttaaggacatttttgaagaggtatatgaagagaagtggaagcaacagtttgaggaacactcgatatggtatgagcatagattgatagatgacatggtagcttatgcattaaaaagcgggggtggatatgtttgggcatgcaagaactatgatggagatgtccagagtgatctgctcgctcaaggatttggttctctgggcctcatgacctctgtattgttatcttctgatggcaagacattagaagctgaagcagctcatggcacagtaaccagacattttcggctgcatcaaaagggtcaagaaactagtacaaatagtgttgcttctatttttgcatgggcaaggggacttggacatagggcccagcttgatgggaaccaaaagttatctgaatttgttcacgccctggaagctgcttgcgttggcacaatagagtccgggaagatgactaaggatttagctatattggttcatggacccaaggtatcaagggaacactacttgaatactgaagaatttattgatcctgtagcacagaaacttcaagagaagctcggtgcctgcgcagttgtatga

SEQ ID NO: 122393 - protein, 482 aa, Nicotiana tabacum
MLTTRLRLRCSAMASVASFISSSSASTSSAVTKNLPFSIISNRQLFKNRVYLLHRIPNASIRSFASTTASSKIRVENPIVEMDGDEMTRVIWTMIKEKLIYPYLELDTKYYDLGILNRDATDDQVTVESAEATLKYNVAVKCATITPDETRVKEFGLKSMWRSPNATIRNILNGTVFREPILCKNVPRIVPGWKKPICIGRHAFGDQYRATDAVINGPGKLKMVFEPENGEAPTELDVYDFKGPGVALAMYNVDQSIRAFAESSMSMAFSKKWPLYLSTKNTILKKYDGRFKDIFEEVYEEKWKQQFEEHSIWYEHRLIDDMVAYALKSGGGYVWACKNYDGDVQSDLLAQGFGSLGLMTSVLLSSDGKTLEAEAAHGTVTRHFRLHQKGQETSTNSVASIFAWARGLGHRAQLDGNQKLSEFVHALEAACVGTIESGKMTKDLAILVHGPKVSREHYLNTEEFIDPVAQKLQEKLGACAVV

SEQ ID NO: 122394 - DNA, 1251 bp, Glycine max
  CDS (1)..(1251)
atggggtttcagaagataagggtgggcaaccccatcgtcgaaatggatggggatgaaatgacccgagtgatttggaaactgataaaagataagcttattttcccttatttggagctggatattaagtattttgaccttggccttcctcatcgcgatgccactaatgatagagttactattgaaagcgctgaagctacactcaagtataatgtagctatcaaatgtgctactataactccagatgaagctcgtgtcaaggagtttaacttaaaacaaatgtggagaagtccaaatgggacgatccgaaacattttaaatggtacagtttttagagagccaattatctgtaagaacattcctcgtcttgtttcaggatggacaaagccaatatgcattggaagacatgcttttggagaccaatatcgggcaactgatacagttataaaaggcccaggaaagctaaaattggtttttgcacccagtggaaatgaaggcattaaagagctagaggtctataactttactggtgctggaggcatagctttgtccatgtataatactgatgagtccattcgagcttttgctgaggcttcaatgaactttgcttaccagaagaaatggcctctctatcttagcactaaaaataccattttaaagaaatatgatggaagattcaaggacattttccaggaagtttttgacacccaatggaatcacaagttcaaagctgcagggatatggtatgaacaccgtcttatagatgatatggttgcttatgctctcaaaagtgatggaggttatgtatgggcctgcaagaattatgatggtgatgtgcagagtgatttcttagctcaaggatttggttcacttggcttgatgacgtcagtactggtttgcccagatgggaaaaccattgaagcagaggcagcccatggcactgttacccgtcattatcgggttcatcagaagggaggtgaaaccagcacaaacagtattgcttcaatttttgcctggtcgcgaggtcttgcacataggccaaaattggatggaaatgctagattgttggacttcacagagaaactggaagcagcttgcattggaacagttgaattgggaaagatgacaaaggatcttgcacttcttgttcatggacctaaggtttctagatcccagtatttgaatactgaagagttcattgatgccgtagccgaggagctgcgaacaagattatcttcacaatcgaagctgtaa

SEQ ID NO: 122395 - protein, 416 aa, Glycine max
MGFQKIRVGNPIVEMDGDEMTRVIWKLIKDKLIFPYLELDIKYFDLGLPHRDATNDRVTIESAEATLKYNVAIKCATITPDEARVKEFNLKQMWRSPNGTIRNILNGTVFREPIICKNIPRLVSGWTKPICIGRHAFGDQYRATDTVIKGPGKLKLVFAPSGNEGIKELEVYNFTGAGGIALSMYNTDESIRAFAEASMNFAYQKKWPLYLSTKNTILKKYDGRFKDIFQEVFDTQWNHKFKAAGIWYEHRLIDDMVAYALKSDGGYVWACKNYDGDVQSDFLAQGFGSLGLMTSVLVCPDGKTIEAEAAHGTVTRHYRVHQKGGETSTNSIASIFAWSRGLAHRPKLDGNARLLDFTEKLEAACIGTVELGKMTKDLALLVHGPKVSRSQYLNTEEFIDAVAEELRTRLSSQSKL

SEQ ID NO: 122396 - DNA, 1251 bp, Eucalyptus globulus
  CDS (1)..(1251)
atgggtttcgagaagatcaaggtcgagaaccccatcgtcgagatggacggggatgaaatgacccgagtgttctggaaatcaatcaaggataagcttatttttcccttcttggagttggatatcaagtacttcgaccttggtcttcctcatcgtgatgccactgatgacaaggttacaattgaaagcgcagaagcaactcttaaatacaatgtggccatcaaatgtgcaactattacaccagatgaagctcggatgaaggagtttactttgaagcaaatgtggaaaagtcccaatgggacgattaggaacatcttgaatggcactgtcttcagagagccaataatgtgcaaaaatattccccggcttgtcccagggtggtccaagccaatatgcattggaagacatgcttttggtgatcaatacaaagctactgatactgtcattaaaggagctgggaaacttaaacttgtctttgtgccagaaggcacagatgagaagactgagctagaagtgtataacttcacgggcgctggtggagttgcattgtccatgtacaacacagatgagtcaatccgttcttttgctgaggcttcaatgaacactgcttatcagaagaagtggccgctctatcttagcacaaagaataccatccttaaaaaatatgatggaagattcaaggatatattccaagaagtttatgaagccaactggaagtcaaagtttgaggctgctggaatctggtatgaacaccgtcttattgatgatatggtggcttatgcgctaaagagcgacggaggttatgtgtgggcatgcaagaactatgatggagatgtccagagtgatttcttagcccaagggtttggatcgcttggcttgatgacatctgtcttggtctgcccagacggaaaaactattgaagcagaagccgctcatggtacggttacccgccattatcgggtccatcagaaaggaggcgaaaccagcactaatagcattgcttctatatttgcttggtcacgagggcttgctcatagggccaagttggataacaatgccaaactccttgattttgccgagaaactagaagcagcttgtattggaactgttgagtctggcaagatgaccaaggatcttgcactcctcattcatggtcctaagtttactagggatcaatacctgaacaccgaagagtttattgatgctgtggcagttgaactcaaggcaaggctttcatgccaaagtctgctgtag

SEQ ID NO: 122397 - protein, 416 aa, Eucalyptus globulus
MGFEKIKVENPIVEMDGDEMTRVFWKSIKDKLIFPFLELDIKYFDLGLPHRDATDDKVTIESAEATLKYNVAIKCATITPDEARMKEFTLKQMWKSPNGTIRNILNGTVFREPIMCKNIPRLVPGWSKPICIGRHAFGDQYKATDTVIKGAGKLKLVFVPEGTDEKTELEVYNFTGAGGVALSMYNTDESIRSFAEASMNTAYQKKWPLYLSTKNTILKKYDGRFKDIFQEVYEANWKSKFEAAGIWYEHRLIDDMVAYALKSDGGYVWACKNYDGDVQSDFLAQGFGSLGLMTSVLVCPDGKTIEAEAAHGTVTRHYRVHQKGGETSTNSIASIFAWSRGLAHRAKLDNNAKLLDFAEKLEAACIGTVESGKMTKDLALLIHGPKFTRDQYLNTEEFIDAVAVELKARLSCQSLL

SEQ ID NO: 122398 - DNA, 1407 bp, Oryza sativa
  CDS (1)..(1407)
atggctcttctctacggctcctcctcctccgccgccgcgaccaaagccctcctcttaaaccccgccgccgcgcacgccttcgtcccttcttcccccggaccccgcgcgctccgccgcggcggcgcctccctccgctgctatgccgccgccgccgcggcggtggccgagcagcaccgcatcaaggtccacaaccccatcgtcgagatggacggtgacgagatgacgcgggtcatttggaagatgataaaggataagctcatcttcccttacctggagctggatgtcaagtatttcgaccttgggctgctcaaccgggatgccaccgatgataaggtcactgttgagagtgccgaggctacgttggagtataatgttgctgttaagtgtgctaccattacacctgatgaaacaagagttaaagagtacaaactcaagtcaatgtggaggagcccaaatggcaccatcaggaatattctaaatggaactgttttccgggagcccatcttgtgtaaaaatgtaccacggatactttctggctggaagaagcccatttgcattggaaggcatgcatttggagaccagtatcgagctactgatacaataattaatggtccaggaaagcttaaaatggtttttgtcccagatggtgctgaacctgtggagttaaatgtttatgattttaaagggcctggtgtggctttatcaatgtataatgtggatgagtctattagagcttttgctgagtcatcaatggcaatggcactttccaaaaaatggcctctttatctcagcaccaagaacacaatattgaagaaatatgatggcaggttcaaggacatcttccaggaggtatatgaagagaaatggaaggagaagttcgaggaaaactcgatatggtatgagcaccggttgattgatgacatggtggcatatgctgtgaaaagtgaaggtggatatgtttgggcttgcaaaaactatgatggagatgttcagagtgacttccttgcccaaggttttggttccttgggtttgatgtcatctgttttgttatcttctgatgggaaaacattagaagctgaggcagctcatgggactgtcactagacatttcaggctacatcagaagggacaggagacaagtaccaatagcattgcttctatatttgcttggactcgtggactagaacatagagcaaagctggataaaaatgataggctgctggatttcacaaagaaacttgaatctgcatgtattgaaacagttgaatcggggaagatgacaaaggatcttgcactccttatccatggccccaaggtaacaagggagttctaccttaacaccgaagaattcattgacgctgtggctcagcaactgcgagaaaagattcaaataccagctgtggtttaa

SEQ ID NO: 122399 - protein, 468 aa, Oryza sativa
MALLYGSSSSAAATKALLLNPAAAHAFVPSSPGPRALRRGGASLRCYAAAAAAVAEQHRIKVHNPIVEMDGDEMTRVIWKMIKDKLIFPYLELDVKYFDLGLLNRDATDDKVTVESAEATLEYNVAVKCATITPDETRVKEYKLKSMWRSPNGTIRNILNGTVFREPILCKNVPRILSGWKKPICIGRHAFGDQYRATDTIINGPGKLKMVFVPDGAEPVELNVYDFKGPGVALSMYNVDESIRAFAESSMAMALSKKWPLYLSTKNTILKKYDGRFKDIFQEVYEEKWKEKFEENSIWYEHRLIDDMVAYAVKSEGGYVWACKNYDGDVQSDFLAQGFGSLGLMSSVLLSSDGKTLEAEAAHGTVTRHFRLHQKGQETSTNSIASIFAWTRGLEHRAKLDKNDRLLDFTKKLESACIETVESGKMTKDLALLIHGPKVTREFYLNTEEFIDAVAQQLREKIQIPAVV

SEQ ID NO: 122400 - DNA, 1233 bp, Gryllus firmus
  CDS (1)..(1233)
atggccaagataaaggcaggacccgttgtagacatcctcggcgatgaaatgacacgtattatttgggacctgattaaagaaaagctgattctgccgtacctggatatcgagctacatacgtacgacctgggcatcgagcatcgtgacaaaaccgaagatcaggtgactatagactgtgctaatgctattaaaaagtacaatgtgggtattaagtgtgccacaattactcctgacgaaaaacgtgtggaagaatttaagcttaaacagatgtggaagtcgcctaacggtactatccgtaatattttgggaggtaccgtattccgtgaagctattatttgcaaaaatatccctcgtctcgtcaccgcgtgggaaaagccgatcatcattggtcgtcacgcgcacgcagaccagtacaaggcgaccgatttcgttgtgccgggtcccgggcgcctggaactgacgtgggtgccctcggaaggaggccagaagtccatcagcggcgttgtgcacgaattccgaggcgccggtgtggcgcttggcatgttcaacacggacgagtccatcatcgacttcgcccactcgtctttcaagtacgccttggcgcgcggctaccccctgtacctatccaccaagaacaccatcctcaagaagtacgacggccgattcaaggacatcttccaggatatctacgacaaccagtacaaggccaagttcgaagcgcagaaaatctggtacgaacaccggctgattgacgacatggttgcctatgccaagaagtctgaaggagggttcgtgtgggcgtgcaagaactacgatggtgatgtacagtcagattcggtggcgcaaggtttcgggtcactgggtctgatgacatccgttcttctatgtcctgacggcaagactgtcgaagcggaagctgctcatggcactgtaactcgccattaccgcttccatcaacaaggcaaggaaacctccaccaaccccattgcttccattttcgcctggaccaaagggctcttgcacagggcaaaactggataacaatgacaaactgagggattttgccgaaaagctcgaagctgtctgcattgaaacaattgaaagcgggttcatgacaaaagatcttgccatttgcattaagggtatgaataatgtgactcgggatgactacttggatacctttgcttttatggataagctgggagaaaatttgaagaagaagttgcagggatga

SEQ ID NO: 122401 - protein, 410 aa, Gryllus firmus
MAKIKAGPVVDILGDEMTRIIWDLIKEKLILPYLDIELHTYDLGIEHRDKTEDQVTIDCANAIKKYNVGIKCATITPDEKRVEEFKLKQMWKSPNGTIRNILGGTVFREAIICKNIPRLVTAWEKPIIIGRHAHADQYKATDFVVPGPGRLELTWVPSEGGQKSISGVVHEFRGAGVALGMFNTDESIIDFAHSSFKYALARGYPLYLSTKNTILKKYDGRFKDIFQDIYDNQYKAKFEAQKIWYEHRLIDDMVAYAKKSEGGFVWACKNYDGDVQSDSVAQGFGSLGLMTSVLLCPDGKTVEAEAAHGTVTRHYRFHQQGKETSTNPIASIFAWTKGLLHRAKLDNNDKLRDFAEKLEAVCIETIESGFMTKDLAICIKGMNNVTRDDYLDTFAFMDKLGENLKKKLQG

SEQ ID NO: 122402 - DNA, 1239 bp, Medicago truncatula
  CDS (1)..(1239)
atgggattccagaaaatcaaagttgccaatcccatcgttgagatggacggagatgaaatgacccgtattatctggaagtatatcaaggataagctcattcttccctttgtggagttggacatcaagtactttgacctaggccttccctatcgtgatgagactgatgacaaagttacagttgaaagtgcagaagcaactctcaagtataatgtagcaatcaagtgtgcaactatcactccagatgaagctcgtgtcaaggagtttggtctgaagagtatgtggaggagtccaaatggaacaatcagaaacattttgaatggaactgtcttcagagaaccaattatttgcaaaaacatccctcgccttattcctggttggacaaagccaatatgtattggaaggcatgcttttggtgatcaatatcgggccactgactcagtgattaaagggccaggaaagctgaagctggtttttgttccagaaggccagggtgagaccaccgatttggaggtttataacttcaccggtgaaggaggtgttgcattggccatgtacaacactgacgagtctattcgttcttttgctgaagcgtctatggcagttgctcttgagaaaaaatggccactttatcttagcaccaaaaatacaattcttaagaaatatgatggaagattcaaggacatatttcaagaagtttatgaggcaggctggaaatcaaagtatgaggctgctggtatatggtatgagcaccggctcattgatgatatggtggcatatgcactcaagagtgaaggaggttatgtatgggcatgcaaaaactatgatggagatgtccagagtgatttcttagctcaaggttttggatcattgggtttgatgacttctgtattggtttgccctgatggaaagaccatagaagcagaagcagcccatgggacagttacccgtcatttcagggttcaccaaaagggtggagaaaccagcacaaacagcatagcatccatctttgcttggacaagaggtctagcccatagggcaaaactggatgacaatgctacgctcttggatttcactgaaaagctagaggcagcttgtattggagtagtagagtctgggaagatgaccaaggatttggcacttattcttcatggatccaagctgtctagggagcattatctgaacacagaggaattcatcgatgctgtggctgctgatcttaaaacaaagatctctgcttag

SEQ ID NO: 122403 - protein, 412 aa, Medicago truncatula
MGFQKIKVANPIVEMDGDEMTRIIWKYIKDKLILPFVELDIKYFDLGLPYRDETDDKVTVESAEATLKYNVAIKCATITPDEARVKEFGLKSMWRSPNGTIRNILNGTVFREPIICKNIPRLIPGWTKPICIGRHAFGDQYRATDSVIKGPGKLKLVFVPEGQGETTDLEVYNFTGEGGVALAMYNTDESIRSFAEASMAVALEKKWPLYLSTKNTILKKYDGRFKDIFQEVYEAGWKSKYEAAGIWYEHRLIDDMVAYALKSEGGYVWACKNYDGDVQSDFLAQGFGSLGLMTSVLVCPDGKTIEAEAAHGTVTRHFRVHQKGGETSTNSIASIFAWTRGLAHRAKLDDNATLLDFTEKLEAACIGVVESGKMTKDLALILHGSKLSREHYLNTEEFIDAVAADLKTKISA

SEQ ID NO: 122404 - DNA, 1506 bp, Aspergillus oryzae
  CDS (1)..(1506)
atgatgaattcccttcggctccattccgcgtcggttcgccgcgctgtcgcctcccctctgtctgcccctctctcttcctccgcttatcgctcgatctcctgctcttcttcttcttacatttcctcttcgtcttcttcttctttctcgactgctgctacccctcgcgctcagagacccctcgcttcgtctcagctccctcgtattgtctccccccgccagaccggaatctaccctttgcagtggacacaggcccgcaccatggcaactgaaggccccaagatcaaggttaagaacccagtggtggaactggatggagatgagatgacccgtattatctggcaggagatcagagagaagctaacttccgagtccagttaccttgacattgacctcaagtactacgacctgggacttgaataccgtgaccagaccgatgaccaggtcaccgtcgaggccgcggaggccatcaagaaatatggtgttggtgtcaagtgtgctaccatcacccccgatgaagcccgtgttgaggagttcaagttgaagaagatgtggctttctcccaacggaaccatcagaaacattctcggcggaactgtcttccgtgaacccatcatcattccccgcgttccccgtctcgtacctgggtggaccaagcctatcatcattggacgtcacgccttcggtgaccagtaccgtgccactgaccgtgtgattcccggccccggcaagcttgagcttgtctacacccctgtcaatggcgagcccgagaccgtcaaggtctacgacttccagggcggcggtgttactcagactcagtacaacactgatgagtccatccagggcttcgcccacgccagtttccagatggccttgctgaagggtctgcctctgtacatgagcaccaagaacaccattctgaagaagtacgatggtcgcttcaaggatatcttccaggagatctacgagtccacctacaagaaggatttcgaggccaagaacatttggtatgagcaccgtctgatcgacgatatggtcgctcagatgatcaagagcgagggtggcttcgttatggctcttaagaactacgatggtgatgttcagtcggacatcgtcgcccagggtttcggttctctgggtctgatgacctctaccctcaccacccccagcggtgaggccttcgagtctgaagccgctcacggtaccgtgacccgtcactaccgtgagcaccagaagggccgtgagacctccaccaaccccattgcctccatctttgcctggacccgtggtctggtgcagcgtggcaagctcgacgagacccccgacgtggttgctttcgccgaggagttggagcgtgcctgtatcgaagtcgtgaacgacgagggcatcatgaccaaggacttggctctcgcctgcggccgcaaggaccgtgacgcgtgggtcaccaccaaggagtacatggcagctgttgagcggaggctgaagaccaacctgaagtccagactgtaa

SEQ ID NO: 122405 - protein, 501 aa, Aspergillus oryzae
MMNSLRLHSASVRRAVASPLSAPLSSSAYRSISCSSSSYISSSSSSSFSTAATPRAQRPLASSQLPRIVSPRQTGIYPLQWTQARTMATEGPKIKVKNPVVELDGDEMTRIIWQEIREKLTSESSYLDIDLKYYDLGLEYRDQTDDQVTVEAAEAIKKYGVGVKCATITPDEARVEEFKLKKMWLSPNGTIRNILGGTVFREPIIIPRVPRLVPGWTKPIIIGRHAFGDQYRATDRVIPGPGKLELVYTPVNGEPETVKVYDFQGGGVTQTQYNTDESIQGFAHASFQMALLKGLPLYMSTKNTILKKYDGRFKDIFQEIYESTYKKDFEAKNIWYEHRLIDDMVAQMIKSEGGFVMALKNYDGDVQSDIVAQGFGSLGLMTSTLTTPSGEAFESEAAHGTVTRHYREHQKGRETSTNPIASIFAWTRGLVQRGKLDETPDVVAFAEELERACIEVVNDEGIMTKDLALACGRKDRDAWVTTKEYMAAVERRLKTNLKSRL

SEQ ID NO: 122406 - DNA, 1251 bp, Codonopsis lanceolata
  CDS (1)..(1251)
atggcgtttgagaagatcaaggttgcaaaccccatcgttgagatggatggagatgaaatgactcgtatcttctggcaatcgataaaggataagcttatttttccctttttggagcttgatataaagtactttgaccttggccttcctcaccgtgatgccaccgatgacaaagtcacggtagagagtgctgaagctactcttaagtacaatgttgcaatcaagtgcgcaaccattactccagatgaggctcgtatgaaggagtttaccctgaaaagtatgtggaaaagtccaaatggaacaattaggaatattttgaatggtacggtgttcagagaaccgattatttgcaagaacattcccaggcttatcccaggatggacaaagccaatatgtattggaaggcatgcttttggtgatcagtatcgagctactgatgcagtcatcaagggaccaggaaaattgaagttggtcttcgttccagaagggagcgaggaaaagactgagttggaggtttacaacttcactggtgctggaggggtagccttgtcaatgtacaacactgatgagtccatttttgcttttgcggaggcttcaatgaacactgcttatgagaagaagtggcctctttaccttagcacaaaaaatactattcttaagaaatacgatggaggattcaaggatatcttccaagaagtttatgaagccaattggaagtcaaagtttgaggctgctgggatatggtataaacaccgtctcattgatgatatggttgcctattgtcttaagagtgacggaggttatgtatgggcatgcaaaaactatgatggggatgtgcagagtgatatgttagcacaaggatttggctcccttggattgaggacatctgtcctggtgtgccctgatggtaagaccatagaagctgaggcagctcatggcactgttacacgtcattacagggtgcatcagaaaggaggggaaaccagcacgaacagcattgcgtcaatctttgcctggacccgaggacttgcccacagggcgaagttggatgacaatgctaggcttttggatttcactgagaaactggaagcagcctgtattggcactgtggaatcagggaagatgacaaaggatcttgcactcattctccatggatccaagctcagtagggagcactacctgaacaccgaagaattcattgatgccgtggcagatgagctgaaagcaagactccaaggaaaatcatcactataa

SEQ ID NO: 122407 - protein, 416 aa, Codonopsis lanceolata
MAFEKIKVANPIVEMDGDEMTRIFWQSIKDKLIFPFLELDIKYFDLGLPHRDATDDKVTVESAEATLKYNVAIKCATITPDEARMKEFTLKSMWKSPNGTIRNILNGTVFREPIICKNIPRLIPGWTKPICIGRHAFGDQYRATDAVIKGPGKLKLVFVPEGSEEKTELEVYNFTGAGGVALSMYNTDESIFAFAEASMNTAYEKKWPLYLSTKNTILKKYDGGFKDIFQEVYEANWKSKFEAAGIWYKHRLIDDMVAYCLKSDGGYVWACKNYDGDVQSDMLAQGFGSLGLRTSVLVCPDGKTIEAEAAHGTVTRHYRVHQKGGETSTNSIASIFAWTRGLAHRAKLDDNARLLDFTEKLEAACIGTVESGKMTKDLALILHGSKLSREHYLNTEEFIDAVADELKARLQGKSSL

SEQ ID NO: 122408 - DNA, 1350 bp, Crassostrea gigas
  CDS (1)..(1350)
  misc_feature (657)..(657): n is a, g, c or t
  misc_feature (1010)..(1010): n is a, g, c or t
atgaattcggcacgaggggcaagttcagtcgcaaacgtaggacgtctcttttggcgctccagcaacaaattacaacggtttgcagcgcccgttgcattgaatgcaacacaacaaagagattatggaactaagagaatcaaggtcgccaaccctgttgtggaaatggatggggatgaaatgactcgcatcatttgggaaaagatcaaggaaactctgatcctgccctacgttgatgttgatctgaagtactacgatctgggcttgccatacagagaccagactgatgaccaggttaccattgatgcagctccggccaccaagaaatacaatgtggctgtcaagtgtgcaacaatcactccagacgaagaacgtgtagaagaattcaaactgaaaaagatgtggctgagtcctaatggaacaatcaggaacattcttggaggaacagtattccgagagccaattatctgtcagaaagttcctcgcctggtgccaggatggacaagacctattgtcattggtcgtcatgctcacggggaccagtacaaagctacagacatggttattcctggaaatggcaaacttgagctcatttacacacccgagggagtcaggagcaaagaacgaccgtgttcgacttcaaaaatggtggtggatgtnccatggccatgtcacaatactgatgagagcatcactgcttttgcccatacctgcttccagtacgcaatcatgaagaagtggcccttgtacatgagcacaaagaacacaatcctcaaaagatacgacggaagattcaaggacatctttgaggaagtctaccagcaaggctacaaagccaagtttgatgagctcaaaatctggtacgagcaccgtctcatcgacgacatggtggcccaggcactgaagtctgatggaggatttgtgtgggcgtgtaagaactatgacggagacgtccagtccgatgtggtagcccagggttacggctccctaggtctgatgaccagtgtgctagngtgtcccgacggaaagactgtcgagtctgaagctgctcacggaactgttactagacattacagggaacaccagaagggtaacccaacaagcacaaacccggtagccagtatttatgcctggacaaggggacttgaacacagaggcaaactcgatggaaacaatgaccttatcacattttcacaaaaattggagaaagcctgtgttgacactattgatagtggaaaaatgaccaaggacttagctggttgtatatatgggttgaagaatgtaaaacccgagcattaccttaacacaatggactttctgcaggccatccgtgaaactcaggaaaagatgtga

SEQ ID NO: 122409 - protein, 449 aa, Crassostrea gigas
  misc_feature (337)..(337): The Xaa at location 337 stands for Ala, Glu, Gly, or Val.
MNSARGASSVANVGRLFWRSSNKLQRFAAPVALNATQQRDYGTKRIKVANPVVEMDGDEMTRIIWEKIKETLILPYVDVDLKYYDLGLPYRDQTDDQVTIDAAPATKKYNVAVKCATITPDEERVEEFKLKKMWLSPNGTIRNILGGTVFREPIICQKVPRLVPGWTRPIVIGRHAHGDQYKATDMVIPGNGKLELIYTPEGVRSKERPCSTSKMVVDVPWPCHNTDESITAFAHTCFQYAIMKKWPLYMSTKNTILKRYDGRFKDIFEEVYQQGYKAKFDELKIWYEHRLIDDMVAQALKSDGGFVWACKNYDGDVQSDVVAQGYGSLGLMTSVLXCPDGKTVESEAAHGTVTRHYREHQKGNPTSTNPVASIYAWTRGLEHRGKLDGNNDLITFSQKLEKACVDTIDSGKMTKDLAGCIYGLKNVKPEHYLNTMDFLQAIRETQEKM

SEQ ID NO: 122410 - DNA, 1212 bp, Rhizobium leguminosarum bv
  CDS (1)..(1212): transl_table=11
atgaacaagatcaaggtcgccaatcccgtcgccgatctcgacggcgatgaaatgacgcgcatcatctggcagctcatcaaggataagctgatccatccgtatctcgacctcgacatcgactatttcgacctctccgtcgaaaaccgcgacgccaccaacgaccaggtcaccgtcgatgccgccaacgccatcaagaagtatggcgtcggcatcaagtgcgcgacgatcacgccggatgaagcccgcgtcaaggaattcaacctcaaggaaatgtggaagagcccgaacggcacgatccgcaacattctcggcggcgtcatctttcgcgagccgatcatctgcaagaacgtgccgcgcctggttcccggctggaccaagccgatcgtcgtcggccgccacgccttcggcgaccagtaccgcgccaccgatttcaagttccccggcaagggcaagctgacgatcaagttcgtcggcgaggacggcaccgtcatcgagaaggaagtcttcaacgcaccgggcgccggcgtcgccatggccatgtacaacctcgacgaatcgatccgcgaattcgcccgcgcctcgatgatgtacggcctgatgcgcaagtggccggtctatctgtcgaccaagaacaccatcctcaaggcctatgacggccgcttcaaggacatcttcgaggaagtctacgagaccgaattcaaggatcagttcaaggaagccggcatcacctacgaacaccgcctgatcgacgacatggttgcttcggcgctcaagtggtccggcgggtacgtctgggcctgcaagaactacgacggcgacgtccagtccgacacggtcgcccaaggcttcggctcgctcggcctgatgacctcggttctgctgacgcccgacggcaagacggtcgaagccgaagccgctcacggcacggtcacccgtcactaccgccagcatcagaagggccaggaaacctcgacgaactcgatcgcctcgatcttcgcctggacccgcggcctggcgcaccgcgccaagctcgacgacaatgccgagctcgcccgcttcgcctcgacgctcgaaaaagtctgcgtcgacactgtcgaatccggtttcatgaccaaggacctggcgctgctgatcggccccgaccagccgtggctctcgaccaccgccttcctcgacaagatcgaccagaacctgcagaaggccatggcgtaa

SEQ ID NO: 122411 - protein, 403 aa, Rhizobium leguminosarum bv
MNKIKVANPVADLDGDEMTRIIWQLIKDKLIHPYLDLDIDYFDLSVENRDATNDQVTVDAANAIKKYGVGIKCATITPDEARVKEFNLKEMWKSPNGTIRNILGGVIFREPIICKNVPRLVPGWTKPIVVGRHAFGDQYRATDFKFPGKGKLTIKFVGEDGTVIEKEVFNAPGAGVAMAMYNLDESIREFARASMMYGLMRKWPVYLSTKNTILKAYDGRFKDIFEEVYETEFKDQFKEAGITYEHRLIDDMVASALKWSGGYVWACKNYDGDVQSDTVAQGFGSLGLMTSVLLTPDGKTVEAEAAHGTVTRHYRQHQKGQETSTNSIASIFAWTRGLAHRAKLDDNAELARFASTLEKVCVDTVESGFMTKDLALLIGPDQPWLSTTAFLDKIDQNLQKAMA

SEQ ID NO: 122412 - DNA, 1239 bp, Pisum sativum
  CDS (1)..(1239)
atggcattccagaaaatcaaagtcgccagtcccatcgttgagatggacggagatgaaatgacccgagttatctggaagtcaatcaaggataagctcatttttcctttcttggagttggacatcaagtactttgacctaggccttcctcatcgtgatcagactgatgataaagttacagttgaaagtgccgaagcaactctcaagtataatgttgcaatcaagtgtgcaactatcactccagatgaagctcgtgtcgaggagttcggcctgaagagcatgtggaggagtccaaatgggacaattagaaacattttgaatggaactgtcttcagagaaccaattatttgcaaaaatgtccctcgccttattcctggttggacaaagccaatatgtattggaaggcatgcttttggtgatcaatatagggccactgatgcagttattaaaggacctggaaagctgaagatggtgtttgttccagaaggcaaaggtgagaccactgatttggaggtttataacttcactggtgaaggaggtgttgcattggctatgtacaacactgatgagtctattcgttcttttgctgaggcatctatggcaactgctttagagaaaaaatggccactttatcttagcaccaaaaatacaattcttaagaaatatgatggaagattcaaggacatatttcaagaagtttacgaggcaagctggaaatcaaagtacgaggctgctggtatatggtatgagcatcgactcattgatgatatggtggcatatgcactcaagagtgaaggaggttatgtatgggcatgcaagaactatgatggagatgtccagagtgatttcttagctcaaggttttggatcgttgggtttgatgacatctgtattggtttgccctgatgggaagactattgaagcagaagcagcccatgggacagttacccgtcatttcagggttcatcaaaagggcggagaaaccagcacaaacggcatagcatccatctttgcttggacaagaggtctagcccatagggcaaagctagatgacaatgctaaactcttggaactcactgaaaagctagaggcagcttgtattggagcagtagaatctgggaagatgaccaaggatttggcacttattcttcatggatcccagcttaagagggagcattatttgaacacagaggaattcatcgatgctgtggcagccgagcttaaatcgaagatctctgcgtag

SEQ ID NO: 122413 - protein, 412 aa, Pisum sativum
MAFQKIKVASPIVEMDGDEMTRVIWKSIKDKLIFPFLELDIKYFDLGLPHRDQTDDKVTVESAEATLKYNVAIKCATITPDEARVEEFGLKSMWRSPNGTIRNILNGTVFREPIICKNVPRLIPGWTKPICIGRHAFGDQYRATDAVIKGPGKLKMVFVPEGKGETTDLEVYNFTGEGGVALAMYNTDESIRSFAEASMATALEKKWPLYLSTKNTILKKYDGRFKDIFQEVYEASWKSKYEAAGIWYEHRLIDDMVAYALKSEGGYVWACKNYDGDVQSDFLAQGFGSLGLMTSVLVCPDGKTIEAEAAHGTVTRHFRVHQKGGETSTNGIASIFAWTRGLAHRAKLDDNAKLLELTEKLEAACIGAVESGKMTKDLALILHGSQLKREHYLNTEEFIDAVAAELKSKISA

SEQ ID NO: 122414 - DNA, 1215 bp, Rhizobium meliloti
  CDS (1)..(1215): transl_table=11
atggcaaagatcaaggtcgccaatccggtcgtcgaactcgacggcgaccagatgacccgcatcatatggcagttcatcaaggacaagctgatccatccctatctcgacctcgatctcgaatattatgacctcggcgtcgagaaccgcgacgcaaccgacgatcaggtgacgatcgacgccgcgaacgcgatcaagaagcacggcgtcggcgtcaaatgcgcaacgatcacgccggacgaaggccgcgtcgaggagttcaagctgaagaagatgtggaagtcgcccaacggcacgatccgcaacatcctcggcggcgtcattttccgcgagccgatcatctgcaagaacgtgcctcgcctcgtgcccggctggacaaagccgatcatcgtcggccgccacgcctttggcgaccagtatcgcgcgaccgatttcaagtttccgggaaagggcaagctttcaatcaaattcgtcggcgaagacggccagacgatcgagcatgacgtttacgacgcgccgggcgccggtgtggcactcgccatgtacaatctcgatgagtcgatcaccgaatttgcgcgcgcctcgttcaattacggcctgcagcgcaaggtccccgtttatctctcgaccaagaacaccattctcaaagcctatgacggccgcttcaaggacattttccagaaggtgttcgaggaggagttcgccgaccagttcaaggccgagaagctctggtacgaacatcgtctgatcgacgacatggtcgcctcggcgctgaaatggtccggtggctatgtctgggcctgcaaaaactatgacggcgacgtccagtccgatatcgttgcgcagggcttcggctctctcggcctgatgacttccgttctgatgacgccggacggcaagacggtcgaggcggaagctgcgcacggcacggtcacccgccactaccggcagcatcagaagggcgaggaaacctcgaccaactcgatcgcctcgatcttcgcctggacccgcggcctcgcgcaccgtgccaagctcgacggcaacaccgaacttgcgaagttctcggagacgctggagcgcgtctgcgtcgatacggtcgaatcgggcttcatgaccaaggatctggcgctgctcatcggtcccgaccaaccctggctgtcgaccaccggcttcctcgacaagatcgacgagaacctccggaaggccatggcggcctga

SEQ ID NO: 122415 - protein, 404 aa, Rhizobium meliloti
MAKIKVANPVVELDGDQMTRIIWQFIKDKLIHPYLDLDLEYYDLGVENRDATDDQVTIDAANAIKKHGVGVKCATITPDEGRVEEFKLKKMWKSPNGTIRNILGGVIFREPIICKNVPRLVPGWTKPIIVGRHAFGDQYRATDFKFPGKGKLSIKFVGEDGQTIEHDVYDAPGAGVALAMYNLDESITEFARASFNYGLQRKVPVYLSTKNTILKAYDGRFKDIFQKVFEEEFADQFKAEKLWYEHRLIDDMVASALKWSGGYVWACKNYDGDVQSDIVAQGFGSLGLMTSVLMTPDGKTVEAEAAHGTVTRHYRQHQKGEETSTNSIASIFAWTRGLAHRAKLDGNTELAKFSETLERVCVDTVESGFMTKDLALLIGPDQPWLSTTGFLDKIDENLRKAMAA

SEQ ID NO: 122416 - DNA, 1413 bp, Nicotiana tabacum
  CDS (1)..(1413)
atggctagtgttgcttcttttatctcatcttcatcggcttcaacatcatccgcagttaccaaaaaccttcccttttccatcatttccaatcggcaactgttcaagaaccgtgtttatctcctccaccgaatccccaatgcttcaattcgatcgttcgcttccactacagcttcgtctaaaatccgcgttgaaaatcctattgtcgaaatggacggtgatgaaatgacgagggttatatggacaatgatcaaagagaagctaatatatccttatctagagttggatacgaagtattacgatttggggatattgaaccgtgatgccactgacgatcaagttactgttgaaagtgctgaggctactcttaagtataatgttgctgtgaaatgcgctactataacacctgatgagaccagagttaaggaatttgggctgaagtctatgtggagaagtcccaatgccacaatcagaaacattttaaatggtactgttttccgggagcctatactatgcaagaacgtccccagaattgttcctggttggaagaaacccatttgtattggtaggcatgcctttggtgaccagtatcgtgccacagatgcagttattaatggaccaggaaagctcaaaatggtttttgagccagaaaatggggaagcccctacggaactggatgtttatgattttaaaggtccaggtgttgcacttgccatgtacaatgttgaccagtcaattcgagcgtttgctgaatcatcaatgtcaatggcattttcgaagaaatggcctctttatttgagtacaaaaaatacaatactaaagaaatacgatggcaggtttaaggacatttttgaagaggtatatgaagagaagtggaagcaacagtttgaggaacactcgatatggtatgagcatagattgatagatgacatggtagcttatgcattaaaaagcgggggtggatatgtttgggcatgcaagaactatgatggagatgtccagagtgatctgctcgctcaaggatttggttctctgggcctcatgacctctgtattgttatcttctgatggcaagacattagaagctgaagcagctcatggcacagtaaccagacattttcggctgcatcaaaagggtcaagaaactagtacaaatagtgttgcttctatttttgcatgggcaaggggacttggacatagggcccagcttgatgggaaccaaaagttatctgaatttgttcacgccctggaagctgcttgcgttggcacaatagagtccgggaagatgactaaggatttagctatattggttcatggacccaaggtatcaagggaacactacttgaatactgaagaatttattgatcctgtagcacagaaacttcaagagaagctcggtgcctgcgcagttgtatga
